United States Patent Application Publication US 2012/0017292 A1 - sequence listing, part 10

SEQ ID NO: 37786 - DNA, 1068 bp, Zea mays
  Peptide Sequence Number=SeqID_81161
atggcattggggaaaagttggctggtggttaaaggcccccgcaatctgccgcctttccatccatggccgcaatccgccgcgccaaatccgccgccacacccctgcgcccgcaacgcccgcacgccgcgatttctccgcccgcagcccccgcaatccgcggcctttccatccgcggccgcaatcgtttccatccgccggagatcagccgcgacagacaacttctcccacgcgataccatgccccgctcccgcctcagcgcaccccctcgccctcgcccccgtcttcgaagaggtcgtgaccctgcctccatcctcaacgccgccagctctccctcatcctcctaatccttggtcgctgctagattcgccagactaccgaggcgctgctcgtaggatctacggggcggcatcggtgctcatcggaatccggagaggtggcagttgtttgccggggatcggcgccgcatgtctcagatctgagatggacaggatccgggacgacaggaggggcggggtgtcggccggaggcgttccgcggcctccgaggagacgcctcaggagcaacggcggaggggggcccagggactcgcctcgctccgagcgccgacggggcgagcgcctcatgctcttcggcgggggtggctgcgccagtcgggaccacagcgacgacatctccgacgagagcctcggcggcgacgacgccgagcaggagctcgcgcagcggtaccaccaacagcggcggtcaccgagcacggcaccacctccgccgtcgccaccacttctacaccatgcctctaccccccgcctccgtaatgtccatcccgttggcgtcaacaggatcatctcggtgggcgtccctcgcgtgctgccggatgagcggatccaccggttcgtcggcacggacaagttcgtgttcctggctcgtgaagcgctcgacatcttcaagcatcgcgggtgctgtcgatcgaccgaccgtcaacccatgctctgcgtggcgctcttccgctcagggtcaggatctcagggcggcagcaacaaccgcgacagggaggagcaaatcgatttgtga

SEQ ID NO: 37787 - DNA, 789 bp, Zea mays
  Peptide Sequence Number=SeqID_81162
atggccaagtgctgtgaaaaacagactgacgactactggtgccctgtgcagcatcatagatcaagtgcaccccctcgccctcccctggttggtggatattggatacagaggcgttgcagaaggttccagttgaatatgctcattgctacaatgaagccgttttgttgtttgctgtccgccaccgtattcggggtcttcgcctgcctctatgggctcaaggcggacaggggcctacaagattggttcacatcctgcgggaaaggaattgcgagccttgtgttggagaagtcgaagactgagagtatatggtggctccattggtgtcctaacacagaaggtgtcctcgccgatgtgccgccttctaacaagatgtgttcatcctactattattatctgcaatttgctctcatatggttatattgctccaggaacgtatatacccctaaggtcaatgagaagagcatgtctacacctttggtgtcgtgcttcttgagctggtcaccgaaagaagccagtagcacaatattgattgttcacgtggctattcatggaatagaaagagcattttgtgctggaggcgatcttgctgcacttgtccgatcgtcagaggtggagcagcagggaagagggcgcacactcgtcagtggtcggcgggcagctgggtcagggcctgcagcatccgggcgtttcatgcccctggtatcctttgtctgggcgtttcatgcccctggtttctgcacttgtttggtaacattgacgaagaagggcgtgagtttaagactattgtga

SEQ ID NO: 37788 - DNA, 522 bp, Zea mays
  Peptide Sequence Number=SeqID_81163
atgaagatcaacatcgatgagaacgataaatctctcaaggagagtggtgccaagcagcactttgttgatgaattcttcactctcaaagaacaatatgatcttagtgaagacacagttattggacttcgttctatgggttcagtatcaacttgtagtttgtgtctgagcgagtgggcggtagcgcgtgatcccaaggtctggagtaacccgcttcagtacagaccagagcgtttcctggaggagaacatcgacatcaagggcagcgacttcaaggtgccgtcgttcggtgttggccggcatgtgtgcccaggagcgcagctcggcatcaacctcgtggccttcatgaccggacaccttctgcactacttcgagtggtccctgccagaaggcaccagaccagaggacattaacatgatggagttccccaggctcgtcacgttcatgggcacactgctgcaagctgtcgcgaatctgtgcctggagaaggagctgtacaatagggcacaccgctgcaagatatga

SEQ ID NO: 37789 - DNA, 537 bp, Zea mays
  Peptide Sequence Number=SeqID_81164
atggataagaggggaaagagaccctcggagaagactgtgcacgtctccgtgaagctccccgagcgaggaatcggactctgcttcaccggagaggccggcccaaggtcaccggacttcaaccgaccgccggcaaccgtggaccgaggtacaccgtgtgcctctcttcgattccttgcacggttagactccttagacctccacgaagctccctatgcccttggattgaactatgccgccgtggataggccggagcacacgccgccgacgagctcgcccgcctgctcacgtggaccgggcgattccggccatccccgacgacgcgccgtacctcgacgtgatcgccagaccctccccgagccaaccctacccttcgccgggacctccctcgccgccgactgtaatcttgctgacggagagtacatcctcgtgccggagcaaggagctgctcaggaggtagccccagatccagcaccagagccagcaccagaggacctgcctgccactgctttggaaggcaagccccggttttatgcataa

SEQ ID NO: 37790 - DNA, 400 bp, Zea mays
  Peptide Sequence Number=SeqID_81165
atggagcccgacactccctgctccacctcaccggtaatcacagcaagcgcccaagctccactcctccttgttcgtcttcaacctccagccggccaccatctctcgtcgctccctgtccgcggccgtcggcgccgccgcgtctccaagcgggctcgggcgcagccatggcgcggctcctccggccgggggcggccctggcacggcggccccgacgcggcgcgccaggcccaacaagagctgcagcgccgcgaccgcctccgcggccaaccagcgtcgcgctgcgtccacaagccgcggcccagatccgcaccggtggcctccaccagccagtgtggcagcgccctctgcgcgcgcgccggcgtgctcctgctcccatggcgcgcccctcctgcgtgccccg

SEQ ID NO: 37791 - DNA, 684 bp, Zea mays
  Peptide Sequence Number=SeqID_81166
atgggaaggagtccgacttggaggtggtggccgaggagggtgttggagctcacatgtggttgtggagctgggaggccgcccccgggagggaaggtagggcctcccgggggcagcgatggcaggcggcggctgtgggggtgggagggagacgccggcggctgtgggagctctttggtgcttgagcaaagtgagttttctcttggagacgttatgaatgctgttgtcagccaagcaatgttattgttgagagagagggatttacaacttattcgggacatccctgatgaaatcaaggatgcgtcagcgtatggtgatcaatgtagaattcaacaagttttggctgacttcttgctaagcatggtgcggtctgctccatccgagaatggttgggtagaaatacaagtcagaccaaatgtaaaacagaattctgatggaacaaatacagaacttttcatattcaggtttgcctgccctggtgagggcctccctgctgacgtcgtccaggatatgttcagcaattcccaatggtcaacacaagaaggcgtaggactaagcacatgcaggaagatcctcaaattgatgggtggcgaggtccaatacatcagagagtcagagcggagtttcttcctcatcgtcctcgagcagccccaacctcgtccagcagctggtagagaaatcgtctga

SEQ ID NO: 37792 - DNA, 414 bp, Zea mays
  Peptide Sequence Number=SeqID_81167
atgggggccacgctggggggtgaggccgcgcacaggggcgctagggagccacgcccgaggggctgggggccgggcgaggccgcgccgcacgaggggagcagggggagggccgcgtcgcgccagggggctgggggaggggcggcgccgcgcgagggggctgccaccgcgccaggggagccggggggaggggccgccaccgcgcgaggggggcgggggaggggcgccgccgtgcaaggggtcggggaaggggccgcgccgcgcgccagaggagccgcgcgcaggggccacgcgtacgagaggggggggtcggggcgcaggggagaagaaggggaggggaagagagagagagagggagagggagaggggagctcacctcggggtccaaatccggcaatcaccgtctccaaaacctag

SEQ ID NO: 37793 - DNA, 471 bp, Zea mays
  Peptide Sequence Number=SeqID_81168
atgaccgcgtcagaaaaggctggcccctcgaaagggttcaacagccgcctcagatcacgtgggccctacacccactactggtcagaggttcgaaggccggcccctcggaagggttcaacgaccgcctcaggctactcgggctccgcgcccactactgatcagggcgggaacgatcttgtaacggaatcccatcagagggaggcatcgagccctcggaccccgtcgccaggggaccgggtccggaagatcacccgcagctcaccggaaacaccatgttcggcgcccatcgagggcaacatggcgctttccccctcctccttgcagaaaggcgacgcagggacggctcagactcgggctaagtcccagaagatggtgaactccgctccgcccgacccagggctcggactcgggctaagtcctggaagacggcgaactccgctccgcccgacccagggctcggactcgggctaa

SEQ ID NO: 37794 - DNA, 207 bp, Zea mays
  Peptide Sequence Number=SeqID_81169
atggccaccggctctgggcatgacctggccgcagaagtgcagctcccgacgtcgatcgtcgttggaccaggcgatgaggatgtcgcgctcactcggtcgagccgtggaccgatggcagacgtcggacgtgtagaggatgggaggagcagaggcctgagccccaagggaagtgacggtgtgccgacgtcgtggcgagctgacaagtag

SEQ ID NO: 37795 - DNA, 315 bp, Zea mays
  Peptide Sequence Number=SeqID_81170
atggagagtcatgatctccgggcagaaagggaatcacaatttgtgggtgacaatgagaatgatggttttggtattgactctggtgatggtaagtggtattctttccgtttggaaagggttgtcagcattgcaaccactgctcaggagaagataaagctgtggaaggagacttccaggagttccaagattacgacgagttctaggcgtgggttagcggcaacccccagtcggctgcctgtgaaggccgcgtgtatctacatttcttttccgcactttgattattgtaaagactatgtggatgtctcagacatatga

SEQ ID NO: 37796 - DNA, 1920 bp, Zea mays
  Peptide Sequence Number=SeqID_81171
atgagcatgaggtgctttgcccttcgatttgatatggacgaccaagattggatcaaatgtgcggtgatagagaagaatgtggagttcactaggcacccacgagcgcacttcatcaacaaccgcacaatggagatcttccgcaagttggatggcttggccagggacattgagaggtcccagccaccagtagatttgtggaggaagttcgtatactgtacttcactctccggttctgtccttggatcggttgatcacatgaaacaggaaggccagttcagttcttatcatgtcgagtgctttatgtcttgcacttcactgtattttgacaaggtcattagtcctgtatccgttgcacatttctcacagtacaagttagttgatttgctactcaagaagcttgaaggtattggtttccagacatgctttcccagtgagattggtaactcaacacaagatttggtactggaaagcaagatattgatgggacacaagtgcacatcccttgatcagactgatgagggcattctggttggagcatcagttaacaatggagggatgataatagagagaaagctacactgtggtcttcttatagggacagatggcgcaagaagtacagtgcgtgaattggcaggtgcaattggtgtactagttgcacatgacctagagaatggggaatttgtattgcaggttccattttatcctcctcagcagatgtttgaagattttagtgctaaggtatgcgagcaaattattttcaaattagtcggatgggagccagcagatgttcatgttttagacataaaaccatgggcaatgcatgctgaagttgcagagaagtacatctgctgcaataatcgagtaatcctctctggtgatgccgcacaccggtttcctcctgctggtggttttggaatgaacaccggtgtccaggatgtacataatttggcttggaaattgggcttactgctgaatggtgtcgcctcaccatcaatattacaaacttatgagtcagagcgccggcctgttgcaattttcaataccgaacttagcgtggagaatttcaaggcagctatgtctattcctacaacccttggccttgatccaactgttgcaaactcagtgcatcaagttataaatagaagcctcggatcaatcattccaagaaatgtgcagaaggcagttctagaaggattgttttctcttggtagggcacaagtctcagactatatcctgaatgagaaaaatcccattgggtcgttgagactagcaagattgagaagtattctcgatgaaggcaaaagtcttcagctgcagttccctgcagaggatcttggcttccactatgcagaaggtgctctagttgttgaagctagttgtgagaagactcatgaaggagaaaaactacagcattctaagagggcatcaagagagtacatcccatctgctaaggttggttcgcggcttccccacatgctagtaagagaagtgcctgcttcgagtgagggcgcgttctcaacactggacctagtgagtggggataaactcgagtttgttctcatcattgcaccagtgaaagagtcatatgagattgcccgtgccaccctcaagatagcagatgagcttacgctatcagccagagtatgtgtaatgtggccacgaggttcgactgatgctgaagtggaagagagcagatccgagttgacaccctggacaaactacatcgatgtcgaggaagtgcctagggtgtcgggtggttcatggtgggagatgtgtcgtattagtaggaagagtgtccttttggttaggcctgatgagcacatagcatggctaacagaactggacagggtgagggatgctgagtcagaaattaggagggtcttctctcatgttctgtgcctaaatagccaccgggtgtaa

SEQ ID NO: 37797 - DNA, 1041 bp, Zea mays
  Peptide Sequence Number=SeqID_81172
atgaaagtgcgaccaccatccaggattggagcggagcggaggatgtcgggggtgggaggcagaaccatgcactataccggtgtggacacctacgctctgttcttaagaaatagtagagatatgaggatagaaggggatgatgctgcgtcagatggcggaccagggagggtgggggcgacattgggcatgcccggagacaactttcgtagggaggcggcgacacgaggatggttagtagagattatttttatagttatatgccgcctgcgctgctgcgccgccggctgccccctcacctcgcgtgctcgattcccatctcccccctccctgcgcatagccgcacaccaccaacaccattcaccagacgccgccgccgccgccgccgccgccgcccctcatccctctcccttcccgcgcgcggccgccgcatccgtccgggcctcctcgtctcccccagccccgctgccgccgggttcatcagcagaagctgcttgctccgccgccgccgccctcttcctcctctactgcgccagcgtcatgtgccagctgctgagccccgagggagaccctctaggctctgcgctcatgaggaagacagaagaagcaaagcgaagcaaggcgacctcctcctcccctgctgcacagagtgggccggggccacggttgcaggcacgagaaggaagcagtgttgcagcctattccaccaccgacgctgaaggccatacgcccccaatcgaatcgatcacatctatgccgtcgatcaccagaggtgggcgtggggggctcttctccacgcaccggggcgcgctcttgtggctccgccgttgccaaagcccactcttgtcgacactagccggcggcggaggccggagcgacgcgccacatctgcccgtactcatcgtcggagctggccctgttgggctcgtcctctcattcctcctcaccaaattcggtacggacctcgtgccccccttgctcatcgatgttccaattcgcgcttctgagttaggcagtagcgttgagcggagcaaagttcattga

SEQ ID NO: 37798 - DNA, 111 bp, Zea mays
  Peptide Sequence Number=SeqID_81173
atggcggccctgacaagggagacccgcccgtcagcctcactcgtctcccctctcctttgcccccatgcagtcgctgaccggtggggcctcctagccccgcgtgggacttag

SEQ ID NO: 37799 - DNA, 240 bp, Zea mays
  Peptide Sequence Number=SeqID_81174
atgatctccgggctgcagaggctagctcagaacattattctatcactgagcgggacactgccaagggtagctaacagcctcgacctgaagtactacccccgtcttttgaccggcagtaccagaggtgtgattgtctcacaagttggtgagggcaatcccagattgagcaacatggtcaacctagtcaccatgctcaacaccaagctagaccacgcccttgacgagttgggcaaggcttag

SEQ ID NO: 37800 - DNA, 1758 bp, Zea mays
  Peptide Sequence Number=SeqID_81175
atggcgtccgcggcggcgggcacaccgaagcgctgctactacgaggtcctgggcctatctcgcgactgctccccgacggacatcaagcttgctttccgccgcctcgcgctctcgctccaccccgacaagcagccccccggctccgacctcgccgccgccaccgccgccttccaggagctccagcatgcccactctgtcctctctgacccgcaggagcgtgcctactacgactcccaccgctcccagatcctcttctctgacccagcctccgccggcgccaaatccgcttccatcgtccccgatcttttcgccttcttctcttcgtccgctttctccggcttctccgacacgggccgcggcttctacaaggtctacggggacgtcttcgacaaggtattcgcgcaggagcttgcctatgctcgccggatgggggttcccgaccccgctgcgccaccggtcattgggaacctcgattccccctatgcgcaggtcactgctttctacagttattggcttgggtttggctcggtcatggatttcggatgggcggctgagtgggacgctgcacgtggggaaagtcgccgtgttcggaggctcatggaggaggacaacaagaaggcgatgcgcaaggcacggcgggagtacaatgacgctgtcaggggcctggctgccttctgcaagaagagggataagagggtggtggacatggttttaaagaagaagctggaggaggagaagagaaaggcagaggagaaggaaaggaagaaggaggaggacaagaggaagaaggagcgagccatggcatgtcaggaacctgagtgggcgagggcagaggaggtagaggagggactgtatgatgaagatgaagaagaggagatgagggccaagaaggaggagctgtactgtgtggcgtgcaataaaaagttcaaatcggacaaacagtggaagaaccacgagcagtcgaagaagcatagggataaggtttctgaactgaggatggcctttagggaggaggagtctttgaaagaggcagaggagggggaaggtgattggaatgaagttgatgtggggtttgattttaagcctacacaggagtcagatgatgagagtgcattttcagatgctgcagaagagttagctgaagaatttgaggaaggtttggaggtgcatgataaagagaacggtgataaggatttcgatagtgcagagcaggaggttgggtcatatgatgaggcaagtgtattggaggcaatgctatcaagctgcaagaacagaaagggtggttatgtggctcctccagaggaggctttgtctggtactgctgaggatgacgatcatcatagaagttctgaagttaataatgcaaaaaggaaaggacgcaggcgacgggcagcaaagaaggagcaagatgaaagtaattatgctggcaatgagcatcatggtaaatgtgaggttcagcctgagggttcggtccatggtaatgatgttgatgatatcatggaagggccatcctcttctaatgtcaacaatggttcagtaagcaaaggagataagcagaatggtgaaaacacgaatcctaaaaagaacaagaaaggcacaaaaaagaaaccaactgtttctactgatcagaagagtatgtcaaaggctgaccagaagagcacatcaaaagggaagaaacaaaagcctcgtatggtttacaacaagcttgttgtttgggaagaaaaaccttctgtgctgttggctcctgtagctttctaa

SEQ ID NO: 37801 - DNA, 510 bp, Zea mays
  Peptide Sequence Number=SeqID_81176
atggatactagtatgctaggtcgagtagctgctttgctaattagggatctcagtagaagtcaagtgatttttctagcactcgcgcgaggttctctggaggatatggttgctggagtgacttggtcgaccaccttgccaccagataacttcccacgttacccatctactgtcctaaggcttttcacacacagccggtctctgacgaaagggctttcccgtcatcttgtgggacgcactgcagggagcaggttacagtacacctcccagctacgcggggcagctgttcgagtagcaccgagtgcctcgcggtcgttagagaatgaccttggagctctcatcgcaacgcgctcgcctggcgttctctgtgactcagagtcttctgtgtatgcaggcgatagcactatggaggacacggacgacacgtgcgaccagctgatgtggacttcagcccctgaagatgtcgactgtgggacgcagaagctcacatgccgagctgtagaggtctactag

SEQ ID NO: 37802 - DNA, 192 bp, Zea mays
  Peptide Sequence Number=SeqID_81177
atgacgaaggtaaggacaatattgaattacaaaaagtaccttcagcttgatagaaggtatcttcggactcgtatcagagagggagaagctcaaaagatacgaaggttgacacagcgccgaagctgtgaagcaggaaagcttcggcatgttcgcagaaaagggaaccgacttgaagatgaaaaggccatttag

SEQ ID NO: 37803 - DNA, 907 bp, Zea mays
  Peptide Sequence Number=SeqID_81178
aaaaaaggagatcggaagtcagatggaggtccattgccaaaccagcttttgccagaatgaagatggtttccccaagttgctgagagcatgcacagttcgcctcggaatcaggagtcaaccagagtatgatggtcgtgaattcgtcgagcatggcacagagaaagagaccgtcccgcttggatggccaggatgcgtgcattggaagagcagcagctgcttgaggacgaccccacagtcgtgtacctcactgcatacctgctcacccttgatgcatagtatgatttcttggctcggcaccaccgatgcagagaagcgcaaccatcagctgcatgtggatctcaccacagctcaagcccgtgcaactgccttggagagtcgtgaagtcattgctgttgaagccctgaagcaagccaaggatgagcacgtccagaagttgatggaggccaagttggtcacccataaccaacgtagagccctgtggatccaagagcccacttcatccaacccagttcaacccaggaaagctgaagacccccagattcttgaaggtcacctggtctctatcagaggagagaagaaggcttgggaactcccgaaaggagccatagtcttggaaggaattccagtcttccctcaggctatggataagcaagagcaccccgagtcctcccaagatcccccgctagagatgtttgagcccctcgccatgaagaagattctagcaccatcccttgaggtcaaggaagaagctgcaagcaccccgccaacaccaccgcactctgaggagctacaagagccagtcccgcttgaagaagagttcgaccccgtgctgccatctcagtcgctgccagaagaagtcatcaacatcagctccctgttgacccatccaggagatatctcagattga

SEQ ID NO: 37804 - DNA, 960 bp, Zea mays
  Peptide Sequence Number=SeqID_81179
atggctgaaaatgcaacggtcatcagtaacggctatatcaacggctatattgcatttaatgcgtcgtcagatctagaggagcgcaccaaggcagcatcccatcaattcgccttcgagcagtccgagcttgagcgggactgcaaggactacaagaaggacctccagaaggtgttcgctcgggagctggaggtggcccggaaggagaagaagctggccaagagggaggagcatttggaccagagggaggaagtcatcatggagctccagggcaagctgaatgcccttaacaaaatcctggaggagcagcgggctgatcagaccgcgactgtggagagcctgcaaaggctgcagcgcaagcttgatggcaaggcccaagacgccgcccttgccgaggagaagctcaaggcgaaaggtgaatccttggacaggcgggaggcggacctcgctgggcgggcagcgaacctcaccaggcgggagaaggatcacgccttcaagaaggaaatgcttgaaaggagggagaagttgctggccaagcatgagcttgaggcggaagagaaggagtggacgctggaggagcggcagcgcgctggggtccagcgcatcgccgcatgggccgatgaggcgagcacgacactggtgccgctaagggtgagtcccatcctggtgtcagagctgccaacgtccatctccgacgcgctcccggtgctggactccgccgccgaccgcctccgacgcctagaccagatccttggcgcccgcctggaggccgagggcgacaggctctgccgggcggtgattgagtacatcctgacatgcttccggagccatgacctggccatctccttggagccggggatctctggtccggtggccgacaccgaagacgccgcccgggagggcatacaagatactgtggaggtggtggccgagcgcttccagcgggatcctgtcgatgattag

SEQ ID NO: 37805 - DNA, 867 bp, Zea mays
  Peptide Sequence Number=SeqID_81180
atggtaatgtcagttgttgcagaatcttacgttataagcaaatcatgtgaattggttaccgttttcctatacacatttcacatgaaccattgggattggtattgcaactatgataacagaggcatatatctgattgatatgctgaccaatgatttttcaggaacaagaagatgcagagcaaagccacaaaagaaggaagaggaatccacagaaaacaacaagctggagaatggatctctggatgcaacagaagaggtgcatcatggagtcgaaaaaggtgatggacatgttacccgcaagagaccaaggagatcagcggcctgttctgatttcaaagagaaatccatacgcttatccgaaaaaaaatctgttgtcatggtcaagaagaatcggatggaggaggaagaagtagatgctgtcaatctgacaaaacttggaccagaagatccaccaccttgccggaagttgatcgattttatcttgcatgatgcagaagggaacccacaaccctttgaaatgtcagaaattgatgacttctttataacagctcttatcatgcccatggatgatgatctagaaaaagagcgtgaaagaggagtacgctgtgaaggatttgggcgaattgaggactggaatatttctggttatgatgaaggtactcctgtaatctgggtgtcaactgatgttgctgactatgaatgtgtgaaaccatcaaccaattacaaatcttattttgaccacttctatgagaaggctcaggtgtgtgttgaagttttcaaaaagcttgcaaaatcagttggtgggaatcctaacccagggcctgggatgaattgcttgctagtgttgttcggtcaaccaatgccatga

SEQ ID NO: 37806 - DNA, 5244 bp, Zea mays
  Peptide Sequence Number=SeqID_81181
atgaagaattacaggcactctagcccctttggcagcaagggtgttgaaagggctaaatctgcttgccgctcaaaatggaataacaggatcttatccaccccattcccaatgctcccaattgtgaacttcacaaacttaagcatatggaaacccagggccctacacccaagaaccacgaatactctttacaaatctccagagctcacgccagaaacaacagtgctgtcatcccgcgtttggggttttggtctcggcctctcggctgtggccgcggcggcgaggcgaggagcacgtggagaggcggggctgggcggaggcttttggcgggaaacgagcgcgggggccccgaaaacccaaaaaattcccggttcccacgggcgcgctggccgccacccaagcagggccccttgccgctcctgcttcccggttctcttttttgataatctttgctccacccccactcggcccctcccccaggcgttcaagcacggcgcccatgccctaggccccagacccctattcgcaggtcgcagcagccgccaacacccagatcctagaccacgccgccaccgcgccaccggagtccggcggccagccaccgcccccgcccacccgcgtgccagcgagcgcgagccggcgagtccctggttccctgcgcgtgcgagaccagagatccaggcagcggacgagccctgtccgtccccagccatcagcgaccagctggtgccggtcatccctgctgcgacgagctggtgccgtgaagctgccctccaggcctacagatccattgttggtcgtgtgtgctgcccgtatccctacaaccatgctgctgcctggtgctgctgccttgagccgaccatgcaacacaaccgtgctggtgctggtgctgctgctggtgacatggtgaaaactccgagatctcctgttaccacaggcatatatctgattgatatgctgaccaatgatttttcaggaacaagaagatgcagagcaaagccacaaaagaaggaagaggaatccacagaaaacaacaagctggagaatggacctctggatgcaacagaagaggtgcatcatggagtcgaaaaaggtgatggacatgttacccgcaagagaccaaggagagcagcggcctgttctgatttcaaagagaaatccatacgcttatccgaaaaaaaatctgttgttatggtcaagaagaatcggatggaggaggaagaagtagatgctgtcaatcttacaaaacttggaccagaagatccaccaccttgccggaagttgatcgattttatcttgcatgatgcagaagggaacccacaaccctttgaaatgtcagaaattgatgacttctttataacagctcttatcatgcccatggatgatgatctagaaaaagagcgtgaaaaaggagtacgctgtgaaggatttgggcgaattgaggactggaatatttctggttatgatgaaggtactcctgtaatctgggtgtcaactgatgttgctgactatgaatgtgtgaaaccatcaaccaattacaaatcttattttgaccacttctatgagaaggctcaggtgtgtgttgaagttttcaaaaagcttgcaaaatcagttggtgggaatcctaaccagggcctggatgaattgcttgctagtgttgttcggtcaaccaatgccatgaaaggatatagtggaaccatgagcaaagatttggtgatatccattggagaatttgtatacaatcaacttgttggtttggatgagacatcaaacaatgatgatgaaaagtttgctaccctgccagttcttctttctctaagagaccagtgcagatctagggtggaactgaccaagttgccctctaacttctcgaacacaagtctgaaaattaaggactcagagtgtgatgagacagcagaagacgatgatgatgcaaaattagctagattacttcaacaagaagaagaatggaaaatgatgaagaaacagaggggtaggcgtggaacaccatcccagaaaaatgtctacataaaaatcagtgaagctgagattgccaatgactatccccttcctgcatactataagccatttagccaggaaatggatgaatacatatttgatagtgatgacagcatattttctgatgatgtgccagttaggatactcaataactggacactgtacaatgcagattccaggcttatatctttggaattgatccctatgaaatcaggggcagaaaatgatgtggttatctttggatctggtttcatgagagatgatgatggcagttgctgttctacagctgagtctgtgaaatcttcgtcttcctccagcaaagctgaccaactggatgcaggaatccctatttatttgagcccaatcaaagaatggattatagagtttggtggctcaatgatttgtataaccattcggactgatgtggcctggtacaagctacgccaaccaacaaaacaatatgctccatggtgtgagcctgtactgaaaacagcaaggcttgctgttagcatcattaccctgttgaaagagcagagtcgtgcctcaaagctttcttttgctgatgtcataagaaaagtagctgaatttgacaaaggaaaccctgcatttatatcttcaaacatcacacttgttgagagatatattgtggtgcatggacagataatactccagcagtttgcagattttccagatgagactatccgtcggagtgcatttgtcagtggtcttttattgaagatggaacagaggaggcatacaaagttagttatgaagaaaaaaactcaagtgatgaggggagagaatctgaatccaagtgcagcaatgggtccagcatcgaggaaaaaagcaatgcgtgcaacaacaaccaggctcatcaacagaatctggagtgattactatgcacatcatttccctgaagattccaaggagggagatggaaatgaaacaaaagaaattgatgatgaacaagaagaaaatgaagatgaggatgctgaagatgaagggcagattgaagagaacatctcaaagactcctccatcaacacggtcccggaagttgctatcacaaacttgtaaggaaatcagatgggaaggtgaaacatctgggaaaacattgtctggagaaactctatataaatgtgcttatgttagggaactcagaatacctgttggtggaacagtggctctagaagatgattcaggagacacagtcatttgttttgttgagtacatgttccagaaagttgatggttcaaaaatggttcatgggaggattctgcaaaaaggttcacagacaattcttggcaatgcggcaaatgagagggaggttttcttaactaatgactgcttagaattcaaattagatgacatcaaggaattggtaatggttgatatccaatcaaggccttggggtcacaagtacagaaaagagaattctgaagctgataaagttgagcaggtcaaagcagaagagagaaagaaaaagggccagcccatggtatatttctgcaaaagcttgtactggcctgagaagggtgccttctttgccctctcccgagataaaatgggtcttggtagtggtttatgtagttcttgtgataatatagagccagattctgatgaattgaaaatattctcgaagaccagctttgtctacagaaaggttacatataatgtcaatgagtttttatacataagacctgatttttttgctgaagatgaggatcgtgcaaccttcaaggctggccgaaatgtgggtctaaagccctatgcagtttgtcaaatattgtccatccctgaaggggctggatctaaaaaactcaatccagcatcagcaaatatcagtgctagaagattttacagaccagatgacatttcatcagccaaagcctatgcatctgacatcagagaggtctactatagtgaggatgtaattgatgtgcctgtggatatgatagagggaaaatgtaaatggttggatgtgcctaaagagaaccgtctagctactcttgacatttttgctggctgtggaggtttatcagaagggctgcagcaagctggtgtatcttttacaaaatgggcgattgaatacgaagagcctgctggtgaagcatttaataaaaatcatccagaggctgtggtctttgtagataactgcaatgtgattctaaaggcaattatggataaatgtggggatactgatgattgtgtttcaacttctgaagctgctgaacaagcagcaaaacttccagaagtgaacattaataatcttccagtccctggcgaagttgaattcataaatggtggtcctccgtgtcagggattctttgggatgaatagattcaaccaaagcccatggagtaaagttcagtgtgagatgattctagcattcctctcattcgctgagtatttccgtcccagattctttctgttagaaaatgttcggaactttgtttccttcaacaaagggcagaccttccgtttggcagttgcatctcttctggagatgggataccaggtccggtttggaattctagaagcaggggcttttggtgttgcccagtccaggaaaagggcgtttatttgggctgctgcacctggagagatgcttcctgattggccagagccgatgcatgtgtttgctagccctgagctgaagataacactgcctgatggccaatactatgcagctgcaagaagcactgctggtggagcgcctttccgagcgattactgttagagatacaattggggatctgcctaaagtgggaaatggtgccagcaaactcacgcttgagtatggaggtgagcccgtgtcttggttccagaagaagataagagggaatatgatggttaagctgtcaaatgggcagatggctgacctgataccttggtgcctgcccaacacagccaagaggcacaatcagtggaaaggactgtacgggaggctggactgggaaggcaacttccccacatccgtcactgatccccagccaatgggcaaggtcggcatgtgcttccaccctgatcaagacaggatcatcacagtccgggaatgtgctcggtcacagggctttcctgacagctatgaatttgcgggcaacatccagaacaagcaccggcagattggcaatgccgtgcccccgcctcttgcctatgcacttgggaggaagctgaaggaagccgttgacaagcgtcaggaagccagcgcaggcgtgcctgcaccatga

SEQ ID NO: 37807 - DNA, 204 bp, Zea mays
  Peptide Sequence Number=SeqID_81182
atgggtacgagtacaagattttacccgtggggtgacatggtgaaaactccgagatctcctgttaccacagatctagcacttatggccattctaggtgcagcaggaggcaatgacaaagcttcaaagtgtggttgtgatattgacaatggtgaggctgggccatcattggtggtggtggagcaacaagcactagccactttgtag

SEQ ID NO: 37808 - DNA, 1311 bp, Zea mays
  Peptide Sequence Number=SeqID_81183
atggcggggaagggagccaaggccacagccgccaagtcggcggacaaggacaaggggaagaagaccgacggccccgtctcgcgctcttcccgcgccgcaccccagacaaccacagttgattttaagccatacgttggtccaatctataatgcgatactgggacgtttggtcaatcaagatcaggatcaggaggtaaaagaatgcgccatatcttgcatgagtttggtggtctctacttttggtgatggtcttgaaagagaattaccagcatgccttcccatactcgttgacaggatgggtaatgaaattacaagacttacagctgtcaaggcaaccaaggatgctggtgtcattgccggcctcaatgttgctaggatcatcaatgagccaactgctactgctattgcctatggtttggacaagaagggtggcgagaagaacatccttgtctttgaccttggtggtggtacttttgatgtcagtatcttgaccattgataacggtgtgtttgaggtgctggccaccaatggtgacacccatcttggaggtgaggattttgaccagaggatcatggaatacttcatcaagttgatcaagaagaagtacagcaaggacaaccgagctcttgggaagctgaggagggaagctaagcgtgccaagagagccctgagcaaccagcaccaggtccgagttgagatcgagtccctctttgacgggaccgacttctcggagccgctgacccgtgctaggtttgaggagctgaacaacgatctgttccgcaagactatgggccctgtcaagaaggccatggaggacgctggccttgagaagagccagatccacgagatcgtcctagttggtggaagcaccaggattcccaaggtccagcagctcctaaaggactactttaatggcaaggagcccaacaagggtgtgaaccctgatgaggctgttgcctttggtgccgcggtgcagggaagcatcttgagcggtgagggtggtgacgagacaaaagatatcctcctccttgatgtggctcctctcaccctgggtattgagaccgttggtggagtcatgaccaagttgatcccgaggaacactgtcatcccgaccaagaagtcgcaggtgttcaccacctaccaggaccagcagaccactgtctccatccaggtttccagcactcagtaccactatttggataagcatattgtgccttttaatgaagaggaactaaaaaggggcgagctggaggctgacaaagacaaaatgatgagagagtatagagctcaactggatgctttggactgttag

SEQ ID NO: 37809 - DNA, 1248 bp, Zea mays
  Peptide Sequence Number=SeqID_81184
atggagctagtagcgtggctcgtcatcgtgttctcagtctccctcgctgggctcctgccagtggtctcggcgtcgacgacgacaccgcagcagcaatgtggcggcaataatgtcggacctgccggagtgagagcaggctactggtcgccgtcctcgaaccgctactccgcggtcggcagcatcgacgcgtccctgtacacgcacctctactacagcgcggtgaccatcgacgagacgagctacgcggtcgctccgcctccgccgacggccgaagacgcctcgctgctcgccgctttctctggcgcggtcaagtccgcgagcccgtccaccaggaccgtgctgtccgtgggcacggacgagtacagggtgggcgagtcgaacgccgccttctccaggatggcgtcggacgcgggcctccgggcggtattcatcaactcctccctgaacctggcccgcgccaacggcttcgacggcctggacctgtcgtggatcttcccggccacgcaggcggacatgcagaacctcggcgccctgctcgcggagtggcgggcgaggatcacggaggaatccgtcgccaagtctttgcctcctcaacctcaaccccttctcctcaccgcgacgctctacttctccaaccacctgttcggcacgcccgacggcaacctcgactaccccgtggacgccatcgcgagcagcctcgactgggccaacgtcctcaccttcggcttccgcggggacagcggcgtcaccgcggccgacgcgccgctctacgacacgtcctcgcacttctcggccagctacggcgtggtctcgtggctggacgcgggggctccctccgtgcaggctggtgatggggatacctctgttcgggaggtcgtggttcctcaggaacaaggccaagaacgggctaggcgcgccggccgccgccgccgggacgaagcagaggaggagcaaccagactgggataatcgcgtcgtgcagcggaagctggagttcgcggcgaggtctcagttgctcggctacttcctctggaccgtcggcttcgacgattcgaacagcacaatctccaggaaagcatcggagtcatggcaccagtatgctcagggtggttttggaatcatgcacgcaggaggttcaaaccaatacgttgcatttaactcgtcttcagtatcacttggtagctgctattcgagatctctcagctgtttgctgtcttcagtacttctgttggttattctgtttcgttaa

SEQ ID NO: 37810 - DNA, 144 bp, Zea mays
  Peptide Sequence Number=SeqID_81185
atggtggtggcggtgggagctagggccaggaagcttgtgactggcttgccgaagcaacagaagctgcaggttgattgcccacatattctgaatggtgatctgggacgttcttgtagtgtggcccttgtcctcaccacagaataa

SEQ ID NO: 37811 - DNA, 1284 bp, Zea mays
  Peptide Sequence Number=SeqID_81186
atgacgggtgccctagtatttggaactatagtcctgtgcgtccaacaacctggaggtccgactctaaagaacgggcacttgtctcttgggggggaatggactacgctacaccagcaggagtcgcgctggaagctggctccgggcagcctcaccagtggcggcgaccacctctgcgccagcagcgacaacgacctccgctccaagcgccttgccagcagcagcgaccacctcagggtggctcagatggtctcgccagcggaggcaaccacctctgcaatgggcagcctcaccagcggcggtgaccacctcagcaccgacggcagcggccacctccgcaccggtgtacggcggctgcctcagcgcgcgaaaatgtcctcgctcccatcctcccacgggagtgaggacaagaccatccaagaatgtggccgccacccccatggcgtacaacgcctttcgcgccccgaccaaatggcaggtggcggcgccagagccatcagagccggggagccaggcacgcggcagctgacggcgcttacagccggccggccccgcgtagccgaagttcgcctcctccgcaaggctggtgaacgcctcctcccccaatgctggaggaagaagcggatctccccactcgtgccccagagtgtcacaggcaaagtctcccctgacttactccagggttcctaccctatgacatgggggctaggcccccacatgtcatacagactgacccgaagcacgaagaaggcgaatcaccgcacaaggggcttgcaactgccccgtagttatgcgccccttcatttttggagcaaccagcggtcaggaaggcgaaccgccgcacaaggagcatgcaaccgccccgcggttaagcgctccctcatcttcgccgaaaccagcggtcgacaaggagaaccaccacgcaggaagcatacaaccgccccgcggttatgtgccccctcagcttcgctgcaactggcggtccaacatgggggcctaggcccacatgtcatacaaccggtgcaccggttgccaggtgtggaaaaatcgcaccaccgctcgcgccaatgccacgtcttctcggggccgtcgcagctgactgaaaagataggttttcagaaccaatgcaacgactcgaggtatcccgcgcatggcccaacagtgacattaagtacgaaaattacaggccagtcaaccatgggaataggcgtggcggtcgacatgaccataggtgggccgacagtaattgcgtcaacaggcgcgcaggagcagcaagctaaccgctaa

SEQ ID NO: 37812 - DNA, 450 bp, Zea mays
  Peptide Sequence Number=SeqID_81187
atgggcaagaacaacaagcgcaagcgtgagccgactcctccatcggaggagtttggtgactcagaatactcggaggaggagttctcctccgagcccgaggggtctccggctcccgtctctcccccggcgtcgtccgatgactcggacgactcccaggggatagccgcggaggtctggacatatatccgggccgtcgagcgcgccgggctcgaaggctcggatgagtcggagtactcctcggatgaggaggactcggacggcggcgacgagggtgaagacgacgacgacgacgacgatgacgacgacgacgacggcgacggcagtggcagaggcggcgacgacggtagcagggacagcaccaagggcggcagcagcagggacaacaccaagggcagcagcaggggcagcaccaagggcggcggcggcggcaggggcagggccagtggctag

SEQ ID NO: 37813 - DNA, 678 bp, Zea mays
  Peptide Sequence Number=SeqID_81188
atgtacactggatcggtgacatcaaatacgatttacaaagaggtttgcattaggggcacaaccgactacaatgcaccaaacatgtccagtggtgcaccgtataccgcactgaatacgacactcagagagctggcaaaatgtgatcgagctaggtatgaggcaccagacatgtttggtgtatcaccggtggcacactggataccgacaaggctaaatagtcggcaatggctagtccacgtggaaggcactggacatgtctggtgcgacataggtggtgcaccaggcatgtccgatgttgattatagtgaggttagacaccctcaaacccctcgacgcttgcgtgtgttgttgtatttgtacagagtggggcaacagtcttgcgagatcacatcaaccgcatttgtggtgtggccgccactatatactggaggaaacgaggctcacgacattttagctgaaaggtcgatagtgaagatgatggggagccctcgacgcttgtgtgtgttgttgtatttgtacagagtggggcaacagtcttgcgagatcacatcaaccatatttgtggtgtggccgccaccatatactggaggaaacgaggctcacgacattttagctgaaaggtcgatagtgaagatgatggggaacatccaagagaggctaaaagtgacgcaccactag

SEQ ID NO: 37814 - DNA, 204 bp, Zea mays
  Peptide Sequence Number=SeqID_81189
atggcgcatcaaatactgccgctatgggttcatatttatacgcctagtgccctacaactcggcgggccccatctgtcattgactttcgctattctagcgaagggaaggagccttcggacatgggatgaaatcgcacataatatgaagagtgtggtttgggagaaggatgaaccagtgccgaagctacccgtgaaaaagctttag

SEQ ID NO: 37815 - DNA, 114 bp, Zea mays
  Peptide Sequence Number=SeqID_81190
atgacccacgcggtcgaaggtgaggacgagaactgggctgagggagcgaagaaacgacctgagtacaatgaggacgaagcctacgcatgtgatgatctgatttgctcggcctag

SEQ ID NO: 37816 - DNA, 807 bp, Zea mays
  Peptide Sequence Number=SeqID_81191
atgccctgctgctcgccgtcgctgctcggagtcgggccgcgggtgcgctcctttctccgcgactacgacgccctccagtccctcgccctcgcactcatctacctccagattggttgtgcgctgattgggtcacttggggcattgttcaatggggttcttgtgatcaacctagtgattggtctatttgctgttgttgcaatcgagagcagcagccagagacttggccggacatatgctgtccttctcttctttgctgtcgtccttgacgttgcttggtttatactcttctcccatgctatctggactattaatcctgatgagaagtatggtgaactttttgttttctcactcagactagcattgtggatgcaaataattgggttttcagttaggtttttgtcttcattcttatggattcaaatgtatagattaggggcttcttccagcacgccaacatattttgaaaccaaccatgaagcaagaattagtttcttaagccctagatctgattcagttagacggagtcctacggcagatgatatattgggaggttcgatctatgatccttcttactactcgtcactgttcgaggatgtccgaaacaatgcatgcaatcatcagggtgataaacaaagtggtagtaatgacagtggttcaacatctgcaggccagacaccacgacttaaatcttttgctaatgatatggagaaactgatttctgacttgatatactacaagtgtggatataggagtcttatattagtttatgctaactcaatttttacagtgcctgtttctgacatctaa

SEQ ID NO: 37817 - DNA, 525 bp, Zea mays
  Peptide Sequence Number=SeqID_81192
atgttgaaagggaaatgtgcctttgggccatttctaagtattttggtgattaagtgccaacacaagtgcttaaatgtaaatcaatgcccatggatgaacaaagtgcaaatcttcaacaaagcccatttgttaatggcatcctcccaagaagataagatgaaggctttgatgaaagtccttgtcgactgtacagaggatgccacaaaatccctggggggtttagttgagcatgcattagaccacatgcatgatgaagaaatcctagctaggacattgtttgctatcaaagataaactagagttgcttcagcaggatgccttagaggcaaaagtccaagcctttccagaagtagctaagtacgagtgggatgacatcactgttgatcctccctctccgtcaccccctccaacagttactgatccttctgttgacgaagaggagttctactgccccgacgtgagtgacgaatggtatttcagtgattcagataggtctacccgtaatagctactggaatatgttttag

SEQ ID NO: 37818 - DNA, 462 bp, Zea mays
  Peptide Sequence Number=SeqID_81193
atgcaggaagcatgcaaccgcgccatggttgtgcaccctttcgactccgtcacatccggcggtccagcaaggaagcccgggcccacatgtcatggatcgggaaaggggatatttcgaaaagggatccttctcggccaaggaaacgggccccgagccctcctactattcaggggttcgaaggttgcgccctccggggttcgtaaaccgcccaagagcactcgggctctgagccctctactgatcagggattcgaaggctagcccctcgaaagggttcgacagccgccccagagcacgcagagtcagggatgaccctgggtacgtctgttacatggccaaggctcgggctacgctcccgaggtaccctaggacatttccaagaccagcgggagcgatttgtaatggaatcccaccggagggaggcaccgagccctcgaaccctatcaaatgggtccgggtctag

SEQ ID NO: 37819 - DNA, 1158 bp, Zea mays
  Peptide Sequence Number=SeqID_81194
atggtgtctgccgcggtgcctagggtgaagggtagcgctctcggcgctggcggcgagatttcggcggtcgctgccgtcaaggacaaagcgggctctgtgtcccgccggttgagggaggcgtcgcagcagctgagtcaagtggccgactttgccgatcgtgtggcgttgggggcccttactgcagatgtgtctgccgaagtcgagagacttcgggcgcagcatgctgacgtcgtccgggaaaagtcggttgcggatagcaagtgccgcaagctggcggagagggtggctgccctggagggcgagaggacggacctccggcgccagctggtggaggagaggagggaggccatccaggccatcgccaaggcgaaggcggtgcaggcggaggccaaattggcgcgggtggaggggagtcttgccagccagcgcgccgaggaatggaaggtgcggttcaacgctttgcaggcccgcatggagagggccgaggcctctacatgctcggaggttgagcggacgcgcaaacagctcgtggactcgtaccgcgagctgggcgcgcagactgctgacttcgaagtgctcgaccgagaggtgggccttcgcttcctcgagtggctgcaggaggaattgttggcgctcccgaccatcgtggagggatttatgtcctttgcctccctcgtcacctgcgaaggggcgttgaacgcgctgtcccgcgaggggtgcagtcactatgaggtcttcgaccgatctgatgaagattttgggcgcgagatttataaagtcaaagaccctgtggtgaatgaatccgcgggggtcctcttcgaccggatgtggggcccctacggtcgggaggtggtcagggagcggtctgtccggacgagggatcagatggcgcgtgccgaggatgtggaggacttcggacccctaaaccacgcgctcgtcgccagccactgcgccgatggtggagaatcccccgaaggcggcggcggagctggcagcggaggatcccccgaaggcggcgacggagtcggcagcggaggatcccatggcggcggctgggtcttcgcaggtggcttagtgggtgtggggtatttgtatgatgaggctgtgcgccttcgtgcatccggctatgtccataggggcgttgcgcacttggtctag

SEQ ID NO: 37820 - DNA, 804 bp, Zea mays
  Peptide Sequence Number=SeqID_81195
atgggaaggcatctggcgagggcatacttcgcccagcacccagccacgcgccaagggccataccccatactcgacaaactcctcaaccagatcgcgtccgctactcatgcgggccacgcaccgcagggccccttcgtcttcatcctcctccgctacctcaaactgcggggaactaactcaacgacttccatcaaagtcttgccggtcttcggcacaataatgcttcgcgaagacttcgaccgagggctacccgccgtacgaagtcgttgcccagacatattttgccagggccaccacggcattcggcgtcagctggtggacctgaatgtcgaatctacgcagaacttcccccacaaattgatgcgcgggcagacgaaggccagcggcgaaaaaagcctcgaagacgaccaaatcgccttccggctcggagacctcctctgcccccgagacacggcgcggcgcttcgggaaacccgcaatccaacagtacggcgtcaatcaacggtcatgtcaaaaacccccgcagaaccacttcgagcgagggcagcgtctccaccatctagcgatgccttcggcaccagatgacttggtcgaactggtccctcggagggcaaatgttggggcgaaggcgaagacgctacccttcgctcgatgccttcgccagtctcgctgcgcaggtggatgcgacgaccggcagtcttcgctcttcgtccggcacgctgaaggacgaagacctatggcgaggtcgccccatcccgcggcgtcgcctaacactggagcccacgtgcaatccggcccgtcataa

SEQ ID NO: 37821 - DNA, 174 bp, Zea mays
  Peptide Sequence Number=SeqID_81196
atgggggatcctcggtcgtcggttgaagatccgatgctcaagattgcataccggtttgatgagttgttattgactgttcatgataagatcattatgttaattggaacatggagaaccacccgggaaaacagtgctaccacaagggtttatggacgcccttggctgattaattag

SEQ ID NO: 37822 - DNA, 549 bp, Zea mays
  Peptide Sequence Number=SeqID_81197
atggtggggagcagcgcgtcggggcgcggcgtcgatgatgtgctcgacgaacggaggcgccatgggctcgatgtaggtacggtgggcgaggcccgagtcggtcatgatggtgaccgggttggagttgacgagcaccaccacctcgaggttgatggagagatggtacgggggcttggtccttatagtcgcggggtgattccgagttggcgatcgactggttgcccgaggacgccgccgagattcgcggccggcggagcaatggacagagaagaggataagtcccaacggcgaagtagcggcgtctgttacggagttcgcgcggaagaagaaatatccggccaggtggttcgaacggacagcgagatccgcgcgatccaggcggcgggcatcgcggcagtgttgcggacgaagcgcgcgatagagaaggaagagctgacaatgcggccccacatggcggcggaagagaagactgaccattggggcccgcgcgcagagaaaaactccaaagcgcgtgcggcagggatgctgggctgcgtgggaaagaattag

SEQ ID NO: 37823 - DNA, 879 bp, Zea mays
  Peptide Sequence Number=SeqID_81198
atggaggagaacaccaagcataatataagcattcttgatcattcacactccgtctttgcgcactcgattggcattcttagtgatttgagctccgttctagtggaccacagagggatcccgagctctccagtctacggagctgaagcatgccttcctctagaaacccttctggattcccacacggatccaggcagccaacaggtggggacccaaggtcgggacctagccctacgacaagtaccaaaccaagaagggctccgtaactctcccccagctgggaaggacccttcaagggcccctgatacgaaagtagggaggtccgacagcctgggggctggctctagagaatggacattggtctcctggggtggtccggagcccgtgcagccgctcagcctcatcccatccagatcccgacgagtttggctcccgaaggttgttgacaatcttttcagatgcgctggtattaactacctccacaccagtaagggctgcgggatggcgagctccgagcggctcgccaacggaggcgaccacatcagcaccgacaacgacggccacctctgcaccgacgactcgccagctacagcgatcacctcagcatgtacgccgctgtggaaaggtcctcacccccgtctgcctacggggggcgacaacgaggccattaaagccaaagagccggaggtccggaggcagatggccctgactgtctcgccagcggaggcaaccacctctgcagtggggagcctcaccagcggcggtgaccaccttagcaccgacgacagcggccacctgcgcaccagtgccataccggcgaatggcggccgccccggcgcgcgcgtgaagaggtccttgctcccgtcctcactgcgggagtga

SEQ ID NO: 37824 - DNA, 549 bp, Zea mays
  Peptide Sequence Number=SeqID_81199
atggtggggagcagcgcgtcggggcgcggcgtcgatgatgtgctcgacgaacggaggcgccatgggctcgatgtaggtacggtgggcgaggcccgagtcggtcatgatggtgaccgggttggagttgacgagcaccaccacctcgaggttgatggcgagatggtacgggggctcggtccttatagtcgcggggtgattccgagttggcgatcgactggttgcccgaggacgccgccgagattcgctgccggcggagcaacggacagagaagaggataagtcccaacggcgaagtagcggcgtttgttacggagttcgtgcggaagaagaaatatccggccaggtggttcgaacggacagcgagatccgcgcgatccaggcggcgggcatcgcggcagtgttgcggacgaagcgcgcgatagagaaggaagagctgccaatgcggccccacatggcggcggaagagaagactgaccactggggcccgcgcgcagagaaaaactccaaagcgcgtgcggcagggatgctgggccgcgtgggaaagaattag

SEQ ID NO: 37825 - DNA, 447 bp, Zea mays
  Peptide Sequence Number=SeqID_81200
atggcaagcagaccgacagagacagcacaacggcctgcacagcaaggtcgagacggtggcttgacgacgaaaccacatctgcgcatggcggggctaagcgccggtaaggattccaagcgtgcgacgagcagtaaagagagcagggcgccatgggaggaaggttggaggccgggcacgcaggccaagctgagccaagcagatggggaggagaccgagtgccggccgagaaactgcggccatgggcgagcagacatagagtgtcgtgagctggagctggggggatggagaggacgcagggaatccggccaggaactcgcgagcaagatccccaagccggccatgggaagggagaggaaggagccgagcgccatgggaggaaccttgctggggaggggcgacgagcataggggcgcggccatggagaaaatcttagatattttgaattag

SEQ ID NO: 37826 - DNA, 735 bp, Zea mays
  Peptide Sequence Number=SeqID_81201
atgtccggcgaggggcggggttggctccgggaggtcctggtggtcacagcggtgtacggctcgacggcggaggtggccggaatcggctggtccacgtgcgcaagcgggactggaaagactttggcggaagttgtggaaatagtcccttgtgctcggaacaagtggggcaactggtgggacttttggttttatgtctctcgtgtggaagtcgaagatctccctgggctctctgcagccattatgtgctctcactgttatgtggcgttcccaccgttcgaggtggcggaggacaatgaggacgaaggggcacttcggtacgctgcccgcatgagtagcgggcgcgatcttgttgaggaattcattagatatggagtgtggcccttggtgcacggctgggtacttggcgaagtgtgcccccgccagatgccgtccttgggcgatcagttgttgaactttctgccatatggcgattatccaggagacgacgacactgttgttgtcgaccgccggggaaaaagggcggcgacagcggccgatgaaggcccttcgcggggagctgtgccagctgctgttgggggccttcatcttccgaaggtatcttcggattcgaatcagaaccacagtgggagaagcacaaagaacacaaaggttgatgcagtgccaaagctacgtgcaagggagcttcggcatgacagcagaaaaggaaaccgacttaaaagagaaaaggctatttag

SEQ ID NO: 37827 - DNA, 345 bp, Zea mays
  Peptide Sequence Number=SeqID_81202
atggcctcagtttctcggccggcgctcggtctcctccccatcagcttggctcagctcggcctgcgtgcccctgagctctcccctgcgcgctcggcctccaaccttcctcccatggtgccctgctctatttactgctcgtcgcgcacttggaatccttgccggtgcttagccccgacgtgcgcagatgtggttccgtcatcaagccaccgtctcgaccttggtgtgcaggccgttgtgctgtctctgtcggtctactcgtcgtggcatggtcatggaacttcctcggcgtcgcgcacgtcaaatcgttgggccgcgtcctgctcggctctcatgccgttgatttga

SEQ ID NO: 37828 - DNA, 177 bp, Zea mays
  Peptide Sequence Number=SeqID_81203
atgggaagggagaggaaggagccgagcgccatgggaggaaccttgctagggaggggcgacgagcagaggggcgcggccatggaggtaggcgccggccaggaggaaacagggagctcagtgcggctggagaggaaagcagggggatgggcgcacgacgcaaaatcgcagatattttga

SEQ ID NO: 37829 - DNA, 354 bp, Zea mays
  Peptide Sequence Number=SeqID_81204
atgcagagcacgacgaagctacaaaaagccattcctaagggagcgcaacaaggcttcggaaaaaagaaaaagaagcagttttatgcttcgctgtgtacgaatagaagggaaggtgtttttcgcattcggctcaaaaatgctaatttcgttcacatcaaagcactttacacattgatggaaagcttcggcctcggcttcgtcatcctgtacatattaaagtactataagcaaaattcaatttcgaaggaagagccagacttcagaaaggcaacaactgtgccccaagaagctaccagggcacagaagtcaccatgtccagctataacttcgtcaaggtcattgatagtcgcctag

SEQ ID NO: 37830 - DNA, 954 bp, Zea mays
  Peptide Sequence Number=SeqID_81205
atgtcttcgcccgagctccgggaatcttccgcgcgaatgctgaaggttaccgggggtcggtggcctaggaatgttccgatcccccgggcggccggcgaggacattcgtacttctcgatttgctcgtgaaatgaggatttttccttacgggtggaatgttgctgctgttgtgtcagcagtgatggaaaaggatcaccaagacgcgtcgcggaagcttcgtttgtttgctagggtcggggacccacgcttcgaggtcaagatggctcggggggttgcgaagtctgccgcccctggcgccagcaagcctccgctgggtgcgaagtccgccgcccccggccccagcaagccgctccctgttgtgcccgtgcaggagcgaaggcctccatcgccgccgtgtgctgctgagacggaggtgggcgaggtcgaggcctccatggatatttccgtggatgactatcttctggatggcgtctcgatattcgacgcgcatacagggcagggacttgttgggtcggaggctgggcagctggctgttgcctcggcacctgtggtggctgggcctgtcgccgtggcgactggtgtgacggggtctgcgcaggacccgtcggcccagttttgcgccagcggcgagatctcttcagccgccgccgctaaggacgtgctccctttgctcacgacgcacgcccagcctctccccaagctcgagttcctctgcttcttccccaaccgcgccggtcggatctccctgcgccacggcagccgagctcgtccctgcgcgcccgtgtttcctgctcctggacgccgcgtcctcccggccatggagttcgccgccaaggacgcagtcgagctcgtcgttttccctgtccagtactcacgggacttcttgctcgccactgtgggtttcgctgcgcagcgatcctgctccccggcctccgtcgtgctcggcagcaagtaa

SEQ ID NO: 37831 - DNA, 324 bp, Zea mays
  Peptide Sequence Number=SeqID_81206
atggaggagtcttcagatgaggacttggattattttgcagcgttagacgtggctgcagcggagccttcgccgcgcatggagggttccgaggagctcccggacgcgagtactgggtataggcggcaaagggctgtggcgaaatggagagtgagtggattgtcgcgaatcggtaggtgtcattgtagtgagatggagagtggtcgtcttcgcgtggacgggacaagtgagagggagctgcgaaatctttttgagggtgaggaattgaggataatgttgttcaactacagggagatcggtatcatcccgaaggttgagccaatgtaa

SEQ ID NO: 37832 - DNA, 195 bp, Zea mays
  Peptide Sequence Number=SeqID_81207
atgccgtgggtggacgagaatttctcatcggagttcctgcgccgctgcaacacacatgtgcgccgtggccataccctctactgcgtagaagcacgtcctcacggtgggaatcctgagtcatgggaaaattgcgagttagcccctgatctcctaagaaatattgtgcctagtcctgaacccttaagaaattcataa

SEQ ID NO: 37833 - DNA, 111 bp, Zea mays
  Peptide Sequence Number=SeqID_81208
atgaccgtggtgggttcaacatcggaaaagatgtacctctgtcaggaccttgtcaatgtaggcctgctgaccgaggaccctttaactggtcacatgcctcatcatgggtaa

SEQ ID NO: 37834 - DNA, 609 bp, Zea mays
  Peptide Sequence Number=SeqID_81209
atggatgacctcgaagccactgttccgctctatgtcgtgcccacttgcgccggcgatgtggcgcagcagccgtcgtcgaggcatacgccgcctgtcctggctccaaggcatgaggatagtagcagcagcagcaatgatcccattggagatctagaagctcaggtgaagcagcttcaaacgaaattgcgtcatagaaacagtgtgtgggtcgaggatggtcagcgtataaatgagttaagaactgacatccggcatctgcaagacgagcttgccgaacgagatttggcactcgattgggctgtcaactcgtgttccattgcttgggaccgagaggccaaagctcgagcccgtgtggaggagcttagcacggccgtggataacttgcaggtgtactgcaatacattgcatgaggaagttcatgaattgtattcgcgactacaccctgacgtacctgcagaccctgtcggagtgggagctggaccttctggaacagcaggtgaagcatttggtggggaactggatcttttcaagccccctccttcaatgaacctggctgatgaatggacccctacacctgacaacgaagctgctaaggataataaatactag

SEQ ID NO: 37835 - DNA, 906 bp, Zea mays
  Peptide Sequence Number=SeqID_81210
atggagaaggagagagtgggacaaggggagaggctgggcaggggcggttggggaagacgagcaggggaggggcggcctggtgggtgggacccacccacaggcggcggcggcgctccccagcgcgcgctagggtttggggaagggtcgcgctgggccgcgggtggaccaggggaggggctcgctgggctgtcgagcaggccaaggggaactgggccacgcggggaagaggggctggctccaaggcatgaggagtgcagcagtggcagtaatgaccccattggagatctagaagcccaggtggagcagcttcgaacggatctacgacacagaaacagggtgtgggtcgaagacggtcagcgtataattgaattaagagctgacgtccgacatctgcaagacgagcttgccgaacgggatttggcaatcgattgggccgtcaactcatgttccattgcttgggaccgggaagccaaagctcgagcccgtgctgaggagcttagcacgaccgttgacaacttgcaggtgtactgcaatacattacatgaggaagttcatgaattgtattcgcgactgcaccccgacgtacctgccgaccctgttggtatgggagccggaccttctggaatagcaggtgaagcacttggtggggaattggaccttttcaagccccctccttcaatgaacctggctaacgaacggtcccctacaaccgacagcgaagccaccaaggacgataaatactataggtatgaaacttcgtacttggatttcttggaaacccatcccccactattcgtcaaagccaaagatcctctggaagccaacaaatgggtacgggtcattgagcagaaatttgggctcatccgctacattgagacccaaaagccattgtttgtggcccagtag

SEQ ID NO: 37836 - DNA, 405 bp, Zea mays
  Peptide Sequence Number=SeqID_81211
atggcgccccggctcggcgtcccagcgcggcaccggtgtggcgacccggcgcggcagcctgcccggcgcggcaccgacgcggcggctcgcctcggagagcctccccagccagctttggtggcctggcgcggcgatgcggccatcctcggcggcgcagtgtggccatctcacggcgcccgcggcgcggcgcgcacaatgccttcgtccatggcgcccggcgcgtgcggcctggcctcggtgtcacgcggttcggcccggcgcggcccagtcgcggcctccctggccggttcttccctagtgcgcggcatggccgagctccccacgtgtgcggcgcggccagcgcggctcgagctgccccggtgcagctgctcgcacccttgcacgtcgcgcagcactggtttgtga

SEQ ID NO: 37837 - DNA, 2580 bp, Zea mays
  Peptide Sequence Number=SeqID_81212
atgccgtcttcttcctcgtctgctgcaaacacgccatcggccgacgcatcgttcgaggataccttgagcaatgtggcggcagaggagctacatccgggtgatatggtggagttcggcgtttcgaggatttcctcggtccgcgttcaggatatgcagcagctggggtattttggcagcggagttgggcgtgtcccgggggcggaggaggttcccgagcccgagggcgagttggtcgtgtttgaggcattttcaccgctggccttcgtctgcctgcacatcgctttgtggcggaggtcctgcagagatttgaggtccaggtcagccttctgtggaggtctttcccaaacattactgactgcattggcaaaaaagaaaaattggacacaagattgcacagtttggatcgtgcacgtttacgtcgaggaccggaagacttcgatggaagtcgtggagttagttccctgtgcccgcaataagtggggcaactggtgggatttctggttttatgtttccgagggcaaagtcgaaaaccacccagggctccccgtggctgtgatgtgctcccattattatgtggtgtacccgcaatttgaggtggcagaggatgatgcagatgaaggagcccttcggtgcgctgcccgcatgagtagcggacgcgattgttgggcgaagtatgccctcgcgagatgccctccctgggtgggcaaagacggggctgcacgtattgtggggcgttatgtgcctaggacggaggccttgtggagttgggatatccgtggatccaacgttcgcctgaatagggtcttcgagctgaatcgctggtcgtacagcggctatcctggggatgacgctgtcgaccgccgcgggaagagaccagtggccgtgactgaggaaggcccttcgcaggaggccgccccagccacgaagaagagaaaaataggtactgcagtggggggactgggggtctccgatagttttgctgtggagttgatggggacgtgtgcagccctcgggggaaggatgtctttgcccgagctccaggagtctttggcgcagatgctggaggttacagggggtcgatggcccaagaatgttcagatcccccgcgcggctggcgaagacttctttacgtctcgcatggctcgtgacttgaaggtttttccttatggacggaatattgctgctgttgtatcgatagtgatggagagggaccgtcaagacgctccgcagaaatgtcgggcggtcgtcaggatcgcggatcctatgcgcgaggcgaagagggcgcgggggagcgtgaaggttgctacctctggcggtagcaaactggtgtcggctgcgaaaccggccgcccccaggcacagaaggcgtcggcaagcatttaatcagtatcatggtgcagggtcgggtgaggggcaactgactgttgtcctgcctccggtggcaaccacttcgccaacggtggtggctggggcgaagggtgccgcacgggacccgtgggccactttctgcgcgagcggcgagattctgtcagccgctgcccctaaggacgtggcgggctccatgtctcagcgactaagggaagcgtcgcagcagctgtcacagcagttgaagcgagcggccgacttcgccaaccacgtcgcgttgggtgccttgactgcggacgttgttgctgagaagtcggctgcggaaagcaaaaaccgcaggctgtcggagaaggtggtcgccgtggaggctgagaagacggatctccggtgccagctggcggaggagaggagggaggcgaacaagtccatcgctgatgcgcaggctgcgcaggccgaggccaaagtggcgcgggcggagggcagtctcgcccgccaacgcgccgaggagctggaggcgaggttcaacgccctgcgcagccgcgtggacaaggccaaggcctcgacgcacgcggaggtcgagcggacgcacacgcaattcgtggacgcgtaccgggagctgggtgcgcggactgcttccttcgaagtgcccggccaagaagcgggccttcacttccttgaatggttgcaggaggagctgctggtgctcccgaccattgtgatgggtttcatgtccttcgcctccctcgtcacctgcgagggggccgtgaatgctttgtcccgtgaggggtgcaggcattacaaggtcttcgaccaagcggacgaaaactttgaacgtgaaaacttcaaggtcgaagaccctgtgctaaagcagtcggcgggggcactcttcgataggatgtggggtccgcacggccgagaggcggtcagggagcggtccgacctagcaatagagcagatggcacatgccgaagacgtcgaggaccttggtggtctggacggcgcgctgcaagaggccgcagaggtcgatccggtgctgccatcggatgccggtgaaggcccctcggcgacccccgcgccgactgcggccggcgaagaccccgcaccagcccgtgcgccgacgggcgaagacgccttgaaggtggtggccgagccggctgccgagccggaagctgaagaccccactgccgcggccgtgccttcgcaggtggctgaatag

SEQ ID NO: 37838 - DNA, 147 bp, Zea mays
  Peptide Sequence Number=SeqID_81213
atggccgtgatgggttcaacatcggacaagatgtacctctgccagactcaggcagttcaagcaattggtcagaccctcgcagtcatgcaacagacacagcagcagctacccccacctcaacctcaaatgcaagtgcaaatgttgtag

SEQ ID NO: 37839 - DNA, 756 bp, Zea mays
  Peptide Sequence Number=SeqID_81214
atgggcgccggcgacggcaatggcacgcgccccaaggcgaacgaggtgacgatctcgtgcgacgagggtcccgggcacgcgtttccgttccccaagccgcacgcccccgaccccgacccaccgcaggcgtccgacccggcgaactacgccgtcgctggcaagatactcctcgccgcggcgggggcgttcgcgggcgtgctcctggcgctcgtcgcgctgcacctctacagcagcacccggcgccggcgcctcggcgccggccagccgcggctgctccggagcttggccatcgccggtggcgacgaggaccgccgcgacggcgacggcgacggcgcgggggcgccttccccccgcggcctcgactacgcagttctcgccgcgataccagtagtgtcgatcgaagcaggcgcgggggcaggggactgcgcggtctgcctcgcggagctcgagtcgggggagaaggcccgcgcgctgccgcggtgcggccaccgcttccacgtcgagtgcatcgacgcctggttccgtgggaacgccacatgcccgctctgccgcgccgacgtcgtcgtgccgccgagcgctaccgcgccagccgagggcggggcccagccggaggtgcgcatagacgtggcaggggacgccgtcgccgcgccgcccaatggcttcagggtggcgccggtgatggggaggatgcatagcgaccaggatcttgagaaggcgaggcgggtctttgcttccacccgattctcttccttctga

SEQ ID NO: 37840 - DNA, 771 bp, Zea mays
  Peptide Sequence Number=SeqID_81215
atggatccactgcgctcggcgcaggagctcttcgcgtgcgtcgccctcctccatggatccactgcgctcgacgcaggagctcttcacgcgcgcacctcacctttccttctcctgttgttggggacggtgcgtccgcacgcgcggtggttctccacggacccgtggacgtcgacgcgcacctggacgatccctggaagcacagggggaatacggcgaggtctacgaggtagtaccatcgacgaggcttctccatcccctccggcgagctccccttccaaaaaaagtggtgagctcttgaacactgaagctcctgacttgtacataaggaagaatcatgttccaaatgcctacaccttagtaatcaatggcaaaaaaccattcattgtcgttcacacaagccttgtggagctgcttactccaagggaattgcaggctattttggctcatgagctgggtcacctcaagtgcgatcatggtgtttggctcacttttgccaatatactcacaatgggagcatacactgtccctggtttcagcatggttgctggctttctggaagagcagctatatagatggctacgagctgcagagctgacttgtgacagggcagctcttcttgtggtgcaagacccgaaggttacagttttttcagattcttctgcagccacggggatggtggcgaccttcgcgcgggcagcgtgggctcaaggagtaccacgagaaaggtgcccggtggagatctacaggtcacctctccttctctctatctag

SEQ ID NO: 37841 - DNA, 360 bp, Zea mays
  Peptide Sequence Number=SeqID_81216
atgacgacggcggcgctcagccccttacggaagcaaggagacgtcagcaaggactcgacagccccgacagctgtccttccgcaaggctccagcgctcctccgacggccacgacatcacatgaacagggtgccaagacctctccagctgccatgacggcatattcagttactgaatttgtgaacatcacaacttctaaacgatcagacttatggctgtcaaattttaacacaaaacactatgatataaccattaaatctctagttagttttaaggtatcttcagaatcgggttatgagtatacaagagtacggtcaggacgaagcttgagtgagacggaaggcgattatgacgaaggataa

SEQ ID NO: 37842 - DNA, 627 bp, Zea mays
  Peptide Sequence Number=SeqID_81217
atggtggtcggaggaggggcatctttagttgaaattcctgaaattattaagaaagatgcttctacttcttgctttgatttaattgatgattctaacccctgcaaccaagtttttgttgagaatattgttgtagaaacatgttcggatgcaaaggaaaatgagaaattaaggcaagaagtggctcgccttggcaaggttttaaatgacaagaaaggcaaagccaaacaaatccaacctccacaggataacaccactatgatttataggttatgccacaaggaaggtcataagtctttccaatgcaaggcgatgaccggggataagcaaaagcaaaagccaacaagcaaaatctccaacacctacatcaacaaggtggacaaaaaggttgctacaccatatttgatcaagaagaaaaagaacggaaatgtgatagcaatcaaggccaacaagcaagccaacaaaggaaaggggggccaaaggcatctgggtgccaaaggaaataacttcaaccatgaaaagcagcaagaaagtttgaatcccgagagggaagtgaggagtccgaaggacgttggggaatttggaggcttggcaaatttggcatgtatatcatgtgacacatcatattag

SEQ ID NO: 37843 - DNA, 285 bp, Zea mays
  Peptide Sequence Number=SeqID_81218
atgggggcaagcagcgaggagcttgcaacggccatggaaacggcgaggctgtgcgtctatggagggccctgctccagcgctgaaccagagaggaggaggaaagtggcgtggggagaggagaagagagagggtgggctgccatttatagagcaaagctctagacatgtcagaatgcatcagcaggtggcggatcttggttgctgcacaaaatatcttccttggtctacactctacaattgttgtatagaacttgaggcgattcaggcactggttagagagttatag

SEQ ID NO: 37844 - DNA, 384 bp, Zea mays
  Peptide Sequence Number=SeqID_81219
atggcgaggaatcccgggcgtttgggcggacgactgagcgtaatacttcacaccaacaatccccacactccaatgaacgatcccgacaccccactggccaccaatcgatctcaccctttccgcgaacgcagcactgtcggcggtggcggtgcatttctggggaaaatgagctcgcgcgagaagagggcagggcaagaatgggtcacgggagcgctcctttatcccacggggtcccggcttggagagagggggaggtcgttcacgttcccagtaatggcggcgatttctgcgcagttcgttgcgggggagaaggaagagctgacgcagggaccccactggtcagtgcgtagaggcacgcgcgagtcggtgccacaaggcatgtga

SEQ ID NO: 37845 - DNA, 531 bp, Zea mays
  Peptide Sequence Number=SeqID_81220
atgatggtcatcgcctcagttgccaccacctcgttcgtcattttacttcttttctctctctcctcatgcatccacctccgcgccaccccattctcgacagagggcgtaggatcaggcgtctactccccctattcgtccgacaccggcctcgacaccgactcgcgtagtggttattgcacgtccacgaggacgtttcacatcatgcatgcaccatcgttttcgtcgtcgtcggacgtcccgttcgtcttccctgccttcgccctgttcttccacccgaacctgttgcctccgcccacggtcgtagccgcgagccgaccgacgctcgtcgacacgagtacaggcgatatactacctatgtcgcctccagatgcccaggtcttcgtcgtgtccttctccagcaacgaacaggctccagaaataccaaggcataatgaaattgtctcttcaagttgccactcacaatccttgaattgcatgaaacgtagaagtaacaagaagtcatgtgggcgagttggtcgtctggccccctaa

SEQ ID NO: 37846 - DNA, 315 bp, Zea mays
  Peptide Sequence Number=SeqID_81221
atgccagcacaaactccggcgagaacgcgcccgggcacccagcacccaaacgctgaatcccaaggcagtttcctctactccatccacacgaggatctcagtggagctgttaggagttcgctgcaaattgaccgtgagggaggaagacaaccgcgacactgacccagttgtcccacccgcagtgaccagcagagatggcgcggagttactcagccgaggtgtgcggcagtcagttgacaaatgggcccaatcggtcagcggcgttggcgaagtcatacgcgggatacgcacggtgcagatgactcgtggggcctag

SEQ ID NO: 37847 - DNA, 738 bp, Zea mays
  Peptide Sequence Number=SeqID_81222
atggggaagatggattactctgccgtggtggtgatgccccccgagccagactacatgtccttggggctccggggcttctggaccgccgaacccccggtcccagaggacgcggcggccagagcgcaggcgagggacagggtcccgctcgagtcctctcccaggagtgaggaggaggaggatgacgatgatgaggggatggaggtccatgccggctttagccctgaggccgggctcggttccgcgccagcctccatgggcccttctagcggcgcagcccttccttcgatggggccagcattgtccctgtccaaggcgcaggcatccaccgagcctgctcccgtccctaccgaggcaaaagaggcagaggttgtggaggaggaatccatgccccttcccacgaaagtcgttgttgtccctgtagttgcgtcgttggttcccctcagcggccgcccgttggagggaatacggaggggggcctgccactccccctcatgttgtcgtcccagggtccgcagtgaccctcgctatctcctcgcccttgaccctcgagccgagggttgtagaagaggtgaccactgcctcgccttcgtcattggtggggcagcaggggccaaggattcggaggaccaggcatccgtttttgcctgtttctggatacgtattcatagtgtgaggaagcctattcactataaacgcgtcacctatttagtgctgattcacgcgtcattcgcgcgctaa

SEQ ID NO: 37848 - DNA, 327 bp, Zea mays
  Peptide Sequence Number=SeqID_81223
atgtatcttgtcatccggctcttgcatttgctagaaagccttcacaaaaatgatatccgttgcactgcacgtgtccaccaggacattgtggaccagaaatcccttgatgacacaagatatgacaattgcatcgttgtggggataatccttgagctgaagatcctcctgggagaagaacttaagctgccagtgattgggaaggtgccacagcttggttgccttgcgaagccattgtcgcagttgtggaagcacgggacgcagcccaggttgaagccattgagcttcggcatctcgcaatatcacttctacacagagtcttcgtcttga

SEQ ID NO: 37849 - DNA, 897 bp, Zea mays
  Peptide Sequence Number=SeqID_81224
atgactgggtccaagcgattggcttctatcaaccgcgagaaaagacagagtaagaccagggccctcaatgctcgtgcctacaacaatgagactgtgtttgttcaggtaagattagatggtcgtccgcgtgctggaccgcgagggccagcacgacaccgtctgcgcgctgctcgacgaaatgccgctcccgcctggacgtctgcgcctacaccaccgtgctgcacgcactctcccgcgcgggccgagcgcacgctcgagctcttcgctgagctccggcaccagggggtggcgcccacgctcgtcacctacaacgtcatgctggacgtgtatggccggatgggtcgctcgtggccgtggatcgtcaccctcctcaatgagatgcatgccgtcggggtcgagaccgacggcttcaccgccagcacggtcatcgccgcgtgttgccgcgacgggctggttgacgaggcggtggcgtcaaccatagaattgtacattgaataccaaaaggagcgggttcacatggtggatgatgcgagactagcgtttgaactaagcacagatctctctaaggaggggattgaagtctgcatggtaccttctgctgataggccagatgacgctaaatttgttgtaccactcctggagtctgactttgactttgccattgccaaactggtgccaggatgtccttggagattacctcaaaagatccatctccaggcagtgaactggcgcctggacattctgcggccaccgattgggaactatagcgggagcgtggatgcgttggccgtcgatggcaaggactgcctggcgaggtatgacagactggaatccattggcagcgatatcaaggcatccatcatggagaaattccctactatatttagtaaacaatag

SEQ ID NO: 37850 - DNA, 468 bp, Zea mays
  Peptide Sequence Number=SeqID_81225
atggagtcttcggcgaagaaaaggcttccactcaactctatcggtgctaaaggttcaacacaaactaataaaaagatacaagttagggttcaaaagaaaggagcaaaagaaaccgaagagaaccatggtctagcgcagtggattgtccggtgtgccaccggacagtgtccggtgcaccaggggcgatcgactcaaactcttcaccttcgggtttctacgcagccactccgctataattcaccggactatccggtgtaccatcggactgtcggtgtgccaagcggagcaacggtcgccagcgcaacggtcgactccaacggtcggctgacacagcgaacagtgcgcgcagagttagagcagcgccagaaggcgcaccggacagtgaacagtgactgcccggtgtggcaccggactgtccggtggcccaagctgtcagagctccaacggtcgaaaccgtcagaaccctaa

SEQ ID NO: 37851 - DNA, 371 bp, Zea mays
  Peptide Sequence Number=SeqID_81226
gcgacgtcggcgagtggtggccccaggcgacatcggcgagcggcgccgcaagacacgagcgtcgcggtgaccgtccatggcagcatccgaagacgatgatatcctctaatatggcacgtctcgggcgtccttcgacgaagaccacctccgatctggtggctttagaggcgttcgccgacccgattgccttaaggtcgtcttccagcgacgtcctcccactgatccatgtttatgccttccatgattatgttttatgcctactacttacactatttatgcattctcttaaggacttctatgatgatgaatacgatgcctctcacgtggctttgggtttttatggtaaccatctgtatttgaaagtcgcctag

SEQ ID NO: 37852 - DNA, 420 bp, Zea mays
  Peptide Sequence Number=SeqID_81227
atgcagcaccgcgcggtccagaggccttacgtcaggctccgcccgctggcttacgtcatgggcatttggccacgtggcagcatcgggtctctgcctgagcggggagcagaagtgtacatggtatggtccggacacgtgtcggctctggacctccacctggccttgattaaggcctgggtattctttgtcccagaatcccgggaccctgctgagggtggcccagaccctacacagagaggtccgggacccgtcccgggggtccggtctgtacccatggaggtcctagaccctgcccggaggcccggtccagatatgctggggtccggtgctttcccatgggggtccagacccaccattgataccttggaggatattgtcctccctagccacgtggcgaccccggagccgtccacgtggtga

SEQ ID NO: 37853 - DNA, 309 bp, Zea mays
  Peptide Sequence Number=SeqID_81228
atgaggataagacacacgataagagaatctcctactgcattgcaaagactttcaattggtgtcataaaagagaagtattcaattggaataaacaaaaaggtacaaagaagtgatatctatatggtgcaagttgcttatcttgatgctagatattcagacgaaggtaagaagaacttcgaggaactgagtgcacgtgagaaggtcaagaagaccaaggtacctaaagccaggggtgaagaagatggcttgcaagaagtgaaggttggtcaagctaagaagagtcttggtacatcaaggatcacatcataa

SEQ ID NO: 37854 - DNA, 768 bp, Zea mays
  Peptide Sequence Number=SeqID_81229
atggggaagggaggaaggtggtcggagtcttcgggcgaggagggagcaaggaggagggacgggaaggtcgggaaagaagatgtcggacacggcaaagtccacgaacgcgtcgacgaatgcagatacggcagccaagaggtcgctgcaggcggggacggggccgccgccatctttctctatttgtgctccggcagggattccccctcgcgcgacatggtggatgcacgggccagtaccggtgccgaggatcccacgaccgtggacgtagtcgtgacgcaactgatgccggaggaggcgctccagctctgcaccggctgcgtccacctctacactttcttgcatcgcctatcgctctgcaggaagcttttaagcggaacggtgttcttgtacaagcaatatccgttgagtatggctcgcaggggctttgtgttgatctcaaagattgtaaaaacagtgaacatcatcgatgccaaaatcagagatcggatgttaagatcctcgtgctccccgcagggcgcttcatgggtccgcagggctcatgggccaatctcattcgaggagcatgttgagcttgagaagagataccgggagctaactgacttgctggtcgaagcagaaaggagtaaagctactcgcagatcagcatcgtcgtgggaagaagatactaatatcaagaaactgactaaaaagctgagcgtttggcagtccgcaacagctttttgtggccagaagctgcaaaaagctgaaacaaacagaggtttctcataa

SEQ ID NO: 37855 - DNA, 447 bp, Zea mays
  Peptide Sequence Number=SeqID_81230
atggatctcccccctggccaccgtccgcagatctccctgcacatcctagctttgaagcagtcgcggcgcgagtttgccgcctgtgtggaggttgtggccgccgtcgctcagatcgtcctctgtttcatgccttcgtctccgctgccctcagcccccttccgctctcagattttggcatctcccagactcactagcgtccttctctcctcccgcgcagatgcttcgcggcggcggcgaaccggatccgggggctcgccagggccttctgcggcgcgtcggcctcacgagcggatgcagaggccaacgggatgcctagcccacagctacgctagatgcagaattgaggagacctgttgttgtaatccaagcaatttattgaaccattgcgaaactctcaaccatgagtgttacttcagggctgcaggagagatgagtgggggagactag

SEQ ID NO: 37856 - DNA, 663 bp, Zea mays
  Peptide Sequence Number=SeqID_81231
atgcaagaaaggggatgcacaaaccatatgatgatggagaagaacatgttcacctcctacatcaagaataaggattctcatgacatgatcatctttggagatgagaaccgaggcaagggtagcgacaaaagaaaaacagagatgccacttattgttatcaagcaattcacgccatccatcaaccagccagactatagcactacaacaaatcatgtaccaatgcatgaaaaatcaccactatctcacctagaattatcctcactaaggcacaagaagggtgagaaggaacagagtggcaaagcatcagaaggtgacggtggggagatcgtgttggagattggagctctggaaaatagaaactatgtcaccagcaaagctgataatgactcggatactgtccaagcagacccagtatatgactcagccaattgctctctaggaattttgggtgatgatgctcatgtcagcaaagcctatggtggttctgctgataacacaaagaacatatctgtggttccgaaagttggccccatcagttcatctagaatcagagatatgcaaataacagaaaagaatgtggtcgcttcatcagaaaaaacaatggaaatctgcaagaaggaaaagcacaagagacccctcatcctaaggatgatgtgcaagtaa

SEQ ID NO: 37857 - DNA, 339 bp, Zea mays
  Peptide Sequence Number=SeqID_81232
atggggaagcctaccccatcacttctcatgctcctcctcggccgagtgatcgcacttgtacccaccataatcggaatgggagaccacgtctcatgttgcgtgaggagggcaatcttcgggcaggttcactcagaatcagaggaaattcaattgaaaaagcttggctcgaagcagccaaaagtctgctcagtctgggtgcaccggactgtccggtggtgcaccggacagtgtccggtgcgccaggctggctctggcgaactggctgctctcgggacttcgatggcggtgtacggctataaatcaccggactgtccagtggtgcaccggactgtccggtga

SEQ ID NO: 37858 - DNA, 873 bp, Zea mays
  Peptide Sequence Number=SeqID_81233
atgggtctttcgtctcggacccaccccttgattcggatcccgcccagaagcgtcagaggatggctggtgagaccatggaggctggctcccaggcctagggcgtgcagaggcgcgtcagtcctcctccaccaccatcatcagacccgcctccaccaccaccaccatcaggttcgccaccgcctccccaggggcagcagcaccatcatcagcagcaatagcagcagcagcaggggcagcgaacgtcccgcttccagggtcgctggaaggtccaggggcccaaggcctcctccccctctgctcccaaagtcgctcccaacggtgaatccggttcccaatagcaggcgtccgctgggagtggtgccggcgacctgcctccgcctgccactgccgaggcggcgccgttgggcccccaggttccgtctgccactgccgaggcagcgccgttgggccccccaggttccagctgggggtttggaggcagtagtgccgctgacggctactgtagacccaacgacgtcgatgtcgtcgaatacaccgtcgataacggcgggagacgcggggggcgcgtccagctccatcccgccacccactccggaggagccggaggttattcttggacggcggctccggtccggcgtcgagccagaagcggcgccgactcccctccctcgggtgctatcccgcgctcatcaggctctccgggagaccgagctagcgatcctgcgggagtgggaggcgctcgcgaccgagcaccagcgcctcagtgattggcacgcgcagctagaggagcgcaccaaggccgcttcccaccaattcacctcggatcggtccgagcttgagcaagagcgcgaggagtacaaggaggacctctag

SEQ ID NO: 37859 - DNA, 249 bp, Zea mays
  Peptide Sequence Number=SeqID_81234
atggaggcgaggatgatggcagagcgagaggcccgcttggcagatcaacaaagaatggcggagatgttccagtacatgcagagccttggcgccgcacaaggttttgctccaccacctctgttgttctctccacttgaccctgctcagttccatactcctcaaaaacaattaaaaaagggtaatctggtcactttgtcgactgtcaaggtcatagcactcgtcaaagaaggcacacctgggtaccggtaa

SEQ ID NO: 37860 - DNA, 210 bp, Zea mays
  Peptide Sequence Number=SeqID_81235
atggacactgactgcttcgacaccgggatggggctcacccccagtggcaccaccgccaagcttgcctcgtcggcccatgcggcaatacgctggaccccagtgcgatgctccactcggagatcttcaagggtctttttcatcgcctccaccgcttgggagctcggagccgcctgcaccgcctgggctacctgcgctgcatgcgtcgcctaa

SEQ ID NO: 37861 - DNA, 144 bp, Zea mays
  Peptide Sequence Number=SeqID_81236
atggggaagcctgccccatcactcctcatgctcctcctcggtcgagtgacaacacttgtacccaccataaccggaaagggagaccacgtctcaggtcgcgtgaggagggcaatctgcgggcaggttcactcagggtgggtttga

SEQ ID NO: 37862 - DNA, 339 bp, Zea mays
  Peptide Sequence Number=SeqID_81237
atggtggctaaggtggagagggcggagatggtcgaggcggcggtggcggcggagatggccggggcagcggggttggcggtggccgaggcggggttggcccgggcggcaggcttggtggtggagatggtcgacagcgtggcggcggtggggatgggctttggcggcgtgtgtgttagaagtgaagagaagaacgtcggtgcccacgactatcgtgcaatcaacgggcgacgtgtggccagcgccaacgatcatcaggctgcaccggactgtccagtgtgccaccggaatatccggtgggccaatgggaccctagctgcaacggtcggcttcgccaaataa

SEQ ID NO: 37863 - DNA, 1257 bp, Zea mays
  Peptide Sequence Number=SeqID_81238
atggtccacatcgtcgagcaccatgatttcttgcctgaggacttcatggtggaagaagcggctgcctcttccacaccgcgggccaccaacctcccggggcctagtgcgaccactgatgtgcactctgcgcggcagcacactcccgcgcaaacgtccagggcatctagggctacgcctggggcattgtcagcggccagagagttgtttcgccaccctcctagatccacgacctccccgaaggccatgaagcagtggcgcgacgacgtcgatcgcctactcggcatggcacactctggatcaaccagaccaaggcctcggtcatcccggcgccaatacgaggcgtcggcatcaatgcgctctccctcggtgagggccgcaccaactgatgacctacgggtggagctcaaccgccagcgagcgggcgaggacgccccagtctctatggagaagtctaacgacctgcgggcagaactcaaccgcaggcgtgcgggtgaggatgcccgcgtctccatggagaggccgcgtgagcgccgacaaaatgtcgagggccgcaacctcgactacaacttcgctgcggttgcaccgcagaccccaacgggcgctcggatacagacgggtgtatgtcaccgctatcacagctacaggtggaaacaccactgtgatggcgacatattttcatgtcgccttgtctgggcctgcccggacttggctcatgaatcttaccccaggatcaatctattcctgggaagagctctgcgtgcggttcacagcgaatttcgccagcgcttaccaataacacggcgtggaggcccacctccacgcagtgaggcaggaagccggagagactctctggacgtttatctcccgcttcaccaagaattagccacgcacgacgtggaaactgtctccactctcttcactctggccgacaagggctccggagccgtcgcccaagatggcaaaaagaataagaagaaccacggccatgagaagccgcggtctaccgctccgattgtcgcagccgcgactgggggccagagcgagcgcaacaagcgcccccgaccacagggaggcaacagcggctcatgccctatgcacaccaacgcttgccacaatgcctcagagtgccgtgagatcatcaagctcgcgaagcgcgtcagcgagcaaaacgaacagtcgtccaaggatggctccccaccccgtcgccgacctggtaaggaaaggtccgacgacggtgaggtggccgcgggagaatga

SEQ ID NO: 37864 - DNA, 222 bp, Zea mays
  Peptide Sequence Number=SeqID_81239
atgcccattggttcacatgggtgtcttgatgggcttggcatccttcatcccaaatttgcatttgagaacaagtccccaacattggcgcccacctccggtgaacttacttccactgttgagctgatggcttcgttcaacaatcaagctgaagttgcttcggctacgaagctggtgctcccgataataggcggttcaggctcagaatcggccaacaagaagtag

SEQ ID NO: 37865 - DNA, 188 bp, Zea mays
  Peptide Sequence Number=SeqID_81240
ccgtcgtgccgttaatggggctcggtgtatgcggctcgctctgccaaggttggttcgccccttggggaggagtgcagtgcatttatggtggcaatgagaatgatggttttggcattggctatggtaatggagaagatgaggccgtggaaggagacttccaggagttccaagattacgacgagttctag

SEQ ID NO: 37866 - DNA, 1023 bp, Zea mays
  Peptide Sequence Number=SeqID_81241
atgtcccagcagatgaggcatgcgtcgcagcagctgaagcatgcggccgccttcgccgaccatgttgcgtcgggcgccctaacttcggagttcactgccgagaggcaacgactcgagggcaggatcgagcgcctcggagcgcagcatacggatgctgttcgggacaagtcagctgtggagaacaagagctgcaggatggcggagaggctggcggctgcggaggccgagaaggaggatctcacgcatcagctggcggcggagaggagggacgcaaacaaagcatgtgctgaggcgcagtctgcgcaagccgaggccaagcttgcgtgggtggaggccagtctcacctgccaacgcgccgaggagatggagacaaggctcggcggcctgcgtgaccgcctagacaaaatggaggcctcgacgcgcgcggaggtcgagcggacacatacgcagctggtggacgcgtaccgggaactgggtgtgcggaccgctcccttcgaagcgcccggtcgggaggtgggcctccgcttccttgggtggctacaggaggagctagaggtgctcccgaccaatatgatgggcctcatgtccttcgcctccctcaacacctgcgagggggccatgaatgccctgtcccgtgaacgatgcgggcacttcgaggtcttcgaccagtcggacgaaggattcgagcgcagaatcttccaagtcgaggacccggtgctgaagccgtcggctggggtagtttttgataggatgtggggccctcacgaccaagagactgtccgggagaggtccgaccgggcgacggatcagatggcgcatgatgaagaggttgaggacctcggtgacctggacagcacgttgcccgaggcattgagggtggagccggcgccgtcgtccgatgctggcgagggccccgcggtgacccccgcgctgactggagctggcgaagaccccgtgccatgcactgcgttgacgggttccgacgtttgggcctgtgcaagcaaccgctgctggcaatactga

SEQ ID NO: 37867 - DNA, 477 bp, Zea mays
  Peptide Sequence Number=SeqID_81242
atgaggggttttgaggatcttcaacaatacaaaacaaaggaaaagaagaggcagaggatttggtggaggcaacagacagatgaagcagaaataactcattatgatgaagaacaaggtaccaacgttgcaatacctataggcaaagagatagatggcaaatatgtgaatgaaaatgtgaaggagtttcaggctgaaattaataaatggaaaacatatagtgatggggcatatggtgctggggtagccatgcctcccaagattcaagttatggagcacctcattcacaacgacatcattcgattggcagacctgttgatgatggcagccacaactcagttagttctagttacaactatctgccgcgacatgaccaaaacctacacccttatgcatggaaaatactcccagggtcatgaatatagaattagctcataccttgaaggttcaaacatgtctcaatactatgactatagttga

SEQ ID NO: 37868 - DNA, 222 bp, Zea mays
  Peptide Sequence Number=SeqID_81243
atggaactggcgcatgcggtggaatgcggcgagcatgtggcacgggagcccttcctcactaagcacatggatcacctcggtgaatgcggtgatggagatgaccgaagcgtgggcacaaaggaggcagaaaagcggagagcgtgggccagcacaagcgcagcggcatggagcaaggctttagagatctggatggcgtcgggatgggcctggtcatgtgactag

SEQ ID NO: 37869 - DNA, 540 bp, Zea mays
  Peptide Sequence Number=SeqID_81244
atggctcacgacccaacttcctccctgcttgcgtgctgctgcgcagtgccccgttggtgcttgctgggtgctcgacaaaatgcgcagcagccccaacgtctccgtgcgctgccggctcgctgttttgtgaagcctagtggacaacacgttgtgatgcccaccgggtgtttgctgtttttgcgtagccccaacatcgacgtcgttcacccccggagaggaaccccatgtttttcgtggaggagaaggcaagccgctcaacgctcgtcggatgttcggagcgatgcacaaatcggaatcaccatcgttcttgcaaacaccgattggacaccgacacgtggggcacccagcatacgagcacgaacgctgaaccatcccagaaaaatcgtcggtgcctgtaacaaccgcgtaacaactgggcatgagccgacagatggtgttacagggtttataaaaacccgatccccatgtgccttccgccataaccagggttgggagctagcgcaaccttgcatggatgattacgctgaagcacagcgatga

SEQ ID NO: 37870 - DNA, 396 bp, Zea mays
  Peptide Sequence Number=SeqID_81245
atggcaagaaggacctgctggcagccgtgggaaccaaggaggaagaaaagggggcgtcggctgctgctacgcgagggagaaggagcagggggcgacgaggaagctggagccaagggggagaaggggaggacgccatgggaggagagggagcttgcagagctgctgctcggcagggacagcagagggagaaacgtgctgggtgctgttgctgccgtgagggaggagacaggggagagtatcttcaggaaagacatccgggaattcacatactaccagaatatccttgatttctgggatgatagtttcatagacctgtccaactggtttggctgggacaactacagggatggacaagagaacttcttcatggccatggctcaacttgatagtccttaa

SEQ ID NO: 37871 - DNA, 1971 bp, Zea mays
  Peptide Sequence Number=SeqID_81246
atggatcatccagatcctaccgtccgcaagctactcgatgcaatggcgttgatggagaatcgcttgactgaggcgctggcgggccgtggtggcgagcagactcctgcctcctccttcgcctcgctgtttgactcattcgagggcaccacaagttcctccaccacagcgctacaatacgtcgacgacgtgttcagctcttcggtgggcgcggagtacgccgcaagcccctttgcgcggacgcgttctccatcctacgacgacgacgaaccggtctttgatgcatggcctctcttcgacgaggaacctgtcgacagcgctaccactcaggctctcttctccgacgatgccaaccactgcttcggcgacgagctcgacactgaccggaccatggagttccgcttccccacctccgaattcgacatcaagcaggtcatggttgtggtcagcaacaccaaggactcgctggagttcgccagtgcgcgaagagtcgagatccgcacacgcgtgaccgtggcatgcgaggactgggtggtggaccacaacgtggatgccatgacggtggccgacatggcgcacctcgcacacgactacttcacgcttccacttgaggacaagcctccgctcggcccctacatcgacacggctccatctccaacttcctttctcccgcagttgatggagaccgaggaagaggatgaggttttccacacctcacccagcacgtgttcgatgatggtccccaaccgtgatgccaccaccagcatgctcgccatggtcgaggccacctggagcgacgagtacgcgctcgtggacctgcagtccgtctgctactactccatgttcaacgccaagcccacgctcaatatcctcgacgaggtcgatccgaagctgctcaagaccttcatcccgctcaccgagcagaagcacctctccgacgtcgccatcgacgccgtcatcgactccgcctccatcaccatcacccaccatgaggcgctgatggccaagggtgtcatcttctgctccatccccaagtccatatgtgagtacccagaccttgtcaggcactacctgggcagcatcgtactgccaggcgacaactactatgccgccctcaattcagcggtgttcagcgatgggtccttttgcttcgttcccaaggacacaatctgccccatggaaatctcgacctactttaggatcaacaacaaggagaccaaccagttcgagaggactctgattgtggccgttgagagatgcacctatgtcttgctcattgagttgtgtcttcaggttgatggtgttaaagttcggcttccgccttggccaccacctgtttggacattctggttgccatatgatgtgtgcagcggcatgcattgcaactgcagagactgtgcctggttcaaggctgaattttccagttcatataatggtgaagatggtgctactttactgatgtataaacattatgctgcaactgctatttccaaaggaatccattgcttgtctctgcgccttactgatgaatactcctcaaatgcccatgcacggaaccagttactgccaccagaactgttatttttgctctctgataattccttacaacattacattctagccagtgataacattcttgccgctttagttgttgtgagctcaactgttcgatcttcctcagtgcctgagaaagtagtcttccctattattacagatacgaaaacatcagtggctgacttgtctcccctttgggctatcaatcttgaagggaaggtaaatggagctgtggaaacatgcagaagggaagacaactgggtgatgtgtaagcgtttcaggacatatttcaacttctcacataccatgatagctcagagacttgacccagatgaatgtgattgggcatatggtacgaatataattgatcggcagtttggaggaagacaagcatcagggatacataccatttatggttga

SEQ ID NO: 37872 - DNA, 366 bp, Zea mays
  Peptide Sequence Number=SeqID_81247
atgtatgtccacaagaacccaaagagccttcataagcacaagatcaaccatcattttccatacaagcatctccaccaactcaagatgaggatctggctcaagaagaagatcaagttcaagacaatgagccacctcaagaagaaggcatcgatcaagggggagatgaagttgatcaagaaaaggaggatgaacaagagattcaagatcaaagaccacctcacccaagagtccaccaagcaattaaacgagatcaccccatcaactccatacttggtgacattaaaaagaggggtagaggatgcacttagagatccagactgggtggtggcaatgcaagaggagctcaacaacttcacaaggaattag

SEQ ID NO: 37873 - DNA, 111 bp, Zea mays
  Peptide Sequence Number=SeqID_81248
atggcgacgtcgtgccttagcgttctgtcgccggtcgggcaccgtgatctgacggctgaagtcagcccgtaccccttcggcccggggataattgcatgtgagccctcataa

SEQ ID NO: 37874 - DNA, 354 bp, Zea mays
  Peptide Sequence Number=SeqID_81249
atggctgaggtgaaggtcatgcgggctcgtgctgatggaccgggagcagtgaagggcgagtgctgggtcttgactgacggatcagagcagccaggacgtggtggagtggaccgtgttggcggcgtggtcgaggactggcgggacacgcgtctgatcgtggaggacgtgcatgaggtgcggtgcgcacgacaggttttatggtttgagcctcaaaaccacccagcgctacagatgctgggttttgctgagttacgtttgagcctcaaaactcggcggtggcggttccggattgaaccggtggcggcacgcggcgtgatcacggagggtgcgtcaaggcgaagcaactccgtgtga

SEQ ID NO: 37875 - DNA, 285 bp, Zea mays
  Peptide Sequence Number=SeqID_81250
atgctggcgtcccccttcgaggtggagatccttccgcccgtgtcgccgtccgaggccgggccagatcccgccgaaagtggaaacgacgccgagggtgctgttgctccctctgtcgatgacttgttcgtcggtagcagaatcgcttatccgagcgagagttacttttcgcggaaggtgacgagtgaggatcccgctatcgaagctgtcgaaaaacgcgaaagattttctggcagaaagactttttccgaggaaaattttgacgcagagggggttccccccttctag

SEQ ID NO: 37876 - DNA, 1245 bp, Zea mays
  Peptide Sequence Number=SeqID_81251
atgcaggtggcgtgcaaccgcaccgcggaggcgcaccccttcggcttcgtcgcatccagcatggaggcccaggcccacatgtcatgtaaccggcgtgccggttactacgtgcaagaaactgcaccgccacttgcgccaatgccgcaccttctcgactgtggaaccagtgccgcgactcgaggcaaccctgcgcatggcccaacagtgccaatcaagcacatcgaccccgggctggctcctcggaagggttcgacagccgccccagagcactcgggcttcaagctcattactgatcaggggttcgaaggctggcccctcggaagggttcgacagccgcctcagagcactcgggctccgcgcccactactaatcaggggttcgaaggctggcccctcggaagggttcgacagccgccccagagcacgcagagcgagggatgactctgggtacgtccgttacatggccgaggctcgggctacgctcccgaggagcgattttgtaacggaatcccaccagagggaggcatcaagccctcggaccctatcgaacgggaccgggtccggcaaaacacctgcagagattgatgggcgcaatctaggtcaaggcttcgtctactcaagggacgggatctcgcctcgcccgagcccagcctcgggcgggaacagtagccccaggcgaattcacgcctcgcccgagggcctcctcaagcaacgggcgcaccctcgactcgcccgaagcccagctcgggcaggcttcgttgtgaagcaaccttggccaaatcgcctcaccaaccgaccgtatcacaggcacattcaatgcgaggatcgcgtgacgccttatcctgacaaacgtgcctcagtcggcaaggtcgaagaaaacagcgccgctcgcccctctccgactggtgcgccacccgccagggtgaggctgacaacagctaagtccagcctcaggcgcaacaggaagctccgcctcgcccgaccttgggcctcggcctcaggaggaggtctccgcctcgcccgaccccagggctcggcctcaacctcggcctcggaaggaggtctccgcctcgcccgaccccagggctcggcctcaacctcgacctcgggaggaatcacgtcctcgctcgacctcggcctcaggaggagcctccgcctcgcccgaccttgggctcagaccaaccacgccacgggggagctcaagcgctccttcgacggccacgacaccgcgtacacagggctctag

SEQ ID NO: 37877 - DNA, 801 bp, Zea mays
  Peptide Sequence Number=SeqID_81252
atggagtcgtcgtcgtcgtcgtcgttagacagcaacctcaggttcgacttgtacgcggtgctggtggcgctcggcctcgccgccttcctcgcggtgtgcttctggctcctgtacaggctcaccgtgtccgcgcggccgcaggacatgatgcccaccaccgccgacgccggggcggccggtcccaagggagcgctgcggcagcaggacgtcgcggcactgccggtgttcgtcgtgcgcgcaggcgcctgcgccgcggcgccgccgcccgtggagtgcgcggtgtgcctcgcggagataggcgacggggagaggggcctgctcctgcccgcgtgcggacacaggttccacgtcgcgtgcatcctccggtggtttagggctcactccacgtgcccgctgtgccgcgccgcggccgtcgtcgtcgggcagcagcggggcgcggcggatcagacgtgcaaggccggctccgcgcaggaacaagtggcggtggtgccgccgacaaccagcgatccatccacgccctcgcccgctccggaccacgcccgcgccgcctccgcgccctacgaacttcccgtcacgggcccgtacaccgtttctgtcttccttgagaagggcttcctctccatccccgggttcatcctcgccggcgacaacctcatcgccaagtgcccctcctggttctggtgcattctttactcatctcgccctgctcttgtgatttttattcctagatacgtcttttatgctaatttgaatgtgttattatgctcaattaccagatctcgtgtacgctccgcattataa

SEQ ID NO: 37878 - DNA, 1263 bp, Zea mays
  Peptide Sequence Number=SeqID_81253
atgagcgactcccaagcccaaatcaccgtccgccgccgcgcgagtaggttgcttttatggcatcttgatccatcaattattaggcttgatctctcagtgatgctcaaggagcatttgtgtcatctgagtttgtgccgcgtcctcttcgaccgtctcggggaagaggttctgtgcgagctcgttggggtcgacggtggggtagagggagttgcccgtggcggcgccggtggaggtggtgggtgcggagaagaaaggggtgttgagatcagggtgggactggtccacatccaggtagaggctctacttggcattcgaggaagcgaaagccatggttgcgtagctgtacttgatgatgaggccgtcatgaggaaacaactccacgaggcgagagaacagctggtgagacaaaggttgttgcctcccaagactggccctaggtggctaactataatggcattatccgtgcacaaggtcaccgtcaagagctcatcgatgggctggaaaacattgtcaaagacccaagcagctgatcttctacaggcatggacagttctttacaatgagaagccaaagatcaccttcgtagtggtgcagaagaggcaccacacaaggctcttcccgagcaaaccaaaggattgccaatacacggacaagagtgggaatattcgagctggcaccgtagttgataataatatttgccacccaacagaatttgatttcttcctgtgtggccatgctggggccaagggaacaagtcgtcctacgcattaccatgtgctacgagatgacaacaaagcagatgctctcttgttgacaactctcataagagtcgataagaggaagcggtgcgggctggtggagtaccagacgctgccggcttacctgcgggacaacgagtacatccaccgccactaccgctgcgagtggccgctcctacaggtgctgctctctgccttctccatccataacgagactctcaacggaaattctgtgtcgactacaaagtacagcatcctgactttcctacctaaaggattatttgagcaggtcgtcttcaaggtccagacctcctccccgctcaagttcctcgtcagcacgttgcgcgatgtcgtgtttggcgcgttagagagcagaggcatcataaaggctgctgaggaatcaagagaagccatagacattggcctgagggatgtagatcttgtcttcataacaattgggataggaggggatattggatctggtgctgctctggttgttgcctag

SEQ ID NO: 37879 - DNA, 579 bp, Zea mays
  Peptide Sequence Number=SeqID_81254
atgggcgcaattcaggtcaaggctccgttcactcaaggacaagatctcgcctcgcccgagcccagccttgggcaaagacagccgacccaggaggattcacgtctcgcccgaggtcgacagagccgaagtgaccgcagtcacttcgcccctccactggctgacctgacaggaaaacagcgccgcctgcgctgctccgactgctgtgccacccgtcaggggctcggactcaacctcgacctcggacgacgcactccgcctcgcccgaccccagggctcggactcaacctcgacctcggacgacggtctccgcctcgcccgaccccagggctcggactcaacctcgactccggaagacggtctccgcctcgcccgaccccagggctcggactcaacctcgacctcggaggagcctccgtctcacccgacctcgggctcggaccgaccacgccgcagggggggccctcgtacgagaaggtggccacgcgggagaacgggccgacgcacgaggctctcgctctctctctccctcgcgaacgcttggacctccggggtcgaaacaccgacagaagggttatttag

SEQ ID NO: 37880 - DNA, 297 bp, Zea mays
  Peptide Sequence Number=SeqID_81255
atggcgcttcctgttgacgtggctggcctgcgccctaggttgggcgtcgtggaggctcctccgaagccgaggtcgagtctgtcttccgtggccgaggccgagtccgagcccctgggtcgggcgaggcggaggtcgttcggcagaggccagggcggagtccgagccctggggtcgggcgaagcggacctgagtccgagccctgggtcgggcggagcggagttcgccgtcttccgggacctagcccgagtccgagccctgggtcgggcggagcggagttcgccgtcttccgggacttag

SEQ ID NO: 37881 - DNA, 210 bp, Zea mays
  Peptide Sequence Number=SeqID_81256
atggagcagcagacaatatctattgccaaagctgccattacaataatactcattttagggacttcatttcttgcagctgccaatccaattgcaagatgctatgacgctcttaagaaagcctatttggtttcaacagagttcatgtatcttttcattcttgatgaaattctggtatggactttgatgtttgaagcacccagatgcaaataa

SEQ ID NO: 37882 - DNA, 378 bp, Zea mays
  Peptide Sequence Number=SeqID_81257
atggcggcccccagctctcttacggaagcaggacgacgtcagcagggactcgaccgctccaacagttgtccctccgccaagctccgacgcacctccgacagccacgacatcacgccagcaagatcctcttccacgtccgcagctgcccccgatcccctcctaggatggcgctcacctaccatcaacgtcgtggccgcccccgctcccctcccaggatggcgctcgcttaccttcaacgggccgaaccttccatcaacgggtagaaccttccatcgaccgacgctcaacccagatccccttccaccgacggttctgccccaaccccacccacccctgacatcctccactcagcttcgctttcgtcgatgcaaggtttag

SEQ ID NO: 37883 - DNA, 525 bp, Zea mays
  Peptide Sequence Number=SeqID_81258
atgcaggccatacttttgattcacgtgtcagctaaatttaagagcttcacgattgaaggctcttctcacttaagtgttgcgtatcctagccatgctctagatatggttcccataagaacacttcagatgatcgcaaagattgttgtggtatgtaatgatccaatcattgcccactctgagcatcaatatgttgctactgggatgcccatagaagctgctctgaaggaagaggaaattgttatagctatgatcttacttttctgggtagctgttttgcacaatagccggaggggcgcggagggaggagggaccaaacaggggaggaggggaaggcaggcggtacgattgatgagccgtgtggttgtcatctcggccttcgccgacggcctgtacgtgtacacgctcaccgggctcacttccaaaagtcgggagtcttatgctaatactggcgtcttacccccttcgccgccatcgacatgggctgtggagacacatcaagggaaggtgtggcggcactgggactga

SEQ ID NO: 37884 - DNA, 1593 bp, Zea mays
  Peptide Sequence Number=SeqID_81259
atgctgtcatttgtttcatccaccgatctaacaaagcttgaagaagctctattggatattaattggatcaatgctatgtatgagacgcccaagtctatgtggatgatatcatatatgggacaacaaatcaagaattttgtgaataacttagagaaatggtggctcatgagtttaaaatgggcgacatcacggcagcgggctcttgaaccaccagaacttctactcaccacgcacggcaatctgccctccgtgaccgccactgagaacgccgacgcgctgctcgggcagggcctcctcgtcgcgcggctcaagccacacagtgacatgagttacaacccaagcgggtgtcacaagctaggcattgtaaatgttggtggtcactgccagccaattctggaccacaagcaaaacttgggagatactaatctctgtttggattttgttttcgatgagctggatgatgtgctgcgctactaccctcagggctaccatggtgtggaccgcgaaagccagcccgtgtacattgagaagctagggaaggtggatcccaacaaactcatgcagatcacctctgtggatcgctacatcaagtaccatgtccaggagtttgagagagccttcagggagaggttcactgcctgcacattggctgccaagaggaacattgactccaccactaccatcttggacgtccagggtgcggggtttaagaatttctctaagactgcaagagaacttgtgcaccggatgcagaagattgatagcgactattatcccgagacactccaccaaatgtttgttgtgaacgctggcagtggatttaagtggatctggaacagcgtgaagggcttccttgacccaaaaacttcatccaagattcatgtgcttggttcgaactaccagagcatgcttcttgaagtaatagattcgagtcccaacgagagtgcttttctgctgctcctagaacttgaggccagatcagaatggcacaaatcagtagcacaaaatgcagtatcaaagtacggaaatgaatgcattttaaacattgaaaacagcacagcagaagcagctaacaacacagtcaaaaaatcaattcgcattgatcttcggtccaacagtcattttgcccccaaaggagtcgacatatattttctactcgttgaggggtttaagaatttctccaagactgcaagagaacttgtgcaccggatgcagaagattgatagcgactattatcccgagacactccaccaaatgtttgttgtgaacgctggcagtggatttaagtggatctggaacagcgtgaagggcttccttgacccaaaaacttcatccaagattcatgtgcttggttcgaactaccagagcatgcttcttgaagtaatagattcgagtgtaattgcattagccttggacttacgcttggagcaattgctggtgttctgtcgaggaatgagctcgtcgctgcagctctctgcactcttgcaatcaatcacaaacagacccattacgtacaaactctcacaagcgacctcctttgagcttgcagttcatatgggcgcaacagcggttggtgcagtggcgcccgtgtga

SEQ ID NO: 37885 - DNA, 309 bp, Zea mays
  Peptide Sequence Number=SeqID_81260
atggcgttgttgccgccgccgcctccctcttccctctggccgccgccgcctggcacctgcacgcacgccgcggcccccaagcgcccaactgcggagccaccgtcgccgcgggcgactggacagcgccgcgccgcctggaagcacgcgcccgcgcctgccagggctggtgctgcgcccgcgtcggtctccctggccgcctgcgtcgcgcgcgcgaggtcgcgcgccctggccgggaaccacgaccgtggggtcgcgcctccgaccagcgcaggagccgcgccaaggggccgtccggccgcctctgcctga

SEQ ID NO: 37886 - DNA, 363 bp, Zea mays
  Peptide Sequence Number=SeqID_81261
atggcgcctcctgttgacgtggctggcctgtgccctaagttgggcgatgtggaggctcctccgaagccgaggtcgagtctgtcttccgtggccgaggccagggcggagtccgagccctggggtcgggcgaagcggagcggcgttgtccttctatcaggccggtcagtggagcggcaaagtgacggcggtcacttcggctctgccgggggggcctcgggcgagccggaaatatgttcgccgtcggaggggggcctcgagcgagacggaaatcctccggggcctttgcagctttatgctgatgggggttaccagctgagaattaggagtcttgagggtacccctaattatggtccccgacagtag

SEQ ID NO: 37887 - DNA, 855 bp, Zea mays
  Peptide Sequence Number=SeqID_81262
atgtctttcgtgctttttgactacttcgaaaagtggatcctgaaaacgacggagtacacgagacacacgctacaagacaatctgatcctgcaggctcgggtcttgacgctggaagggggcagcaacaccctcggcatcgacgacaccatcggcgagggtctcctctgggaacccggcccgagcgggcggctcggccggtcgccccggggcctcggccagccttccaccgagggcgccagcccgacccgaggcgtcggagcgtcggtcccgccaacggacgacccgactaggctccgaccaaccagcgacaacaacgacccccgctccgggtggccgaactgcagcagcgcaggcctcagggtgggcgctgctgtaatcttgccctcgcccacgccaatgctcgaggggcgaggacaagggccgtcagccctccggcagatccccactcaaatcctcccggacgagtgggacaccgacctctgcgcggaggcgccataccgccgccttccggcaggaggggccaccgggagccaagtcaacgagctcgacacgctggggctgacgacgcccgccgtcgaccagccccgcgttgtcgaagtccgacccgcccgcagggccagcgagcgccctctccctcgaacaccgcaggagagggtgacccacgaacccgcgcgggaggtagagctccggctcgacccggcctccaccctagcgaggatgatgaacatccttgaagctgagggtgggaccaagatcgcagcccgcttgcttcttcccacccaggggctggtggtcgccgtcttgggtgaccaccggcgggggagtacagccgggctggctgatgaaaatccttga

SEQ ID NO: 37888 - DNA, 174 bp, Zea mays
  Peptide Sequence Number=SeqID_81263
atggacagtggtgatcaaagcgttccacacaattgttgcaaatggaacagtgtgaacaccgaggtggatgtgaagcacgaggtacaattcccggatcccgagcggcagtggttaagagtaatagaagcacctacaccaaaaggcaaaagtgcaggcaagaacaggcaaatttag

SEQ ID NO: 37889 - DNA, 1923 bp, Zea mays
  Peptide Sequence Number=SeqID_81264
atggcgcgctcttgctccaggacgagtgttgcggcgcgctcgcggtcgcgggaagcagcaacagccgcctggatggtggcgatggtcgtgacgagcgccgaggaagcaggcgaggaggtagtgacgccgggccacgtaggggccgcaagggcggggaagctcggaggggaaccgtggtgcggctgggcaacgatggtcgcgtcggggaggggcccgaggtcggtgatgtatggggcccctccaacagcgagctcgctgtgggagtcgaagccggcgtcgacgctctggggggcgaggccggcaacagcgagggcgacggttaactgggtcaggcccattacaaggggtgcaagggaattcaacatatgctttaccactgtcgagcgttcttctgatggcagtgtacctaatttgccagcatcaaaagttactggtgttttacctgagttgctgaggagtttggtggagaggagaaggatggttaaatcatggttgaagactgcttctggtcttaaaaagcagcagttcgatattcagcaacaagcattgaaacttactgcaaatagcatgtatggttgcttgggcttttccaactccaggttttatgcaaagccacttgctgagctgattacactccaaggtagagagatattgcaaaacactgtagatctggttcagaacaatttaaatttggaggttatctatggtgatacagattctatcatgatacatactggacttgatgacatctccagggcaaaagcaattgcaggaaaggttattcaggaggtgaacaaaaagtaccgttgtctggagattgatcttgatggcatatacaagagaatgttacttcttaaaaagaagaaatatgctgctattaaagtagcactggatggcagcttacgagagaacattgaacgcaaggggctcgatatggtcagacgtgattggagtttgctgtcaaaagacattggagatttttgtcttaaacaaattctgtctggagggacatgtgatgatgttgttgagtcaatacatagttcacttgtccaggttgctttgagactcaagcaaaatggttactctggttgctcagctggtgacacagtaccttatataatttgctctcagcaggactcagataatgcacattctgtgggaatagctcagagagctagacatcccgaggagttaaaaagagaccctgacaagtggatgattgacattgactattatttatcacaacagggcactagtccagctcgtctggctgaatgtctgggccttgattcggctaagttccaaccaagattgactgagtcgagcaaccaagatacatctatgatgctgttatctgtaatcgatgacgaagatgagagatatcgtggttgtgaaccactgcgtttgtcatgcccaagctgttctggtaccttcgactgcccccctgtatctagtctgattactagtgctagtgctacaagtgtatcagatccaattgaaggaaaggatgctactgctaatttctggcgccatatgcggtgcccaagatgcctagataatactgttgagtccaaattttccccttctatgctcgccaaccagatgaaaagacaggctgataatttcattagtctatattataaaggtttgcagatgtgtgacgatgagggttgcaaatactcgactcacagcgtaaaccttagagttatgggggattctgagagaggaactgtctgtcctaactacccacgctgcaacggtcgcctagtaagacagctggaccagaaggcaaggctccccttcgagagagagtttgtagcagtaggccaaacaattaaattggcactgctagagatccagaaaatccgagacagatgtgcatttggatgggttcagctaaaggaccttgccgtatcaatatga

SEQ ID NO: 37890 - DNA, 3159 bp, Zea mays
  Peptide Sequence Number=SeqID_81265
atggaaggctcacccgccgatgccgccggctccggccgccgcacgcgcacccggggcgcggaggcgtcggggcgtgccgccgtgctccaacaactccgcgccgttcgcagtggtcaaattcgtgcctccgacgccatccaggtgaaggttgacgccccgatttacgacaccgtcccggaggaggagtacaacgtgctcgtcgctcgccgccgcaaggaagcaggcgagttcatcatcgacgacgacgggctcggttacgtcgaggacggccgcgaggaggactggagccaccgcgctctcccttcctcctccgacgagggatctgaaggcgaggacggcgccccccgcaagcggaagcagacgcgccctccccaggcgaagcgccagccgcagcagtccgccaaggtggcctctctctccgccgctgccgcaaagacgggccagcagatctcctctatgttcacatcctcggtatttaagggacgcggcagcgaccgcgccaagaacttggcactggccgccgacagcatcgtggacgacgtcatcgccgagtttgcacctgacgagaacgaccgtgaggagaggcggcgacgggttgctagggtttgtgcgccgcagcctgtcccaacagtttcctacatcaagcctcaaaaggtaattctcgatgctgaaatggtcagatcggagaatgaaaatgatatggtggtggaattgaagaacgatactgagatggaaaccaatttggaagaaattcctggttctagtgctgaattggtggttaataagagtttggaggagccgaagcaggaggataatggggaagtaaagatagaaaaggcacaccgcctcaatgcaaagattaaggcggaggagtgcagaaataatgatgtgacgagtgcaacagaaggatggatgaagatatgtgggaatggggagaatgcagtaggtgaagaaggggtggctgttgatggtaacaccaatgtggatgaaagttcagagtttgagctgaaagatggagcactgcccttctacatactggatgcatacgaggaaccatttggtgctaattcaggcacagtgtatttgtttgggaaggagttggcatcaggattaaagagtgaaatagctgacaaattgtcagacctcaatgtgtcaaatttcataatgactccagtcaagaggaattatgcatttgagaggactgatctaccaaatggagagcagtatgtcctaaaaatcaattatccttacaaggatcctgctctaccagcagacctcaggggtgaacattttcatgcattgcttgggacaaacaatagtgctcttgaattgtttcttatcaaaaggaaggtcaagggaccttcatggctgtcggtttccaagtttgtgacacggccatccactcagcgggtcagctggtgtaaatttgaagttacagttgattgcccaaaggatatatctgttttgacaacaagtacaaatctagaagttcctactgttgtagttggagcagttaatctcaaaactatcataaatgagaaacacaatgtgcatgagattgtgtcggcatctctcatatgttgtcatcgggtgaagattgatagtccaatgcgtccagaagattggcagaaacggggaatgctcagccattttactgttgtgcgcaaacttgaaggtagcatatttcctataggtcttgctaaggaagcttctgataggaaccagaaggctggtagcaacgtgctagcactagaaagcagtgaacgtgcattattaaatcgcttgatgattgagctgagcaaacttgattgtgatgtacttgtgggacacaatatttcagggttcgacttggatgtgcttctacaccgtgctcagacatgcaaagtgccaagcagcatgtggtccaagattggtcgtctcaggcgatcattaatgcccaggcttaccaaaggaagcacactctatggttctggagcaagtccaggaattatgtcctgtgttgctggccgtcttctctgtgacacctatttatgctctcgtgaccttctgaaggaggtgagttattccttgacacaacttgcagaaacacagttaaaaaaggtcaggaaggaggtttctccacacgatatacctatgatgttccagtcttcaggcgaactgctcaaactggttgaatatggtgagacagatgcatggctttctttggagctcatgtttcatttgagtgttctcccactgacacgacaattaaccaacattagtggtaacctgtgggggaaaacactccagggtgctagggctcagagggtagaatatctactactgcattcattccatgcaagaaaatttattgcaccagataaatttgcacgcaacaaagagctgaactccacaaaaagaaaaatgaatcctgatactgggggtgcaaatgctgatgatggtgctgctgatccttccgttgatgatgaagtgcataatggtgatcaaagtaaagctagaaaaggaccttcatatgctggtggattagttttggagcctaagaagggtctatatgacaagtatgttctacttctcgacttcaacagcctttacccttcaataattcaggtcgatctccacatgcttcgtgcgctgatgctgcacgggattggtggagaggtagacggcgtcgacgttgtcgcagtagacgagggtggcgcgttgaagggggctgtggagcttgtggaggagctggcgcatccaggaggcctctgccacgccgttggccacaacgcggtactcgacctttgcgctggagcgggagacgacgggctgccgcttggcggcctaggagatgaggttggcgcgcaggaatacgacatagccggaagtggacctgtgcgtgtcggggcagccggtccagttagcgtcggtgtagaccacgagctccgacgttggggatggtcggaggagcaggccgtagtcgagggagccgcggaggcacccctgcttaacggcgtaggcgatgttgggtcgggagaaggtgaggtactgaagcgcgctggtcaagctctggaagagaccctggggccggcgttcgacggtaatgccgaggaagtgatggaggggcgccaggtccatcgcaaactcccgctggagggcgatgatcgtgcgctgtag

SEQ ID NO: 37891 - DNA, 288 bp, Zea mays
  Peptide Sequence Number=SeqID_81266
atggcgagctcgtcggtgctcgccgtcccctccatccctctccctcccccgggcgcctataaaaggacccgcccgagccccgtcttcaccacaccagctccggccatctcctccgccttcccccgagccaatcgagctagcgccgctgtgcttcccccgtcgctccgctccgccacactctcacggtcacaaggcaccacttccccccctcctattgtgaccggcaaccgcaccgacgccatcaccgccgcggacatccgccaccgtgccgcggaccggccgccatag

SEQ ID NO: 37892 - DNA, 1200 bp, Zea mays
  Peptide Sequence Number=SeqID_81267
atggacgctgaccgcgtcaaaccaggctccgagtgcgagtgcgtgaaccacgcaccacagacacatgtccggcccgacgacgttcggtctcagccgctcgcttgcttcatccggacctcgccaccatgtcggcacagcctggcggaccagcgcggaccgcagggcggcggcggagcggggtggccggcgaagcggcgcgcgggaggcgtgcaggacgagggcgcggccgcggccgcggggatggcaatggcggccgccggccccggggaggtgatgtccgagtactaccaggcgcaggagctgtcgacgatggtgtcggcgctgacccacgtcgtggccggcgcgccgatggggagcgcccctgcgcagcggccaatgcacggcgcctccggctactacgcgcacgagatggggagctaccgcggcgcgccatcgccggagctcgcagggtcggagctgagttcggacacccagagcgcgggcgcggcggccatggaggagcaccagtcggcagctgcgctgtccagccaggagggtcccgagacgccgcggaggcgctaccgcggggtgcgccagcggccgtggggcaagtgggccgccgagatccgggacccgcacaaggcggcgcgcgtctggctcggcacgttcgagaccgccgaggccgcggcgcgcgcctacgacgaggccgcgctccgcttccgcggcagccgcgccaagctcaacttccccgaggacgcgcgcctctacccggcgtccacggcgggcgcggcggcgcctctcgccgcggcggcctcgacctccccacctgtctactccggtggcgtccagggctcgtcggactacctgaggtaccaccagatgcttctgcaagcgtccacgggcagccagggcaccctgctcccgttctatggcggcggcatgagcaatccctacggcggcggtgccgccatgaccggttcctacggtggagccggcggcggcaacacgagtggttccttgggctcctactactcgttcccggcctcctctgtttctgtcgccaccgtgccgtcctctacttcctctgcttcggggtactactactcgtcgccgcacgactcgcaacacagcgaggcgtccgcggcggcggactggaactgggagagcgcgctggcctggcccgactcgagccagtacccgccgccacctcacactcagtag

SEQ ID NO: 37893 - DNA, 594 bp, Zea mays
  Peptide Sequence Number=SeqID_81268
atggcgagctcgtcagtgctcgccgtcccctccatccctctccctcccccgggcgcctataaaaggacccgcccgagccccgtcttcaccacaccagctccggccatctcctccgccttcccccgagccaatcgagctagcgtcgccgtgcttcccccgtcgctccgcggaagagggatccgatcccccggaatttatagctccggaagaagggcaagaacccaacccctccgagataaacctcttgtgctaggaaagcttcgacgaaggcaagtccgtccttcccttgatgcattatttacctatttctctctaccactgcctaagcctggaatatgggatgggaatcgaattgcatgtctttcccctgtttgcgaggaatctccacaacttggagcctctcgcccttacaatgatgatcacaaaagaagcacagaaacgaccattacacctccaggccagttggcgcaccggacactgtccggtgcacgccggacaatccggtgccccctgccgaccgttggtgcgggccatgtgtcgctcgcggattgcgcggccgatcgttgcgctggcgaccgttggctcaccggatag

SEQ ID NO: 37894 - DNA, 606 bp, Zea mays
  Peptide Sequence Number=SeqID_81269
atggcaatgtctccgctgccccgcatcgtgctcctcctcaccgtcgtcgccgccgccaccgcagtggggctcatcccgaactccgtcgcctcctacagcttcgacgaggccacgggcgccttcgagatccacctcgccggcacctgctacgtccacttcggctcccacctcgtctactacgagaggaccataaccggcaagctctccaagggcgccatctcggacctctccggcgtccaggcccagaagctcttcctctgggtctacgtcacggggatggtcgcgctccccgaccagggcaccatcgagttccagtccggcttcatctcggagtcgctatcggcctcgatgtttgacgaggtgcccacctgcggttccagcgttggcgcgcagctgcgcggcgcgactggggtgatcggcgagcttgggctgctcccagttgcacaggtcgaagttatcgatgaaaaactagaaggtcgcggcgacggcatgaagacaacacatgacattgaagatagatttatggtcaatgggacggtggggacgacacaaaacggtagccgaaatatggttttcgcgatggatttagaaccaacattgatttag

SEQ ID NO: 37895 - DNA, 324 bp, Zea mays
  Peptide Sequence Number=SeqID_81270
atggacgagcagtgcaaacaggacaacaaggactcgattcggagaacaatcgtggagcatgataaggtcttcaggcagcaggtgcatgagctgcatcgtttgtaccatgtacaaaaaacattgatggctgaatgcgatagccacaggtctctgcctattgacctggagccgagagtggtcaatggaatccataacagcgagtacaggaacctgtacaaccacgagaacatatttgtcgctgagcatggtggtggtgccgggaacaactgggccagtgggtatcatcaggaatacatgttcaaattccttttcatattatcatag

SEQ ID NO: 37896 - DNA, 408 bp, Zea mays
  Peptide Sequence Number=SeqID_81271
atggcgctttccccccttcctccttacggagaggcgacgaaggggcatataacaaaagtcgagatggtcattgatcgtcctctcgctccgtgcagaggctcgggggctgctctcgcaacccggcttctgaaaggaagtgtggaatacagcgccgctcaccctgctctgactgctgtgccagccacccgggcaaggctgacaacagcaacttcagcctcgggcgcaacaggaagctccgcctcgcccgaccttaggcctcggcctcgggaggtctccgcctcgcccgaccccaagactcggcctcagcctcggcctcgggaggaatcacgtccttgcccgaccccggcctcggcctcaggagaagtctccgcctcacccgaccttgggctcggaccaaccgcgccatag

SEQ ID NO: 37897 - DNA, 309 bp, Zea mays
  Peptide Sequence Number=SeqID_81272
atgggtgactcgccgaacgccaggggggtttgggtgctcgtgcggcgcggctcttggatggtgatcctctggggtcgctgggagccgtggtgtgttgtaagcttgtggccgggggcgattcatgcgccagcgggtggaattgctcgtcggagcggggaggcatcaccgtcgaccgccttctaccgtggacagctattggagcctggtgccgcaaacctgatgttcgccagtgggtgcgccaccgccgagctcgccgttgtggctcggctccatccaggggaggaaggacgggtctcggccgttggatag

SEQ ID NO: 37898 - DNA, 534 bp, Zea mays
  Peptide Sequence Number=SeqID_81273
atgtgggagacttggtacttcggctgcgacaagacgcccgaggaaaagtcttttgccataacgtctttcgcgctttttgactgcttcgatagcggggtcctaaaaatgacgagagtacacaatccggcccggcctcagacggcgacacgggcggaaggatttccacctcgaaggaggacgccggcaccgcacttgggccctcacggccaggttctccgcaagggttctagcccgagcggacgcctcggctggccactccgtagcctcagccagttgtcccccgaggacctcagcccggctcatggcctcggcagcgagactccgaggttggtcccgctagcgaacgacctggccaagctccagccgccactgctgcacctcctcatcctaggaagccacatgctcctgggccgacgaaacctcttttcgagccgactctgcctctgtccacgccgacaccgctgcctctggcttcagctcatcgcagagcggcggaaggttctaaagctgagcaagagaagccttgagcggtaa

SEQ ID NO: 37899 - DNA, 744 bp, Zea mays
  Peptide Sequence Number=SeqID_81274
atggggagcacccgtgttaccttcttcttgctgctgttggaggagcgcgacctcgcgggggttggcgctcttcagacatcgctcggcttcaaggattttcatcacgcagcccagttgcagtccctcaccaatggggggcgcaccgagttggggcctgcctccgcgtgggctggcgacccgcttcttcctccggcattcaggggagaagggcatcctccagctctacggaggaggcatcctccagccatgcgggtaaaggcaaactgctgctgccaggatagggtgcagttgtccgtcttccacccgggcgacggtggccggctgcaccggggggtcgcacaacacgtcgtatgccgcgagggcggtactcgtgttctgggacggtcccgttctcgttcttgtggcgagagcgggagtgaggacctgccagtgcgctttggggcggccgtcgctcgctggtgcggtgttggtgggcaggtggccgctgtcggtgaggctgcctctgtcgaagcggttgcttccaccgacgagaccgtccgtgccacctgcgctccagacctccagctctttggctttaatggctggttctcgtcccccgtgaggggacgtgaacgagggcctttcagcagcagcgtttgccctgaggccatcgctgcagctgtcttgccgcccgagactgaggccgttgccacgctgttggtgcagcggtcgccagcaagccacctggagtttgttatcccatag

SEQ ID NO: 37900 - DNA, 207 bp, Zea mays
  Peptide Sequence Number=SeqID_81275
atgggtaagaacaacaagcgcaagcgtgagccaactcctccatcggaggattttggtgactcagaatactcagaggaggagttctcctctgagtctgatgggtctctggctctcatccctctgcagtcaactgccgagcgacttgagggcgacgccagcgttttagaggtaacgccgggcgatagcgggctgcgtgggccactttga

SEQ ID NO: 37901 - DNA, 1707 bp, Zea mays
  Peptide Sequence Number=SeqID_81276
atgggggtcggctgggaaggttcccagggtcaccggagttggactgggagtcagccacgattgccagaggagccacccagcaggtaccatgctatccacaatgaagtttacaagtggtttaacataaaatttgacaagtttgggcggacatcttctccagagcagacagaaatctgccatgcaattttccataaattgatggaaaacaattggctcacagaaaatactatgcagcagctttactgcgatatgtgccaaaaatttctagccgataggcttgttgaaggaacatgcccaaacaaagtctgcaacgcatcagcacgaggagatcagtgtgaaacatgcagcaccttgttgaatccaacagaacttattgacccaaagtgcaaggtttgtaagaatactccacgtattcgtgacacggatcacttatttttggagcttcctctattgagagacaagctggtaaactacatcaatgaaacttcagttgctggtttgtggagtcaaaatgctattcaagcaacaaatgcatggttgaaggaagggctaaagccacgctgcatcaccagagatcttaaatggggtgttcctgttcctcatgagaagtataaagacaaggtcttctatgtttggtttgatgcacctatcggatatgtgtctattacggcatcctatacacctgaatgggagaagtggtggaagaatcctgataatgtagagttgtttcagtttatgggcaaagataatgtgccgtttcacacgatcatgttcccttcaacgctacttggaactggggaaaagtggacaatgatgaagacaataagtgttactgaatatttaaattatgaagcaggaaaattttccaagagtaaaggtattggagtctttggtaatgatgcaaaggatacaaatattcctcctgaagtatggcgatactacttgcttatgaaccgtcctgaggtatcagatacactttttacttgggctgatttgcaagccaaattgaacagcgagttgctgaacaacttggggaacttcattaatcgtgtgctaagttttattgcaaaagaagctggagctggatatgattctgttgtacctgatgctcctaatgcgggtgaacacacattgacaaagatacttgcagaaaaaacaagtaaatgggttgaacaatatctcgacgcaatggaaaaggttaaactgaaacaaggactgaagagtgcaatgggcatttctagtgatggaaatgcgtatctgcaggagagccagttttggaaactttacaaggaagatcctgcagcatgtgcgatcgtgatgaaaacttcagttggccttgtctacctgcttgcctgtctgctatcacctttcatgccctccttttctgatgaagtattacgtcaattaaatttatctccagaagaaaatttgtcattaagtgaagaaaagggagaaattgcaaaggcaaaatctccttgggattttgtaccagcagggcacagaatagggaagcctgcacctctgttcaaggaattgaaagatgaagacgtagctctccatagagaaaaatatgcagggagtcaagctgagagaagctcaaaagcagcagctgatgctgaagccaacaaagttgctaatcagctcaagggcacaaaattatccggtattgatctggacattcttatttattctccttatgctggttag

SEQ ID NO: 37902 - DNA, 531 bp, Zea mays
  Peptide Sequence Number=SeqID_81277
atgatgagaagattaaagagaagggaaaaaagcatgtacaaaacactcgagagataccgcagctccaactactcacaagaagtaaaaactccactggacactgaaattaaataccaggattatctcaagttgaggacaagggttgaattcctccaaactacacaaagaaatattcttggggaggatctgggtccacttagcatgaaggagctcgagcagctggaggaccaaatagagatatctctgaagcatatcagctcaagaaaggaacaagaattgctggatctcaataaagacctaaggaagcagctgcaagaaacaaggccagagaacgcgctccgtgtctcctgggaggaaggtgggcacagtggcgcaagtgggaatgttcttgatccttatcaggggctccttcagcacctggacaacgatccttccctgcagttcgggtaccatcatcaagcctacatggatcagctgaacaacgaggacctggtggacccgaatgagcatggtcgatctggatggatatga

SEQ ID NO: 37903 - DNA, 789 bp, Zea mays
  Peptide Sequence Number=SeqID_81278
atggctacacccccgcctgcccgttgcccgtggccctgcccccgcccccgcgacgcgctctgccgccgccacagagtagccggcgtcaaagcttgcccctcccctaccctccccgccatgcccgcgcccttcccctccaccgtcgcgtccgccccccgagattgctacacgccatggtcggagttccgtgtcccgtatcccctcccacctcgagatcgccttcgatctgtcatgctaggaggtccgcaccccaccccacccctagatgcctacgtgcacgccgtcgattttgcccgcctcacctcctcgctgccccccatttcttctccaccaagtctcgttcccaacccaggccctcgtacccacagtcgacctcgaaatcaaggcggcgtggacaatgcaggtgccgaggtggaggcagggctgggtctggaggcgatgcgcttgcaggacggacacatggagagggtggtggttgggaggcgcatgaagaagggtggcgccatcttaagcgcgcagctctacgcggattgctccttggagaagcgcagattcttgcatgcggacacaccctcgtcctcatcgctcgcgcgagacaaggaccgctcgtcgtcagcctgcgccgcggcggccttggcgtgggcctatgggccacccaggtccagcgggaaggaccccacactgtcgttgggcgacgacgacaaggctgccgcgtccgggtcctcctcctcatcctctagcgctagggcgctccctgccacctacggcgcctggttcacgtcgtggtga

SEQ ID NO: 37904 - DNA, 984 bp, Zea mays
  Peptide Sequence Number=SeqID_81279
atggcgtcctcctctgctgccgagtccagctcccgcctctctgatcgaggtacgctggctacgcctgatattgtttgtgggttgaaaattcagcgattattaggctccgctcgattcggtgcttcgttgtgtccatggggggttttgagttgggcctctggaggcttttatgcagcgaggaggtcggcgctgggactcagattcatggtgctcctgatgcacgtgctgttcgttggcgctgtcttcatcctcgatccgaccctcgactggcgaatccacggggagccgtggtatatagggttgtatggagtgcttgttctgctcacgctagtgcaatacttctatacagctggctcatgtccagggtatgttattgatgtaatgagagctggttccatgatgcatgcaaccttcgtcaacactgctgctctttcaaagcagtcaaattcaagaaatggaaacataaattctccgacgagtcgtgctcaactacagaaacttagcacgatgactcctacatcttcatgggcacagatggttatggatctttatcctccagggtcaagcagcaggtggtacatatttgaagaaacaatcttgtgtatctggactgctgctctctgcatcgagtcattgtgtttagatgtggacaaggcctggtggaaggactttgttggtgttatcctgttggcagcgcttatccttatcctgatattcctactactattgtggttatttcattcgtacattgctctaacaaatcaaacaacctacgaaattgccagaaggaagcgaatattctacctaaggggagtccctgaaagagttcttccattcagcaaaggcatatgcagaaatctctacgatttctgctgttctagccagaagggatatattctggaagctgtgcccccaagtgaagagctggaagctagagctgcccgttacacgtgccgagatgtcatttgctgtcgttgctgctga

SEQ ID NO: 37905 - DNA, 486 bp, Zea mays
  Peptide Sequence Number=SeqID_81280
atgaagaatgcacctgataactcaaaaagcattgaaagatggtgcggaaaaaataaccgcaacataaaacggagttggtggctctgggggaacacgatttctaagggatatttcaaaaccccccggccgccgttcctcgccgtggccaacaagcagatcttcagaggtctcctgggactgggagtaaacttcgcctctgcagggtcaggcattcttgacacgacaggctgccgacaccctgctgtcgcgcttcctgttcctcatcagcaccggcggcaaagacctgttcgccttcttctccagaaccgagcctgctgcctgcacccgctcagcgcctgcatcgacgtcctcaacgagctggcgcgtgcgttcaacaagggcgtcaaggcggccatgcacggcctcagcttcttgagcttccaggccggggttcaggggacaatggatatgcatggctgtgttcattatcacccgaatttacattag

SEQ ID NO: 37906 - DNA, 2262 bp, Zea mays
  Peptide Sequence Number=SeqID_81281
atggggtgcaaagggtccaagctggacgaccaggaggccgtggcgctgtgccggggccgcgccgacctgctcgcggcggccgtgcgccaccgctacgcgctcgccgacgcgcacggcgcgctggcggactcgctcgcgtccgtcgccgcggcgctccacctcctcatgaccgccccgggccagccgcgcctcgcgctccccgccgcgcgcaaggccgcggacgtggacgcgccgcccgccgccgccgccgcctccgcctcgccgccgcactcctcgtcgcacatcaacttcgcgccgtcctccgactccgactccggctccgtcacctcctcgcccccgcgccgcctcgccgccggctacgaccacctctcccaccaccacccgctcccgttcccgcactacggctacggctacgcgcccgagcccccctacggtgggtacccgccgccgggatcgctgcgcctctactacgcgcgtagccgcccgcccccggcctcggtcgccatcgagcagcgcgccccgccgtcggagcgcgtgtaccacgggtccgtcgaaccggcgggtgggcacccgcagtactactcgtacgggggcgagcccgcaggcagggcggccgcgccgccgcccccgtccccgccgaggaccacctcgtgggacttcttcaatgtgttcgccgactacgacgtgtacgacaactactgctacgacgacgccggcggcgtcggggccacgtcggcggcgtacacgccgagcaggagctcgcgagaggtgcgggaggaagagggcatcccagacctcgaggaggaggacgccgtcgtcaagcaggtggccggcgagttctcggcgcccgggagtggcgcacgcagccggcgcagctcgatcggcggcgtcagcagcggcattgcccaagtcgaccaagaggacagttctgtcgtcgataagcaagtcattggcgggggtaacgtggcgccggcgcaacgtaacactgcatcctctgcgcccacaccccgtaggcccgtcgacactacagacgttgccggggagatcaaggcgcagttcgttcgagctgcagacgctgtcagggcactttcaccacttcttgagatcgggaggcggaggtaccaccaccgaagctcagtgtaccatgtttcatcaagcatggtgtcagcgattgccttgccgcattcggacgttggaggcatcgaactcctggacgttggaagtgagaaggtgttgggaggaagaagcctgtgttcgacactggagaagctctatgtctgggagaagaaattgtatgatgaggttaaggctgaagagaaaatgcgtctgctgcttacaaagaatgcaaagcggctgaagtacttggatctgaaaggtgcagaagctcagaagatcgatccgatccgaaatatggtcaggaagttgtcaacaaaattaagaatatctgtaagagtaattaccaaggtctccaaaaagataaacagagtaagggacgaagaattgtggccacaaattaatgccttaatccaagggtttgtaagaatgtggcgagacaagttggactgctaccagatacagtgtcaaatgatctcagaggcaaaaaatctggattcaattgttcctcatggaaacaatcgagacttggcattagagcttgaactagagatgatgaaatggattgtcaatttttcctcctgggtgaacgaacagaggagcttcgtcaaggcgctgaacggatggctatcactttgtcttgactacaaagttgacgagacagtcgacggagttcctccttattcacctggaagggtgggtgctccccttgtgtttgtcatctgcaacagctggtctcaagccatggatcggttctccgagaaggaagtggttacctcgatgcaagctcttgtgtccagtgtgcgcaagctgttggataaacagaatgtggagcaaatggagcagacgatcgctacacgggaaagggaaaaatggaacaaaatactggaaaagaaaactgtggagatcaacaaggaggcagatgtgttgaacaggaagttggccctgataccaggtcggcacagccggcttccaagcgcgcaaacataccaggaacatcttcttgacgcaagcagtttgcagagtagcttgcaccgtgtcgtccaagccctagaaagcttcacctccaattcgctgcaagcattcgagcagaccctgagacatgccgaagaggaaaggtcgtccagggagagcgccaaagtttcatag

SEQ ID NO: 37907 - DNA, 132 bp, Zea mays
  Peptide Sequence Number=SeqID_81282
atggttgattatgctgtgaactcctatccatttgctttcaggtggatcgtcttgcaaacgcataaaaagcccaattatgtccgctaccggttcaacgcagcgtgtgccgaggatttctactgccgagcataa

SEQ ID NO: 37908 - DNA, 1296 bp, Zea mays
  Peptide Sequence Number=SeqID_81283
atggctggttcattgggatgcacgcggcctcttctgcaaagccaagcatggatccttgccatgaagaagcgccctatagcgggacgcgatcgagcgcgccatcagggcgcccctgggcaccgtgctccgcgaccacgcgctcgtgcacctcccgccggtcgccgcggcgcgcctccgcctcgtgcacccgtcgtgggcgcgggcgctcgtgtcgccgctcttcgccgtcgcgcacgccaccaccccgcgcagggcctcgggcttcttctccgcgtccgcgcccgcgggcttcctcccgctcgacgctgtcgacaccgtgccgtccccggcgctggccttcctcccggcctcgtcgacgcccgcgtgctgttgtcctcgcacggcctcgcgtgctgcttctccccggccgacgatgcctacttcgtgtgcaacccggcgacgagggcctggcacggcgacccatgcccgccgtgccggatcacctggccacgccccgcggtcgtcgtgctcttcgacgtcggcgtctacaacttccgctgcgactacacactcgtctgcgcctttgagtcggcgtcggggtccggcatctactgcttcacggtgttcgcgtcggggatcggcgcgtggcgggtcgccaacgcgatcgcgcctgccgaggggctcgtccccgcctcgggcgtcgcggctggcgggacggcctggtggcggacggacatcagcatcgccgtcgggtacaaccctgccatgggccgcgtcgacctcgcgttgtgccccggggacagcgcccggtgggagatcggctctgtcgtgggcaggctgcactgcgtcgttcgcgacggcggcaacgtcctggtgttccggctcgacgacaggcgcggtggctgggagctggccaccgcggtctccgtctgcgagatactgcagcggccttggcaaccggagaccactttcgagctgtccgactccgaggacgacgacgaggaggaggcgacgggtcaggcagagttggaccacacgggtgctgtcattgccgtggccaacaggtacagcaggagcagggtacgggtgccgagagacgacgtgaggctgctgccgttccagtgcggcgatgtggaggtggtgctgctgtccggctggagagtggtggcgttcgagacggtgacacggcgtcggcgtgagaccgtcctgccggtgccggatcagctggccgccaaggattggggtgctgtggagtacatcgcgcacaccaacacgctcgagctggtcgggcccgtggtgttcatggagcctccgtga

SEQ ID NO: 37909 - DNA, 354 bp, Zea mays
  Peptide Sequence Number=SeqID_81284
atgcggctatctgtagtcgcgtggcaagcagtacctgaccctacaacatggacggctccggggccgccacgtggccaagaaagacaatatactccaaggtggcgacagtgggtccggaccccccacgggaaagtgccggacccctggatgcacagcccggaccaccaggcgaggtttaggacctccacaggcggcgtgcccgtccgctccggtggcaggcagtacgcccgtgctgcggcatacactatgctcatcatcactcgtatgttgctagtgaagcttccgttgcacgccgatactacgcaggctgcggatatcagggcgcaaggagattgctctggcgaccaacattag

SEQ ID NO: 37910 - DNA, 390 bp, Zea mays
  Peptide Sequence Number=SeqID_81285
atggtgaagcacgagataagcgaaattgaaaaatcaagggcacaaaagaatgctgaagagctccgtgactctatagagagatgctatgaaatatccttggaatgtgccaagaatctaaagaacaattttgcaaaggtgggagtatactctttcgagcagaggttgatccacggtgaccctgatggagtcgtccagtggatcagcggagaagtcaaagcctttgacgaaattttaactgaactttcacctccatcgaagccatataaccccgaagctgacccagccatgaaggaggcgttagatatgataagaatcgctaatgatgctgttgacgaagccgtcgacaaactgctgaatgaagctgatgataaggtgttgaaggaagactaa

SEQ ID NO: 37911 - DNA, 393 bp, Zea mays
  Peptide Sequence Number=SeqID_81286
atgggcaaaaacaacaagcgcaagcgtgagccaactcctccatcggaggattttggtgactcagagtactcagaggaggagttctcctctgagtctgagggttctccggctcccgtccccctgtgtgagtcgtctgacgactcaaacgactcccagggactcgcggcgaaggtctggacgtacattcgggccgtcgagcgctccgggctcgagggctcggatgaggaggactcggacggcggtggcaaggacgaggacgacgacaacaacgatgaaggcggtggcggcggtgacggtgacggcagcggcaggggcggcagcggcggtggcggcagcagcggaggcagcaccaggggcggcagcggcggcggcagcaacagggccagtggctag

SEQ ID NO: 37912 - DNA, 162 bp, Zea mays
  Peptide Sequence Number=SeqID_81287
atggaggctttgaatgtgtcttggaatggattgctagctcttgtattgaatgttgaaggtatcgaagagtcggcactctccactagtcctcgttggagcacccgcgcaagggtatcgctcccccttggtcctcgcaagaaccaagtgctcactacgagatga

SEQ ID NO: 37913 - DNA, 2703 bp, Zea mays
  Peptide Sequence Number=SeqID_81288
gaatacaaatacaagatgggcgcgtcaagacccccaagcacccctgcatcgaagggtgagcacacaccgatgtcgactcctggtggcagctcaagggccaaggaggagaagatttttgttacggtgagggtgaggccactaagcaagaaggagctggctgcgaaggatgacgtggcatgggaatgcgctgatacccagacaatcttgtacaagggccccgcgcaggaccgagctgcacccatgtcttacacttttggtaataaagtgtttgggccagcttgccaaacagacgtcgtctatgaagagggagctaaggatgttgcaatgtctgcactgacaggcattaatgccaccatttttgcatatgggcaaaccagcagtggtaaaacattcacgatgaggggcgttacagagagtgctgttagtgatatttatagacacatagatagtactcctgagagggaatttgtgataaaaatatctgctatggaaatttacaatgagattgtcaaggatcttctgcggcctgactctgttccccttcggttgttagatgatcctgagaaaggaaccattgtggagaagttgcaagaagaaattgcgaaggatagccaacatctgaggcatctaatcagcatttgtgaagaacaaagacaggttggggagacggcactaaatgacactagttcacgttcccaccaaatcattaggctgacacttgagagcaggctccgtgaagtttcaggatgtgttaaatctttcgttgctaacctgaattttgttgaccttgctggaagtgaacgagctgcacaaacacatgccataggtgcaaggttgaaagaggccctgacacatgtagaacaatctagaaatactctattcttcgcaacctgtgcaaaggaagtcacaaatactgcgaaagttaatatggttatatcagataagcaattggtgaagcaccttcagacagaacttgctagactagaatcagagctgaggacccctgaccgtggctcctcttctgatatcctcataatggaaaaggacaggaagattagacagatggaaattgaaatagaggaactcaggaaacagcgagataatgcacagtcagagctcgaagaactgaggaagaagaaggttgatcaccagccagggtggaatccctttgactcgccacaaaaggcgcgaaagtgccttacattttcaggatcgctagagccaagtaacaaaaataagatgatgatgagctcgattaggcaatcatctactgctccatttatgttaaagcatgaaatccgcaagctggagcagctacaacaacagcttgaggttgaagcaaaccgcgccattgaagtacttcacaaagaagttgaatgccacaagcatggcaaccaggatgctgcggaaaccatcgctaaacttcaggcagaaatcagggagatgcaaactgttaggtctgagaacagagacatggagatgattacagatgaaggaaatggatccgatttgaaagatgagatttctagacttcatatgcaagacaatgatattgccaaacttgaggcgaagctggaaaatgtgcaacggtctattgacagattggtgatgtcacttccaaacgttgccatgccgtgtaatgagactaccccaaagtcaaacagatcaaagaagaagaagaggctgcttcttcctctgggtgtgagcaacaacatcaacagagcaaatcttctcagagcaccctgttctccccattcttctagtaggccttcggaatcagaagttgagaacagggcgccagagggtgacactatgtctgttgagggttcagaaaaggctactcccaccaagagtgaagatggagatatgtcatctcgtgatgaaacgccacgctacaggcgctccagttcagtcaatatgaaaaagatgcagaggatgttccaaaatgctgcggaagaaaacgttaggagcatcagggcttacgtgactgaactgaaggagcgagttgcaaaacttcagtaccagaagcagctgctagtctgccaggtcctggagctggaatctaacgagggcaagccgaatggagaggataattctgggcctctacaggatggtcctgattcatgggacagattattcaaagagcagatgcagtgcatcattcatctgtgggatcagtgtcaagtatcgatcatacacaggacccagttctacctgttattcaggggggacaaggctgatcagatatacatcgaggtcgaagtaagaagactcgtatggttgcagcagcactttgccgaggtcggtgatgcaagccctggtgctgttgaagaccctgcagtttcacttgtctccagtatgaaggcgctgaggaacgagcgagagttcctcgcgagaaggatgggatcaaggctgacggacgaagagcgtgagcggctcttcatcaagtggcaggtgcccctggacgcgaagcagcggaagctgcagctggtgaacaagctgtggacggaccccaacgaccaggcgcacatcgacgagagcgcggggctggtggcccggctggtgggcttctgcgagggcggcaacatcagcaaggagatgttcgagctcaacttcgccgtccccacgagcaggaggccgtggctggtgggctggcaacccatctcgaacatgatcagggagaagacccagcagctctggtga

SEQ ID NO: 37914 - DNA, 804 bp, Zea mays
  Peptide Sequence Number=SeqID_81289
atggcgctgtcctcctccggccacccggcgacgacccgcctgctcttctcgcttctgctcgtgggctcggcggcgggcttgccggagcgggcggccatcgacagggtcaaccggcgaggcccttccctcggcctcgtcatgtcctacgtcgacgaggccaccgcgctgcaggcctccggctacttccagccttggcgtgccctccctttcgttgacctctacggacggcggtatcacatcggcagcattcggggcgtgaacgtgatatacgcactgacagggcaacgcaggctgaacgccgccgtcacagtacagacgctcatcgacgtcttcagcgtgtccggcattgttcactacggcacggcagggagctgcaacgactccatctccttcggcgacgtcagtgtccccaggctcgtcgcctacacgggtgcctggacatggaaggtggaacttgaaagatgcaacgacactttctgcttacccacagctccacggattgtctacgggctgaaggggtcgtcggctgacatgttcctcgacaacgcggaatacaggaagttccttttccaagagtttggggtgtctacaatggacgaggagagcgcagcggtggtgatgacagcaacgtcgcctggcatacctgtgatcgtgttccgaggagtgtctgacttggctggaggggagccgacatggtcgtccacaagcctgatgaacctggcgtccattaatgcattaaaagtggcggtagagttcatcgctgcagttggcaagcatagttcaaccgcatcagtaaaaagatga

SEQ ID NO: 37915 - DNA, 4623 bp, Zea mays
  Peptide Sequence Number=SeqID_81290
atggcctccaccggcggcggcggcggcctccgccacagcaacagcagccgcctctcgcgcatgtccttctccggcggcggaagcgacgacgcccgcgcgcaggcggccgccgccccgggcggcgaccgccccatggtcaccttcgcccgccgcacccgctcgggacgctacgtcagctactcccgcgacgacctcgacagcgagctcggcgccgccggcgtcgacatgtcccccgaccgcgacgagcagttcgccagctaccacgtccacatcccggccacgcccgacaaccagcccatggacccggccatctccgcccgcgtggaggagcagtacgtctccaactccctcttcacgggcggcttcaacagtgtcacgcgcgcgcacctcatggacaaggtcatcgactcggaggccagccacccgcagatggcgggggccaggggctcctcctgcgccgtcaacggctgcgacgccaacgtcatgagcgacgagcgcggcgacgacatcctcccctgtgagtgcgacttcaagatctgcgccgagtgcttcgccgacgccgtcaagaacgccggtgccatctgccccgggtgcaaggagccatacaagaacacggagcttgacgacgtcgttggcgctgccgctgatgccacagccgggggcaggcctacgctctcgctgcccccgccgcctggcgccgctgcttccaggatggagaggaggctctccatcatgcgctcccagaaggccatgaccaggagccagaccggagactgggaccacaaccgctggctcttcgagaccaaggggacgtatgggtatggcaatgctatctggcccaaggagaatgaggtggacgctgcaggcggcttgggtggaggtggagctgatggacagccggccgagttcaccaccaagccatggaggccgctcactcggaagctttccatccctgctggagtactcagcccatacaggcttctcattcttatccgcatggccgtccttggtctgttccttacttggagaattaagcacaagaatgaggatgccatttggctctggggcatgtctgttgtctgcgaactctggtttggtttttcatggctgctcgaccagctgccaaagctgtgccctgtgaaccgggccaccgaccttgccgtcctgaaagacaagtttgagaccccaacgccgtccaaccctactggacggtcggatttaccagggcttgatatatttgtgtctactgctgatccggagaaagaacctccactggtcacagcaaacactatcctgtccatccttgctgctgactaccctgtggagaagctttcttgctatgtttctgatgatggaggggctctcctgacttttgaagccatggctgaagctgctagctttgctaatatgtgggttcctttctgtcgcaagcacaacattgagcctcgcaatcctgacagctacttcaatcttaagaaggacccatacaagaacaaggttcgccaggattttgtcaaggacaggaggagggtcaagagggagtatgacgagttcaaggtcaggatcaatggtctgcctgactcgatacgccgacgctctgatgcgtaccatgccagagaggaaatcaaggctatgaagaggcagcgtgaggccgctcttgatgatgcagtggagcctgttaagatccctaaagctacatggatggctgatggcactcactggcctggtacttggattcaaccttctgctgagcatacccgtggtgatcatgctggaattattcaggtgatgctgaaacctcccagtgacgatcccttgtacggcagcaccggtgatgaaggcagacctcttgatttcaccgaggtcgacatccgtttgccaatgctggtgtatgtgtcccgagagaagcggcctggttatgatcacaacaagaaggctggagcgatgaatgctctggtccgttcatctgctgtcatgtcaaatggccccttcatcctcaacctcgactgtgatcactatgtctacaactcgcaagctttccgcgaagggatgtgcttcatgatggaccgtggtggcgaccgcattggttatgtccagttcccgcagcggtttgagggcatcgatccatcagatcgctatgccaaccacaacaccgtcttcttcgacgtcaacatgcgcgcgctggatggtctcatgggaccagtctatgttggcactggctgccttttccgccgtgttgccctatatggatttgaccctccgcgctccaaggagcacggtggctgctgcagctgttgcttcccccagagacgcaagatcaaagcttcagccgctgcaccggaggagacccgggctctaaggatggcagacttcgacgaggatgaaatgaacatgtcgtcgttccccaagaagtttggtaactcgagcttcctcatcgactccattccgattgctgagttccaagggcgcccgcttgctgatcaccctggtgtcaagaacggccgccctcccggtgctctcactgtcccccgtgaccttctggatgcatccacagtcgctgaggccgtcagtgtcatctcatgctggtacgaagacaagaccgagtggggccaccgtgttggttggatctatggctcggtgacggaggatgtggtcactgggtaccggatgcacaaccggggttggaagtcggtgtactgtgtcaccaagcgtgacgccttccgcggcaccgcgcccatcaacctgaccgaccgtctccaccaggtgctccggtgggctactggatcagtggagatcttcttctcccgcaacaacgcgctgctggcgagccgcagaatgaagttcttgcagaggatcgcgtacctgaacgtgggtatctacccgttcacgtccatcttcctgatcgtctactgcttcctgccggcgctgtcgctgttctcggggcagttcatcgtgaagacgctgaacgtgacgttcctgacgtacctgctggtgatcacgctgacgctgtgcctgctggcggtgctggagatcaagtggtcggggatcagcctggaggagtggtggcggaacgagcagttctggctgatcggcggcacgagcgcgcacctggcggccgtgctgcagggcctgctgaaggtggtggcgggcatcgagatctccttcactctgacgtccaagtcgggcggcgacgacgtggacgacgagttcgcggacctgtacatcgtcaagtggacgtcgctgatgatcccgcccatcgtgatcatgatggtgaacctgatcggcatcgcggtcgggttcagccgcaccatctacagcgagatcccgcagtggagcaagctgctgggcggcgtcttcttcagcttctgggtgctggcgcacctgtacccgttcgccaagggcctgatggggcggaggggccgcacgccgaccatcgtcttcgtctgggcgggcctcctctccatcaccatctcgctgctgtgggtggccatcaacccgccgtcccagaaccagcagattgaaggtgtaaataccgacgtggctacaagggtcccacgttgggaggaccaaggcctcacccttcccctcctctcctctccacctcatccgtatctccctccctcttctcggcggccgtggcggcgccggaggactatgcgcggcctccaccgctgcccgcaccagctcctcctggtctctccaccgccgcggtccgcccccgcgtgccgccagtcggccaccgcctcatcgcggggcctcaggagctccctcgccgtcttctccgcacccggggctcgggtagcggcggcggcgcgcgagcagaagtggggccacgtggagggtgatgaagacggtggagaggagggcctaggggaggcgctccacaggacgcgggagctcgtggagtgcgccatgttcgcggccgtcgctgggctggcctacttcctcagcaattccctcgccattgaggttgctctgctcccctttcttcattctccgctccgcgcctcttcctggacacaagagaagggatgtatgcaggaggtggcatatggaacagcatcagaatgtgatgacacactattggtgacgggcatcagaaattatttcagttgctttttcccattgccgatagtcatttcctcattaagatggggactagaagccagcaggaaaaccgtggtggctactgttttactgctattcacattatctggccctgtaaaagcgtcaacttatctgctaatgcatggagtagttggtctcatcatgggtactgtttggagattggagaccaactggattgtctccatcatcctctgctccattgtccgtgccctgggagcttgtggttacgtgctagtgtcatcgtttctgataagagaaaatattctcgcgctgataacggttaacattcatgcttcgttgacatacatcctgacggcagctggcgtgaacacaattccttccatgggcacaatatatctactctttgggacactgcttctacttaattgtgggttcttcgtcttcctcctgcatgtgatgtatacggtattcctggcgaagcttgggataaagccgtcgctgaggtcaccaagatggctggacagagtgatgtga

SEQ ID NO: 37916 - DNA, 426 bp, Zea mays
  Peptide Sequence Number=SeqID_81291
atggggtccgagcagtggtcgcacgtggcgaacgccgtcaccgccttggtaggaggtgacgagaagcgagtggcggccttcatcggggtgtggaagcggccgtggggcaagttcgaggccgagatccgtgactcgacgcacaatacatggcggctaccgcggcaagtgagtgattccactgatcgatttgttatggcaactatctttgctatggtggataaggttggacagataaatggacatggttattcttctggcttcccaaagtgtgatgctcatgatatgcaggataaaaacggtctggaaaggaataactttaacagacaaaacaatgtcactctcattccttcttcgacaactgttgttcacacctcaagatcctccacaccatcaagatgggaaagcggaaccgtcacattctactaa

SEQ ID NO: 37917 - DNA, 177 bp, Zea mays
  Peptide Sequence Number=SeqID_81292
atggacgacatcgtatcgccattgccgtgctgtgatgaagtagcagtgctttctagagacttgatcgccatggacgacatcgtatcgccatcgtcgtgctgcgatgaagtagcaatgcttgtaagaggagcagaacaacaacccgttctgagtgttgagcttatattgatgatgtga

SEQ ID NO: 37918 - DNA, 483 bp, Zea mays
  Peptide Sequence Number=SeqID_81293
atgaagtccatcaagagaagcaaaagtttgttgaaggagaaaataaagaagtccgagaccgccgtgcctgtcatatgcagtgacaactacctctgcgatgcaaaccgtagtggcgagctaccaaacaatctttacttgctggtggcgcagttctttctggtggaggtctgggctctggatacaatggtagtgaattcattggagaaaggggttttgtttcctttcttctttgggaggcagaatgactacaacaagccacttagctggaactctcacttcaagatggcactcggctctgctcgtgcactcaagaagttcgttggatcagccagaagagttatcattgagttgacacgcgcagaggaggaagagggcaagtcgccacgcgcaagcagttcctcatcggttatgcagacaggaccaactactgctgcatcagcctatgcaaaatttgggaagacaaaggtcattgtatctgtgtaa

SEQ ID NO: 37919 - DNA, 483 bp, Zea mays
  Peptide Sequence Number=SeqID_81294
atggcggcggcaatggtgaggagatccggggaggagcgggcggcatggcggcggcaatggttcgggggcggctacggtcgtgcagtcgggctggttcgggagcgactgcgggttctacgggtcgcgcagggtgagcgtgcggatctggatgaggtaggcgaggtagaggaggccaaaacatgggccaaggcggtgatgctcctcatcatgtgcggcgatcaccacgcatctggcgaggccatcaaggatgtgctttctgttagaaagaagatgtacgctgtgcagtccctcgaacggtcgccggtcgccgggaagaagaacagcagcacgcgtcaactcgggaagacgtcgaacgaagcagctggacaaacagatcacgcgagcagtcgcgaagacgctccccaaaaatctgatcgcccgcacacccgtgcaagcggtcagaagaagggagaaggacaacggacagaaacggtcgcgcattag

SEQ ID NO: 37920 - DNA, 225 bp, Zea mays
  Peptide Sequence Number=SeqID_81295
atgcggcttcatatccttagaggtatgaaggcagaagtcatccttgcatttgcagacattagcactcatgagtttgatattattttacttgctgagatgtgtcatctcactcttgcattacccaatgcagaaattgacgctatggagcttttcttggatgcagaccgaagaccaacattgcataggaacacactggagcccgtaaatgaagcagtcctcaagtaa

SEQ ID NO: 37921 - DNA, 651 bp, Zea mays
  Peptide Sequence Number=SeqID_81296
aacaagcccaagccgcccgtgatcatcacccgggagagcgccaacgcgctccgggcgcacatcctcgaggtcgccgccggctgcgacgtcttcgaggcgctcaccgcatacgcgcgccgcaggcagcgcggcgtctgcgtgctctcggcggccgggaccgtcgccaacgtcacgctgcgccagccgcagtcgtcccaggccggcccggcctcgccggcggtcgccacgctccacggcaggttcgagatactctccctcgccggctccttcctcccgccccccgcgccgccgggggccaccagcctcgcggccttcctggcaggggggcaggggcaggtcgtcggcggtagcgtggccggcgcgctcatcgccgcgggcccggtcgtcgtcgtggccgcgtcgttcagcaacgtcgcctacgagaggctgccgctcgaggacggcgacgaggtggcccctccgccgcctgcaggggccgaccagcagcagcccggtggcgtgccgtttgaccccgcggccgcggcggcctctgccgggcttcccttcttcaacctgccgttggggatgcctccaatgccgatggtcggccacggcggctggcctgctggctcccctggcggcgccggtgtcgggaggccgcccttctcttga

SEQ ID NO: 37922 - DNA, 348 bp, Zea mays
  Peptide Sequence Number=SeqID_81297
atggcaggaatgtactgcgacgcccgcgactgcctcaacaagagaatgcagccgccggcccgcaccgctgcacggatcctcctctcccccgtcgacaaggcgaaaggctcggcgaggaagaaggaccgggaaagggggataccccgaaagggatccttctccgcgaaggaaccgggctccgagccccccattactgatcaggggttcgaaggctggccccccgagggttcaacagtcgcctcagatcgcgtgggcccgacacccactactggtcaggggttcgaaggccagccccccgaagggctccatggccgcctcaggctactcgggctccgcgcccattactga

SEQ ID NO: 37923 - DNA, 1590 bp, Zea mays
  Peptide Sequence Number=SeqID_81298
atgacgatcgtgcgattgacccatggttgttatagtctgacattaaggatgagcaggcgaggattgaggcgttgggactgggatgcaaggtcatccaatgaaatggctatcgagtctccggtacatactgcgattgctgaggaggttagcgagaagtggcgcagatctaggggctcatatgcagaaccaagaaaggatggttctctactggttctgcctataggaagcttgatggcttgccagcgatggtacaagtcatcctctccaatgaccccactgtgcagcttgaggccactatgcgacaacttacttgttaacttgagagatcctcagagaccaatttgcaagatgcctataggatgcaaaatgcaaaatttaccgatgcgctgtgctacacattgctccatcctctcctcacctgtgaagatatgcagcaaaatgcaaagcctgactgcaaaaggatatgaactcgtctccaatgggattgacaaccatttagtttcggtgaatctcaagaataaggcactaactcctcacatgcaaaaacgggcagaaggatcaccaactccaaagtctggtagagtgctaggtcctgctttgggtgatcagcagcagggaaccttttctgttaacctgtggaaggttgcgtttcacgacacattcaacagaatgtgccccctcagtgctggcggacatgagtgtggctgtttaccagtattagcaaaacaagtgatggagcagtgtgtagcccgtttggatgttgccatgttcaatgccatccttcgtgaatcagcaagtgagataccaacagaccctatatctgacccgattgttaacccaaaagtcctaccaattccagctggtgatctaagctttgggtcaggcgcgcagctgaagaactctattggaaactggtccagatggctgacagataagcttggtatagatcatgatgattctgaggacataggagatgttgaagacgaaagaagagccgcagctgaaacgaaatcgtttcaacttctcaatgagctaagtgatctcctgatgctcccaaaggacatgctccttgaaaaatctatcaggaaagaggcttgtccctcaattggccttcagttagtgactaggatcctgggcaacttcaccacagatgagttttgccctgatccggttctaagcacggtcttagaagagctgaattccgaggagcaccccaccttctccgtcgaacggtttcgcacacttcagtgctcggagaggagtttccatggagaatacaagatacacgctcctaagagaagtacgggggctggagcaacggaaaacagcgccgtctgccctcctccgactgctgtgccacccgacagggtgaggctgacagcagccgagtccagcctcaggcgccataggaagctccgcctcgcccgaccccagggctcggcccccgcctctacctcggaagatggtctccgcctcgcccgaccccagggctcggactcagcctcgacctcggaggagtcaccgcctcgtccgaccttgggctcggaccgaccacgttacagggggggtacatcattaccctacccctag

SEQ ID NO: 37924 - DNA, 309 bp, Zea mays
  Peptide Sequence Number=SeqID_81299
atggaggcccaggcccacgcgtcatgcaaccggcgcgccgagtgcttcgtgcatgcaactgcaccgccacttgcgccaccaccgtgcctcctcgactgcggaaccgataccgcgactcgaggcgacccagagcacgacccagcggcgccagcctggcgcgacgacaacgcgcccgtgttctgttcctcgaacggctcgcgcacgcgcaacggccgccccgcgaactactcgccccgtagcattaactccgcggcgagacaggcggcgcctctggcaggagaagcgaacgacgcttcgccttcgccataa

SEQ ID NO: 37925 - DNA, 1110 bp, Zea mays
  Peptide Sequence Number=SeqID_81300
atggcggtccgccctttcacccgctggtttgggcgaaggtggaggagtgcttgtaaccgctgggcggttacacgctccgcgcgcggcggagcgcaacttcgcggaggttggcacctttcagccattgctcggcttcaaggattttcatcaggcagcctagctgcatcccctcaccaatggtcacccaagacggtgaccaccagttcgatggtggggagaagcaagccgggctgcggcctctgccctgccctcggcttcaaggatcttcatcatccttgctggggcagggggcgagctgagctggagctctacctcccgtacaagccggcgggccacctcttccttcagcattcaggggagagggcgctcaccggcctagcggagggagcggactccgacaacgaggggccgatcggccgccagcgtcgtcagctccagcatgcctgctggctctggcgcagcttccggtgccacctcccaccgctagcggagtgtggctatctgcccgccgtacgggcggctgttgcgccgcgcgcaccgggggaccgcccaagacgtcgcgcgttgccagggcagcgtttgtgttcttgggctgtcctgccctcgctccggcacgacgcctccgcgcggaggtcggtgctcgcccgtccgggaggacttgagtggggatctgccggtgggcaggtggctgtcgtcgtcggtgctgaggtggtggccgccggagaaggcttctccgccgacgagatcgtcggcgccatctgcgttccgggcctccggctctttggctttgatagcttgtcctcgccccgcgagtggggacgcgggcgagggccttgtcacagcagcgtctgtcctgaggagtccctcagctcggtcggccttgctactcaaggcttcgctcagttaaggaaccctcggctgctctgcgatgagccggagctggaggcagcggtgtcagcatggacagaggcggagttggctcgaaaagggcttcatcggcccaggagcagggggcttcccaggccgaggaggcgtagcagaggcggctggaacctggccgggtcgtccactggtgggaccgaccccggagtcaggctgccgaggccatga

SEQ ID NO: 37926 - DNA, 615 bp, Zea mays
  Peptide Sequence Number=SeqID_81301
atgcaggcggcaagcaactgtaccacagggatgcaccctttcgacttcgacgcatccagcgttgaggcccaggcccacacgtcatataaccggcgcgccgattactacgtgcgaaaaaccgcaccgccacttacgccaatgccacgccttctcgactgcggaaccggtgccgcgactcgaggcaaccctgcgcatggcccaacagtgccaaccaagcacatcggtcatagggaccgggaaaggggatactccgaaagggatccttctccgcgaaggaagcgggccccgagcccactactgatcagaggttcgaaggctggcccctcggaagggttcgacatccgcctcagagcactcgggctccgcgcccactactggtcagaggttcgaaggctggcccctcggaagggtttgacagccgccttaggccactcgggctccgcgcccactactgatcaggggttcgaaggctggccccccgaagggttcgacagccgcctcagaacacgcagagcgagggatgactctgggtacgtccgatacatggctgaggctcgggctacgctcccgaggtaccctaggacatttctgagaccagcaggagcgattctgtaa

SEQ ID NO: 37927 - DNA, 315 bp, Zea mays
  Peptide Sequence Number=SeqID_81302
atggcccatcttctacctgtgatagcccgacgcggccatgcccgtgcccaagcggtggtggggctcaccggcgcacatcgccccagcgccccggagccttcgtttaggattggatatgcgcggactcaagaggggatcatatcgaacgccataagatccaccgaggagatccgacgagcgtcgtccatgctccacgaccaatgcttggaccccaaaagatggtgcacggcgagatcaacagcggcgacatctgttctttctcctcccatggttccgctcagcttgcgcgtttggctcagcgtgtttggcttctga

SEQ ID NO: 37928 - DNA, 114 bp, Zea mays
  Peptide Sequence Number=SeqID_81303
atggaagatgttatgtgcttcgtttgcggtgagaatggacaattcgccaagaagtgcaagaaccgcaagggcaagaaaaatcagcccgggtcaggcaaggttcaaccatcatga

SEQ ID NO: 37929 - DNA, 651 bp, Zea mays
  Peptide Sequence Number=SeqID_81304
atggacggaaaatacacgctacaagataatccgatcctgcaggctcggatcctgacggctaaagggagcagcagcgccctcggcgtcgacaacaccttcggcgaggcccgacctagcctcggacggcgacgcggtccaagggtctctgctctgaaggacaacgttatcaccaagcccgggccatcgccgccagggtcttctccgagaatccggcccgagcaggaggctcggccgatcaccccggggcctcgaccagctggcctccgaggacatcagcccggcccgaggcctcggcagtttaattccggcgtcgatcccgctaacggacgacccggccaggctccggccgaccaggcctcgacagccacgatgaacaaaaacactggcattcaaagtgccattacaaaacggaactccggttccacctccgcaacaacgacaacgacccccgctctgggtggccgaactgcagcagcgagggcctcagggcggacgctgctgcaatcttgccctcgcccacgccgacgctcgaggggcgaggacaagtacaaagagccggaggcccgaagcgcggatggtgacggtgatcccgtcggcaacggggacttctcgagccgcctccacctcggcaccgacgacaggggccgttag

SEQ ID NO: 37930 - DNA, 732 bp, Zea mays
  Peptide Sequence Number=SeqID_81305
atggcggtagcagacgggcaggagcggcgttcacgtcgtcagccaagcttacgtcccatccgggggcagcgagagaaccctctctcacggcgtgaagacgacgcgcccgtgttccgttcctcgaacggctcgcgcacctgcgacggccaccccgcgaaccactcgccccatcgcattaactccgcgggaccgggaaagggggataccccgaaaaggatccttccccatgaaggaaccaggctccgagcctccctactgatcagaggttcgaaggctggcccctcggaagggttcaacagccgcctcagagcacgtgggctccacacccactactggtcagaggttcgaaggccggcccctcggaagggttcaacgaccgccttaggctactcgggctccgcgcccactactgatcaggggttcgaaggctggcccccgaaggcggggaacgatcttgtaacggaatctcatcggagggaggcatcgagccctcggaccccgtcgccaggggaccggctcaccggagacaccatgttcggcgcccaccgagggcaacatggcgctttccccccctcctccttgcagaaaggcgacgcagtggcggctcggactcgggctaagccccggaagacggtgaactccgctccgcctgacccagggctcggactcgggctaagtcccggaagacggcgaactccgctccgcccgacccagggctcggactcgggctaa

SEQ ID NO: 37931 - DNA, 636 bp, Zea mays
  Peptide Sequence Number=SeqID_81306
atgtcttcgcgcttccttatgcatcgtgtctttccaccttccaagcccccggatgggggatacccgccgtctttccgccttgtcgttgggggaacgctactctgtgggagttggtacctttcagccatcattcggcttcaaggattttcatcagccagcccggctgcacccctccgccggcggtcacccaagatggtgaccaccagcccctggatggggagaagcaagccgggctgcgatcttggtcccaccctcagcttcaaggatgttcatcatcctcgctggggtgggggccgggctgagccagagctctacctcccgcgcgggttcgtgggtcggcctctccttcggcgttcgagggagagggcgctcactggccctgcgggcgggccggacttcgacaacgtggggctggtcgacggcagacgtcgtcagcctcagcgcgtcgggctcgtcggcttggctcccggtgcctcctcctgccggaaggcggctgccgcgccgtgtgcacgggagggccgcccaagatatcgcgtgctgccagggcggcgttcgtgttctggggaggtcctgcctttgcaccggtacggcacccccgcgcggaggtcggtgccccactcgtccgggaggatctga

SEQ ID NO: 37932 - DNA, 1552 bp, Zea mays
  Peptide Sequence Number=SeqID_81307
atggtgccgaaggcgaggggcgaggcgcttggcgccgaaggcgaggtgtcggccctcgtgttggtcagggacgaggcgggcgtggcgacccgccggctgaagggagtgacggaggcgctgagtcaggcgacggaggcgctgagccaggtggctgacttcgccagccgtactgcatcgggggccctcacggcagctgtgtctgccgaagtcgagagacttcggacacaacatgctgacgctgtccgtgagaagtcggcttccgacagcaagtgccgtaagctgacggacagggtggccgccctggagagggagaaggccgacctccggcgccagctggcggcagagaggagggaagccaacgaggccgccgccaaggggcaggctgcgcaggcggaggccaagctggcgcgggcggagggcaatcttgccaaggagctcgccgaacatctgcaagagcggctcaccgccctggagagccgcgcgaaggaggccgaggccgcgatgcatgcggaggccgaacggacgcgcacgcagcttatggatacatatcgtgagctgggtgcgcggaccggtgacttcgaggaggagctgctggaacttccagccgttgcgggggggttgatgtcgtacgcctccctggtcacctgcgagggggcgatgaacgctctctcccgcgaagggtgccggcactttgaggccttcgatcaggcggatgaagaatttgagcgagatatctataaggtcgaagaccccattgtgaaggaatccgccggggccctttatgaccggatgtggggtctgtatggtcgtgaggtggtcagggagcgggccgagactgcgagggctcaggcggagcgcggcgagcgggtggacgacttcggggctctgaacagcgcgctgccagacccggagccgaccctcgcggaggctgtgactggggtcgccctggagccaaccccggagaccgcagcgatcgcgacggctgcccccacatccgctgtggccggcgaagacctgcccccgaaggtggccgaaggcgctcctgatgcccccgcagctgctgtgccgagtgctgaagatcccgcggcggtggcggcggagccaacggcggagccaacggcggaggctcccgcagcgtcagggccttcgcaggttcaaggttttgggtctgcgcacgcaaccgctactactgagtttttggcggctacgaccgcggaaggtgggaatgaatatggtgggtctgtatctgagttttttgattttactgactctaggagctcggttgagtggactgaggagtcgtcggaggaggacttggattattttgcggccttggacgtggctgcggcggaggcttcgccacacgccgcggacgcgccagacgtgccaggtcctaggaccgggcgccgacgacgaagggcggttgcaaaacgtagggttagcacggaggagggggctcggcttcgtgtgagtagggctggtcgtcaggaactgttgtctttgccggccgctgcgagtacaggggaaagggaactgcgaagtctttttgcgg

SEQ ID NO: 37933 - DNA, 351 bp, Zea mays
  Peptide Sequence Number=SeqID_81308
atgctgtcctttatcctgcataacacatttctgtttcatgctttgcataatactgaattgaagctagaacttcacaagtacggagggggcctcgtggacatcgacggcagggacatcttgtccactcctgattcgaagcaagccggtggctctgctaaagctcctctagagtctgctgctgcgtccactgcgttgccccctcatgcagacgtgtaccatctcggcatccagtcgcagcgctcggccatcgccagccagaggtctggacagctgcaaaggcccatccagaaatggaagggccctgacaagatcagcaggatctatggagactggatagatgagaacgaatag

SEQ ID NO: 37934 - DNA, 606 bp, Zea mays
  Peptide Sequence Number=SeqID_81309
atggaggaggatatggaggtcaccgaacaggaagaaaggggagtcgtggactctgatgtggagggtttcagcattgctttagcagacctagatccagttcaagttaatgatttgcttggtgatgaacctattgttgatacaagtgtcactactcagaaaacttatcctaccatcaacgccatacagctcatggatggtgtctgtcacctgaacgcatgcatactgatactctactcctggatgacaatactaaactacttcggcaacaacattcccatcaatggatctatgtctggctgtcatcgcgaagatcatcctcgccatcggtgccccagtgggccctttgacatcctaggcctggccaacgacccctaccaaactgccatcctcaagagacgtacaacaagttgcaaaacgaccatattacaacaaaagaacgactttagtaagagcatggtactaatatggcatgttgtgtttagtggaaacctccctatcttgaggtttcttcttgatcatggtgatgatctccatgaagaaggcagcctggaaggtcatgacaggttcaccgttcttcatataactacagagaaagatataatgtag

SEQ ID NO: 37935 - DNA, 585 bp, Zea mays
  Peptide Sequence Number=SeqID_81310
atgcggagaccgtcgtccgaggtcgaggctgattccgagccctggggtcgggcgaagtggagaccgtcttccgaggtcgaggctgagcccgactcctggggtcgagcgaggcggagaccgtcttccgaggtcaaggctgaatccgatccctggggtcgggcgaggcggaacttcctatggcgcccgaagctggacttagctgttgtcagccctctctctatcgagtggcacagcagtcggagcggcgctgtttttcctgtcagagcgcgcgtcaggataaggtgtcagtcgatccttgcattaaatgctcctgcgatacggtcggttggcgtggcgatctggccaaggttgcttctccgcgaagactgggcctcgggcgagcggaagaaatttcaaaaaggaaatccggagaacttgaccgaagctgcattgtatggtatagttgaagacctatgcacattcatattaaaagaggtcattccagctgaagggaaatatcacgacgcttccagtacattagctatgccagagtttagaatattaacagaagttagtagactgtctcttaaacgagataattactag

SEQ ID NO: 37936 - DNA, 675 bp, Zea mays
  Peptide Sequence Number=SeqID_81311
atggtggtcagcccttggtggaggtttttacaaagaattatgccttcacttgaaagaaaaaggtttccagtgatggaaggcaccaaaggggtttctcggctgcctccaactattttgtgttcgcatagctacatcgccttcccccaatttgatgtgaagggggatgctaacgaggccgcccttcgccatgcatcgaagtcgagcagcgataacgatttggtggaagaatttattgcttgcgatgcggggcgagacgctgcggcatttgttagggaagtggaggctaaggcggtgaagattgttgacaagtattcaacaaagacagagatgcctaggagtttggacattcgaggctcgaatgttaggttgaatcgcgtttttgagttcaacgacctccgctatggtccatatccggaggagggctccgctgatgccggagacgttgatgagcataaaataaaatgcgaggtcaagcgtggtgcagtggacgatggttgctctaaggggaaggttgtggtttcgtcggtgaagaagacgaagaaggttgagactaggatgaaaaacccgacgagggtggtgaaggcctcgggcaaatttcttgtagagctggccgacacatgtgctgagccggaggagaccatgacttcgggcgtgctgtggaagcctctactctga

SEQ ID NO: 37937 - DNA, 453 bp, Zea mays
  Peptide Sequence Number=SeqID_81312
atgcctccgtctacgacaccatctacgactttggtgccacctttgcctggcaaggctagccaggatgaggcggtgaaggcgttgaggtgggaatgggtggagggatgttcgttgaccattccattgacaactacctgctcgagggcgtcagcgagtttgatgcccacaccgggtaagctaccagaggttggtgccttcgctaagctggtgtcatctggtgcctcggtcaactctacgacctcacggttgtgcaccaagaagactgagctggagaataaacttgagggcctccagaccaagcgtatccatgttgtgtgggagaagtcgtcagccgagctgatgaatcggcacttgggggaaaagactagcaatcttgagaaggagaatgaaggactgagctaccaactagtagaggtgaaagaaacaatttctcaaatgcatttggatgtgtag

SEQ ID NO: 37938 - DNA, 417 bp, Zea mays
  Peptide Sequence Number=SeqID_81313
atggggaagcctgtcccatcactcctcatgctcctcctcagccgaggcagggtcccactcgacagtccaacccggtggcaagatggacggccaagtcactccagcaaccatttcctccagagaacctgtaaaaattatgccacaagcaaggctgagtatactaatactcagctagacttacccggtgggcactctgtccccacacacatcaaccgtccccatcgattccctggcaacagatcagggctcaccgccttggcgtacaatgcctcactgaccccgactggccgtcgtgcagtgaccgcacttgtacccaccataaccggaatgggagacctcgtctcaggtcgcgtgaggggatatgtctgcgggcaggttcactcaggatttaataacattatgctaaaaagaaactaa

SEQ ID NO: 37939 - DNA, 567 bp, Zea mays
  Peptide Sequence Number=SeqID_81314
atgcagccggcatgcaatcgcgccaagtgggcgcgcccctccgactccaacgcgcccaacatggaggcccaggcccacacgtcatgcaaccggcgcactggttgctacgtgcgagcaactacaccgccactcgcgccactaccgcgcctcctcgactgtggaaccagtaccgcgactcgaggcgaccctgcgtatgacccaacagtgccagccaggcgcgacggtcaatatggccgaaaatgggccggcagtattggcggtggcagcgagacaggcgacatctttggtaggagaagcgggcgacgcttcgccttcgccataatgaccgcgtcaaaaaaagggaccgggaaaggggaataccccgaaagggatccttctccgcgaaggaaacaggccccgagcctccctactgatcagaggttcaaaggctggcccctcagaggggttcaacagccgcctcagagcgcttgggctccgcgcccactactggtcagaggttcgaaggccggcccctcggaagggttcaacggccgcctcaggccactcgggctccgcgcccactactga

SEQ ID NO: 37940 - DNA, 822 bp, Zea mays
  Peptide Sequence Number=SeqID_81315
atggcgcctcctgtgacgtggtcggtccgagccctaggttgggcgaggtggaggatcctccgaggtcgaggtcgagtctgtcttccgaggcccgaggtcgagtccgagcccctgggtcgggcgaggcggagaccatcggctgaggccagggctgagtccatgcgctggggtcgggcgaagcggagttcgtcgtctttcggggctgagcccgagtccgagccctggggtcgggcgaagcggagttcgtcgtcttccggggctgagcccgagtccgagccccggggtcgggcgaagcggagttcgtcgtcttccggggctgagcccgagtccgagccctggggtcgggcgaagcggagttcgtcgtctttcggggctgagcccgagtcagagccctggggtcgggcgaagcggagttcgtcgtcttccggggctgagcccgagtccgatccctggggtcgggcgaagcgaagttcgtcgtcttccggggctgagaccgagtccgagccctggggtcaggtgaagcggagtttcctatggcgcctggggccggacttggctgctgtcagcctcactctgtcgagcggcacagcagtcagagcggcgcaggcggcgctgtcctcttgtcaggccggtcagtgtagcggcgaagccacccttgcattaaatgctcctgcgatttggtcggttggcgtggcgatttggccaaggttgcttcttggtgaagactgggcctcgggcgagccgaagctttgtgctgatgggggttaccagctaagatttaggagtcttgagggtacccctaattatggtccccgacagtag

SEQ ID NO: 37941 - DNA, 120 bp, Zea mays
  Peptide Sequence Number=SeqID_81316
atgagagagctcgtcgtggccagatgtctacagaatgatgactcagaaaaccctaatatctctggtgtaccgtgtaggaaagttgtattcaagatacaacttgttgtgtctctattataa

SEQ ID NO: 37942 - DNA, 411 bp, Zea mays
  Peptide Sequence Number=SeqID_81317
atggcctcggccaacgttggcggtaccgacgatggattgggggaccgttcgttagccaggttcattgaaggagggggctcgaaaaggtccaattccccaccaagtgcttcacctactgttccagaaggtcggctcccataccaacagggtcggcagtacaccagcaagttgtcaacagccgtgctaagctcctccacatgggctcgagctttggcttcccggtcccaagcaatggaacagatgggcttcgctccgatagcagctgtgatagaacctcccaagtcattaggcccacctacagttgtccttgtccattggacctcagacaaccctgtagatgcacctgatcacttgacaagttcggtatatgaattcttttccttacccaagagcgtttcacccatcacgtag

SEQ ID NO: 37943 - DNA, 513 bp, Zea mays
  Peptide Sequence Number=SeqID_81318
atggcgcatacaaggaaaactgcacgcaaatctactggacctcttggcgtgcctcatcatcagctagcccccagacatgtagggagtagtaacggcagcaatgaaccaatcggagacttggaggccaaggtggaacaccttcggacagagctacattaccagaataggatatgggcgcaggacagccaacccattgattgggccgtgaactcgcgttcgattgcttgggacagcgaagcaaaagctcgagctcgtgtggcagagcttagtgcggccctcgacagcctgcaagtgtactgtaatactttacatgaagaagttcatgtactgtatgctcgactgcatccagacgtgcctgccgacgctgttgcaatgggagtcggaccatcggggacagcaggtgaaggacctgatggggagttggacctttttaggcctcctccttccatgaaccttgctgacgaacggtctcctgcatcaggaaatgaagaaaccaaggatgatgaagactag

SEQ ID NO: 37944 - DNA, 192 bp, Zea mays
  Peptide Sequence Number=SeqID_81319
atgtgccttggcatcttaccacatcgcattagcttgcgttatgcatatccggtgatcgtcggtgagcttgccaagaaaacgaagaagaagaagaagttgaagaagaaagagctacaccaccacctgaagacccacctgcagggaactgcttttattttgatatttgtggagcagagcccgactctcctataa

SEQ ID NO: 37945 - DNA, 216 bp, Zea mays
  Peptide Sequence Number=SeqID_81320
atggcgttctcctaccttcaaccagctgcacgcatatggccatgggaaatgaggcttgctgcgtccggcatgggaggtgccgcgcaaggggacctcggtgtaatatccaaaaaaaatgttgaccaaaagttgatttttgtttctgtagaatggcagattcgacaatttctgttcatggcagttttccgtggtcttagtggcctaaaaaaaatttag

SEQ ID NO: 37946 - DNA, 117 bp, Zea mays
  Peptide Sequence Number=SeqID_81321
atgtgtagagcacagaggctatggtcgatgccaaaggtgaaagtcaaatgggttcatgctgatggactagaagcgatgaaggacgtatgtcgaggtatggactcaggaactagataa

SEQ ID NO: 37947 - DNA, 587 bp, Zea mays
  Peptide Sequence Number=SeqID_81322
atgggcaccgaacatggtgtctccggtgagctgcaagcgggtaatctgagtggacgtccgtgccccgttcgttgggggtcggctaggggcccagaggcacgcccaaaacaactggcgcgccggttgctcgacgcgtgggcctgggttcccaagctggcgtgtcagaagtcggagaagcgcgtccatctggcgcggttgcatgccgcctgcatggctgcccgccccttctgcccgttggtctgggcgaaaatggggggtcgcttgggtaaccggttgagccgcctgctcgggccggattcccggaggagtccctggaccgcggcgccgcccgaggctgggtcgggctttgctgaagacgtcgtcgatgtcgagggtgctacggctcccttcagcgtgaagacccgagcctgcaggatcagatcatcttgtagcgtgtgctttctgtggccgccgaggccagaagaacacaccctcgccgcgcttgcgaagctgcgtcttttttcctcttgtttcgagcatctggactctgtcggtaacagggatgtttgtgtgagcgagagttgcttttcgcggaagggacgagtgag

SEQ ID NO: 37948 - DNA, 183 bp, Zea mays
  Peptide Sequence Number=SeqID_81323
atgaagcctgaatttagactgatccttagcttacttgaaacaaatgaaggcaaatatgatttgattgagagagagcatgagaaggagattcacgagagtatggaagacttagcaaaaacggttagaaacctcttcacttacttgttgaactatcatagcacgctgcaattcgtggaaatttag

SEQ ID NO: 37949 - DNA, 188 bp, Zea mays
  Peptide Sequence Number=SeqID_81324
atgacgtaccggtggcacagcaacacgtgcacgtctgcattggcccgaggcctagtggaggcgcagtggcgacaacatatggtggttgaggcaaccaccgacccggaggtggaggaggtggcgcggggaagcaggcttcgctatgccctccaaaccttcgttgaggaccagctactactggagaaagg

SEQ ID NO: 37950 - DNA, 132 bp, Zea mays
  Peptide Sequence Number=SeqID_81325
atggcgtcgtcctgctgcgcctcctcctccgtcctacaggtgctcctcctccccctccccctccccctcctcgtcctcgtcccaccgcccaccatctttgtccaacaacctgcaattaagaccggatcataa

SEQ ID NO: 37951 - DNA, 714 bp, Zea mays
  Peptide Sequence Number=SeqID_81326
atggttgcctttcgagggggtcaccctccttttaaaggcgactctccccacttgcatcctcagccgtcgcggactgagtcttctccaacacgctccaaggtcttccccctacgacacgggggctgggtcccacgcgtcatgcaaactggcctaggacagaaggagccgaaaccgccgtgcgcggtgcgcgtaactgcccagcggttacaagcattcctccactttcgcccagaccagcgggcgaaagggcggaccgccatgcaggcggcatgcaaccgcaccgagggggcacaccctttcgacttcgacgcgttcagcatgagggcccaggcccacacgtcatgtaaccggcgcgccggttactgcgtacaagaaactgcaccgccactcgcgccactaccgtgcctcctcgactgcggaaccagtaccgcgactcgaggcaaccctgcgcatgacccaacagtgccaaccaggcacatcggtcacggggaccggaaaaggggataccccgaaagggatccttctccgcgaaggaagcgggccccgacccccactactgatcagaggttcgaaggctggcccctcggaggggttcaacagccgcctcagagcactcgggctccgcgcccactactggtcagaggttcgaaggccggcccctcgaaagggttcaacggccgcctcaggccactcaggctccgcgcccactactga

SEQ ID NO: 37952 - DNA, 639 bp, Zea mays
  Peptide Sequence Number=SeqID_81327
atgtcgagctcccttgaagagggaaccgagcggtggacgtcctcggggtggtcccagaagccgcccggacggcgggatggtggaaggggtcgggttcgcgtgcgcttcgtggtggacggcggagatgcaacattggcgtgcgtgccagtactcttcccgaactccaccgaaaagatccgtgtttggtccaccgacaccttcctcttccttcttcggttcttccccagccgtgcgcgcttctcctctgccctggagacaaaggagcaccccgcgatctcccggccccacctccccgcccgcgtgcttctgaaacggagaagttgtcggttcccagccgggcaggctactctgactcttcctttccctccggccggcgaggcgtccaagcggattagcggagaacgtcgggacggctacatgtgggtgttgcagacgaagaaggccttgaggcgcgcgtcgtggggccctcccttgaaggtcgcgtcgactgggcggtggccgtcctcggggtggtcccagaagccgcccggccggcgggatggtggaaggcgtcgggttcgcggcttttgtggtgggattgcggcgtgggagcgggtggtagggcggttcgcggcggaaggatttgcgggcgggcggtag

SEQ ID NO: 37953 - DNA, 740 bp, Zea mays
  Peptide Sequence Number=SeqID_81328
gggcaatttatcttcctgctgaccagtacttgaatcatgctgagaagtcagacatgactattgtggaagctttcaaaaggatgcaggttgttcagcatgaggaacctgaagatgtggctgaggaaaatggagaacttgatcaacaggctttgcgtgatccatacttcaaaggtcttgccagggttgaaagagaaccatcctgtcagccaatcagaaaagtggaatttgactttgagcacaaaagaatgtcaaaggaagagataagagagttgatattccgggagatactggaatatcacccacaactgctaagtagctacattaatggcacagagaggacaacctttctctacccaagtgccgttgatcaatttaagaagcagttttctcatcttgaagagagtggtggtaacggcccatcagttccaacagacaggaaacatgcatcccttcccaggaccactgtggttcactcaaatccaattcctgccaaggaacaacctcttgccgtgtcatcaagggttagaccagtctctgatgattcgtgtaagaatccttgggagaaagcaagtggtcctggaaatgttaccaggacatctctgactttacaagggctgcaagcacaagcagatcccacaagcatacggttagcgccaaatgcctgcaaggttggacagtaccaacccatcgcaggccatgggaggttacacgctgcagtcacagaaggaaacattatttga

SEQ ID NO: 37954 - DNA, 549 bp, Zea mays
  Peptide Sequence Number=SeqID_81329
atggcgaacacgcggagagggttcataccagcttctggtgtggcagcagccctgcccacggtggtcagcggattccagaggaggaatggacggcggcgagaaattctttggtccagggcgacgcttatgccagatagcaagcttgcgcacgatccccggtcactggttatcgcctccgaccaccaccctgggatccgaacggcaggaattgccgcatgcgacggtggcggcgtgagcaccattttttcttctccctctgcgccaggcgaggttcccaacgactcggtgcagcttcgaattggtggatggagggaagggggtcgcagagcttcggcttttaagcaccacgacgaagtccgtgcggagggaaccggacggcgaaaatcgcggcgaggatcacatgcggtctacgccgattgttacgatgaggaagaacagtctggcgagtgggtccgcagtgacagcgccagcgctttgtttctgctggttggtccgcgcaaagggaaaaataggaggagaaatgggccgagaatctcttttaagttttga

SEQ ID NO: 37955 - DNA, 867 bp, Zea mays
  Peptide Sequence Number=SeqID_81330
atgaacccgcggcggcttcactgtaggcggctgggagtggtacacaagagaagcgcggtggtgtttctgcggcgtagccggacctcctctatccttcccccccccccatataggccgaggtcccaacagaattcgcagtgcggaaccggtaaatccggccggcgggtgcggaggacggagtccgcggcgcgagttagcccgaggtttactgcgtttgaagacgagtctgacagtgggtccccgggcgcactgctgcttgaggatgaccccacagtcgtgtacctcactgcatacctgctcaccctagatgcacagtatgatttcttggctcggcaccaccgtcagatgattgcccgagcagaagatgcagagaagctcaaccgtaagatccatgtggatctcacctcagctcaagctcgtgtagctgccttggaaagtcgtgaagccattgttgttgaagccctgaagcaagccaaggatgagcacgtccagaagttgatggaggcctacttggtaacccataaccaacgtagagccctgcggatccaagaacccgcttcatccaacccagttcaacccatgaaagctgaagatccccagattcttgaaggtcacccggtctctaccagaggagaaaagaaggcttgggaactcccggaaggagccatagtcttggaaggaattctagtcttccctcaggctatgaataagcaagagcaccccgagtcctcccaagatcccctgccagagttgtttgagcccctcaccatgaagaagattctagcaccatcccttgaggtcaaagaagaagccgcaagcaccccaccagcaccgccgccctctgaggagctacaagagccagtctag

SEQ ID NO: 37956 - DNA, 1443 bp, Zea mays
  Peptide Sequence Number=SeqID_81331
atgggcgcctgtgtatcttcaagcaaaaagcggagatcgcaaaggtcatgctgtatatacaggcgctaccgtggcaaggttttaaccaatacacctatagtacgcgtcggtgaagtggagaaccttgcttcttctggagcagcagtccatttagggacttctgcagctgctcgacggagatccgatggctcaaacgttacgttccacctcacacaattgcagtggcgtcacagtgagctggacacagagaatggaaatgttgtgtgccaagaagaagcgtggttcgactctgtcagtatcttgggatctgactcagatgaagacttcagcagtgtcaatggagacttccctgctatgtcaaattcaacaggtacacaattgatgcagtgcgaagatgcttcatctatcgctgacgccatccagaagtttgaattgatttttgatggttctagtgttgctcaagctgttgggcagtacctgaaaagagatgcaaataaaatagaagcagagaggcctagagttgcaagccccgaagcttgtgatgtctctagtggaaaggttgaggatgctaagacacgaaatgagggttcctctagaaggtacttgatccgcccacgagctggattattggttccacaagctggtgagaaaatttctgaaggttgttggtctgtgcttgagccttcggcattcaagctgcgaggggaaagttttttcaaggacaaaaagaagtctcctgccccagcttgttctccatacacttcatttggtgtggacatattcatgtcccctaggaaaattcaccacattgcccagcatattgagcttccatctgtaaagccaaatgataaaattccttcgctacttatcgtaaatattcagatgcctacatatcctgctgctatgttccttggtgatagtgacggtgaagggattaatctggtgctatatttcaaactgaacgataactttgagaaagaaatttctccccagtttcatgacagcatcaagagacttgtaagcgacgaaacggagaaggtcaagggtttcccattggactcaacagtccctttcagagaaagattgaagatattggcagggttagttaacccagatgacatgaacctgagttctgcggagaggaagcttgttcaggcttacaatgaaaagccagtcctctcaaggcctcagcacaacttttatgtgggatcaaattacttggagatcgaccttgatgtacaccgctttagcttcatctcgaggaaagggctcgaagcattccgagaaagattgaaacatgggatgattgatctcggtctaaccatacaggcccagaagcaggaggaacttccagagcatgtactgtgctgtgtaaggctaaacaaaattgattttgtcgataatgggcaaataccaacactactgccatgtgacgatgactaa

SEQ ID NO: 37957 - DNA, 81 bp, Zea mays
  Peptide Sequence Number=SeqID_81332
atgcggcttcatacccttagagataatgtggttttataccctcagaggtgcttgttgctcatcaagggaagtgggaagtag

SEQ ID NO: 37958 - DNA, 939 bp, Zea mays
  Peptide Sequence Number=SeqID_81333
atggaggattatgatctcttggagtcggagcaaataagggagaaagatatgagagccaaattgcagaggggtctgtatggtttggttggatcagagttatatgagcaggggtggccttggaggtcggaggggtctaggtcgagatgttcaccatcttcaggaagctcgaagaagaagttaaatctatttggttttgggcttctggaccagggcttctttggaattgatgttctagaaggagtggaaaacagtgatgccacagaatctgtccaagattatgccattagtgaagagattagggcggtgagctgtgaggtaggtgctaggccaaaggtatcagatcctaaaactgttctggaaaaggggtttcaggggagagaggagctaggagggatggctgaagtcaatgttttggctaccaaaaaagtcggagggtctattcttattgacagccaacattcgaatgtgtgtgatcaggatgaagtgatggaaaggcatgaagaggaattactagagctgagaggaagagctaacagcgaggagatcaaagagggggacctggatggcactcaattaagtgaagtgggcagggttagagaagataaaagaggttctgttgaagctgggattgtgctgagtgctagggggcagtcgaatgtggtgcctaagaataggaagatggcatctaggagtctggaggctcttaggaggagggaggaggagaaaggaaaactcgacagcatggacgagaggggcaggggctactttctagatgacgaggcagatccaaggtggaccaaagttgcaagtaaaaaattgaagaaaaatacaagaggaagattccagttctggctacaagggctatctctagaattgcaagagatgggatacctatcctggagaaagccactaaaagatcccaagagaaggactatctga

SEQ ID NO: 37959 - DNA, 138 bp, Zea mays
  Peptide Sequence Number=SeqID_81334
atggcgattggagatgtgagaccacatgaacaacaagagcaagatcaaccttcttcctcaacgatggtgcatccccaactcaagatgatggacagtgagcctttcagggtagaagaggacttgcaagatccggactag

SEQ ID NO: 37960 - DNA, 580 bp, Zea mays
  Peptide Sequence Number=SeqID_81335
atggacctggagctcgaagccgcgggcagcggcggaaacggaacaagagcggtgtccctctccgttgactccccgacggccgaactaggccgcggggacctgggcggcagcggcggaccctctcaggaccgcaccgtctcgcgccgccacgtgtccctccgccttctcggtgtcggcgacgggatcgcattcgaggtcgtgggcaggaaccccgtcgtcgtccgctcccctgacggcggaggcggaggcggaagtggaaccagcagggtgttccgccgcggggagaagggcgagctccgcgccggggacgcgctgtcgctgtcgctcaaggctcctgcgttctgggcggtgcgggcgagggaggggaacggcgacggggacgcggatgtggacgtggaacccgccgtgcttgatgcggtggcgaggcgggagaggcgtacgcgggagcggaaggagagggagagggagaggcgtgttgcggaggagaccatggaggtcaccgaagaggaagaaggggcagccgtggactctgatgtggagggtttcgacattgatttagcagccatagatccagttcgag

SEQ ID NO: 37961 - DNA, 486 bp, Zea mays
  Peptide Sequence Number=SeqID_81336
atgggagcaatgtacctggtagaaattgacaatgaccagaagaatatgtggtgtccggaaagagaggaggatgaggagaggagcggttaccgtagaacaccagcgctgcgcacggatgcggagtggcggcacaccggcgggcgggagcggggctctttcttcgtcaccggcagcggcacatcggtgattcgcggcggagtacgcagtgggcgccacacttggagagagcactgtggcgtctactgtggacttggagagaggaacgagcagatgtggtgtgcgaagggagggagagaggagggggagcaatgggggaaggcagccgcgagaccaggtggacgatttgtgaggaaagggaatgggggaaggctgccatggatggaagggcgcggagggagcgcggctgccatgaagggggagcggggcgcggcagccatagatggaagctttgtgcgcgattcacgatggatttgggagatcgagtag

SEQ ID NO: 37962 - DNA, 3732 bp, Zea mays
  Peptide Sequence Number=SeqID_81337
atgggccgttccggccgccgccggcgggaccgcgtgcggtggagcaatctctacaccttctcctgcttccgtgcccagcaagagcacgccggcgatgcgggcccctcctccgatggggctggcgccgtcggcgggccgggcttctcgcgcgtcgtgtactgcaacaacgccgccctgcagaagccgctcaagtacatcaccaactacatcaccaccaccaagtacaacatcatcaccttcttccccaaggccatcttcgagcagttccgacgcgttgccaacctctacttcctcctcaccgccatcctctcgctcaccccagtgtgccccttctctcccgtcagcatgattgctccgctggcctttgttgttggcctcagcatgatgaaggaggggttggaggactggcgccgcttcatccaggacatgaaggtgaacaaccgctatgtcagcacgcacaagggtgatggcgaattcgactaccggcactgggaggacctttgtgtcggtgatgtggtcagagttgagaaggaccagttcttccctgctgatttactgctactgtcctcgagctatgaggatggtatttgctatgttgagacaatgaacctcgatggtgagacgaaccttaaggtgaagaggtcacttgaggtaacgctgccgctggaagaagacgagtcatttaaggatttccaggcagtgatacgctgcgaggatcccaacccgtccttgtacacatttactggtaactttgagtatgagaggcaggtgtacgcccttgatccgtctcagatacttctgagggactcaaaactaaggaatacagcctttatctatggagtggttatcttcactggccatgacagtaaagtcatgcagaactcaactgagtcgccatcaaagaggagcaggattgagaagaagatggatttgatcatatacatcctgtttactgtgcttgtgttgatatcgctcattagttcaattggattcgccgtgaggatcaagttagatttgccccgctggtggtacttgcagccagagaaaagcaataaattagatgatccatcacgcccagctctttctgggatattccatctaatcacagctctcattctttatgggtatctgattccaatctcgctgtatgtctcgattgaacttgtgaaggtattgcaagcacatttcattaaccaggacattcatatgtttgatgaggacactggcaatactgctcaggcacgtacatcaaatttgaatgaggaacttggccaggttcatactatcttatcggataaaactggcactctgacctgcaatcaaatggatttcctgaagtgttcaattgctggagtatcatatggcgtgggttcaagtgaagttgaacgtgctgctgcaaagcatatggcatcaggtgctgatgaccatgatatccctttacaagatatatgggaggagaacaatgatgatgaaatcgagttggtaggagtcaactttagtgttgggaccaacataaagccctccataaaaggcttcagttttgtggatgaccgtctcatgcaagggaactggaccaaggagccaaattcttccacaattctactcttcttcaggatacttgctctgtgtcacacagcgataccagagataaatgaagcaactggttctattgcctatgaagcagaatcacctgatgagggggcttttcttgtggcagccagggaatttggatttgaatttttcaagcgaacacaatcaagtgtctttgtcagggagaaacacacttcttcgaaagacacagttgagaggttgcatatcagtatttgttacccatttgttcatatttgttccttatcgttattattatatttttttgtcttattgtttgagtataatttcagggagttcaagattctcaatctattggaattcagtagcaaaagaaaacgaatgactgtaattctgcaggatgaagatggtcaaattcttcttttttgcaaaggagcagacagcatcatatttgatagactggcaaaaaatggaaggatgtatgaagttgatacgactaggcatctgaatgattatggtgaggcaggcttgcgaacattggcactatcatacagggtgcttgatgaatcagaatattctttgtggaatgcggagtttcttaaagcaaagacatatattggtcctgatagagagttgcaacttgaacgagtctctgagttgattgaaagagagctgatccttgttggtgcaactgctgtagaggacaaattacaaaagggggttcctcagtgcatagatcggttggcgcaagcaggtctcaaaatctgggttctgacaggtgataagatggaaactgcaattaacatcggatatgcatgcagtttactgaggcaaggcatgaaacaaatatgtttgtccatacccactggtgagcaggtagctcaggatgcaaagaaggttgcaaaggagagtctcctgtcgcaaatcgccaatgggtcacaaatggtcaaactcgagaaggatccagatgcagcatttgctctagttattgatggaaaagctctggcatttgctttggaggatgacatgaagcatatgttcttgaacctggcaatcgagtgtgcttctgtcatatgttgtcgtgtgtctccaaagcagaaagcactggtgactcggctcgttaaagaaggtataggacaaaccactttagcagtaggtgatggtgcaaacgatgtgggcatgattcaagaagctgatattggagttggaataagcggggtagagggcatgcagatttgctacttcttttataagaatatcgcatttgggcttacaatattttactttgaagcattcgctgggttttctggtcaatctgtatacgatgattggtttatgctgcttttcaatgttgttcttacctcacttcctgttatatcactcggagtatttgagcaagacgtttcatccgaaatctgcttacaggagaatgacactcccatggaaccacaatcattagcaactggatgtagatcagactatcagagaactatactgtacttagatgtcagtcagttcccagcattataccagcaagggccaaagaatcttttctttgattggtaccggatccttggatggatggggaatggcctctactcctctctggccatattcttcctcaatctctgcatattctatgatcaggcaatccgtgttggggggcagactgcagacattgctgcggtgggaactaccatgttcacctgcatcatctgggctgtcaacatgcagattgccctaacaatgagccatttcacatggattcaacatctctttgtatggggcagcataacaacttggtatctcttcatcctcgcctatgggatgacattgaggtctggcgacaactaccagatcctattagaagtccttgggccagctcccatatactgggcagcgacgcttctggtgactgctgcctgcaacatcccctacctgatacacatatcctaccagagatcgtgcaatccacttgatcaccatgtgattcaagagatcaagtacctaaagaaagatgttgaagaccagacgatgtggaagagggagcggtcgaaggccaggcagaagacaaagattggtttcactgcgagggttgatgcaaagatcaagcagatcagggggaaattgcataagaaaggcccatctttaacaatccagacg

SEQ ID NO: 37963 - DNA, 672 bp, Zea mays
  Peptide Sequence Number=SeqID_81338
atggcgactccgacgagagggaagaaacggctggttgtcgatgtcgaggtcgacagtgaggccgaagtggcttccgccttcagtcgattgtccgtgtcaatcgttgccaagcgtacaggcgacagttgcggcaaggagcactcccccagcaaggacctcatctgcgcggccacctcagcaaacccccgccgcggcagccacatagtagtgccattcactccccagcagcagaccacttgtgtcgtcaaccagtgctcggcacctcgttcagtgtcgataacccgatttgaaacagttcgtagtgacctcgctcaggccattgcaaagatgcttgcagttggaaaggagttgaaagatttggccgaagatgagattatggcttcgccagacatggccaaagaggtgtcagtgaactttgcaatgtggcgcgtgtatgagcttgctcagtcacttgaggacgaagcacaacgtttagaagatctcgaagctggtccgtcaccaccattatctgagtgtttcaacaaccaatttgctgaagatgaagatatgggtggtggggaatgggcactggatgatgtcaattctgaagagattgacaatgctagcgatgcaacccatgagctggtgggtgttgttgtctttcgacgaccactagaagtgcatgtgtgctga

SEQ ID NO: 37964 - DNA, 870 bp, Zea mays
  Peptide Sequence Number=SeqID_81339
atggcggaggacatcattctggacttctcaaagttgaagaaatcggacatgatggccatcatgattctcagtaatagagttctcagccaccaggttacatgtgcctccttcaaaaaggcttctattattagagttcagttctggtacctggtatctgacagccttgattacaaaggtcacatgcatctgctggccgtggtcgtcgtggacgagcccgcgaagctggcggcggccgcggctacgaagtcgtcgccgtcgccgaagtcgcggttgtcccccgcgaaggggaaggcgaggacgggcgctgcgaagacgaggcagcgaaggctgcgttgggtgcggtcgcgtcgtccagagaagaataaagggaaacggaggaaggagacggcgttgcgtgtggctgtaagggtaaaaacgggacattgcaacgcgggcccacctgctagtctctactgcgactactcctctattgcccacgccgccgactgccttaaggccggcgtccgccaccaggttccagcgccgtggtttgccaacagctggccgcgccgccgtctgccagcaggagcccgtgaccccgtctgcgaccaggagcccgtgaccccgtcttccagcagcaggtccccgcgccgccgtctacaaccatcgtctgcaaccatcgtctgcaacctcgtctgcaactgcatggaggtagaaaaccgtgcccagtccccggattcatctcccggcgatgaaagtgagccaccccatccttccctccccacgatttctcctgtgcaaaggcaggatctacctgttaggagctcggatttgtcggatccccaagattttctgttaggggatgaacatagaatggaggtttgcttctaa

SEQ ID NO: 37965 - DNA, 309 bp, Zea mays
  Peptide Sequence Number=SeqID_81340
atggggcggatgcggcggcgatcccggtcgcctccagaagatggtgcagagaacctggccgaccgcttggagggcgagatctacgccacgctatgcgactgcggaatggaccccgacatagccgtcgagaggctcatctcccaggtagacgccacagtgctctctccaagtgtggcgcccactgcgtactccgccgcgaatcaccgatgtgccgctgccggtgacgaagaaagagccccgctcccgcccgccggacgtagccggtgcagcgccatcgcccccgccaggaagcccgtggacgcagcttag

SEQ ID NO: 37966 - DNA, 627 bp, Zea mays
  Peptide Sequence Number=SeqID_81341
atgggtcgccgaggtcagtcctgcatgacttcgctggtgagtggtgacattgtcaagaatcgctcagagagtgatgctccctgctgtgaagctgatactgtggatgagagcgaggaaagagagtcttgtgttcgttacaatttgcatatccaaataactctggcctgctattgtacacctgctgaaaacacaatagtggcaaatgggcaaactgcagcagccgctgaagcaggtgagcgcatgagcagcatagcatctcttgagaatagatgtattaaggaaccagagaagttcagtgaagcagggactacatcagccttgcttgatgatgcatggaatgataagcattacaatgatcagcacagctcaaactgtttcacatggaacttccattgtataattaatctgtttctacatgttttccgcatttcgaccttgagaattaattgcattcatgtgcccaataagccaacaactgtattccaattgcaagctattcagaatttgctagatcagttatctagtgttcctgatcagtgcgcagcaatccaatggctcaagatcagtttgacacattacaccaacaagtccaacaggtcaaattatcaaccagaaaaggcacattaa

SEQ ID NO: 37967 - DNA, 759 bp, Zea mays
  Peptide Sequence Number=SeqID_81342
atgggcgcgattaaggtcaaggctcagtccactcaagggacacgatcttgcctcgcccgagcccagcctcgggcaaaggcagccgaccccggaggattcacgtctcacccgagggccccctcaagcaacggacacaccttcggctcgcccgaggcccagtcttcgcagagaagcaaccttggccagatcgccacgccaaccgacccctcgggcgccataggaagctccgcctcgcccgaccccagggctcgggctcaacctcgacgctggacgacggactccgcctcgcccgaccccagggctcggacagcctcggcctcggaagacggactctgcctcgcccgacccagggctcggactcagcctcggcctcggaagacggtctccgcctcgcccgacccagggctcggactcaacctcgacctcgaaagacggactccgcctcgcccgaccccagggctcggagcctcggacacagcctcagcctcggaagacggactccacctcgcccgacttagggctcggactcagcctcagcctcggaagacggtctccgcctcgcccgacccagggctcaaactcaacctcaacctcaacctcggaagacggactccgcctcgcccgaccccagggctcggactcagcctcgacctcggaagacggactcaacctcgacctcgaggagcatccgcctcgcccgacctagggctcggaccgaccacgtcacaggggggccatcattaccctacccctagctag

SEQ ID NO: 37968 - DNA, 606 bp, Zea mays
  Peptide Sequence Number=SeqID_81343
atgaagttcaaagagcagggggtagggttttgggttctagtatcaaacaagaaaaagaaaaagaaaagagatgaacagtcctcggctgattctggcccgaaccggcccaaccagggcagaaatgcgcccgcgcccgcagaggcagaacccctggctactgttcaacgtttcactgacatctacaaaaacaacctcgcgcttctatcctttctccgttcgaagtccacggcggcgaaccgcatagagacgtactccgacaagcacctggaccagccggagggagccaagactggtggccctgagtggcgaacaccgaattggatctcccctaaacaattcccctcaaacaatttcaccaatggtgcactaaaacgccgtggccacggtgaccgtagactatgcggacagaggaacgtgttcccggtgatgggtggtggtctagttcaattggacggttcggtgagcatcaagagcatggaagggtgttggaacaataacacagagggcgagatcggacctgagttgagctggccgtggcaaggtgttcttcgtggtggcgaaaaccgaattgggggaagtttgaaaatggagctctctagcgattga

SEQ ID NO: 37969 - DNA, 441 bp, Zea mays
  Peptide Sequence Number=SeqID_81344
atggcggctcgcgcgcgataccacggtagcgccccaccggatcacccgccacggtacgattacaccaagactcttggttccaggttgtcgtgcggcaacgcgtactccccagcgacctcgcccggcaccttgattgaatccgcagcgctgtcagagcctgcgacacccgtggctctctctctcccttctcactacgatggcggcgctaggttttcctggaggggccatggagggctccggttttatacccatggggagaatggagtccgtgcaggcgaggatcacgcggccgaggaaccagggcggtcatggccgaggatctcgcgtcgagcgtcggccacccgcgcgacgcagacgattctgttgaggaaggggcgtctgaccgcatgggcccgcacggcagtgaactgcagagcgcgagcgcgagcaagagaccgctag

SEQ ID NO: 37970 - DNA, 261 bp, Zea mays
  Peptide Sequence Number=SeqID_81345
atgggtgtagataacatcaacaatgacaacgatgagctatcaaaggaggtaccgctggaggacctctctccgactaactctaagggccttgagcctgaggggtgcgcctacctcgggggcgttgagcgtgctaggctcgatgtctctaaggaggaggaggacaatgtcaaggagtacaatggagacaacaacgacgacgatgatggagatatcgacaacagtgaagacgatgtcgccacctcacgttgctgccttatgtag

SEQ ID NO: 37971 - DNA, 189 bp, Zea mays
  Peptide Sequence Number=SeqID_81346
atgaaccaaggcgagtttcacacgagcccccaagcttcacctggccctcttggtgagccccagatagagggtggaacagagttggatgggcatgacttcttccattttgagtacactagcgaccttcgagctggctggctccaaagcagctcgtgctacagagggtgccggtatgggaaggactactga

SEQ ID NO: 37972 - DNA, 267 bp, Zea mays
  Peptide Sequence Number=SeqID_81347
atggcgcggtcggtccgagcccaaggtcgggtgaggcggagacttctcctgaggccgaggccggggtcaggcgaggacgcgattcctcccgaggccgaggttgaggccgagccctggggtcgggcgaggcggagaccttcttccgatgccgaggttgagtccgagccctggggtcgggcgaggcggagacctccttccgaggccgaggttgaggccgagccctggggtcgggcgaggcggagacctccttccgagaccgaggcctaa

SEQ ID NO: 37973 - DNA, 657 bp, Zea mays
  Peptide Sequence Number=SeqID_81348
atgcgggggaaggcaaactgctgctgccgggccagggtgcagctgtccgtcctccacccgggcgacggctgtgccgcgcgcgggccggctacgtccaggtcctccctgcgccgtcggctgcacaacacgtcgtacgccgcgagggcggtggctgctgtcgtcggtgctgaggtggtggcagccagagaaggtttctccgccgacgagaccgtcggtgccacctgcggtcggacccccggctctttggctttgatggcttgtcctcgcccctcgtgtgggggcgtgggcgagggactttccacagcagcgtttgccctgaggccctctggagtggaggttgctcatacccacgggagtggaaccggagttccgtttgtaatggcaccctgggtacgggagcaggtggcttctcaggccaaggaggtgcaacggcggctggagcttggccaggtcatccgcgagcgggaccaacctcggagtcatgctgccaaggccgaccctgccgaagatcctggctgtgagggctcaagcgcggtgctggcgtcctctttcgaggtggagatccttccgcccgtgtcaccgtccgaggccgggccagattcaaccgaaggtggaaacgacgccgagggtgctgctgctccctctgccgatgtctga

SEQ ID NO: 37974 - DNA, 384 bp, Zea mays
  Peptide Sequence Number=SeqID_81349
atggtggcgcactccttcggcttcgtcgcatccggcatggaggcccaggcccacacgtcatgtaaccggcgcgccggttactacgtgcaagaaaccgcaccgccacttgcgccaataccgcgccttctcgactgcggaaccggtgccgcgactcgaggcaaccctgcgcatgacccaacagtgccaatcgagcacaacgatcacggatcaatcagccgcgggaggaagcgcgacgggaccgggaaaggggatatttcgaaagggatccttctccgcgaaggaagcgggccccgagccctcctactgattaggggttcgaaggctggccccttggaagggtttgacagccgccccagagcactcgggctccaagcccattactaa

SEQ ID NO: 37975 - DNA, 255 bp, Zea mays
  Peptide Sequence Number=SeqID_81350
atgagcctgacgaggggtggcccacacgacagtggtgcggcgcacgagtcgtgccggcgcagaggaagctgggccgagggcgccagaatcggcccagattcaaaaccagttcaaactttgactcagttttacatgtgcactttaaatccacagtatgaaatgaacatgtttattttaggtgatgttgcttccaatgtaacaaaattcttattggaaggtattctaatatcaaaatccttggagaacttttactaa

SEQ ID NO: 37976 - DNA, 330 bp, Zea mays
  Peptide Sequence Number=SeqID_81351
atggggaggaaaaggagcagcggcgctgtggatctcgggcgtgtcatgtggcttgtgctcgcgcgcagggaaatccccggcgccgtggctgctggccggagctggggctcgggcgccatggagcaagaagcagaggaagccgcgaccaaggggagagaagggggtgccgtggttgggaaaggagatggagcagagagctcgcagggaggggcgccggcgtgctcccagggagctcggccatggctgcactgcgggcgccatggatccagggataccgaacttgctctgccctgcgcgctcaggagcatggggagggcgacgcttgcttga

SEQ ID NO: 37977 - DNA, 714 bp, Zea mays
  Peptide Sequence Number=SeqID_81352
atggtgaccactagttcggtggtggggagaagcgagccgggctgcaatcttggtcccaccctcagcttcaaggatctttgtcatcctggctggggcggaggctgggctgagccggagctctacctcctgcacgggtcggccggccacctcttcttccagcttctggtggaggaaaccatcctccagctctgcggaggaggcgtcctccagccatgccggggaaggcgaactgttgctgcccagctaggacgcaacattctgtcctctgtcctcacttttgtggcgaggacgggagtgagggccagccggtgcgctttggagcggcctgcgcttgctggtgcggcattggtggacaggtggacgtcgccgtcggtgttgacgtcgagggtgctgctgctccccctctatcgagacttattcatcggtaacagaattgtttgttcgagcgagagttacttttcacggaaggtgatgagtgaggattctgctaacgatgtagttgagaaggcccgaaaaatcgtttcggcagaaaggtctccgagcattaagacttgttcggtcagcggaatcgcttatccgagcgtgagttacttatcgcagaaggtgatgagtgaggaccccacttttgaagtagtcgaaaagcacgaaagacattctggcagaaggactttttccaagaaaaattttgacgcagggggggttccccccttctag

SEQ ID NO: 37978 - DNA, 390 bp, Zea mays
  Peptide Sequence Number=SeqID_81353
atggctaactggttgactctggccacgttgaccgttgttttcacagtgttcttgagcagatttgggggaagtccaaaatttgagctcgctagcgatccactgagggcaatactgggtggctgggtacttgactaccctacggagcttgcggtggcttcaatttatagagcacaacagcggtggcccgggaattacagtggcgacgtgcggcggtcggaggaagggggagttcactggtgcagtgaattcgtgtcctacgccgtgacagtcactccggcgatcaacggggagccgagcaggtcatggcgatgcggtggaagtgcctggacacacgacgcaaggccggaaggcggcggtcaacggcatacttatcggattccaccgcggtga

SEQ ID NO: 37979 - DNA, 372 bp, Zea mays
  Peptide Sequence Number=SeqID_81354
atgtcatgtaaccggcgcgccggttacgacgtacaagaaactaccccaccactcgcgccaatgctacgcctcctcgactacagaaccagtaccgcgtctcaaggcagccctacgcgtgacccaacagtgccaactaaaggcggcgaccacagggaccgagaaaggggatgttgtggaaaggatccttctcggcgaaggaagcgggccccgatccctccaactgatcagaggttcgaaggctggcccctcggaagggtttcgatagccgccccagaacgctcgggctccgtgcccattactgatcaggggttcgtaggctggcccctcggaagggttcgacagtcgccccagagcacgcagagtgagggatga

SEQ ID NO: 37980 - DNA, 684 bp, Zea mays
  Peptide Sequence Number=SeqID_81355
atggggagcaccagcgccgccttgctcttgctgtcgttggaggagcgcggcctcgtggagattggcgcccttcagccatcgctcggcttcaaggattttcttcgagcagcccggctgcattccctcactaatgggcagtttggtggggagaagcaagccgggccgcagcctccgccctgccctcagcttcaaggatcttcgtcattcgggctagggcggaggagcacactgagtggggggttgcctccgcgtgggctggtgacccttttcttcccccagcgtttgggggagaaaggcatcctccaaccctgcggaggcgtcttccagccatgcgggggaagctttccgtccttcgtccgggcggcggtcgtgccgcgcgcgggccggccacgtccaggtcctcctcgcaccgtcagccgcgctagagggtcgcccagcacgtcgtacgccgcgagggcggtgctcgtgttttggagcgacctcgacgaggacgggagcgaggacctgctggtgcgctttggggcggccgctgttcgtcggcgcggtgtcggtgggttcgaacccacggtcggcgccctccgactcttcggacttaacggcttgtcctcgcccctcgtgtggggacatgggcgagggcctcttcacagcagcgtttgccctgaggtcatcgctgttgctgtttag

SEQ ID NO: 37981 - DNA, 501 bp, Zea mays
  Peptide Sequence Number=SeqID_81356
atgataaagtgtttaggcctcggcggccgcgaaaaaacatgcgcgtgctacagacaaactgtttccgcaggtttaggcatcggcagggggagcagcagcaccctcggcgttgtttccaccctcggcggaacctggtccggcctcggacggcgacccgggcgaaaaggacctccacctaagggaggacgccagcaccgcgccagcagatgtctcggccaagctccagcggctgctgccacatcttcctcggcctggaaagccgccatctcccgggccgatgaagtctctttccgagccgactccgcctctatccgcgctaacaccgctgcctccggctccggctcatcgcagagcagccaagggttctcaaaaactgagcaagagaggcctagagcggcaaggccgaccgagccgagggactcctacgcctccgggatacggatacctcactcgtcaccttccgcgaaaggcaactcacgctcggttaagtggttcggctag

SEQ ID NO: 37982 - DNA, 1697 bp, Zea mays
  Peptide Sequence Number=SeqID_81357
atgccgcgcacgaagaatgtgtcggcgccagggggaggcgatgatgaggatcctcgtcgtcccttcaggcaggtcaagggcaagacaatttacttggagcagcaggaaggccgcaagaagcggcgtacggacagagcagcccatgcagcagcagcagcagccgctgcgcaggccgagcttggagatcagccgcagactccgtcagatcagattgcataccatgttcgtcgtctcgcctcccggcctcgctcctccactcacaccactgcttccactccaccaccctctctgcctgctcctgtcacccctgttgcgccatccaccaccacagccatacccgctacctccactacgccagcttccactgctcctcccgctcccgcttcagctcctcctgtccctccacctcgtttccgggagcgcgatgagactgaggtacaaccacttgctgcggatcctagactgtttgaccttcagcgtgctacagcggcacggatgtctgctcagatagctctgcgagtgcaccggctcttggaccttctagcttttctgcttgccgcaggtgctgactctgaggcacacctcacatatctgcctggccttctgacccttttgactactagcggcagatgggtcgcgacgttcaccggcagacttactacagcagccaagtacttatttgagcttatcacacggactcttctgccgaggatgggatacagggaggctaccacacatattcaactctggctccttggtgccctggtctctcactctgagtttgacgtcgtggacttccttatttgtgagatcgaggacaccgttttggatgggattcgtgctcgtcgacagttgccatatgctcactacttatgccacatatttgcgcagctgattcagcctcctcggtttcagggcacacttgaggcctcacgcctcgtttttggatcctaccgtcctgcgcctgagactcctgtgccagcttctgctcctgtttttgactctcaggccgaggatgcagctcttcatcagttcgacactcaggatacaacagttgttgttgatgatgatgatgatgattttggggttcctcctccgcctcctatgcctctacgctcacatgatcatgaggctgggagttctagtgatgcccctgctgcccctccggctatggaccctgctcttgcttcgattctccagtctatcactcagcagcaggctcacctggcagccgagcaggcccggttatccgagaggatgctctcgatgtttcagaacatgcaggacaggcaggatgcgcttcagcacagctactccaggatcaggctgagagcaggggcattcatggctcttatgctacatcattctggtgtctcagttcccccagttcagtctgctccacctcctccgcttcaggctccagttgtgccagcgattcagaccggaccccctattccttctgttggtccctctctgctccggccggccactttggctttcacctctccggttctcagctctgtctgcccgcagccgccagtgccaccagcatctgctgttaccactactgctgtggcagtatctgtgaccacttctgttctggcagctcctgcagcgcggcctcagtccgagtcagtaccagctctagcttctaccgcagatcctggatccgagactgactctgaccccccgccggc

SEQ ID NO: 37983 - DNA, 1068 bp, Zea mays
  Peptide Sequence Number=SeqID_81358
atggggtccaggcacagtgcttgctctgccaaggctgagtgccgaggttctttcgttttgcttttgttagtcaccctcctgcggggagagatggctcgtcttagacacactgctcgtaagtcggtgatccctttcctgccgtctcgccttgcggagcgtcctctgcgccgcacagtatccggtcagtcgagtcacctggagaggctacaccaccgcctgcatgaggagcaggagcgccagcatcagcagagggagcagcagggctcttcctccctgcttgagcaggaagtggagtccgcgccccctgcaccaccgtgggacgccccggctgctggaggaggtcctggaggagaccccaacgacgacgacgactcagaccacagcactgagccctctgagccgcaggaggcggaaggatggttcgcccgacccatcacccgtgacgccgctcgcggttgtcacttccacgacgcactcgacaccttgttgcgccgggctttcgaccggcacacctggtcgatcgagtatcgttgtgtagtctaccagcacagtcgcgggaggtacccggaccgctgggaggctacctgcctagtatgccgtccggaggatgaccttcggggtgcagaggccttttcggagcattactccatttccgagagggacactgcggaggcggctatgcaggatgaagcacgacgtgcactctcccagtactgttccttattcaatggggtggccgacggtcttaaccttaggtactacccccgccgtcctactggtagcgcagagagtgtggttgtctcgcctattggtgaggataaccctaggttgagcagcacagtcaacctagtcgctgtgcttaacactgagctggaccactctctggacgagctgagcagggctcgaacggagattgctgagttgcgtgctgagctggcagagcgccgccacctggagggtggttctcccgctcctgttgggactcagtacctttaccgctcgccgccacgtggtcaccacacctatggttcccctgcttgtaagaccaggatagatctggatccttag

SEQ ID NO: 37984 - DNA, 1044 bp, Zea mays
  Peptide Sequence Number=SeqID_81359
atgcaggtagtcgaattggttccttgcgcccgcaacaagtggggcaactggaatgagttttggttttacgttgctgagggtgccgtcgaaggccatgagggactccccgtgtctgagatgtgttctcatttttactcagcgtacccgccctttgaagtggcggaggaggatgcggacgaaggggccctacggtgcgccgccggcctgagcagtgggcgcgacttggttgaagaatttgtggcgtacaggaaagttgatgaggacgtgcgcggccccggggggaaggatgtcttcgcccgagctccgggagtcttcggctcggatgctgaggggtcgggcgaaggccaacttgctatggttgcgcctgccgcggcgaccacgacggctgccgcagtgccgaaggcgaagggcggggctcttagcgtcggaggcgaggtgtcggccctcgcggttgtcagggatgaggcgggcgctgcgtcccgccggctgaaggaggtgacggaggcgctaaatcaggtggctgacttcgccagccgcacagcgtcgggggccctcacggcagctgtggctgccgaagtcgagagacttcggacacaacatgctgacgccgtccgtgaaaaatcggccgccgacagcaagtgtcgcaagctggcggacaaggtggccacgctggagggagagaaggctgacctccggcgccagttggcggaagagaggagggagaccaacgaggcccttgtcaaggcgcaggctgtgcagacggaggctaacctggcacgggcggagggcaatcttgccagggagacaaacgagcaggggcaggagcgaatcaccgaattggagaagtgcgtggagagggccgaggccaggtcacgcgcggaggcagagcggacgcgccaaatactcatagatacataccgtgggctgggcgcggggaccggtgatttcgaagtgccggaccgagagcccggacttcgctgcctggagtgggtgcaggaggagttgcaggcactccccttggtcgtggaggggtttatggcgtag

SEQ ID NO: 37985 - DNA, 216 bp, Zea mays
  Peptide Sequence Number=SeqID_81360
atggcgtgcggcggaaacgcaggtctggcgacaaattccgtcccgtggtttgggatacccaagctccagtacgcggcgtgcccgcggaggattccccgcgtcggtgcaccgcccagggtgcaacgccgccgccgagcgcatggaaaggtcaaggtgcccgagaagcgcgctggagttctcggcgaggtcgtcgcgctcgccccggagttccgttga

SEQ ID NO: 37986 - DNA, 135 bp, Zea mays
  Peptide Sequence Number=SeqID_81361
atgggaaccaatgggcatctcgacctcgacacgggaggtaaaatcttagatcaaaaggcgcatcagttcgcctttggccttggcgtgtgggaagggaggattggtgcgacaccaccaccaccaccatggcgatag

SEQ ID NO: 37987 - DNA, 618 bp, Zea mays
  Peptide Sequence Number=SeqID_81362
atggcggtcagacgggggattcttatggtcaataccaggaagggtggtggaattgatctacctcccaatcgacacactagaaggatatttagacaaccacaacaacaacaacctgagatggatcctccaccgcctccaccagcaggagttggcgcaactgttgcaacacaaatgaggataatgcaacagatgactgacactatggcggatatgcacgcgcagagcgagaggatatacgccgggagatgcgccaagagcgagaggagatacgccaggtgtcggcgtttcgaccccggggggtccctggaccgacgagtaaattgtcgccgcgtgccccagcccagatgggtcggcgcgagacggagcgcgaaggggggaaaccagagggaggcaggcgtaaaaggggaaacccgcggccttcgtgtttgtcccgcgcccaggtcgggtgcgcttgcagtagggggttacaagcgtccgcgtgggagggagcgagaggcctgcacgtgccgtcccgtcctccccgcgcggccaaccctctgtaagatggccctggaccttccttttataggcgtaaggagagggtccaggtgtacaatgggagatgtagcagtgtgctaa

SEQ ID NO: 37988 - DNA, 72 bp, Zea mays
  Peptide Sequence Number=SeqID_81363
atggaggagaacgacctgctgggagaagacctggtcgactacgaggcttctccagaacgcccagaaagttag

SEQ ID NO: 37989 - DNA, 999 bp, Zea mays
  Peptide Sequence Number=SeqID_81364
atggcaccccctgttgacgtggcggatctgtgccctaggcagggtgacgtgggggctcctccgaagccgagggcggagtccgagccctggggtcgggcgaggcggaagtcgttcggccgaggccagggcggagtccgagccctggggggtcgggcgaggcggagttcgttcggccgaggccagggcggagtggagttcgccgtcttccgggtcttagcccgagtccgagccctggggtcgggcggagcggagttcgccgtcttccgggtcttagcccgagtccgagccctggggtcgggcggagcggagttcgccgtcttccgggtcttagcccgagtccgagccctggggtcgggcggagcggagttcgccgtcttccgggtcttagcccgagtccgagccctggggtcgggcggagcggagttcgccgtcttccgggtcttagcccgagtccgagccctggggtcgggcggagcggagttcgccgtcttccgggtcttagcccgagtccgagccctggggtcgggtggagcggagttcgccgtggcgcctttggcaaggcctgactgcctgtcagactcactctgtcgagtggcaccgcagtcggagtggcgcaggcggcgctgtccttctgtcagactgctttatgctgatgggggttaccagctgagaattaggcgtcttgaggaaaagttattccatctgagattagctgctatacttgatgacgttgaggcagagatgtcctctgaaaagcaaaggagagaatctgcaccacctatcatatcttcacataagcgtgctgagaaagcccagtacttccttgctgaggtaatgcataatttcaatggaaccacggagaaggaactgagcttaattgttggcgattatgttgttgttcgtcaggaaacaggacagaatggaaggcatcagctgtataggaagacccacaatgattctgagatccttgaggttgggagagctgttcagcaagcatga

SEQ ID NO: 37990 - DNA, 183 bp, Zea mays
  Peptide Sequence Number=SeqID_81365
atggcgacctccggcttgatggtgggggaaagcgagctgggctgcggcctctgcccctccctcagcctcaaggattttcatcaccagggctggggaggggagtgcgccgagttgagctgtcggggcctgaacatgtacgtaattttggcacggagccgttttttcctcattttcgagcactaa

SEQ ID NO: 37991 - DNA, 249 bp, Zea mays
  Peptide Sequence Number=SeqID_81366
atgggcgcgcagaaacagcgagccaatcgccaatcaaactttggccccacctgcagtgggcaaacggatttatccgcggatatccgttacccgcgggtaacggatgtggatactgtttgttatccatggcgggtaacgggtacgggtttggatatcggatataagtcgcggatatggatgtctagagacactatccgcggatattttacccgttgccatccctacctgcaggctcgtatcctcccctga

SEQ ID NO: 37992 - DNA, 624 bp, Zea mays
  Peptide Sequence Number=SeqID_81367
atggccttgctagatcttcgcgagcgcttccaactcgaggtggcactcaacttggtgcgcaacccgcttggatggggtatgctggcgtttgccgggaggacctgtgtcggtgtctcttctctcggcgacctcgccgccgaagagtttgtgttctttgtttccaaactccccagcgagttggctctgtcaatcccatctttcctcgtgcaactgttggaggggcttggcctccagcctctactcgtggtgtcctgcttcatccttcaggcggccatcatcgcctacctctgtgggatgttcgtggaggcgacgctccttcccacttcttcctccagcattcggggggaggatgattaccagcctcgtgaaggttcgtcgcatccgcagcgtcccctgtgccgccggccacgctgttccgacgccgcccagggggacgaggacaggggcgaggacctcttcacacgcgctgaggtggtcgccgtcgccggcaagcccaaggtgcagaggtggccgcctccgctggccctactggacccgccatctgacactagccatcctttgatacatgctcggtacctacggggtctagtatgggaggccaagttgtgcgtccggaccccctag

SEQ ID NO: 37993 - DNA, 1383 bp, Zea mays
  Peptide Sequence Number=SeqID_81368
atggcgtggggtgctcgaaaagttggaaaaaattgctattttagcccttttaacgtgggctctctgaatattcaaaatttgcagtatgtgaagtgtggctttgctggtgagaacttccctacatctgtgttcccttgtgttgtcggacgaccgctacttcgctatgaggagtcacttcaggaacaagaattgacggatattgttgttggagcagcttgtgctgacttgagacatcaacttgatgtatcatatcctgttaccaatggcattgttcaaaattgggatgacatgggccatatctgggatcatgccttctacagtgagctcaaggttgatccatctgagtgtaaaatcctactgacagatccaccactcaatcccgtgaaaaaccgagaaaaaatgatcgagacaatgttcgagaaatataactttgctggggtcttcatccagatccaagcagttctttcactgtatgctcaaggcttgctaactggacttgtgatagattctggtgatggtgttactcatgtggtgcctgtagttgatggatactcttatccacatctgacaaagagaatgaatgtagctggaaggcatataacatcttatcttgttgacctactctcaaggagagggtatgctatgaataaatctgctgactttgagactgtcagagaaataaaagagaagctatgttatataagttatgattacaaacgagaataccagctaggacttgagaccacaatccttgtgaaaagttacactcttccagatggaagagttattaaagtaggcactgaacgatttcaagctcctgaagctcttttcactcctgaactgatagatgttgaaggtgatgggatggcggatatggcattccgttgcattcaggaaatggatattgacaacaggatgacgctctatcaacatattgtcttaagtggaggaagtaccatgtaccctggtctgccaagtcgaagtgtagacaacatagagaagtacaatttagcaaagaagatcacaaaacgacctttgcatattcttaaacaagttactactttttttacaaggttggagaaagaaattcttgaccgttatcttgatgtagttttgaagggaaacaaagatggcctaaagaaattacggctgaggatagaggatcctcctcggagaaagcacatggtgtatctgggaggtgcagtgcttgctgggatcatgaaggatgcacctgagttctggataaccaggcaggagtaccaggaagaaggtttagattgctccgacaggtttctttatcatggtatgcaccgcataaaaaaagaagtcagaaaattcatttgtggtaatatggccctctttaagaatcttgagcaacagtag

SEQ ID NO: 37994 - DNA, 63 bp, Zea mays
  Peptide Sequence Number=SeqID_81369
atgacctataacatccatgttatacgtttcaacgccatgggtcatagcgccaagagggtgtaa

SEQ ID NO: 37995 - DNA, 1236 bp, Zea mays
  Peptide Sequence Number=SeqID_81370
atggcgtctgttggtctgccctgccctgccagctgccatctcatctatatatatgcggcatcaggtcggccactccagtcttccaaaacgaagcaaaagcaaccgtcgagcttgcaacgccttacgcctccacactcaacagtcatggtcgtcatgggcaaggagcagcaacacgaggaggaggaggtgcaagggaaggtcgtccaagaagaagtgcaagtcgtccaagagacggtggtgccggtgccgtcggaggaggacaaggaggccgaggcggcgctggtgcacaagatctccagcctggccgccgccatcgcgaagctgccatccctgagcccgtcgccggaggtgaacgcgctcttcaccgagctcgtgacggcgtgcatcccgcgcagcagcgtggacgtggagcggctgggcccggagctgcaggagatgcgcggcgggctgatccgcctctgcgccgacgcggaggcgctgctggaggcgcactactccgacctgctggcctccttcgacaacccgctggagcacctgtcgctcttcccctacatcaacaactacatcctgctgagccagctggagcacgggctgctggcgcggcacgtgccgggcccagcgccggcgcgcgtggccttcgtcgggtccggcccgctcccgctgagctccctggtgctcgcggcgcgccaccttccgggcgcctccttcgacaactacgacatctgcggggaggccaacgaccgggcgcggcgcctggtgcgcggcgacggcgcgctccaggcgcgcatggcgttccgcacctcggacgtggcggacgtgacccgggagctggcgtcgtacgacgccgtgttcctggcggcgctggtgggcatggcggccgaggagaaggcccgcgtggtggcgcacctcgggaggcacatggcccccggcgccgcgctggtggtgcggagcgcgcacggcgcgcgcgggttcctgtaccccgtggtggaccccgaggagatccggcgcggcggattcgacgtgctcgccgtgcaccacccggagggggaggtgatcaactccgtgatcatcgcgcgcaagcccgttgccgtcgacgcgcacgccaccggcggggtggggcacgcgcacgcgcacgcgcacggcgccgtgctcaaccggccctgcctctgctgcgagatggaggcccgggcgcaccagaagatggaggaggtggccgtcgagcagctgccgtcctag

SEQ ID NO: 37996 - DNA, 1212 bp, Zea mays
  Peptide Sequence Number=SeqID_81371
atggagaagagccgggtgctggtggtgggcggcactgggtacatcgggcggtggctcgtgcgggcgagcctggcgcaagggcacccgacgctggtcctgctgcgggcggagatcggcctagacatcgacaagctccagatgttgctctccttcaaggcccagggcgcgcggctggtggaggcgtcactggaggaccacgcgggcctcctcgccgccgtggcgcatgccaacgtggtggtctcggccatgtccggggcgcacatccgcagccacaactcaccaaaaggcgacacgggcagggaacttgcagatgccctcgcaagggtggccttccaggagcgagtcggtgtaaaaggtgacgttcgccaggtggatttccagaaggacatagttagagcagctgaaggtttggtgtctattggaaacaaacatattgaagtgggaacaaaattttctgaggactgctatagatatggaagcgaaaataatgcaagcgacgaagcccttagaaaagcagcatcactatacggaggtgctttgataaatattgagaaagagtatgaagatttcaacagaattttatcttctcagactatagacccattgagagcaatggctataggtggtcccctggaagatgctcgtggtcttgcacaacgctatagcaggatgagacatgaagctgagatcctctctactgaaattgctagaagaaaggcacgggtaagagaagctccaattgctgagcacactacaaagcttcagcaatcagaagctagaatgatagagcacaaagcaagcatggccgtgttaggaaaggaagcagcagctgcgcttgcagctgtcgagtctcaacaacaacgggtgacccttcagcggctggttggcgcggcggaagcagaaaagttattccatctgagattagctgctatacttgatgacgttgaggcagagatgtcctctgaaaagcaaaggagagaatctgcaccacctatcatatcttcacataagcgtgctgagaaagcccagtacttccttgctgaggtaatgcataatttcaatggaaccacggagaaggaactgagcttaattgttggcgattatgttgttgttcgtcaggaaacaggacagaatggaaggcatcagctgtataggaagacccacaatgattctgagatccttgaggttgggagagctgttcagcaagcatga

SEQ ID NO: 37997 - DNA, 1860 bp, Zea mays
  Peptide Sequence Number=SeqID_81372
atggccttctggtggccgctgctggtgctcgccgccgcatacgcgctctgtcgcctgctcctcttcctcatcccgcccaccgtcccatccatcgacgtcgacgcctccgacgtgttggccaaggaggacagcttcatctacataccgagaaggggtaaatcaactcagactgacaaggtccaatgctatgaaccagcgaccatgaaatacttggggtacttcccagtggtgactcctgatgaggtcaaggaacatgttgcacaatccaggaaagctcaaaggatatgggcaaaaagcagcttcaagcaaaggcgccagtttcttcgaatccttctcaagtatatacttgaacatcaggatctcatatgcgaggtatcatctcgggacactggaaagactatggttgatgcttcattaggagagataatgaccacctgtgagaagattacctggcttttggatgagggcgagaagtggctgaaacctgaatacagatctactgggagatcaatgctgcataagagagcaaaagttgagttttaccctcttggagtgattggtgcgattgtatcttggaattatcccttccataatgtttttaatccagtgctagcagcagtattctccggtaatgcagcagttataaaggtctcagaacatgcgacttggtcgggctgcttttattttcgtattatacaagcagctctttcagctgttggtgcacctgagaatctggtgcacataataactggttttgcggaaacaggccaagctcttgtatcatcagtagacaaaataatatttgtgggatcaccaggtgttggaaaaatgatcatgaaaagggcgtcggagactctaatacctgtaactctggagcttggtggcaaagattcatttattgtgtgtgaagatgtagatttacccagtgttgttcaagttgctactagagctgctctgcaatctagtgggcagaattgcgctggtgctgaaagattttatgttcacgatgacatctattctgcctttgtttcacagatagtgaagacagtcaaatctataagtgttggccccccattatcaggcagatatgacatgggtgcaatctgtatgattgagcactctgagaaacttcagaatcttgttaatgatgctctagacaaaggtgccgaaattgccgtcagggggagttttggcaatcttggtgaagatgcagttgatcaatttttcccaccaactgtcctggtgaatgttgatcacacaatgaaaattatgcaagaagagacatttggacctattataccaatcatgaaattcagttctgatgaagaggctatcaaacttgcaaacgactcaaaatatggtcttggctgtgctgttttttctggcaaccagaagcgtgccatcagaatagcgtcccagttacactgtggggtagcagcaatcaatgattttgcttcaagttacatgtgccagtctttgccattcggtggtgttaaagacagcggattcgggagatttgctggcgtagaaggcttgcgagcttgctgccttgtgaagtctgttgtagaagatagattgtggccatatattagaacagtgatcccgaagcctatccaggtctacttcttccccagcccccatgatacaagtactcttgatttgcatggtttacttggttcttgtggctctgctatgtatcccgtctcagagcatggatttgagttccagcagttgcttgtggagactctgtatggctatagcgtgtgggacaggttgcggtcccttgtgaatcttataaagatggttaccgagcagaattttgccccgacttcaaatgcgaccacgaagaaaaggcgatga

SEQ ID NO: 37998 - DNA, 273 bp, Zea mays
  Peptide Sequence Number=SeqID_81373
atggcggccaccagtaagcatggcatttatgagcacgcgctctcgctgctcgtctgctcaagcttgctcaaccgcctcccgccgcgcacaccaaatttaccacaccaaatttaccttcagcaacatcttcggcaaagagaggagccaacatgtgatgtggggcctgagatgtcgccctcggttggtcatctcaagggttatgattacactggcacatgcttcatgactatgaggctaagatgggttggagacagttggccccatgacaagtag

SEQ ID NO: 37999 - DNA, 150 bp, Zea mays
  Peptide Sequence Number=SeqID_81374
atggcaacatctgaaagagatatggtttccaccggcgtggctaaggttgtaagagacttgctttactttatgcgccgtgaagttcttcatcaacaagggctattctacaatgcggtgcaccacaagcggttcctggaaccgcctgtgtag

SEQ ID NO: 38000 - DNA, 351 bp, Zea mays
  Peptide Sequence Number=SeqID_81375
atgggcacggcggcgcactcggcgctcgggctcggcggcgctcgggctcgaggatggggacggcggcgcttggcctcggagacggtggcgcttgggctcggggacggggaaggggacggtggcgcactcggagatgggcacggtggcgcgctcgggctcgggtacggggaaggggacggtggcgcactcggagatgggctcggcggcgctcgggctcggggacggggaaggggacggtggcgcactcggagatgggctcggcggcgctcgggctcggggacggggtggagggcgcctcggatgacggtggcgctcggggacggggacgggcgcccagctcggagacggtag

SEQ ID NO: 38001 - DNA, 126 bp, Zea mays
  Peptide Sequence Number=SeqID_81376
atgacaatgggcacctggctgaccaccgaccggcgagcttacacgacttcacattcagcttacacgacttctttagcgccagtcttagcaaatgataacaagaccaaaggagaccttacagtttaa

SEQ ID NO: 38002 - DNA, 534 bp, Zea mays
  Peptide Sequence Number=SeqID_81377
atggccgctggcgcgttgcgatcgccgacagcgaccggcgcgggccgtgtctgcagcgcagcacaggccagcacagagcccgcgcccgcacccctcgctcgacgccgtcgatcgatcgcgccaacaacgcactgcactggacatggacaagcaccagcgcatttcatgtacggccgcggtgcattgcgtagaggactgcagagggtgcacgcgattgcgtcagcggttacgctgcgtgacggcgaccgcgcaactggcgcggcgtcgagtccaacgacgccgagatgtcgaaccgcaactccggaactcgagtctggccgcgcgctctatcatgtggcttcaaatttcaccgagctcgtgcctatccacatgcgtgctgtcttcgtcgtcgtcttcttcttcttcggtgaagttctgatccgtggacttgttcttcaaacaagttctgaaaaattctccatatacaggtggccaatgcaagttgcattgctccttggccgcattcatgcatatgagcacgattgtgcgttgtga

SEQ ID NO: 38003 - DNA, 2520 bp, Zea mays
  Peptide Sequence Number=SeqID_81378
atggtgacatttgaacagaagggtgttgagcggtgggagaagaggatggagatgttggatcggttgggaagtagactggaggtgatggaggcagatcaacttcgactcaaggagcaggcggatcgcgtagccacagcgacgagaaaggtggaggcgatgtcgtcgaaaaaaaagatgaaggggacactggagtggttcaacgctaccacaggttccggattcgtcacttcagtcgaccatggcgagttcctgtattttctacaaccgtccctcaagtcccatgagctctcaggtgaccagaaccttaagatcggtgaggcagtcgagttcggcatcatgggggacaggtatggctatctcagggcctttgacattacacctcttggaggtggcatgctctctggtggttttgacatctatgccagttggaacaacaacctggattgggttgttgagaacagcgacgatgaccatagtggccacagctgcggtccagtgctgcttgaaagtatggaccctccggtgtttgatgaaatgtctcacccctgtagtgaggaatctgggcatgaaagtggggtgaatctggaagggaaggatgaccaggcgcacatcaattgcgagcaggatgttgtacatgatgctctttggatgttggttggaatgtcccatcaggccagtatacaaccggtgttcaatgtagtgggtcttacggcagcatgggatgaggagatgcaatctaaaactcacatgcaagaaggtttactgaagcagcttgctcaaggtggagaagatttaaaagaatcagctagcaagggtgctcatgttgaaggtgaagctagttggcctgacccaacgagtgaggcaactgaggtgattaagaatggtggaagcatggaggattttcttcctgctagcgcttgcagtgtgcttgggggaagactggagaaggaacagaatgctgaaggtcgggtcgctgttagtaaagtgaaggagttggtagaaggcttctctagtggtagtgtctctcgagactttatcagtagcagggttgggcagatgatatttgatgaatctgaagggttgttgatgagtggtccatatggagattatgttcaatacaagaatgcagcattactgtacaacgttcgtgatcactatggcaggcagaacaaaggcagtgtgcaacttggaataaccggattgacacaatggtggctcaatgcttttagctcaggaaacagtggtatggcagttcagtcacagccaaacattcaaaggaactccatgaacaaattaaggggattatcgtttagaatggtgtacgataaaggcaaggagaatatagtggctgatacattttcacaagggggttcaattatggctacgtatggtgaccttgttgttcaaatagatatacctaaatttgttgtgactaattcctatgctctggatatgttgccaatagtgaccatccacagtccacatggggctgtgtactcagttcagtggggcaaagttaaaaggctccatcagtttgggaagcagtgtttagtttctgagcaagcgaaagaagagcaacagctatttggtgggttctggcatttgttttcagtgctacaggggatttgggagggcctaaagtcagattttcttgaggattttctcatacctgaaggctatgattttattatgatgcttcagtgtgttgcccaggaccatctcccacggtggaaaaccttgctaccatttgttgaactgtggtaccgccctgataagaatgctagcaacccagaagcatcagaactcttcaaagaagttgcatattcttataacatcttgtcagatccagagaaacaaaggcagtatgataatgttgaatttgaagcattagaaaatgaaggagtggatatggaaattgaattgtcccatcttggaactcctctatggtacctcgtcgcgaaggatcaaagtgatcccctcgtcgccggaagaagaagcgtcattaacagccatagaaaaatggagcgatctggctggtggggcgaccacgagggccagtcgacttctgtaccgtcaatcgtgtccgggcatgagggcgcactagagacaagacttggacgagcagtccgctcgatcgaacaacaacaacggaggtgtcttcatctggtgaagcctgcggttggcaagcagggcacgacccctatccatggagggggcagtaccacatcggacagagcggttgctggatctcgaactctcgcaaccggtctgcagcccgctacgacaaaggcggtcacacccgttaatcaagacatggcgttggtggttgttgcggcgttgctggggccgacgccgagatcgccaccagtccggcgaacacgctcagggtcaaatgtggctcgtgtgtccttggtgtggtgcttcttggcatggcggcagcacgcaaaaggcggcgtgcaacgacatgagcacctcgccgctgatgatgttcgccactcaaagaccgaaagaagaaagtga

SEQ ID NO: 38004 - DNA, 537 bp, Zea mays
  Peptide Sequence Number=SeqID_81379
atgtggcctactgcccgtgacgtaagccagcgggtggagccagacgtaaggcctctaggccgcacatttattgcggaggaggcgcgccgcctatcaagctggcaggtgatgtgccgcctcagcattaaatacaccatgtctactccactgacaagcgatgtgccgcatcagcatttaatgtgccctgtccactctgctgacgggcggcggccaagccatcctgcaggcgacgtgcccgtccgctccggtggcagtcggtatgcccgtgctacgacatacattgtgttcatcatcactcgtgaagcttccgttgcacgtcaatactacgcatgctgcggatatcaggacgcgaggagattgtgtacaggtgtttgctatagctcaagtcctctaattcaaaagctatttttgaaaatcaaaaatcactttaactttatttggctgaccatgctgagctttccagctgaacttaacttcagctgtgatgagcttcttcagctgcagctgagcttttcagctgagctggacttcagctga

SEQ ID NO: 38005 - DNA, 978 bp, Zea mays
  Peptide Sequence Number=SeqID_81380
atgccgcgctttctccacgcgcttcccccgcctgccatcgccagcgcgctccctctgcgccgcaatcaactccatcgcccccgccgccgcgcgcatactcccccaggccccaactgctgcccccgcacctccctccccctcgttcaccccatcctcctcgcgacgctcgctcctcctcgcgcaaaccctagcctcctcttcacactaccctgctctgtcgtcggcgagaccacacagatctactacgagctcgcccgcctcggcgcggacatgcgcgtcatcgagggcaggcgggcggccttggcgaggaacgccacgagggccacggccgaggcgaccggtgacgggctcgagccctcgacgccggcgccatggagggggcatcgcggtcaggcaacaccgcgcacctcctccccacgccgtcaacagaatctccttccaccatcagcagaaggtcgccttgctgttgctacttccgcgctcgcctcagatccacgatcccgcttcacagccacaaactcgcttcctagatccatcttcttttgcttgaattccgttctttgggagcaaagagctagggacggtgggggcgctcagcctctcggggtgtcctccgtctccatcgtcatctgcaacaaggctctcatgacctccgttggcttcaacttcccatccagcgacggtgtcgcccgccttaactccttccttcgccgccagcgcgccgtggtcgccgtcctagcagcaggggaccgtaccgcggagaggcccaccaagctcgtgctctctgacgcctccaaaagcgtgagcttgattgtggcggcaatatgctacgcgtggatgctaccaagcaagggggatggccaggctgcagtgctggtggtgaacatgcgccggagcaggatggcttggtgcaggcaggcggcttggctcctgtatcacgttggggtcgatgcatcggcgctgctcttcaccgatgag

SEQ ID NO: 38006 - DNA, 1470 bp, Zea mays
  Peptide Sequence Number=SeqID_81381
atgaagttgcgttcctccaacggcaagtcgggaggattgcgggtgttccccatccgggggctcggaaggtggaaagacacgatgcataagggagggcgaagacatggtcgccttccaaggggtcaccctccttttaaaggcgactctccctacttgcgtccccagccgtcgtgggcagagccttctccaacacgctccaaggtcctcccactactgcgcgggggctgggtcccacgcgtcatgcaagccaaaccgccgcgcgcggtgcatgcaactgcccgccggttacgagcattcctccactttcgcccagaccagcgggtgaaagggcgggcagccatgcaggcggcatgcaaccgcgccaagtgggcgtacccctccgacttccaacgcacccagcatggaggcctaggcccacgcgtcatgcaaccggcgtgccggttgccacgtgcgagcaactgcaccgccactcgcaccactaccacgcctcctcgactgcggaaccagtgccacaactcgaggcaaccctacgggcagcgagagaaccctctctcacagcgtgaagacggcgcgcccgtgttccgttcctcaaacggctcgcgcacgtgcaacggccgcctcgcgaaccactcgcctcgctgcattaactccgcggcgggacaggcggcgcctcaggcaggagaagcaagcgacgctttgccttcgccacaaggaccgcgtcaaaaaaggcacgccgcgtcattcgatttcgccccgagcctccctactgatcagaggttcaaaggctggcccctcgaaggggttcaacagccgcctcagagcgcctgggttccgcgcccactactggtcagaggttcgaaggccggcccctcgaaggattcaacggccgcctcaagccactcgggctccgcgcccactactgatcagggcgggaacgatcttgtaacggaatcccatcagagggaggcatcgagccctcagaccctgtcgaaaggggaccgggtccggcagatcacccgcagcgccgcctgcgccgctccgactgttgtgccactcggtagagtgaggctgacagcagccaagtccggcctcaggcgccataggaaactccgcttcgcccgaccccagggctcggactcgggctcagccccggaagacggcgaactccgctccgcccgaccccagggctcggactcgggctcagcctcggaagacggcgaactccgctccgcccgaccccagggctcggactcgggctcagccccggaagacggcgaactccgctccgcccgaccccagggctcggactcgggctcagccccggaagacggcgaactccgctccgcccgaccccagggctcggacttgggctcagccccggaagacgacgaactccgctccgcccgactccagggctcggacttgggctcagccccgaaggacgacgaactccgctttgcccgaccctag

SEQ ID NO: 38007 - DNA, 984 bp, Zea mays
  Peptide Sequence Number=SeqID_81382
atgcaactaggacgggttcatccatcattttcttggaatggattcattccgcagaatcgcctagctgttggcttgcgggagcactgtgctgctgtgcagaatgccatgagttcagcttgtgctgcaaaccaaacagctaagggaggttcgctaactggagcaaaaattggtaaccgcctgatggcagaggcagaaacgaatttggctattaatgttctccctggaccattatcagaatcttatgaagttcaaggaagaggagagcttcagttaggaatattaattgaaaatatgcggcgtgagggatttgagctttcagtttcacctccaaaagtgatgtataaaacagagcgtggtgaaaggttggagcctattgaagaagtgactgttgaggttggtgaagagcatgtgggattcgtcttggaaaccattactcacaggaagggtgaagtagttgacatgggcccggttcctggcacaactggaagaactcgaatcttcatgacctgtccatctaggggtttggtgggtgttaaaggaattttcagcagctttacacggggaactggatttatgcaccgtgcttttcaggcatatgctaaatacagaggtccactgggcagtgtcagaaaaggagttctgatatctgttggcaagggacttatcacttcacatgcccttatgagtttagaagctcgtgggatcctctttgtatcccctggaatggaggcatatgaagggatgatagttggtgagcactcacgtgacagtgatcttgaggtgaatcctgtgagaactaaagaacttacaaatatccgagcccctggaaaggatgaaaatgtccgtttgtctccaccccgattgatgagtttggaagaggcaattggatatgttgctgcagatgagcttattgaggcaagtatcatgttcttaattcttgaaagaaccctacagaaatttcagcttttgattctatttttgtaa

SEQ ID NO: 38008 - DNA, 609 bp, Zea mays
  Peptide Sequence Number=SeqID_81383
atgaacagaagaccggcattcaaggtgccattacaaatggaaccccggttccacctccgcaggtacgaacaaccccacacgattggggggactgcggagcaacagaagaccgatgaacggctcgccgtcgcccgctccagcagcgacgacgacgacgacttctgctccggggggccaaacagcagcagcgatgacctcagggcggatgctgctgccatgaggccctcgcccatgccctcactcaagagtcaaggacgagcagaaggccatagagtcggagatcagtctgtgggtggcaccggctatctcgtcggcagagaaacctctttcggctgccatggcggaaggcggcgctgggagcggctccgaagccactcggctcagagagccaggcacgcggtagctgccaacgccacgaacggcgaacgcccttccccccgatcactgagggaaggagcgggccgccgcccgcgcagggaccgaccccaactcgcctcgctctccgccccagcaaggatgataaacatccctgaagctgagggaggggcgggggccgcagcccggcttgcttctccccatccaggggttggtggtcaccgccttgggtga

SEQ ID NO: 38009 - DNA, 321 bp, Zea mays
  Peptide Sequence Number=SeqID_81384
atggaggagagggtcgccggacctggggcagaggaggctggcgttgagggagttgaggagagcggctgccagggagatcgagtaaaatcagaaatcggtgaaaccttcacaagtaacttgataaatggagataaacgtgatcgagaaatagaaaatttcactgagcgtccgagattaggacaaatctcccgtcataacacgaaactgacacctggggtgtcacagaggcggaggagaagggacgggagattcctcctgaatctcgtcggagtcgctgctaaactcaatcacagaggggttgcgatgacgcaccatgattga

SEQ ID NO: 38010 - DNA, 252 bp, Zea mays
  Peptide Sequence Number=SeqID_81385
atggctgcagccggccagtgggaattgccgcccaatcccagccaatggaattccagcgataccacgagcaagggagctcccatggctacctccctggcagccgctctcctcaactccctcaacgccagcctcctctgccccaggcgagcagtgcgccgtcgacctgctccactccgaccatggacgcctaggcccgaccggcgtctccccctgctatctcctccccacggcgcgacgctgatagtcgcctag

SEQ ID NO: 38011 - DNA, 357 bp, Zea mays
  Peptide Sequence Number=SeqID_81386
atggctcctccgcgttgcgcccacaccctgctgcatcttctcctcggcctcctctctgcaacaggcggcgcttggtcctgcttggcgcccatcaaggaggctgcagatctcagctccatggctgttttcccaatcgcagcaggtgtccagattttccccatggcgcctagtcccttgagctcgccttcaacctccacagcacctcctcggcatcagccaccgcgcacccctgctgccccccttgactttccaagccggtcgccagtgctccctgcttcaaccctgcacgacgctcactccctggctctcatcctcgccaccagcctgtgcaacggcctggccgtcggcctcgcctag

SEQ ID NO: 38012 - DNA, 294 bp, Zea mays
  Peptide Sequence Number=SeqID_81387
atggcgaagcctggccacactactgctcctggtcctctcctgcggaaacagcaacccactcgaccgtctatcccggtggcggggatggaggccaagtcacaccatcaaccaaatcaaggaggtacctgcaaaaattatgccacaagcaaggctgagtatactaatactcagctagacttacccggcctcaccgccttggcatacaatgctccactgaccccggtcgccgccgtgcagtggccgcacttgtacccaccatatctagaatgggagacccagtctcaggtcgcgtga

SEQ ID NO: 38013 - DNA, 252 bp, Zea mays
  Peptide Sequence Number=SeqID_81388
atggctcctccgcgttgcgcccacaccctgctgcatcttctcctcggcctcctctctgcaacaggcggcgcttggtcctgcttggcgcccatcaaggaggctgcagatctcagctccatggctgttttcccaatcgcagcagttccaagccggtcgccggtgctccctgcttcaaccctgcacgacgctcactccctggctctcatcctcgccaccagcctgtgcaacggcctggccgtcggcctcgcctag

SEQ ID NO: 38014 - DNA, 294 bp, Zea mays
  Peptide Sequence Number=SeqID_81389
atggcgaagcctggccacactactgctcctggtcctctcctgcggaaacaacaacccactcgatcgtctatcccggtggcggggatggaggccaagtcacaccatcaaccaaatcaaggaggtacctgcaaaaattatgccacaagcaaggctgagtatactaatactcagctagacttacccggcctcaccgccttggcatacaatgctccactgaccccggccgccgtcgtgcagtggccgcacttgtacccaccatatctagaatgggagacccagtctcaggtcgcgtga

SEQ ID NO: 38015 - DNA, 348 bp, Zea mays
  Peptide Sequence Number=SeqID_81390
atggccatgtctgcgttgtttgaggctatattattactcattctaaaggatggtcaaggtggtgatgaaaggaaggtatcagaagcgatgaggagcatgccgcagggcaccgagcaagcgaaaaaagatgggccagctgtctgtgctcacgaggatgcacatcttctgacgttagttaagcctgacaagcacggggatgaacatcgaatggcagtcagggctcggactcgggctaagccccggaagacggcgaactccgctccgcccgacccagggctcggactcgggctaagccccggaagacggcgaactccgctccgcccgacccagggctcggactcgggctaa

SEQ ID NO: 38016 - DNA, 1179 bp, Zea mays
  Peptide Sequence Number=SeqID_81391
atgcaggcggcatgcaaccgcgccaagcgggcgcacttctccgactcccaacacgcccggcacggaggcccaggcccacgcgtcatgcaaccggcgcgccgaatgcttcgtgcatgcagctgcaccgccacttgcgccaccaccgcgcctcctcgactgcggaaccaataccgcgactcgaggagaagcgggcaacgcttcaccttcgccataatgaccgcgtcagaaaagggaccgggaaagggggataccccgaaaaggatccttccccgtgaaggaacctggctccgagcctccctactgatcagaggttcgaaggctggcccctcggaagggttcaacagccgcctcagagcgcgtgggctccacacccactactggtcagaggttcgaagaccggcccctcggaagggttcaacggtcgcctcaggctactcgggctccgcgcccactactgatcagggcgggaacgatcttgtaacggaatcccatcagagggaggcatcgagccctcggaccccgtcgctaggggaccgggtccagcagatcacccgcagctcaccggggacaccatgttcggcgcccaccgagggcaacatggcgctctcccccctcctccttgcggaaaggcgacgcaggggcaggctcgggggctgctctcgcaaacccggctctggccacaccgttgacagcgtcaacataccagcccgagaacttgggacccgaccgtacacctgggctacggccagctcgcatgagggaacgaccagaccagccgaagcattacgcgaggcattaagacctcggaggagtcaaaaccactcctccaaggcctcgggggctacacccggcggggctcggactcgggctaagtcccagaagacggcgaactccgctccgcccgacccccggggctcggactccgccccggcctcagccgtcggtctccgcctcgcccgacccaggggctcggactcgaccccggtcacggaagacagactcgacctcgacttcggaggagcttacacatcacccaacctagggcgcagaccagccacgtcaacaggaggcgccatcatcaccctaccccgagctgactcgggccacgagaacaagaccggcgtcccatctggctcgctccgccagataggcaatgatggcgccccgcatactctgtga

SEQ ID NO: 38017 - DNA, 1059 bp, Zea mays
  Peptide Sequence Number=SeqID_81392
atgtctttgcgctcccttatgcatcgtgtctttccaccttccaagcccccggatgggggttacccgccgtctttccgcctcgtcgtcggaggaacgcaactccgcgggagttggtacctttcagccatcgttcggcttcaaggattttcatcatacagcccggttgcgcccctccgccggtggtcacccaaaacggtgacctccagcccctggatggggagaggcaagccgggctgtgatcttggtcccgccctcagcctcaaggatgttcatcattcttgctggggcgaggagcgaggcgagccggggctctacctcccgcgcgggccggctggccacctcttcttccagcttctggtggtggcaaccatcctccagctctgcggaggagacgtcctccagccatgccggggatggcgaactgttgctgcccagctaggatgcaacattccgccctcttcctcgctttcgtggcgaggacgggagcgaggacctgccagtgcgctttggagcggcccgctctttggctttaatagctggttcgcgtcccttgagcgggaacgcgaacgggagccctccggcggccgcgtccgtcctgggaccatggctgctgctgcagaggtcgctggcgggtcccccggtgctcgtcgccccgcaggcttcccggtgtggaggtggaaccggagttccgtttgtagcggcacttcgaatgtcagtgtttttgttcattgtggctgtcggggcctgaacattatctggacttttttgtcggtaacagaattgttttgtgcaagcgagagttgcttctcacggaaggtgatgagtgaggtatccgtatcccggaggcgtaggagtccctcggctcagtcggccttgccgcttacgcgcactcttacccgtccatggggttctgtcaccgacgcagttgagaaggctcgaagaatcgctccggcagaagagcttctgaacatgaagacttgttcggtccgcggaatcacttatccgaacgcgagttacttatcgcagaaggtgatgagtgaggatcctctttcgaagtag

SEQ ID NO: 38018 - DNA, 279 bp, Zea mays
  Peptide Sequence Number=SeqID_81393
atgggggtggacgcgggcgaggaaaggcacagatccgcctacggtgccggggccaaggtggacgggggcggaggctgggtggttccatgcgcgagtgcggggaggggcggattcagcgaaggcgagggcaagctagctgtggacgcgagggagggggcgtgcgcggcgagattagcggcgagcggcggggggagggcggaaccaggtcttcatctactcactaggaacgtgcccgtgcgatgccacggaacacagattgcgaccctccaatggacttag

SEQ ID NO: 38019 - DNA, 459 bp, Zea mays
  Peptide Sequence Number=SeqID_81394
atggctgcggcggaggcgcggcgccggtcagcggtctgggccctgctgccgctgctgctgcggctgctccacccggtcgcgctcgtgctggccaacaccgaaggtgcggtgcggcggtgcgcccgtcttgctctcctcgctttgcttgccttgctcttgctcaccacccgccgccgagttggcccgtctgcggctgggtggtttccgggagctctgtctgctcccacgggacctacttcaaatcggtgggttggtctagcacaccacgatgcacgcggcaagtgccgttcccgaggggtttggctgggcgccattcctggccctcgcggagccgtttctgcgtttggccaaacaaattcgaatttacttctgctctgccgcggattcgggtgtctggcaactggccgtgtcgtccttctcctcgctgcaaatttcgtgctctccgagaccaaaacttag

SEQ ID NO: 38020 - DNA, 396 bp, Zea mays
  Peptide Sequence Number=SeqID_81395
atggaacaggactcggggagtgtgactagatggtacagtggggcttcgaaaattctgcagtggctaggcagactgtacgctagcagtcgtctgctcctgctttttagcaaggggggatatgagagatgtcgttataatgaagcgcatatcgagatttctgttgtcctgacggatggagagtataattttgtggtcgacctgacattgggcaatggtaaggtggaaactggtaggactgcagtttcctgtcaaaggatttttcaaaaagaaaatcaagtggatgaaacatggattcccacgtcgccagtgttggaagagctacaggggcagtgggctcgggtaacatctctgttgttccccaccccaattggaatcccattcttggaatcttcgtaa

SEQ ID NO: 38021 - DNA, 690 bp, Zea mays
  Peptide Sequence Number=SeqID_81396
atgagcacgtacatatctctctccttagagcgcagcagcagcgtggtccgcgacgccgccaagtccgcgcctccgggcagtggtgtcagtgccccgtatccacgcgcgggcgcgggcgcgggcacgtcgctttccctgtccggcgcagcggcggcgcacgggcacggccagtacctccccctcaacgaggacgactccctggacatggtcctcttcgacgtgctccgcgaggcatccggctccgcacccggcgccacctaccagccgccctcgtcgtcgttgcctacgctgaaggcgctcgcttccggcgcctcgcgcaagggcggtggcaacaacggcaacggcagtagggccgcgcacgcacccaaggcggccacggggcggcactaccgcggggtgaggcggcggccgtggggcaagtacgccgcagagatccgtgacccggcgcggcacggggcgcggctctggctcggcaccttcgccacggccgaggaggccgccgcggcgtacgaccgcgccgcgttcggcatgcggggcgccaaggcgctgctcaacttcccgccgccggccgcgggctgcgggaacgccgcaaccgccacggcgaagcaggctgctggaagccaagtgaacaacggcgaatgcgatctcctcgaagaaaatgggtcatcgcatgatagtgaatgtttctaa

SEQ ID NO: 38022 - DNA, 1230 bp, Zea mays
  Peptide Sequence Number=SeqID_81397
atgccgatcgacttactccccgctccagccccggcggaggaggaggtgaaggcggttgaggaggacgaggagatggtggtggaggtggagggagaagggtgcggcggaggggccgtggtggtggccgtggcggacgcggaggcggagggtcacccctacgacttccacgtgtccgggccgcgcaacctgccaccgcccaactggaaggacataatcaggtcgagctggaagggtccaaattacaaaaggatggtaatggcctgcttcattcaagcagtctacctgcttgaactggacaggcaggaccagaaaggcgaagaggatggccttgctccaaaatggtggaaacccttcaaatacaaggtcacacagacattggtggatgagagagatggttccatctatggcgccatgctggagtgggatcgctcttctgccttatctgactttatcctcataagaccaagtggggcaccgagggctgtgttagctctcagaggaaccctcctgcagaagccaactatgaagagagacctgcaggatgaccttcgtttcttggtatgggagagcctcaaaggttcagtgagatttgttggtgctttagcagcactacagttagcagttgagaagtttggcagcgccaatgtttgtgttgctgggcactccttgggagctggctttgcacttcaaatctgcaaagagcttgccaaacaaggggtttttgtggagtgccaccttttcaatccaccttctgtttcactggccatgggtgtaaggagcatgagtgagaaggccagctacctgtggaagaaagtcaaaggaagtctgccattgaaggaagagacaacaacacttgagactgccaaggccgaggcaaatgacaagaagagattgcgcaccgagaataaatgggtgccacatctgtatgtcaacaacagcgattacatctgctgccactacaacgctccctcttgcccgtccacatcaacagatggttcttccgacgaacagcagcaacaacgcaaggcaagtgagattgccagtgatgtggtcgcaaagctctttgtgacatcaaaaggcccacagaagttccttgaggcgcatgggctacagcaatggtggtcagatggcatggagctgcagctggctctctatgatagcaagctcataaacaggcagctgaaatccatctacacagcaacagcaataccatcttctaccaggtcctag

SEQ ID NO: 38023 - DNA, 711 bp, Zea mays
  Peptide Sequence Number=SeqID_81398
atgaaggtagtaaaccaagctagtatgtcaaaggcagggagtgataaggctttggacacaatggatgaactgttggagatgcttgggcgtttagagccagatataggatgtgaagatgctggtggtgcaactactggagagggcaaccatggcgaagaggatgatgttggaaacgctgaagatgaacatgtatcgcaatgtgataacaaggagcatgtggcagtacattcacgacaacaggatggaggcttaaatattgatggacatcatcaatctgaactgcaaatgacgcttgttggaaatgatgattgtgaaggaacacaatatggggatgttagaaagagactggaatatgatgtagatggcataagcttattgcgtccaattaatgcaaggccaaagggaaggacgataaaaactagtgaacaaagagttctaaaactgggtgcgaaaggagaaaagaagaagactcgaaagtgccaaaaatgtggcattgctgatggacacaacagtcgaacctgcttgtctatagaggaaaatagggttaaattggctagccttgccgatagaaaaagaggacgaccgcctgggtctagaaacaaaaattcaacaatggccccgcagtggaatgagacatccacatcaaaaaaacataaacataccgattctgaagaacatggttcggatgatgataatttggcaggattgtaa

SEQ ID NO: 38024 - DNA, 597 bp, Zea mays
  Peptide Sequence Number=SeqID_81399
atgtctccaacaaatgctccagtatcctctccacctgttccaacccctgataataagcaacatgatcaggaagtacatgttccttctgatgatatcaaagtatcagaacagtttgacaaaaccccattgacaaaaggttttatcgactgtattcgtgatgatgatgtattatacaatccagatacattaatcaacactctaatattgaatgtcaatgttgggaccgttttgaatatcgaggagtttgaacagcacagttcaaatccccagcccttctcaacatcagttcttaaagaacaactagaaccgatgcttcctctagatgaagttctgaaccaaataaaattgatactggttcctatgctacgtcgtagccactggaccctttatgcaatcaactttgagcttcgtcgaatagacattctagattcaaatccttatgggacattgcttggaggcactacctggaaacaaatcgacaatgatcaattgctgataaatggaacgaaggatgaaccattggaccaacgtgcttttgttctgcattacctgacctttcatcgcaacaacagggtttccccctccctgcagaactga

SEQ ID NO: 38025 - DNA, 705 bp, Zea mays
  Peptide Sequence Number=SeqID_81400
atggcgtggcagcgtggacgtggagttgggtcggctagcggcccacgcgggcgcgagagggatatgtcacagggtgagtgggtcagttggggagaaccatcccagagaaaatgttatggactccaaaacagaattgtgggtgttacacaggagcatagcaccggcacaaaggcgctggagagggcggttcatacggcaaggacacggcaagggcttgggtcgacggcggtggctttctggctgcgcgagggaagctccggtgagcacgggcagagggaaccagagagggagagagaacgagcggagggactcattgctttggcgtttgatggatttgaggtcccagggttgcgccgacttgttggaaagggattggaaattcacgaaaaaccggcgacaaaagtcagcccagtcgttaatgcaatggcgaggaaggtgtcggagccatttcatcgcatcctacctgaggacgatgtgcatgtacgttttcatgacgtcctccattgccctggtggcccgagctacggtcgtatagatggctaccaactacccagatcttgcttgggctcgtacttatcaacgttcgagaccttgatgttagactgccacttaatcgcccggagtcaggggaaaggactgatactccacacgtcccttgggcctcccagtggtcttcttgagcgtagtcatggtggcagtttctag

SEQ ID NO: 38026 - DNA, 1482 bp, Zea mays
  Peptide Sequence Number=SeqID_81401
atggcgggtcgtcggggcgactcggctgcggcgccgttgctggagaacaaggcggcgccggcgtcggcgtcggaggcggaggcgggcggcgggtaccatcaccacaacaacaactactactactacgtggacgggtgccccgggtgcgccgtggaccggcgcaaggcggcgagcccgggcatcccctacgccaacttcatctacgtctggatcgtcaccctctgcactgccctacccatctcatcgctgttccccttcttgtatttcatgataagggacctgaacgtcgctgaaagaaccgaagacatcggcttctacgccggcttcgtaggtgcctcgttcatgtttggtagatgcttgacttcaaccgcctggggaatagcggcggaccgtatcgggaggaaacctgtcgtcgtgttcggcatctcctctgtgtcaggagagcgcttcatgtgtcccagggtcgtgttcaacacgctgtttggcctgagcgtcaactactggatggcaatcgccacacggttcctgcttggtgctttgaacggcttgcttggaccaataaaggtcagcacggcatgggggataggcctcatcatcggcccagctcttggaggctaccttgcactgcctgcagagaacttcccggctatcttttcacctgactcggtatttggaaggttcccgtatttcctaccatgcctttgcacgtcggtcttcgctgctgctgttctagtgagctgcatatggatgccggagactctgcacaggcacaaagttcacgagagtacgagccaggacgttgaaaaggttcaagaaagcggcattaggaagaagaagagcttattcaggaactggccgttgatgtcgtcgataattgtctactgcatcttctcgttccatgacatggcttacacagaggtgttctctctatgggctgaaagtgacaagaagtatggtggactgagcttatcatctgaggacgttggtcaagttcttgcagtcactggtgccagtcttcttgtttatcaactctttctataccctagaatcaataaggttctcgggccgatcaaatcttctcgaattgcagctatcctgtgcatacctatcctctttgcctacccctacatgacatacatctcagaaccaggactgtcaatcattttgaacattgcgtcagcgataaagaataatcttgctgttacgatcattacaggcactttcatccttcaaaacaatgcagtgcctcaggatcaacgaggagctgcgaacggactgtccatgacagggatgtccttcttcaaggcacttgctccggcaggagcgggcattgtgttctcgtgggcgcagaaacgccagcatgcctttttcttcccaggtgatcagatggtgttcttcctgctgaacgtcgttgagctggtcgggctcatcctcacattcaaaccctttctggcagtgccagagcgatgcgatagtagatag

SEQ ID NO: 38027 - DNA, 1164 bp, Zea mays
  Peptide Sequence Number=SeqID_81402
atggctggggacacaggtgggaagagtcgccttcaaaaggaggccatcgtttggcttcaaagattttcatcaggcagcccggctgcatcccctcgccggtggtcacccaagacggtgacctccagtccgatagcgaggagaagcgagccgggctgcgatcttggtcccgccctcagcttcaaggatgttcatcatcctggctggggcgggggccgggctgatccggagctctacctcccgcgcgggttcgtgggtcagcctctccctcagtattcaggggagagggcgctcagcggcccagcgggagggtcggacttcgacaacgcggggctggtcgacggcgggcgtcgtcagcttcagcgcgttgggctcgttggctcggcccgtggtgccccctctcgccacaagggcggttgtcgcgccgcgcgcaccggaggaccgcccaagacgtcgcgcgctgctagggcggcgttcgtgttctggggctgtcctgcctttgccccggtacggcacctctgcgcggagatcggtgctccgctcatccgggaggatcaaagtggggatctgccagtgggcagacggctcctgtcgtcggtgcggaggtggcggcggctagagaagtcctcgtcgccggcgagatcaccgccaccatccgcgcccggggcctccggctctttgtacttgttctcgcccctcgagcgtagacgcgggcgagggcaaggttgcagcggcgtccgccctgaggccatcgctgctgcagttcggccacccggagcgggggtcgttgtcactgctgctggagcgggcgacggcgagccatccgttggccttctgttgctccacaggccccccaatcactcgcctgtcggctatctgaaccgcttcaccaagcgtgagtcgcctcgtgcaaaggtgacgagtgagcacggacagaggcagagttggtttcgaaaagaagatttggtcggccggagcctggccgggtcgtccactggcgggaccgacgccggagttgagttgccgaggccacaagccgggccaatgtccttgggggatagctggctgaggcttcgggacctcgccgaaggtgtagttgacaccgagggtgctgctgctctcttcaactgtcaagattcgagcctgcaggatcggattatcttgtag

SEQ ID NO: 38028 - DNA, 295 bp, Zea mays
  Peptide Sequence Number=SeqID_81403
atgtccggtgcaccaccggacatgtccggtgcaccaccggacagtgtccggtgcaccaggggacttcacgctgaaatcctcaccttcgggaaaatccagaggcgcttcgctataattcaccggactgtccagtgctccaaggaagggcgtctcaggaactcgccagcttcgggaaatcgcaacggctgctccgctataattcaccggacatgtccggtgcgggcccagaagacagagctccaacggtcggaacccaacggccttggtgacgtggctagcgcaccggacatgtccg

SEQ ID NO: 38029 - DNA, 879 bp, Zea mays
  Peptide Sequence Number=SeqID_81404
atggaggaggtggagcagcagctgaccaagaaacagatcgaggagttccgggaggcgttcagcctcttcgacaaagatggcgacgggacgatcacgaccaaggagctgggcacggtgatgcggtcgctggggcagagcccgacggaggaggagctgcaggagatggtggacgaggtggacgcggacggcagcggcgccatcgacctgcaggagttcctgaccctgctggcgcgccagatgcgggaggcgagcggcgccgacgaggacgagctccgggaggccttccacgtcttcgaccaggaccagaacggcttcatctcccgcgacgagctccgccacgtcctccagaacctcggcgagcgcctctccgaggaggagctcgccgagatgctccgcgaggccgacgcggacggcgacggccagatcaactactccgagttcgccaaggtcatgcttgccaaacgaaggaaccaggagctggaagagcatgggagtgaatcgtctcactccaagggactctgcccctcctcccttgtctccctggcacctaagaatcatggtcaatctaatgaaacaaattcatgggcgtggttgaggaagagtacagggctggaagaagagagagatacctcttttgccgagtttgaaatctggggtgaaagcagactcagacgacatcgagcgacgaggagggccgacgaggtggaggccggcagggaggtcgacttcctgggcaacgactgggcgtcggggagggccgactcttgggcgaagtggaggtcagcaacctgggacgacggccttggcgaagaggatggcggcggctggacgacggtggcttgggcgacgtccttggcgaagaggacggcggtggcctag

SEQ ID NO: 38030 - DNA, 708 bp, Zea mays
  Peptide Sequence Number=SeqID_81405
atgcagtcggcatgcaaccgcgccaaatgggcgcacccctccgactccaacgcgcccagcataaaggcccaggcccacacgtcatgcaaccggcgcgccggttgctacgtgcgagcaactgcaccaccactcgcgccactaccgcgcctcctcgactgcggaaccagtaccgcgactcgagggaccgggaaagggggataccacgaaagggatccttctccgcgaaggaaatgggccctgagccccctactgatcagaggttcgaaggctgccccctcagaggggttcaacagccccctcagagcgctcgggctccacgcccactactggtcagaggttcgagggccggcccctcggaagggttcaacggccgcctcaggccactcgggctccgcgcccactactgatcagggggtgaggctgacagcagccaagtccggccttaggcgccataggaaactctgcttcgcccgaccccagggctcggactcgggctcagccccggaaaacgacgaactccgcttcgcccgaccccagggctcggactcgggctcagccccagaagacgacgaactccgctttgcccgaccccagggctcggactcgggctcagccccagaagacgacaaactccgcttcgcccgaccccagggctcggactcgggctcagccccggaagacgacgaactccgcttcgaccgaccctag

SEQ ID NO: 38031 - DNA, 312 bp, Zea mays
  Peptide Sequence Number=SeqID_81406
atggctgacgacagagaagaagaagcaggcgatgatagttctgcgtcattgcacagagctgcaccagacacatgcagtggtctaccagcagcgcccacatcaagaattatatctccaaactgtggtgcgagtccacggataaatatagtaacaccacctgcagaattacgagcgccaggggtcaatgatggcaatacaacagtaattgaaacaatgcctgaaagtattgattcaaccatggtgcctaggatcggtatgacatttggaaatgtcgatgaggcatacaatttttacagtcgttacgcatatgag

SEQ ID NO: 38032 - DNA, 474 bp, Zea mays
  Peptide Sequence Number=SeqID_81407
atgagggacacccagagtcaggctacaaggatcaagagttggcgtggagcagagggagtaatgttgacacccgaatactctgtcgtccttgcacgttgtctcaacggacttcaaagaagcatgaccagggagcccaaacgacaagggcgaataccgtcggacgaacctttactgagggtaaagcacctcgttttaccacagaacagctatcccttccaagggaagccacttgtaactgccccctccttggtctataaaaggaggagggtcagcccaaaccaaggacacggagataacaacactcgacgacttagcctggtaggaaacacctggcacatagatgtccagaaccaacattgcttagaggcttgggattcttccgtctctcgcccgcttgtaacccctactatgagcatcgagcaacaaggtgtcggtagcgcaagccacgaaagactaaaagtagggacgttatga

SEQ ID NO: 38033 - DNA, 1146 bp, Zea mays
  Peptide Sequence Number=SeqID_81408
atggtgaccaccagtttgatggtggggagaagcaagccgggctgcgacctctgccccgccctcagcttcaaggatcttcatcacccgagctggggaggagggcggggcaagtcggggcctgcctccgcgtgggccggcgacccgcctcttcctccggcatccgggggaggaaaccatcctccagctatgcggaggaggcgtcctccagccatgcgggggaaggcgaactgctgctgcctggccagggtgcagcattccgtcctccatccggcgagaacgggagtgaggacctgccggtgcgctttgggggcggccgtcgctcgctggtgtggtgttggtgggcaggtggccattgtcgtcggtgctgaggtggtggcagccggagagggtttctctgccgacgacactgtcaacgccacctgcgctccgggcctccgactctttggctttaatggctggttctcgtcccccacgaggggacgtgaacgagggccttccagcggtagcgttcgccctggggccatcactgctgctgtcttgccgtccgagacggaggtcgttgttgctgctgcagtggtcggcggcaagccacccgaagtggcttcccaggtcgaggaggtgcagcagcgacagttggagcttggccaggtcgtccgccagcgggaccaaccccggagtcacactaccgaggccatgagccgggctgatgtcctcgggggacagttggctgaggctatggagcggccggtcgaggtgtctgctcgggccgggaccctggaggagaccttggctgcgatggcccaagcgcgatgctggcgtcctccttcgaggtggagatccttccgcccgtgtcgccgtccgaggccgggccagatcccgccgaaggcggaaatgacgccgagggtgctgttgctccctctgttgatgtctgaacctgcagggatagacttgttcgtcggtagcagaatcgtttatctgagcgagagttacttttcgcgggaggtgatgagtgaggattctgttatcgatatagtcgagaaggcacgaaaatcgttctggcagaaaagttttcgagcgttaagacttgttcggcagcagaatcgcttatccgagcgtgagttacttatcgcagaaggtgatgagtga

SEQ ID NO: 38034 - DNA, 477 bp, Zea mays
  Peptide Sequence Number=SeqID_81409
atgcagccgggctgcctgatgaaaatccttgaagccgagcgatggctgaagggtgccaacctccgtgaggttgcgctcttccaacaacaagacgaaggcaacgcgggcactccccatccgtgggcatggaaggtggcgcgcaaccgcaccacggggacgcaccccttcaacttcgtcgcatccagcatggaggcccaggcccacacgtcatgtaaccagcgcgccggttactacgtgcgagaaactgcaccgccacttgcgccaatgtcgcgccttctcgactgcagaactagtgtcgcgattcgaggcaaccctgcgcatggcccaacaatgccaatcgagcatatcggtcacggggaccgggaaaggggatatttcgaaagggatccttctccgcgaaggaagcgagccctgagccctcctactgatcaggggttagaaggctggcccctcggaagggttcgacagccgccctag

SEQ ID NO: 38035 - DNA, 126 bp, Zea mays
  Peptide Sequence Number=SeqID_81410
atggccgttggagggctgctgtcgcatggcgcttcggatagtccggttcgggccgcttggagatgcataacaccctacgtcctggtgagaatgctttacgtggtggattacaagggagctctctaa

SEQ ID NO: 38036 - DNA, 1104 bp, Zea mays
  Peptide Sequence Number=SeqID_81411
atggagaagatctggcaccacaccttctacaatgagcttcgtgtggcacctgaggagcaccctatactgctgaccgaggctcctctgaaccccaaggcaaacatggagaagatgacccagattatgtttgagacattcaactgcccaacaatgtatgtggccattcaggccgttctttacctgatgactgtaactcaagtttatgtcactaaagaatttagtgctagaatacagatctggtatggtgagaacgtgttagaagttaagaagaatcctaactggatatgtccagtttgtcgtggcatctgtaattgcagcatatgcagaaccaagaaaggatggttccctactggttctgcctatagtaaggttgtctgtagcctatgcctaacctacttggtggctaggaaacgtaatggagtggatccaatgcaggcagcatgcatatttggttctaatgttggtagtatgtatgtaccaatttgtcaaagatccaacaatcctaacagtctagcatcttccttcgtgcaggtggttgaacttgggtacaaatctgtttcacactttttaattgcgacacatcgagcatcatcagataactcagaggattcaagcccagctgtcaaagagaagtcgctgtctgctaaatctgaaagctcatgcatttccgatcatgatggcccggatgccaatgagaggcctgaggatggtgaaacgagcagcaaagctaaggtgaagaaagcaacccgcctcaaagtgaagaacagttctgacggcgacaaagaagacagcagaagcgagtccgtggtgacatctgagtgccaggatggccatcaagccaacacggaggctgggtgtgtcactccatcgtccaagccagtgtcaaggaagaggaaagaacgtatccttattgaggagaacaagggcctcctctctgcatcctccttcgataggcctcgtgcaagaaggcaagaggagggctctaatccctctcctgatgtaggctacatcagtgaaatattgaagcttatacctgaagagtttggaccaaggcgaagtctactgtcactcgtgtttgatgttcagttgctgaagatcatgtga

SEQ ID NO: 38037 - DNA, 2529 bp, Zea mays
  Peptide Sequence Number=SeqID_81412
atgtacgtcagcgggagtaccacgccgctcatcatgatcgctgcccccaccagcccggggttgaagcagacggctgggggcgcgacggtcgcagatccgaagacggggtgtggggaagaaggcgcggcggtcacgaacctgcggggggaggggatgggggcggacctgagcgggggtgggcacggcggcgctgtcgccgccggcggcgatgcgcgccaccacgcaccgcagccgtcggtgctcggtggaggcgcggactggctagtgttcgggggccgcgccgacctggaggagcccgcgaggaatgccccgtcgcccgccttgttccttcttccgcccgcggggctcgatgacagggcggcccagcccgagcccaatcccaagcccgcacagctcgcaggaggcctgatgataatttttattggttacttgaatggtgtagctgttgatgaagagcgacatttggcacttgcacatcaaaactacaggtcagggaagtaccgagaggctctagagcatggtaatgtcgtttacgagaagaatccacgtcgaactgataacctcctcctccttggagctatatactatcagattcgtaattatgacatgtgcattgcaaaaaacgaggaggctcttgccatagatccacattttgctgaatgctacggcaatatggcaaatgcttggaaggagaaaggtgatattgatcttgcaattcgttactatcttactgctattcaggcatacagttgctacatcgaggcgttacgtattgatcctcattttgcaattgcatggtcaaaccttgctggtctgtttatggaggcaggagacctcgacaaggctttaatgtattataaggaagctgttaagcttaagccatctttcgctgatgcatatcttaatcaagggaatgtttataaggctttgggaatgcctcaagatgccattatgtgttatcaacgtgcactgcaggcacgtcctgactatgctatggcttatggtaatcttgctactatttactatgagcaaggccagcttgatatggcaattcgttgttacaatcaagctatagtctacgacccacagtttattgaagcatacaacaacatgggcaacgcacttaaagatgctggaagagtagaagaagcaatcaactgctacagaggaaactatgctgatgctatcacatgttacactgaagtactccgtatagatcctacagcagctgatgcactagttaatagagggaacacattcaaagagattggcagagttaatgaagcaattcaggattatgttcaggcagcaacaatcaggccaaacatgccagaagcccatgccaacttggcctcagcatacaaggacagtgggcatgtagaaacggctataattagctacaagcaggctctccggctgcgtcctgattttcctgaggcaacctgtaatctcctgcatactctacagtgtgtctgtgactgggaaaacagagatggcatgtttcgagatgttgaagaaattattagaaggcaaataaagatgtcagtacttccaagtgttcaacctttccatgccattgcttatcctattgatccattgcttgctttggaaataagtcaaaacgatggtactgagtggaggcagcgtattcagtctgaggcagaacattttgtcgatgtttctgccatgacttccgataatatcgccaagcttatcaatcaagacaaaatacaaattttgataaatcttaatggctacacaaagggtgccaggaacgaaatttttgcaatgcagccagcacctatccaagtttcgtacatggggttccctggaacaacgggtgctgcatacatagattacttggtcacagatgagtttgtttctccatctagctatgcacatatatattcagaaaagctcgtccatttgcctcattgctattttgtcaatgactacaagcagctttacaaaatggaccctgagatatttgacacatggtgcaatattctcaaacgtgttcccaacagcgcattatggcttttaagattcccggcagctggtgaaactagagtgagagcatatgctgctgccagaggagtaagatcagatcaaattgtattcacagacgttgccatgaaaaatgagcatatacgacgcagtgccctggcagaccttttcctggacactcccctctgcaatgcacacacaacaggcactgacatactgtgggctggtctgccaatgatcacccttccactagagaaaatggcaaccagagtagctggttccctctgcgtagctactgggcttggggaggagatgattgttagcagcatgaagaagtatgaagatagagcagtagaactagcgctgaatccggtgaagcttcaagcgctgactaacaagctcaaggaagtgcgcaaccttgaaagggcatactacaagatgtggaacctttactgctccagtcgccacccggagccattcaaggtggtagaggatgacaatgagtccccatttgaccgctaa

SEQ ID NO: 38038 - DNA, 432 bp, Zea mays
  Peptide Sequence Number=SeqID_81413
atgggcaagagtaacaaacgcaagcgcgagccgactcctccatcggaggacttcggcgactcgaaatactcggaggaggagttctcctccgagtccgaggggtctccggctcccgtctctcccccggcgtcgtctgacgattcagacgactcccaggggattgccacggaggtctggacttatatccgggccgtcgagcgctccgggctcgagggctcggatgagtcggagtactcctcggacgaggaggactcttcggactcgtccgaggagggcggtggcggcgatggcggagacgacgacgacgacggaggcgatggtgacgacggcgacgatggcggtgacggcggcagcaggggcggcagcaagggcggcaacagtggcagcagcaggggcggcaacagcaagggcagcaacaaggccagtggctag

SEQ ID NO: 38039 - DNA, 1029 bp, Zea mays
  Peptide Sequence Number=SeqID_81414
atgagcaagatcaggagcactggagcagggtggagggagcaccggagcattggagcaaggaggtgggagcagccgagcagggagcaccggagttcgctgtgtgccgcgcacggcgaggcaggagccagggacggacagagggacctcgagaccttgagagcagggagcaccggactaccggagatcgccgtgcaccgcgccgggaggagggagcagggagcactggagtttgttgtgcgccgcgcacggagaggcaggcgcccgggacggagggaccccgagaccgagagagcaggtaccagggagcaccggactaccggagttcgtcgtgcaccacgccaggaggagggagcagggagcaccggtggaaccccgagactaggagccaggagccgccggccgccgcacaaagaggcaggacgcagaagcgagagccgagagggcgttagggttagggcagacactccgcaaaggtcacctgggacactcggcaaagacattgtctccgtcacccggcgccgtaacggctgcttttctttgccaagtgccccctggcactcggcaaacctctttgccaagtactcggcaaagccgtcgattccggtagtgagggttaggtgttcaaagttgtattatactgtcgggtcaaggcttcgtctactcaagggacgtgatctcgcctcgcccgagggcctcctcaagcaacgggcgcaccctcgactcgccggaagcccagctcgggcaggcttcgttgtgaagcaaccttggccaaatcgcctcaccaaccgaccgtatcgcaggcgcattcaatgcgaggatcgcctgacaccttatcctgacacacgtgcctcagtcggcaaggtcgaagaagacaacgccgctcgcccctctccgactgatgtgccacccgccagggtgaggctgacaacggctaagtccagcctcaggcacaacaggaagtctccacctcgcccgaccccagggctcggcctcaacctcgacctcggaaggtggttgaaagtcgcctag

SEQ ID NO: 38040 - DNA, 273 bp, Zea mays
  Peptide Sequence Number=SeqID_81415
atggtctggcgcaccggaatgtccggtgtgccaccgaacagtgtccggtgcaccagggagatcaactctgaacttgccaccttcgggtttctgggattgcctctccgctataattcatcggactgtccggtgcagcaccggactgtccggtgtgccaagcggagtaacggctacatcgccaacagtcgtttgcaaaaggtgaacaatgagctacagtgcgcggactgcgcgcgcagaagtcagagcaagcgcagatggcgcaccggacagtga

SEQ ID NO: 38041 - DNA, 243 bp, Zea mays
  Peptide Sequence Number=SeqID_81416
atgcccggttctaaagatcttaacgatgtttccccaggcaacaacacaaggctgactatggatgatttgtcgggcgatgagcgtgaggaatttgaggactacctaaagaagcttcgtgaggaaacaaggatgtggaccgtccagctccttatgccggattgtccgactagtgtcacaccgaaccactcggacaccgaggccacatcattcggatacgtctacataggacaaggtgttgcataa

SEQ ID NO: 38042 - DNA, 429 bp, Zea mays
  Peptide Sequence Number=SeqID_81417
atggccggccgcccgcgcccgcagacggagctgcactcgccgtccgcctccacgcggcggcgtgagcggtggctggttgtactcggcgtcgcactccacgccgtgtacatgctcagcatcttcgacatatacttcaagtcccccatcgtgcacggcatggatcccgtgccgcctcgcctctcggcgccccccgccaagcgcctcgtcctcctcgtcgcggacgggctcagggcggacaagttcttcgagcccgacgaacgggggaggtacagagcgccgttcctgcgcggtgtgatcgaggagaagggccggtggggagtcagccacgcgcgcccgcccaccgagtccaggcccggccatgtctccctcatcgctggcttctacgaggaccctagtgctgtcaccaaaggtgcgctgccccggtgctag

SEQ ID NO: 38043 - DNA, 1164 bp, Zea mays
  Peptide Sequence Number=SeqID_81418
atgcaggcggcatgcaaccgtgccaagtgggcgcgccccttcgactccaacaagcccagcatggaggcgggcagaagcagcggtcacgtcgtcagccaagcttacgtcccatccaggggcagcgagggagccctctcccacggcgtgaagacggtgcgcccgacaggcggcgcctcagacgggaggagcaagcgacgcttcgccttcgccgtaatgaccgcgtcgaaaaaggctccgagcctccctactgatcagaggttcgaaggctggcccctcggaggggttcaacagtcgcctcagagcacgtgggctccacacccactactggtcagaggttcgatggccggcccttcgaagggttcaacggccgcctcaggccactcgggctccgcgcccactactgatcagggcaacgggcacactatcggctcgcccgaggcccagtcttcaccgagaagcaaccttggccacatcgccacgccgaccgaccaaatcgtaggggaaactccgcctcgcccgaccctagggctcggactcgggctcagccccggaagacggcgaactccgctccgcccgacccagggctcggactcgggctcagccccggaagacggcgaactccgctccgcccgacctagggctcggactcgggctcagccccggaagacggtgaactccgctccgcccgacccagggctcggactcgggctcagccccggaagacggcgaactccgctccgcccgacccagggctcggacatgggctcaaccccggaagacgacgaactccgcctcgcccgaccccagggctcggacatgggctcagccccaggagacgacggactccgctttgcccgaccccagggctcggactcagctctggcctcagccgacggtctccgcctcgcccgacccaggggctcagactcgaccacggccacgggagacagactcgacctcgacctcggaggagcctccacatcgcccaacctagggcgcagaccgaccacgtcgacaggaggcgccatcattaccctaccccgagctgactcaggctacggggaacaagaccggctccagcactcctccgacggccacgacaccacacgaaccgggtgccaaaacccctccggctgccacgatggcatgtacttagggcgatag

SEQ ID NO: 38044 - DNA, 558 bp, Zea mays
  Peptide Sequence Number=SeqID_81419
atggcgtcgctcaccatgatggcgtccttcgccgccgtggcggtggccgcgccctcgcgccgcggcaccttcgccgtggtcaggtccgccaaggtcgaccgctgccaggagcccgccacgctagcagcaaccgaggccaggcccgccgccgacggacgccgcgccgtcatgctcgcggctgctgcggcggccgtggcagccatcggcggcgccggcgccgccatggcgggccccaagaacgggacccccgaggcgaagaagaagtacgcggccatctgcgtcaccatgcccaccgccaagaagaccgtgccagagcttcttccatcccgcgcgccaccgccgcgcgccatgggaggaggcaagtcgttcttctgccccagcatcttcagctttctgcgcaagtggaggcgctacgacgacgacatggccgactgggacggcgggtacgcgcgcaaggtgcgctccagcgacgaggactacggcggctggtgggtcggcgagcccgacgtcgaccgcaaggcctccgacttcatcaacaacttccaccagaagaattga

SEQ ID NO: 38045 - DNA, 1335 bp, Zea mays
  Peptide Sequence Number=SeqID_81420
ccgccgccacctcagctgccggcgtcctcccctcggtgccgtgatcccccctcctcacctctgccaccggggccctcccctcggcggccgtgctccccctcctccctgggcgtcgcgccggccgtccagctgccagggcctcccgcgccagatttctctgccgcctgctgctactgctccgaccgccacctcctctcctcccccggctgggcccgcgccgtcttgacccggcctcggtgcctcgcctcgtcgcggccgtgttgtgcccccatctggcgcgcccatcactggggcccccatctgctgcgctcgccgacggtgcccccatccgcggcgcccgtcaccggcagcggcgcggtgcttttccccgctcgccggcgagccctgcctgtgctcccccgctcagcgcacatcttcgacctcctccactgcccagccgcagtgtccttctccatcctctaccaacgccgccgtttctccttgtgctggcgctacaatcggcctcctccccttgttcctgtcggccgctggtccccagccgtcgggcactgtcggcccctgctcccagtcatggcaccgtgggcgctcccctcagcagtcgttccctgctgtcgggcatcgtcggccctagctcccagccgcgccgcccgacccaatcccggcggctgcgcttgcgttactcctaccagtgttgtctccaccctcactggttccatggcatcacccccgccatacatgagcttaacctcgcccgctgctctcgtggttgtgcgtgccctcctccacgacgaccagctcatccggggcatgttcgtgtccttcgatccagcctggaaccctattctccgggactgcgtcgagctccaccctcaggcatctctcccagcaagctactgggagaatccctgcacacagccacccaccttctcaactacctcccataaaaggcggcacctcgcctcgcacccttgcctgcacctcgcgcggccccgtcgatcccgtccatccacatgtggcctcgacgcccccgctcgcacgtctgcctatgccacgtacggccccgtcgaccctgcctatgccacgcgcggccccgtcgaccttgcttgcgccatgcgcggctacgtcgaccacgcctgtgccacgcgcgaccccacctacgccacgcacaaccctgtcgaccttgtctgtgccatgtgcggccccgtcgaccccgcctgcgccatatgcagccacgtacaccccgcccgtgccacgtgcggccccgtcgaccccgcctataccgcgtgcggccccgacgactttgggcccgtcgacaagcgggacccgtttcgctga

SEQ ID NO: 38046 - DNA, 291 bp, Zea mays
  Peptide Sequence Number=SeqID_81421
atggcgcaggaagacgtgacgacagcagcgacggagggtgtcgtctcgccctcgatggtggaggagctggagagaaaggcggcggaggccgaggcgcggctgcgggagaaggaggagaacgccgcgctgaagcgacagatcgagagctaccatgttaggtggctggagcatgagatcagggccaaggccctgacggtcgcccgtctcacgccggtggcggcagatcgagagctaccattcttggcgagggatcctgctaggatgcgcttctgtgacgacaacaacgcatga

SEQ ID NO: 38047 - DNA, 1314 bp, Zea mays
  Peptide Sequence Number=SeqID_81422
atgcctggggccgcgcccacgggtggggcgaggaggtggcccgtgctggcggctaggtcagcggcgtggggcagggacacgccgaccagatctgcggtggcggccagggagcctgccaggcctgggcctgactcggtggaggcggctaggactgcggcaacaaccgcgttggctgaggcgatgactgcaggggagaggggaggggcaccgatcgtcggagccatgaagggtgttcgacgcgggtggaggagcctggggaagggggccgcagcggggagcacctgcagcagggtgaggccgacggcggctggagtggcccatttctctaaatggtcgtgcaaagcaatcaaggggtttgataaagatgagaaaggggctgaattctttgattatcctggacgcctggcaaatctggaagcatcacaatgttggcagtatcaaccatcaattccaacaatacaatattttctagaggatgcgctgatatgcatcactaagctggatcggaagaaactatgcttagtcggtgcaggcaggactgatacaggtgttcatgcatggggtcaggtggcacattttactacacccttcagttacagttgcctcagtagtattcattctgcaatgaatggactccttcctcctgagattcgagtcagggaaattagtgcagcacgtcctgaattccatgctcgctcatccacaaagagcaaagtctatcgctacaagatctataatgaagcaatcatggatccctttcataatcactatgcttatcatagtgcttataaacttaatccccatgccatgcaggaggctgcaaattattttgttggaatccatgacttcacgtcttttgctaatgctgcacataatgacggtgagcgcaggcccacaaagaagataacacgttttgatgttactgaaatgggtgctgtcttacagctcgaggttgaaggcaccggttttctgtacagacaagtgaggaacatggttgctttgctgcttcaagtcggaaaggaagcacttcctcctgatatcgttccagcgatcattgcggccagggaccgcaaagaactggcgaaggtggccttgtcagcaccaccacatggattgtatctcatgtcggttaactatgacgaggaaatcctgaagcctcctgaaggttcccctccaatttcgtttggcagaactcatcatcttaatgaattgtcttccagaaatgtatcatcttttagtttccgttgcctcctaggattttcttggttcagaactgtcaaccgtgggctctcatggcctgctagtttctgctaa

SEQ ID NO: 38048 - DNA, 408 bp, Zea mays
  Peptide Sequence Number=SeqID_81423
atgtccgtagtccatacagtattgatatgtcgcggctgcttcctcggtaacgcacgagtcatgatgggtgtagtatacacggcagcatgggtgtactgcctgccagtggaatggacaggcacgccgcctgtggaatggactggtcaccacctgcccacggaatggacagggctcattaaatgcggaggcggcacatcgcctgccagtggaatggacaggcggcgcgccttgtccgcaataaatgtagagaccgcgcagcccagaggccttacgtcaggctccaccggttggcttacgtcacacgcaccatgccacgtggcagcatcggggctccgcctgagcggggagcagaagcgtatgcggtatggtccggacacgtgtcggctccggacccccgcctggccttga

SEQ ID NO: 38049 - DNA, 312 bp, Zea mays
  Peptide Sequence Number=SeqID_81424
atgccgaagctattacctataaagcttcggcatagtgacatgtctcaagacgaaggagtgaaccgacctaaagatgaaatgaccaataaacccatgatagtttgtgtcatgattgtaatcgattgtgaagggcataaatggggtcctgccagccccttagcgccacagccagtatctcagagtcgtcccgatgcatggatccccgagatccgggactacctgaaagaaggtatccttcctgaagatcatgtgtccacagagcgcataatgcgtttggctaaacgctacacggtggtagagggggatctctaa

SEQ ID NO: 38050 - DNA, 3369 bp, Zea mays
  Peptide Sequence Number=SeqID_81425
atggtcggtgccgggactacgcaggtgctggtatcgaattcggtggcgctgtgcatgcgctcggcggcggcgatgatgccgctcgtcgaggccgccgccacaggctacggctgctggcaggcgtttctcgtcgcgcccgtactctactcggcgtgggcatcgccgttcgagctggccgtggagagggcggtcacctttccgctcctcgtcgcagacttggtcgccgacgcgttctttttcgtcgacatcgccgtttccatcgtcgtcgcgtggcttccactccgcggttcgtcctgcgctaccaatctcttctacgacgatcgcaagaaggcctacgtgaggaacctgcgcccgtggactctcgcgatggacgtggcctcgacgatcccgttccaggtgatctacctcctgggcacctcctggggcgccgccgccgcgtggttgtcgccgtgccggtacctgagcctcctccgtctgtggcggctgcggcgcgtcagcgagttgttcgcgaagctggagaaggacgtccggctcaactactactggacgcggctcgtcaagctcgtcggcgtgacgctcttggcggtgcacgccgcggcgtgcgtcctcctatggatggcctcccactacagcgggcccaaggagcgcacgtggctcagccgcggcttcgagaccagcagcgtctgggccgggtacacccgcgccgtgtactggtccctcaccacgctcaccacggtcggctacggcgacctgcaccctgccaaccccggcgagatggcgttcgccgtcttctacatgctcttcaacctgggcctcgccgcgtacatcgtcggcaacatgaccaacctcgccgtgagcgactccacggccctgctcgcgttgcgggacacgctgcgcggggtctccatgttcggggccgtgaaccggttgccagaggcgctgacggagcagatggcggagaccgtgcggctcaacttcgacatgacggagcagctgctccagcaacagcttctgtccgagatgcctagggctgtgcggtcggggatcgcgcagcacctgttccgggacaccgtcgagggcgcctacctgttccggggcgtctccgagggactcgtcgtggatctcgtcgccgacgtgacgccgcagtttttcccgcccaaggccgacattgtccagcagaacgagaccccgacggacttctacatcatcgtgtccggctccgtggacgtcttggcgactgctcccgacgggacggaaacggtcgtatcaagggcgtgtcggcgcggcatggccggcgagatcggcgtgatgctcaacataccacagccgttcaccgtccggtgcaggaggctcacccaggccgtgcgcgtcagccaaggccaccttctgcgggtagtccggcctcacaccgccgacgccgacagggtgttctgcaacttcgttcgtcagcaccttggatctcccgtgtggaaagttgcgaggaaagaaacgccactattcggggagatcgcggatgagcttgaggtcggtgccgccaccgcagcgtcaatgtcgaggcggaggagcgagatgttcgacttcgacccggaggctgatcggctgagaatgtcgctgcgtagagaggccaagcggcgagtggttatccgtcacaagtctctgaatgctgcagggaagcttgtatttcttcctggttccatgcgagagctgaggagagttgcggaggccaagctcggagaggtggtgacgacggtgctcaccgtcgacggcgccgaagttgaggacatcgacgtgctaagagatggagatcacttattcccatatgtgcacgtcctgctcaggcatggcgtcgtttgcggattggtagaggatcgagcggaacgttctcattcatataagaaccttgctatacatccgacccgcgtgtccaacccacggtcagatgccctttgtacacatgtatataaagaggatctctgcaataaacaagacatccctgtcatttgtctcattcacacttgtctctccactgattcaccactgagcactgcaatagagcgcaacacgttatcagcactgtctcaaggagaaatcagagaaggggaagaggaagaacacgctgttcttgacaagaacagcaagatcgatctacacatcaacagcaaggtatggagcataccgttttcatgcgcatacgccgtatgcgcgaagttcttcacattgttgatgatgcgatgttggaagcgttcaccgttgggcaagccgcagcgcttccaccggtgcacgcgatccctgaacgccgtgtgcaagtgcaaaatgtgcacttctgcgttctccatagatggacagcggtggttccgctgccagtggtggagtgtggactccccattgcatccccgtcgccaccggcgccggtgtttgacgcggaatcgtccgcatcggcccccatggatgtcgatttggcggcaccaccaccgcctccgcccactgcagcggcagttgctcgtcgttcgccatctccaccagtgcctgtggtcgtcggaaccattgctgcccgtcgtgggcagcccccgcgtgccgtcgatgctccacgtggacggattatcttcactggccatcgcccaagtggtatggcctcgtcttcctcctccaacgggagggcctaatggccctcgatccggccgccacgtcggccgtttggggggagggggtggggctcggcgcggcaagcctcagcacgggcgcgatctgcgcggtatggtcctcggccggccaggcgctcacgccctggcggctctcggaacggcctctgcgtggcccatgcaggcgcgctcggcgcgaggcgcgcttggcgtggtcccaccagagcgcgggcgcgggagcaggcctcggcgagggcgcgcacctgggcgcacggcgcggtcctttcggcggcgctcaccaacgtggggagccacggaggccccagccaggcgcccgaccctgccggctagcagttgcgtcgctcaccgcgacccccggcgagcaggcaggcccacccacgccatcaagcggtggtctgggcgcgcacggcatcgaccccagcgcggccccgagtgggtcgcgtggacctggtggcgcgctcggtcggctcttggtggccggacctggcaagggcgcggcccagactcctcggccgaacccggcgagataaggcggcgcctggagctcctgctcggcctcgccccaggaggctcgagccggctctgcgcgggcccccaccaggcgagcgctcggcgcggctcccatgggtgctcggcgctcgacaggagcgggcgcaggagaaccaaggcggcggctgggagatcttcgctccctggcggcggcggctga

SEQ ID NO: 38051 - DNA, 342 bp, Zea mays
  Peptide Sequence Number=SeqID_81426
atggacctcgccaggcgggagaaggatctcgccttcaaggaggaaatgcatgaaaggcgggagaatctgcagaccgagcatgagctcgaggtggaggagaaggagcgaatgttggaggagcggatccttggcgcccacctggaggccaagggcgacaggctttgccgggcggtgatcgagtacatcctgacgtgcttctggagccacgacccggccatcttcttggagccgatgatcgctggtccggtggccgacactgaagatgccgcccgggaggccgtacaagatgtcgtggaattggtggccgaatgtttccagcgggatcccgctgatgatgagtag

SEQ ID NO: 38052 - DNA, 141 bp, Zea mays
  Peptide Sequence Number=SeqID_81427
atgtggtggctgtgcgcgggagccctagttcaggctgaattcctcaccggaatcatgttggccgtagatcagcttcgattggaaacagcgttgtcgacaccacggatccaagtccagagaactaaagaaatagataattaa

SEQ ID NO: 38053 - DNA, 993 bp, Zea mays
  Peptide Sequence Number=SeqID_81428
atggcgctggggtccatagggcagtggctgaaagagcgttgtgcgggcactgatgaaagagaaatatgccttaggccatttctaggggaagcttctcgcataagggatgatgagcacagtgcgtcgtgcagcacgggcgcactgtttgacaatagactggacagggtactgacagtggccctcgggcccgcctcaggggaggatacaagcctgcaggtggggccaaattctgattggcgattggctcgctgcccctgcgtgcccgttgatgcaattactgccgtcttctgcggtggccccgaggagatgtggtattggcgcaagcggcggtgcgacttctttgcacctagaaactggcacgccgggtgcatgacatgtgggcctagcccccgatgccagaggttggaccaccggttacagcgaagccgagggggcaaacaaccgcggggcggttacaggctccttgagcggcagttcgcctccttgaccgctggttgcggcggagatgaaagggcgtataaccgcggcgcagttgcacgctccttgtgtggcgaggtggtcgctgccgtcggtgcagaggtggtcgccttcgctggcgagccgctcggaactagctacccacgtgatcctactggtgtggaggtactaggacacccgtcgcagagtggtggagcgtacaggcccacggtacggaaccaggctgagcggctacacgggctccggaccaccccaggagacaagtgtccattctctagttccggaccccaggttgctggacccacaggacttatagctccaaatactagggtacccgtcacgaagtggtggagtgtgcaggctttcggaccaataggccgggcttatgagggcggacctcaccgggttggcgtacacaagtctggacccgtggggagtccagaagggtttcctggggaaggcaggctttggccccgtagaccggggagcacggggtccctctgggggtacatctag

SEQ ID NO: 38054 - DNA, 762 bp, Zea mays
  Peptide Sequence Number=SeqID_81429
atgatggtcctcacctcagttgccaccacctcgttcgccattctacttcttttctctctcccctcatgcctccacctccgcgccaccccattctcggcagagggcgtaggagcatgcgcctcctccccgtattcgttcgacaccagccctgacaccgactcgcgcagtggctattgcacgtccacgaggacgtttcacatcatgcgcgcaccatcgttttcgccgtcgtcggacgtcccgttcgtcttcccggccttcgccacgttcttcctccccaacctgctgcccccacccacggtcgcaaccgcgagccgaccgacgctcgtcgacgcagggaaagtgaaaaatcgctttcgcacaagtcgcggaacagaggcaagcgctgtgccacacagcgggagtcctccccgactccccgagagatttgctgcccagagccttcgaatcgggttcaatcccgtcgatctttctgcccgccgccgccacgggactccagaagttgccttcgattcggccggggccgtggaagcggggatggggctcggagaggcggcggggcggctcctggcggccgtggactgggagcgcgaggcctaccctgcgtacgacgacttcctcgcgctccccgccttcgttctcttcttccctaccgtccgcttcctcctcgaccgcttcgtcttcaaggtgcgactgcccttgccgtctttcgtttttccttccgttgtttcggtgaaggtcttcgactctggcgctgaacgctag

SEQ ID NO: 38055 - DNA, 804 bp, Zea mays
  Peptide Sequence Number=SeqID_81430
atgaggcttatacatgggcagggacatcagagagctaataatgacacagaagaggcaaggaagaagataagaaaattcaaggaatcagcttggaaatgtgtttatttcctgtctggagagcttttatctttgtctgtcacatataatgagccttggttcaccaataccagatatttttgggtaggaccaggagaacaggtctggcctgaccaaaagataaaattgaaacttaaggctgtatatatgtatgctgctggattctacacatattccatatttgcacttatgttttgggaaacaaggcgttcagactttggagtgtcaatgtcacatcatgttgctactgttgttctgattgttctatcttacgtgttcagatttgctagagttggctctatagtattggcaattcatgatgcaagtgacgttttcctggaagtagggaagatgtccaagtacagccattgtgattggcttgccaatgtttcgtttctgttttttgttatttcatgggttcttctccgtctcacatattttccgttctggattctgagaagtacaagctatgaggtcttgttgactttggacaaaaagaagcacaactttgatggtcctatatactattatgtgttcaattcccttctattttcactacttgttctccacatatattggtgggttttaatatatcggatgcttgtgagacaaatcaagacaagaaatgttggagatgatgttcgatctgattatgagaggacgagcattgttcctcacgagattcaccgaagccgggctatgggttag

SEQ ID NO: 38056 - DNA, 402 bp, Zea mays
  Peptide Sequence Number=SeqID_81431
atggtcgggggcagcgacggcgctccgggaggcggtcgggggcagcgacggcgctccgggaggcgtttgggggcggcggggccggcgacggtgggggccggcggggcagcgggcgtcgcggggggcggtacggggccaccggggacggtgggaggcgacggccggtggaggacgggcgggccgggcgcgacggcggtgtgggcggtggggggccagcgggcgtcgcgggtagggatggcaattggacccgtgggtatggatacccgcgggtttcgtacccaccggatatggatacgggtacaaaaactcacccgtgggtcctatcgggtcggatacccgaaatacattgggtcggtcaactataatgtaatcgagaccaatgagacatttacaatgttataa

SEQ ID NO: 38057 - DNA, 180 bp, Zea mays
  Peptide Sequence Number=SeqID_81432
atggtcgttgggaggctgcagtcgtatggcgcaccggacagtccgactgtccggtgcgccttctcgcgcgtgcctgacttctgcgcgctctggcgcgcattaattgccattgcagagttgcttcgccctggggcaccagacactgtccggtggtacaccggacagtccggtgaattatag

SEQ ID NO: 38058 - DNA, 1869 bp, Zea mays
  Peptide Sequence Number=SeqID_81433
atgtcgtcctcttcttcttccgctgccgctatgccgccagccggttcctcgtcgccggccgccgcctcgtcggaggagacgctgagtagtttgatggcggaggagctgcgcgccggcgattctgttgatttcggcgtgtcgcgaatgtcgtcggcccgcgtggaggatatgcagcggttgggctacttcggcggcggagttgctcgtgccccggggacggagaaagtccccgagccggagggcgagttggttgttttcgaggcgtttttcgccgccggtctccgcttgcctgcataccggatcgccagggggctgcacaaaagcgccaggcggctgtcaggcttgttgaagccaggccaaagaggcagcgggggtcggcgaaggctgcggcccccggcggaggcaagcccgccgctggcggcgaagtcaggcgtccctgcatctagcaaggcgccagagacagcggcgggcgccggaggctccaaaccggcgaaggctgtgccgccgcccagcagggtggcggaggccgcgaaggcggcccgagcgttgccgtcggcaggcaagcgtgtcgccgacttcgccaccgacatttgtgtggaggactatcttggtgggtcggacgaaggccaacttgttatggttgcgcctgccgcggcgacagcggttgctaccgcagcgccgaaggcgaagggcggggctcttagcgccggaggcgaggtgtcagccctcgcggttgtcatggatgaggcgggcgatgtgacccgccggctgaaggaggtgacagaggcgttgagtcaggtggctgacttcgccagccgcactgcgtcgggggccctcacggcagctgtggctgccgaagtcgagagacttcggacacaacatgctgacgccgtccgtgagaagtcggccgccgacagcaagtgtcgcaagctggcggacaaggtggccacgctggagggagagaaggctaacctccggcgccagctggcgggggagaggagggagaccaacgaggctcttgttaaggcgcaggctgcgcaggcggaggctaacctggcgcgagcggagggcaatcttgccagggagcgcgccgagcagctgcaggagcggctcaccgccctagagagccgcgtggagagggccgaggccatgtcgcgcgcggaggcggagcggacgcgccagctgcttgtggatacataccgtgggctgggcgcggggaccggtgatttcgaagtgccggaccgggagcccgggcttcactgcctggagtgggtgcaggaggagttgcaggctctccccactgtcgtggaggggtttatggcgtatgcctccctggtcacctgcgagggggcgatgaatgcgctctcccgggaagggtgccggcacttcgaggtcttcgaccaagtcgaagaagattttgagcgagatatctttaaggttgaggaccctgtagtgaaggaatccgccggagctatcttcgaccggctatggggcgaacacggtcgcgaggtggtcagagagcgggccgagacggcgagggttcaggcggcgcgtggcgagagggtcgacgacttcggggcgctgaacagcatgctatctgacccggagccaaccccggcggaggccgtgcctgggcccgtcctggggccgaccccggagactgcgggagacgcgccgggtgcctccgcatccgctgcggccggcgaaggcctgcccccagaggtcgccgaaggcgcacctgatgcctccgcagcggctgcgccgagtgccgaaggtcccgcagcggtggcggcggagataacggcggaagcaacggcggagccaacggcggaggctcccgcaacgtcagggtcgtcgcaggtggcgtag

SEQ ID NO: 38059 - DNA, 942 bp, Zea mays
  Peptide Sequence Number=SeqID_81434
atgtcgacggagtgttcggacctcggggacgagttctggctgccggaggagttcctggacgacgacttcttctccgaggaggagaaggcggccgtggcggccaggagcgagagcgacgaggaggacagcctggcggggctctcgcgcaggctcgcgggcctcctcggcgacgacggggagcggaagccgcctaccgccaaggcggaggtggcggtgattgggtcgccgcagtcgacgctgtgcgggctgcccaagtcgggccaggagagccccaacggcggggcgtccaaggggacgtcgccgccgtcgtcgccgcctctggagcagaagccggccgacccgtgggacgtcctgtacgaggcggcggggcaggtcgcgcgcatccgcgccgccagcagcgtgccggtgcaggtgccggccaacgcatacgccttcagcaagccatccccgccgccgccgccgccgccgcagatcgctccgccctccgccaagttccatctcctgaagcagcatcagctgctgaagctgcagaggcagcgccatctcgccgcgtggagcgcgcgccagagcgcctgtgccaagcccgtcggctgcggcggaggcgacgcgccgcttggcctgaacccggcggcgtggcctccgctccagaagccaccgccaccgccgccgccgcagcagcaccaggcgccggcgcatcctgcctccggcatgcgcgccgtgttcctgaccccgcctggcgccaagcgcgagcgtaacggcaccggggtgttcctcccgaggccggccggcgcgcccgcggcggagcccaagaggaagacggcgggggcgtgctcgacggtccttgtccccgctcgcgtcgtccaggccctcaacctcaggctcgaagacctcggcgcccagcctcgctactaccctggcggcttcgttctcgatcacggttag

SEQ ID NO: 38060 - DNA, 915 bp, Zea mays
  Peptide Sequence Number=SeqID_81435
atggccggacggctggtggaagaggttcaggacggggacgtagacggcggcggcgaggtgaccgcgccgccgcagcacctggtgttcgcctactacatcaccggccatggcttcgggcacgccacccgcgccatcgaggtccgccgccgctccctccgcccgcttgcggcttgcctgcctggtgccggcgcgtaccgttttctgaccccatcgtctccaggtgtttgcacacacaactcgatcgccccccttcgtttctctgagttcttaatactggtgcgcggagtgcagtaccaccagacgaccgtggtgcccggggagtccatcctcaagaccgaggcagagtggctcaactccatcaaggccgaccttgtgatgttgtacccgtcgcgtgtagggcagctgcagatgctggcattcgatccgtgtgcgtcacgaatttcagccaccgatgccggtggcggcaagaagcccaaggagctgaagcagaagaagggcaagaaccccttctcgctcgagtacaacgactcggcgccggcgagcgcaccgaggctggtggtgctgcgggagcccacggggcgggacatcacggagcggtacgagcttggagcgaagctcaggcgcggcgagttcgaggtcacctcaacttcatggagagtgtttgctcaatttatgcagaagtggatggtaaggaataggcaatttgcagttgttgagaatccaggattctggaactggacctttagcctggtggatgaagatgacaaattgttggctcagattgatcgtaattggaggggcaccggctttgagccttttatacagtactgggctttgccattgcctgatgacacagctatgatggttctatctcacaagtcacaacagatccatgttgcagtctggtgcatctga

SEQ ID NO: 38061 - DNA, 354 bp, Zea mays
  Peptide Sequence Number=SeqID_81436
atgctggcccttctgctcctgctgctgaagaagtactggtggaactctttactggagttgatcccaatgggtgtggccctgctgatgctgaacccaatgggtgtgaccctgccagagttgaccccaatggatgtgggattagaggtatcccgggcagcgtctcgtgcctcgtcgaccttggaaggcggtcttcggagccaagagattgccccagttgatattccttcgtcgagccaccgcctggcttctcgtgatttgggatttccttcgttcttctccaatctccagatatggcccggtggtattctgaacttgaggaaaagtattcccaagttgttacgattgcagaagtaa

SEQ ID NO: 38062 - DNA, 441 bp, Zea mays
  Peptide Sequence Number=SeqID_81437
atgggcaagagcaagaagggcggaagttcgtcgcaccattccggcgacaaggggaagcgcgagccgacccctccctcagaggacttcggtgattccgagtactcggaggaggagatttcctccgagtccgaggggtcgccagtctacacctctcccccggcatcgtccgatgactcggacgattctcaggggatcgccgccaaggtgtggacatacatccgggccgtcgagcgctccgggctcgagggctcggatgagtcggaggtctcctcggacaaggagaactcctctgactcgtccgaggaggggagcggtggtgacggcgacgacgagggcaacggcgacgacggaggcgacggcgatggtgacggcgacggcggcaagggcgacggcaagggcgacggcaagggcggcagcggcagcagcaagtttagtggctaa

SEQ ID NO: 38063 - DNA, 624 bp, Zea mays
  Peptide Sequence Number=SeqID_81438
atgacaatgaggtatggaggtcggaacgaggaagaaatagccctcacccaccaactagccgttgcaggcaactttccgctcaccggcgcaccggacagtccggtgcgccaacggtgcgccaccgcatgtgatgatgatgtccaattatgtatcgctatgtacgtgagttctgatgctggcacgtacatggttcgcattcggtttacctccaaaaccagatggctcgtattagatgcactgcaccgcccactgcgtcgcacggtgccaggtcagtccagtcacctggagagactgcatcgtcgcctacatgaggagcaggaacgccgatgccaggagcaggagcagcaggactcttccctctcgcctcagcaggaggtggagtctaggaggcagccttcccctgcacctcagccagagatgccccctgcaccaccacagggcatcccggctgctgaaggtgaccctgacgaagacggagacgacgacgacgccggtggcagttcaagccacagcgtggagctctcggaggagcaggagatggagggagggatcgctagacccatcactcgcgatgcccctcctttttctcacttccacgatgctctagacaccttgctgcgtccg

SEQ ID NO: 38064 - DNA, 636 bp, Zea mays
  Peptide Sequence Number=SeqID_81439
atgtcttcgcgctcccttatgcatcgtgtctttccaccttccaagctcccggatgggggatacccgccgtctttccgcctcgtcgttggaggaacgcaactccgtgggagttggtacctttcagccatcgttcggcttcaaggattttcatcatgcagcccggttgcacccctccgccggcggtcacccgagacggtggccaccagcccctgggtggggagaagcaagccgggctgcgatcttggtcccaccctcagcttcaaggatgttcatcatcctcgctggggtgggggccgggctgagccggagctctacctcccgcgcgtgttcgtgggtcggcctctccttcggcgttcgagggagagggcactcactggccctgcgggcgggccggacttcgacaacgcggggctggtcgacggcgggcgtcgtcagcctcagcgcgtcgggctcgtcggcttagctcccggtgccccctcctgccggaaggcggctgccgcgccgtgtgcacgggaggaccgcccaagatatcgcgcgctgccagggcggcgttcgtgttctggggcggtcctgcctttgcaccggtacggcgcttccacgcggaggtcggtgccccactcgtccgggaggatctga

SEQ ID NO: 38065 - DNA, 132 bp, Zea mays
  Peptide Sequence Number=SeqID_81440
atgacgaccgacaggccgcttgagctactccacatggacctattcgacctgatcgcttacataagcatcggcgggagaaaaatctcaaacccaagggacgttaaagagattcttgagacgggctcaaaatga

SEQ ID NO: 38066 - DNA, 798 bp, Zea mays
  Peptide Sequence Number=SeqID_81441
aggcttacccggtctacgttcaccggcggtcgggtcaagtccggcgaccgtggactggcttctccggcgaggcaaagtccgattccttgctcggggagcttcaccaaggcatgcacggtctcttccgagggtcgggcgtggctgggaagggctctgcaggccggtctacggtggcgggggatcgggtggccgcgggcgcgctgtctgcagggcaaacgccggcgatctctggctccggtgtaaaaggttcacactcagccaataaaaagatcaagttttggattcaacaaaggagcaaaaggggcaaccgaaggcacctctggtctggcgcaccggactgtccggtgtgccaccggacagtgtccggtgcaccagaggactccaacgcaaactcgccaccttcgggaatctccagaggcgactccgctataattcaccggactgtccggtgtacaccggacagtgtccggtgctccgagggaggtcggcctcaggaactcgccatcttcgggaagctccaacggctagtccgctataattcaccggacatgtccggtgtgcaccggactgtccggtgcaactccggagcaacggctattcggcgccaacggctacctgcgctacaattaatgcgcgctctgcgcgcgcagaaggcaggcgcgcccatactggcgcaccggacaaggaacagtgcatgtctggtgtgcaccggacagccaggcgggcccacaagtcagaagttccaacggtcagaatccaacggcagtaatgacgtggcgggggcaccggacatgtccg

SEQ ID NO: 38067 - DNA, 567 bp, Zea mays
  Peptide Sequence Number=SeqID_81442
atggcagcccacgttaacatggggtcgtattcttggctaaggtacttcacccagggggccaccaccatcgtctttagaaaccttagcgggttgcttcgtattaagatggttcgcaccctccaaactacccgcatcaacaccagctacgcccctcagccccggcaggtcccggtctacccagtggtagtcgaggaagctccagcggatctccctcccatccaagtggagaacgtgatcaacctggaggacagctcggaggagcagctgccgacccccaccccgttggccgagtccctggcctacgcagctgggtcatcgatgtcagcatcgtcggcaccagcctttcaagcacctgcacctggaggcgacgaccccgacgactccggagacggcgatgacgaggatgacgacgaagacgatggagaagacggacacatcaacgaggaagctgactacgcccagcaggaccacttcatggggattggtccagttgtcgaacattacacatcaatgttcgagacaggacgcttccccaacctgctgcaggcagtgcttgtacgaagctag

SEQ ID NO: 38068 - DNA, 969 bp, Zea mays
  Peptide Sequence Number=SeqID_81443
atggatcctggcacacatatgatggttcgcaccctccaaactacccgcatcaacaccagctacgcccctcagccccggcaggtcccggtctacccagtggtagtcgaggaagctccagcggatctccctcccatccaagtggagaacgtgatcaacctggaggacagctcggaggagcagctgccgacccccaccccgttggccgagtccctggcctacgcagctgggtcatcgatgtcagcatcgtcggcaccagcctttcaagcacctgcacctggaggcgacgaccccgacgactccggagacggcgatgacgaggatgacgacgaagacgatggagaagacggacacatcaacgaggaagctgactacgcccagcaggaccacttcatggggattggtccagttgtcgaacattacacatcaatgttcgagacaggacgcttccccaacctgctgcaggcagtgctgtacgagctaggagcctacgcccgccccctgtacgagacgaggcgagtgagcgagcctccccgggcttgctattacatcactcgcatccatgtcagggtgatggatgcaggtgacaggggattgaggactctgtctgctcacgagtccctgataccgctgtccacctacgctgcctctgtcagcgacgctgcccgtcggaccctgtggtcgcttagccacacctaccggcagcagctgcagaacacaaggttcaggcatctccctcagcgcctgcgagctggtgtagtggccggtctcaacaccgacctggacagtgccactctggacctctacagtgtgcacttggagctggagaatgcccacgccaggatttcagccctggaagcccaactgcaaggactggatccgccagaagctcaggtccccgccgtggcgctatctcctccccgcaagaggatgcgctatggagagcccggatcagtcactaggctgctttag

SEQ ID NO: 38069 - DNA, 474 bp, Zea mays
  Peptide Sequence Number=SeqID_81444
atgggcaagaacaacaagcgtaagcgtgagccaactcctccatcggaggagtttggtgactcggagtactcggaggaggagttctcctccgagcccgaggggtctccggctcccgtctctcccccggcgtcgtccgatgactcggacgactcccaggggatagccgcggaggtctggacatacatccgggccgtcgagcgcgccgggctcgaaggctcggatgagtcggagtactcctcggatgagggggactcggacggcggcgatgagggtgaagacgacgacgacgacgacgacgatgacgacgacggcggcagcagtggcaggggcggcggcgacggcaggggcagcaccaagggcagcagcaggggcagcaccaagggcagcagcggcggcagcggggacagcaccaggggcagcagcaggggcagcaccaagggcggcggcggcggcaggggcagggccagtggctag

SEQ ID NO: 38070 - DNA, 849 bp, Zea mays
  Peptide Sequence Number=SeqID_81445
atgaatagtgttgggctcaattcagcccaagtcggcccacagacgggagaaacacgcgcgcgcctgcgcccgcgcccgcgctgcgccaggtccacgacggtggacggcgacgagcacatctccggcgaactcaaggctggccacagcgaggcgttcacggtggcgtggaaaacaaatttgggggaagaaaggaatttgggcactatgttggctaatcggaggcaaggactggtgctctggcttcgtgacaacctggcggagctcactagggcttcaatttatagagctcaacggcggtggcgcccaatttggagaaaacacgcggggcgaccagagagaggggaagtcactgaggcgaactaccgtggcggtcactgggtaatgagctacgacggtcactgggtaatcaccatgactcgtgacgacatgcaagcttttgaacatggggcagaagaacacctccacgtgttcgacgcgttctgggtgcgccagagcacgcccgcgcccgaccccgcgccccccgcggcacgccaagccgtgcccgcgtctcctgctcgcgcccgcgcctataaatcaccgtcaggcgtcgaccgtactcctccgcgcacgctcgacctcaccggagcccgaaaccaccggcatttgccccgcgcacggcgtgcccgcggccacccgagcgccggccaccgtagaccggccaacagagcccttcccagccacgcccgaccctcagaagagactgtgcacgcctcggtgaagctccccgagcaaggaatcggactttgcttcgccggagaagccagtccacggtcgccggacttcgcccgaccgccggtgaatgtagaccgg

SEQ ID NO: 38071 - DNA, 651 bp, Zea mays
  Peptide Sequence Number=SeqID_81446
atgaccctagagcctcatcccctgcagccaggctggcgttcgctggactctgagtcttttggatatcgggctgaggatactatcgaggcgattgctcttcacggattgaccaccttctgcggattccaccccttggagctgtccactcaccgcattggcttgttccccgctgagaaggaagacgacccaatgtggaaggaccgagtggagcatgccaaggatatctcggctatctacccagtgatgcgtggtgaggcaatgtcccatctgatggcattgttggaggcaaccaagatcactttggataacagagaggaacttgtggttgatttgtccactgagatggtggaaaaggacttacaagtggagcaactgtcaaatgagatccaggagctggaggaactagtgggaacgagggagaacaccatcgaggttctcgaggatcagttgatcaacacccagcagcagcttgcagaggctaaccaacacctggatatgcaccaccaggagatccaagacatggaggccaacgaggatgtcgacatcggggaggagaggagcctgcctccagtttggacattgctggctcagggagaccaccttcccccgagtcgagtgttgcctcatttgctcactaggtcgcagggatag

SEQ ID NO: 38072 - DNA, 819 bp, Zea mays
  Peptide Sequence Number=SeqID_81447
atggtggagtataaatttttacgcagtacctggtggttgcatactggtgatattggatactttgatgagggaggtcagcttttcatagttgatagacttaaagaactgattaagtacataggttttcagattgcacccgccgaggttgaagggctacttctgtctcatccagaaattctggatgctattgttatcccgttacccaatgctgaagctggtgaagttcctattgcctatgtcgtaaggtcccccgacagttctttgactaaagttgatgttcagaaatttattgaaaagcaggttacggccacgagtcctacagggacacacaaattagccaatccaaatggtgctttccttctcatcaagctgcagaatcgaggtggttgcctccagttgcgacgctattcgcttttatcaattatatttttcatcgtgtaccttaggtgtacaagagaagcgatgtttcgacaacattgtggctctgacattggtggtggctatgagctttatgttgatgaagccaagccaagaggcgacgaccagcgtggtgatggtagatctagtggctgttctggtgggagatttggtgaccgttctggtggccggcgtggtggtggtagatttggtgaaagatctgggggcagggatggtggcggcagatgcgatggccgacgcggtggtagggatggcggccgtggctttggtaacaagcagagcgctggcactcccagtgcaggaaagaagaccactttggtgatgattgatgatgaacgcggaggatgctgcaaaaggaggaatgatctgctgatccaatga

SEQ ID NO: 38073 - DNA, 960 bp, Zea mays
  Peptide Sequence Number=SeqID_81448
atgatgaacacaactccaggaatccagccttacctcttagtggcacaagcgacaccgtccgggcaggcaacaacccagggtgtcaattttgggatgtcggcaccctgcctgcaaggtcgtactcagaacaaccccactatctccaatcataagtcaagtttcaatgtattatttatttgtgctggtagattggacatgtcaaactgcttcgcccgagcggtggaacacatcggccgggcgcctagaggagcgcctggacccgggaggcgggagcgggtcggtaccaccgccgctgccgtggcacgcgcggtgcggcgtcgcctacgggcgtgctccgtgctggcgttcctgcactccacgctgccacggccgacggtgcacggggacgtgaggccgacgaacatcctggtgctagaagacaatgtgccgcacgggtggtcatgcaaactaaccggcctcggcgcgcgcgggctcgtggaggagcaagagcagccccgccccggtgccgtggatcgggcgtatgtggagccgcggtacctcgctacgactggggagctgaacccgcaccgcgacgtgtacgcgctaggcgtggtcctcctctggctagtgaccgggagaccggcgttcctggtgaggaaggcagcgcgggaggccgtggacggcagggcgtcgtggcaggaggtggcgagagggtggccgacagagcgcgtcagggaggtggccctactcgggctgagatgttgcggcgtggacgtggaggcagagcagaggccacggctccccgccgcgctgttgctcgaggaggccgcgatgagcgcagcgccgagcaggtcgccatcgtcgctatccgagtccgacggcgccccatcctacttcctctgcccgatactcaaggaggtgatgagggatctgcagatatccagcgatgggttcacgtatgaggcggaggccatctggtag

SEQ ID NO: 38074 - DNA, 255 bp, Zea mays
  Peptide Sequence Number=SeqID_81449
atggagagtcatgatctccgggcagaaagggaatcacggcttgtgggtaaagtgcacaagctctgcagagtgtttgaaactgatatatcagccgtgctcacggttatgagcggccaagggagctccagtggcaatgagattgatggttctggttatgactatggtactggttgtcagcattgcaaccactgctcaggagaagatgaagccgtggaaggagacttccaggagttccaagactacgacgagttctag

SEQ ID NO: 38075 - DNA, 403 bp, Zea mays
  Peptide Sequence Number=SeqID_81450
atggatattcgtttatgcactgctaaggaaatcctcctccatgaggattttttgttcctccagaaggaacttaagttttcaggagtgcacttattcatgatggatggagtcacacaagctgttgaaaatcttaagaaagaatggggccaagcagtttcacagcttgacgagaacattactgcaattgaatcatgtggaaaaacagggaaagggacagaggaagcaaattgtcttccaaggttgaatggttctgcacaggatgctctgcagttgctgaagtcactgcagttccagcttgatcttctagcacagcagcttcccacttttgatgaggtgcagtctggtcaagcaaccttgaagtcatgggatgaacaatacaagaagatattcttggagacttgga

SEQ ID NO: 38076 - DNA, 2124 bp, Zea mays
  Peptide Sequence Number=SeqID_81451
atggatatagtggtggaggaaggaaatgccgatgttggcaatactgctgaaccatcgtatgaggttgtggctagaagtggttgttcagcacaattgtcaactaatgacactaatgaacatgaattggatatagagagcgaggatagtaaggtcagtgttggtaatgctgcaaaacaatcacacgatgttgtgggagtagacattgactgtattttcaatcatgtaaaagtgtcaactgaagccgatcttgggccacaaccggattataagtgcaccccagaagatgttcagcttattgaatacattaaaacattactggggaaacaagttgtggtggacatcgacagcgcatggttaaatagaaatgatatggaatgtctttttcatggtgacatccaagtgtctggcgaagccctcagtgcatatatacactgtattagggatgaagagcatttacttcatagagaaggtggaaaggtcttcttggagaacacattcatttccagtctgcttaagcgtaatggcgaccctaaggtgttcattccaatgaatatagaaaattttcactggtacctggcagttctgaatgcaaaaaaaagtgagttaaaaggtctagaaagacagattaaacttgcagcagaacataaagagctttaccaaggcaagtggtcgaaccttgatgttgcatcatggccagttatagagaagatcacaacacaaatgcaaaccgatggggtatcttgcgggctatggatgataaactatatggaatactggacaggatcctccctatctgataacgtaactcaggatgatataacaatgtttaggtttaagctacctgcaatattatgggactcgagattaaacacaaagaaaagacatcaaaatcttgaccacaatgtggatgaagatggagagagttcaagtgatgttcaaataatcgatactccattaacatcaacaaacacgcaagaactgatgtttgtattatgcacatatatcatggggatagacaacgccaaatatttaaagaaacattggattcagagcactaaaccttatccaatttcgttaagtcttcaaaaacttaaagatatattggatgtaaataagccgatggataccgattgttttaacatggctgttcggatgatcgcatgcaatgatgccttgttcttgttggaagacaaataccactacatggatctacagttctgttccataactaaatttggtcgagaccctcgccttcgtgcaaagccagatatcaacatgttggcaaaattattagaatgttggcctgacatggagtacgatgtttcagattgcaaacaaattctattgcccttttctttcatgggtcacttcaccttatatgtacttaacatggacactagaagcatctatataatggactccatgcctataccatcatggtttaagggtgatcatcctagcatgcattatatccataatatacattatattgtcaacaatatgaatgctgccatggaattggccaatcctacatggaaagacgatatttatatgtggcgtcgtatagtaccaacatgggttccaagaacattaaactgggatttatctggctttcttgttatcaactttatgcacgattggaatggtataaggttaccctgcatttgcattcactgtagtctgtcaccactgccagcatatgagcctgcatttgattgggagaatgagaggtctttgatatttggccaaagggtgccagaaagtataccaacaataagcaacagtggcttgaagataactgtcaagagtgtttgcgtgaaaatgattgatgccggtgccgaacatactgttgcagtaactgaagacgatgacctctacggatggggttggggtcgatatggaaacttaggtattggtgaccgtaatgaccgtttgcttcctgaaaaagtatcttctgtggaggtaggtatgcagctcctgtgctgtgaagttgttgagaagactgacgcagtggtctatcgtggaaagccaattgcattgactaggttgtctgcaaaacatgtaccgcagaagttgaaagggaaatgtgcccttgggccatttctaagtgttttggtgatttag

SEQ ID NO: 38077 - DNA, 996 bp, Zea mays
  Peptide Sequence Number=SeqID_81452
atgaacatgattgacttcgagggcaagaaagtcctggttcggccaaatacagccgataaaggcaaaggcaaggaaacaatcatcggcaatgctgatgaaagtgcattcatcccttttgtgagttttggtgatttggataacaacacatttaaagggaggattagggttgaaagagacctggctctttgtgggcgcctcaacgaggaagtagggcaccttggtgatgttgatcctagggcaatagatcttgccatgagaatcgccgaaaggatgttcctcaaaatgaaggaagatgagacaaagaacaagattgaagaagaagaagatgatcgatggaaaccaaacgatgaatccacctcttcacaaggttcgtctttcaaatccacttctcatatgtgctttatcgctaatgggagtgacagtgaaagcggaagtgaggacgaggaggagcaagaaagtgatagtgaagatgaggatgatcttcaacaattcttcgctcagctaagcaagaaaaatcggatgagcttgcttaaactcacgaaaagagcggaagaacaaaaagaaatgcttcataagcaagaagacttcctcatcagaaaaatcgaagacttagagaagttgaccaaagagcatgagaagctgaagtgctctcattatgatttggtccaaagggctcggactcgggctaagtcccagaagacggcgaactccgctccgcccgaccctcggggctcggactccgccccggcctcagccgtcggtctccgcctcgcccgacccaggggctcggactcgaccccggccacggaagacagactcgacctcggcttcggaggagcttacacatcacccaacctagggcgcagaccaaccacgtcaacaggaggcgccatcatcaccctaccccgagctgactcgggccacaggaacaagaccggcgtcccatctggctcgctccaccagataggcaatgatggcgccccgcatactctgtga

SEQ ID NO: 38078 - DNA, 513 bp, Zea mays
  Peptide Sequence Number=SeqID_81453
atgagattgatggttctggttatgactatggtactgctacagacccgacagacacctaacagtattttagtagcgggttctgataaccaacgctctcagtggacaaaggatgttgttgaatatttacaacatattttggacgaattttgttctaaagagggtgcattcgtgcatccatcttttagagagcagtcatcaccaggacctattgctggaaccaatcagataaaaatgaaaactgaagcatctccagctgctggagacattgaagaacccttggtgcacttcaaatggtggtatatggttcgtctcatccaatggcatctcacagaagaattgcttgttccctcagtacttatcgaatggctatctaaccaactccaggagagagattcagttgacgttttagaacttctcttgcctattatgcttggtctggttgacaccattagtctctcacaaacatatgtgaaactggaagaacgtatgaagctagactttaacagattatga

SEQ ID NO: 38079 - DNA, 186 bp, Zea mays
  Peptide Sequence Number=SeqID_81454
atgcagttcgaaaggccgagctcgatgagcttgctgcagctctcacagatggcgaacagttggtcctattgtatttcagttgctcttgcggtagttcccccaactgtcaccatgcagtacgaggagggtaagactgtggacctctatgtccccaggaagtggtacgtttgcctcatcctcttgtag

SEQ ID NO: 38080 - DNA, 759 bp, Zea mays
  Peptide Sequence Number=SeqID_81455
atgggccggcacccaacagtggtgccggcccactcacactcacacacacatagtctaacagttctgaaacgggctggacacaccgaggcatctgttgaccttgccatgttggctggattacctcctgttgctgtcctttgtgaaattgtggatgatgcagatggttctatggctcgcctaccaaagtataggaggaaaagagacaggctaattgaacgcgcttctgttgcacgcttgcctttgaaatggggcaatgtccatgcctattgctacaaatctgttattgatggcattgagcatattggcatgatgaaaggtgatattggtgacagccaagacattttggtgagggtgcactctgagtgcctcacaggcgacatttttggatccgcaagatgtgattgtggcgaccaacttgcgatggcaatggagatgattgagaaggctggaaggggcgtattagtctatctccgtggacatgaaggaaggggtattggtctgggccacaagcttcgtgcttataacttacaggatgatgggcgtgatactgtggaagctaatgaggaacttggtcttcctgtggactcacaggaatacgggattggcgcacagatattgcgggatctaggagtccgttcaatgaagctgatgactaataaccctgcgaaatatagtggtattaagggctacggattgagcattgcgggcagggtgcccttgattacgccaattaccagtgagaacctctctgacaggtag

SEQ ID NO: 38081 - DNA, 1209 bp, Zea mays
  Peptide Sequence Number=SeqID_81456
atgtcggacgactttgttgttcctgtccactttgaagttggccaagaacctcgcttttgcctcctggatcatctgctccttgtgcttctcaaactagagctgttcgacagccgacaatgtgtcccaagtcgtctctatgatgttgcttgggcgcggactgtccggaccgcggaccgtccgacctcagggccggaccgtccgccagctcaaaacggtgctcaacagcagcaaatcgaggtgagcgacaacacctgttgttttgcccctccctcgtccggcccagcagcccaggcgagcatgccttcgattgcgccaccgtcttcctccgtcgctgccctcacccgccaaccggtgcaattcttcaaagggtgcagtgtatccaaggagacaaagggaccggtccgcagtttcttcactgcaaattcaaagagcaccacggtgaaatcagcggacttgaaagtagcatcatccttcaaaaatgatggtggttatccagctggcggtgtctcttggaaggacgacactctattgccaaaaagcacaaccattcgtggccaggaccatccggttgctgaccctgtactcccaatggattccatgattacgccagaaatcctctctgctaatgtggaacgtgttatagacatgtttgcagacgatgacactgatactgaacttgatttggatagcccgacagaggacttcacatcaattgcagaagccattgaggacatacagcaaggaaaacttgtgattgttgttgatgatgaatcaagggaaaatgaaggagatctgataatggctgcctccttggttaccccagaggctatggcttttatagtaaggcatgagacaggaattgtttgtgtcagcatgaaagaagatgatctggaaagactgagccttcctttgatggttaccacaaaagaaaatgagaagctatgcactgctttcactgttacagtgatgatgattttgcaacaattactttctattgaattgaattctaaagatgcaaaagagggcacaactactggggtatctgccaaggacagggcaaaaacagtcatgactcttgcatctcctgactctaagcctgaggacctcaaccgccctggtcatattttccctttgaaatacagagaagggggtgttcttgttagactatgtgtgtgtgagtgtgagtgggccggcaccactgttgggtga

SEQ ID NO: 38082 - DNA, 363 bp, Zea mays
  Peptide Sequence Number=SeqID_81457
atgcgccccctcctcctctccctctctcatttggatttcccgcgcagcaacctccctctccctcttccacctatctcctcgtggtgccctagggattggagacggcgatcaccggaatttggaccccgagcggaagagggatccgatcctccggaactcttagctccagaagaagggcaagaacccgacccctccgagattaacctcttgtgccaggaaagcttcgacgaaggcaagtccatctttcccttgatgcattatttacctatttctctctaccactgcctaagcctggattatgggatgggaatcgaattgcatggtgagcatgagagagctcgcattaactattacttcgattaa

SEQ ID NO: 38083 - DNA, 453 bp, Zea mays
  Peptide Sequence Number=SeqID_81458
atgggcaagaacaacaagcgtaagcgtgagccgactcctccatcagaggagtttggtgactcggagtactcggaggaggagttcttctccgagcccgaggggtctccggctcccgtctctcccccggcgtcgtccgatgactcggacgactcccaggggataaccgcggaggtctggacatacatccgggccgtcgagcgcgccgggctcgaaggctcggatgagtcggagtactcctcggatgaggaggactcggacggcggcgaggagggtgaagacgacgacgacgacgatgacgacgatgacggcgacggcggcagcagtggcaggggcggcggcgacggcaggggcagcaccaagggcggcagcggcggcagcggggacaacaccaggggcagcagcaggggcagcaccaagggcggcggcggcggcaggggcagggccagtggctag

SEQ ID NO: 38084 - DNA, 474 bp, Zea mays
  Peptide Sequence Number=SeqID_81459
atggaggacgcacccatcggtcttggcatggcgctggcggttgccgcggcggtgcggcaggaaattaacttgatcctcggtgatgaggtggcgcgacagctgcctactccgacccccaacgccggcccctcgggaacgacttcacggccgccactcttgagcccgagccacaaatctctactgcttattaaggcggaagcgctcgcgttggcgtcgctcatcgacgacgagaagaagcttgacgactgccagttcgagctctggaagcagtactacgtggccacatgcgtcgctgtgtttggcaagctccggcgcagccgctgcttggacacggtccagagcggctgcaccgcacttttcatcttcaaacagggggacctcatggtcgtcgccaacgccggcgactctcgggttgttttgggcaccgcatgcgacaacggcgccgtcacaacgtccagctcattatccacctga

SEQ ID NO: 38085 - DNA, 417 bp, Zea mays
  Peptide Sequence Number=SeqID_81460
atgggcaagaacaacaagcgcaagcgtgaaccgactcctccatcggaggagtttggtgactcggaatactcggaggaggagttctcctccgagcccgaggggtctccggctcccgtctctcctccggcgtcgtctgatgactcggacgactcccaggggatagccgcggaggtctgggtgtacatccgagccgtcgagcgcgccgggctcgaaggctcggatgagtcggagtactcctcggatgaggaggactcggacggcggcgacgagggtgaagacgacgacgacgacgacgacgacgacggcgacgacagtggcaggggcgacggcgacggcagcagggacagcaccaagggcgacagcagcaggggcagcaccaagggcggcggcggcggcaggggcagggccagtggctag

SEQ ID NO: 38086 - DNA, 99 bp, Zea mays
  Peptide Sequence Number=SeqID_81461
atggcgcccaagaggaagaccgcgaactcgtctgccgcagtgatccccgccatcgaccccaacagtcagttacccttcgcaggttgttttaccttctga

SEQ ID NO: 38087 - DNA, 396 bp, Zea mays
  Peptide Sequence Number=SeqID_81462
atgggcaagaacaagaaaggtgggagttcttcacaccattccggcgataagcggaagcgcgagccgactcctccctcggaggactttggcgattccgagtactcggaggaggagttctctcctcctctgagtcagagggtgtggacctacatccgggtcgtcgagcgcgccgggctcgagggctcagatgagtcagaggtctcctcagacgaggagaactcctcggactcgtccgaggagggtggcggtgacggcgacggcgagggcgacgacgacgacggaggcgacggcgacggcaagggcggcggaggcaatggtgacggcttgggcggcagcaagggcagcaacaaggccagtgtcttggcgccactggttttaaatgttagtatagattag

SEQ ID NO: 38088 - DNA, 198 bp, Zea mays
  Peptide Sequence Number=SeqID_81463
atggggtccaggcacagtgcttgctctgccgaggctgagtgccgaggttctttcgttttgcttttgttagtcaccctcctgcggggagagtatttcctctccgaggaggtactttttgggattataacttgggttttatggttgtccacattgcaaccactgctcagaaaagatgaagccgtggaaggagacttctag

SEQ ID NO: 38089 - DNA, 378 bp, Zea mays
  Peptide Sequence Number=SeqID_81464
atgccactcgacagagtgaggctgacagcagccaagtccggcctcgggcgccataggaagctccgcctcgcccgaccccagggctcggactcggcctcggccccggaagacgacgaactccgcctcgcccgaccccagggctcagactcggcctcggccctggaagacgacgaattccgcctcgcccgaccccagggctcagactcggcctcggccccggaagacgacgaactccgcctcgcccgaccccagggctcggactcgacctcgacctcggaagacagactcgacctcgacctcggaggagcctccgcctcgccctacccagggctcggaccgaccacgtcacaggaggggccatcattaccctacccctag

SEQ ID NO: 38090 - DNA, 645 bp, Zea mays
  Peptide Sequence Number=SeqID_81465
aactccccgaagtcctgggagggggtatggccctcaggtctcctcggccgagccccgcaccccctcgcggcctagccgtggccggtcggcaccctaccgcgcccagctccggctggcgctgttggctgcctggccggccgtgcggctacgctggcgcatgagttgtcttggacccgtgactgcttggaggacccccgctgccgtgcggccgactcccggcgcccgtgtcccatcactcgtgcgggcatcctgtgcctgctgcgttgagaagtgcttgcgtgctgctacccgtcccacgggaagccgtgctcgatacacgttgccttcgtcgagctcaccccccggggtgcggctcgtcggctcgagagcgcccgcggcgtttgcctcgtgccgccgtcggcctatggccggcggcaccgaggacacctcgctggcgcttttggtctcggatgtggctcacgctgaaggccggagacgcgttggcgtcacgcgcccaagaatcggtccgcccgaacgaacgacgtccagcccggcacgacgcctccgcgcggaggccggcgctggcccgtctgcgaggacgtgctacctggttgatcctgccagtagtcatatgcttgtctcaaagattaagccatgcatgtgcaa

SEQ ID NO: 38091 - DNA, 177 bp, Zea mays
  Peptide Sequence Number=SeqID_81466
atggagaagctccttaaattggctgacgtgactcctctgtcgccttttctttttgtgtcattttgtgtgtggggattgcgccttcctgtggctgcgaagctcaaggagaagattgagaagatgtttaaaggtgaaaagatccagaagcagcagaatgtgcaaaaggccggcaactga

SEQ ID NO: 38092 - DNA, 603 bp, Zea mays
  Peptide Sequence Number=SeqID_81467
ggaagggttatcccttgcgactttattggtgttgttaaaagtcagcagcctgtttacttgaaaggggaaactgtgagtaatcatgatgagcttatgtccaatttctttgcccaacctgatgctcttgcttatggaaagactcctgaacagttgcacagtgagaaagttccagaaaatcttatccctcataagacttttaagggcaaccggccatcactaagtttgcttctgcctacactatccgcatatgaggttggacaggattttgtgctcatttggggaattaacagtacctatactcttcagcttttatccatctatgagcaccggattgcagttcagggcttcatatggggaattaactcatttgaccagtggggagtggagctagggaagtcactcgcttctcaagtgaggaaacagctgcatggaacccggatggaaggaaagcctgttgagggttttaaccacagcacttcaagtttgcttgcacgatatcttgctgtcaagccatccaccccgtatgatactaccgtgctgccgaaggtacagcagcagctcgcaggctgccgttacagctttgcaggcaacagctgggattaa

SEQ ID NO: 38093 - DNA, 780 bp, Zea mays
  Peptide Sequence Number=SeqID_81468
atgaagaacgtagcaaaatgcgatacctggtgtgaattgcagaatcccgcgaaccatcgagtttttgaacgcaagttgcgcccgaagccttctggcggagggcacgtctgcctgggcgtcacgccaaaagacactcccaacacccccccgcggggcgagggacgtggcgtctggccccccgcgccgcacggcgaggtgggccgaagcaggggctgccggcgaaccgcgccgggcgcagcacgtggtgggcgacatcaagttgttgttctcggtgcagcgtcccggcgcgcggccggccattcggccctaaggacccatcgagcgaccgagcttgccctcggaccgcgaccccagaggcgtcctcagcgacggaccgggcccaagttctctggaaagggacgcctgggagggcgagagaccgatagcgaacaagtaccgcgagggaaagatgaaaaggactttgaaaagagagtcaaagagtgcttgaaattgccgggagggaagcggatgggggctggcgacgcgcaccggccgtatgcggaacggctcctgctggtccgccgatcggctcggggcgtggaccgttgtcgcccgcgccggcggccaaagcccgggggccctaggcgcccccggcagccgtcgtcggcgcggacgaaacctgagatgcgcaaggaagctgacgagcgggaggccctcacgggcccgcaccgctggccgaccctgatcttctgtgaagggttcgagttggagcacgcctgtcgggacccgaaagaatggtga

SEQ ID NO: 38094 - DNA, 777 bp, Zea mays
  Peptide Sequence Number=SeqID_81469
atgaggaaaaaacacggctccgtgccgaaattacatacatgttcaggccccgacagccacaatgaacagaaaacactggcattcgaagtgccattacgaacggaactccggttcccctctccgcaggtacgaacgaccccattccatggggaaggcctgcggagcaacagaagaccgacggccggctcgccgccgcccatcctgactacggcgacagtgggtcggcgctgccgcgatcttgccctcgcccccgccgacgctcgaggggcgaggacaggcacgccggcgcggtggcccggggcgcgggtggtggcagtgatcccgtcggtgacggggacttctcgagccgcctccgcctcggcgccgatggcggggacaccagccccccggcagatccccgctcaaatcctcccaaacgagtggggcgccggactccgcgcagggcgccgtcccgatgcaaaagcaggaccaccccagaacacgaacgccgccctaacggcgcgcggaatcatgggtggtcctcccgtgcacacgatgcggcggtcaccctccggcaggaggggccgccggaagcccggccaacgactccgacacgctggaggtgacgacgcccgccgtcgatcagccccacgttgtctaagtccgcgccgtccgcagggccagcgagcgcctccacccccaaacgccgcgggaaagggcgacccgcggaccctcgcggaaggaagagcgccggctcagcatggctcccgccccagcggggatgatgaacatccttga

SEQ ID NO: 38095 - DNA, 225 bp, Zea mays
  Peptide Sequence Number=SeqID_81470
atgagcaagaacacaagatttatcccgaggttcggtcacaccaccaaggtgccctacttcctcgttgaggcgcccacaaagagccgggtctctttcaaccctaatcctccctttgtcgaccacaaagaccagcgggtgaaagggcgagccgccatgcaggcggcatgcaaccgcaccaagggggcgcaccctttcggcttcgacgcgtccagcatggaggcctag

SEQ ID NO: 38096 - DNA, 267 bp, Zea mays
  Peptide Sequence Number=SeqID_81471
atggagagtcatgatctccgggcagaatgggaatcacgacttgtgggtggcaatgagactgatggttttggttatgacgatggtgctgggaaagtggttgtcatcattgcaaccactgctcagacgaagatgaagctgtggaaggagacttccaggagttccaagactacgacgagttctaggcgtgggttagcggcaacccccagtcggctgcctgtgaaggccgcgtttatctacgtttctttttcgcactttgatttattgtaa

SEQ ID NO: 38097 - DNA, 285 bp, Zea mays
  Peptide Sequence Number=SeqID_81472
atggcggggacgcgctgggggcggtggctggggctggtgacggcggtgtgggtgcagtgcatctccggcaacaactacaccttctccaactactcgcacgcgcggaagacgaacatgggcctcacgcagctgcagctcaacggcctctccgtcgccaaggacgccggcaaggcgttcggcctcctcgcggggcggcgtccgaccacgtccccacctggatcctcctcgccgtcggctccctcgagcctcgttcactggcacttggataattcactgcaaacttag

SEQ ID NO: 38098 - DNA, 501 bp, Zea mays
  Peptide Sequence Number=SeqID_81473
atggaggcggaggttcttgagagcgggcgtagcgggtggtggtggcgagagattcgcgcgcatgcgactgctgcggcgatgcgcacgaggagggaggccggttggtgggggattcgccgcgggcgagagggggatcgcggtggggggttcggtcgtgcgcgtgatccgcgggcaggagaggaatcgtggcggggacaccgagctcatggcgaggagatcatggcgaggagatccgcggggaaacgcgtagctcggcgcagagaggttggcaaggctcatggcgaggagatcaagctggaggttggcgcggagctcggccggccaagctcgtcgcggcgaggagggtggaagttgcagagcgcatcgaggaagggaagggctggtgggcgagggggagagcgatgtggggatcgtgggaggatgggcgtcggtggaggactggagagagcgcatcggacgggggaggagctccacggcatattggacgatcgagatagctag

SEQ ID NO: 38099 - DNA, 1185 bp, Zea mays
  Peptide Sequence Number=SeqID_81474
atggcgaacgggccaaaaacggattttcggccacggccgcgaaaacgggcacgtggaagggcacaggaccctcccgtggtccccccgcgtgagacgtggaagttcgggtgcacccgtgagggaaaacggaactccccgaagtcctgggagggggtctcctcggccgagccccgcaccccctcgcggcctagccgtggccggtcggcaccctaccgcgcccagctccggctggcgctgttggctgcctggccggccgtgcggctacgctggcgcatgagttgtcttggacccgtgactgcttggaggacccccgctgccgtgcggccgactcccggcgcccgtgtcccatcgctcgtgcgggcatcccgtgcctgctgcgttgagaagtgcttgcgtgctgctacccgtcccacgggaagccgtgctcgatacacgttgccttcgtcgagctcaccccccggggtgcggctcgtcggctcgagagcgcccgcggcgtttgcctcgtgccgccgtcagcctatggccggcggcaccgaggacacctcgctggcgcttttggtctcggatgtggctcacgctgaaggccggagacgcgttggcgtcacgcgcccaagaatcggtccgcccgaacgaacgacggccagcccggcacgacgcctccgcgcggaggccggcgctggcccgtctgcgaggacgtgctacctggttgatcctgccagtagtcatatgcttgtctcaaagattaagccatgcatgtgcaacgtcccggcgcgcggccggccattcggccctaaggacccatcgagcgaccgagcttgccctcggaccgcgaccccagaggcgtcctcagcgacggaccgggcccaagttctctggaaagggacgcctgggagggtgagagccccgtccggcccggaccctgtcgcaccacgaggcgccgtcaacgagtcgggttgtttgggaatgcagcccaaatcgggcgggttcgagttggagcacgcctgtcgggacccgaaagatggtgaactatgcctgagcggggcgaagccagaggaaactctggtggaggctcgaagcgatactgacgatagctggagcccacacgagttctatcgggtaaagccaatgattagaggcatcgggggcgcaacgccctcgacctattctcaaactttaaataggtag

SEQ ID NO: 38100 - DNA, 369 bp, Zea mays
  Peptide Sequence Number=SeqID_81475
atgggcaagggtaacaaacgtaagcgtgagccgactcctccgtcggaggatttcggcgactcggaatactcggaggaggagttctcctccgagtccgagggatctctggctcccgtctctcccccggcgtcgtctgatgattcagacgactcccaggggattgccgcggaggtctggacgtacatccgggccgtcgagcgctccgggctcgagggctcggatgagtctgagttctcctcggacgaggaggactcggacggcggcgagggcgaggatgacgacgacgacgacgacgacgatgacggtggcgacggcaatggcgacggcagcggcagcggcgggggcagcggcggcaaggccagtggctaa

SEQ ID NO: 38101 - DNA, 96 bp, Zea mays
  Peptide Sequence Number=SeqID_81476
atggttaacagcagccgagaccggaccaaggcgcgggacatggagaggacgacgggcagccagatcggcgaacaggaggaggttgctggagagtaa

SEQ ID NO: 38102 - DNA, 72 bp, Zea mays
  Peptide Sequence Number=SeqID_81477
atggcgagagtggcacgtaccctcctggcaaaggaccgcctaaaaggggtggtaagatggtacactgactaa

SEQ ID NO: 38103 - DNA, 708 bp, Zea mays
  Peptide Sequence Number=SeqID_81478
atgacctcagggcagacgctgctgcgacaaggccctcgcccgcgtccccactcgaggggcaaggacaagctatcaaagccaaagagccggagcaccgacgacaagcagccacctacccaccggcagatccccactcaagtcctcccggatgggcgagcaccgacctccgcgcagaggcgtcgtgccggagtggcgtgcaaccgcaccacggagacgcaccccttcgacttcgacgcatccagcatggaggcccaggcccacacgacatgtaaccagcgtgccggttactacgtgcgaaaaactgcaccgccacttacgccaatgccgcgccttctcgactgcggaaccggtgccgcgactcgaggcaaccctgcgcatggcccaacagtgccaaccgagcacatcggtcacgggtcagtcagccgcgggaggaggcgcgacggtcaatctggccaaaagcgggccggcaataatggcggcaccaggcgagcggaagcagcagtcaaatcctctgcaggctcacgtccccacctggagcagcaggggagccctctcccacggcgtgaagacgacacacccgtgttccctccctcgaacggctcgcacaacgactaccccgcgaaccacccgtcccgtcgcattaacttcgcggcagggcaagcgacacctttggcaggccatgcgggcgatgtttcacctccgccatga

SEQ ID NO: 38104 - DNA, 306 bp, Zea mays
  Peptide Sequence Number=SeqID_81479
atgccggagcacaccgacccagcattctcgaggccgattagccaggggtggggtgcaaatagatacagacatcatggcgaagcaattagggaaaaactcaccgcggatggggcacgcagaagccttgcgcccggggttaggcggatcggcggcggcccggaagctccggtaatgttttcaaccatccccgacgtggaccggccgactccgaccatccccgacggcgacccgcacatcaccgtgaccctcaggatctcccctacaccctcgaccacctcactggagcagtctcgccgccgagtttag

SEQ ID NO: 38105 - DNA, 918 bp, Zea mays
  Peptide Sequence Number=SeqID_81480
atgctgtccacgctgccttccgcgtgggctgacctgggcgcgggcgcggccgaggacctcgccgcgcagagccacttcggcgacgactcgtcggcgctgctcgcgtcccgcctccggcagcaccagatcggcggcggggacgtcaagtcctccgcctcccaccagtcccaggtcatgctgcagctcagcgacctgcaccgccacggcggcctggggggcgaggagagcgggctcttcacggaccggtccgctccggcgccggaggagatggagggcggcttcaagtcgcccaactccgccggaggtgaccactccttgttcaacgggtttggggtgcatggcgcggccaccgtgcagccaccatttggccagcttcggagggagaggatcgcggagcggatgaagtcgctacaggaactggtcccgaacgccaacaagacggacaaggcgtcgatgctggacgagatcatcgactacgtcaggttcttgcagctccaagtcaaggttctcagcatgagccggctgggcggagccgccggcgggatggcgcctctggttgcgagcatggcttcatcagagggaaagagcaatggaagcggcggcggcggcaacactaacgctaccaccaagagcggcaacggcggcgggctgcgggtggcggagcaccaggtggcgaagatgatggaggaggacatgggcacggccatgcagtacctgcagggcaagggcctgtgcctgatgcccatctccctggcgtccgccatctcctcggccacctcatccgcgtcgctcctctcccgcccgccccccgccgccgccgccggcggcggcggcggccagatgcacggtgccaacggcggcgctgccgccgcggcgacgaccatatcatcgcccgcgtcggctaacagctccggatga

SEQ ID NO: 38106 - DNA, 900 bp, Zea mays
  Peptide Sequence Number=SeqID_81481
atgctggcgtgtcgggagtcggagaagcgtgtccacctggcgcggctgcatgccgcctgcatggctgctcgcctctttcgcccgttggtatgggcaaaagtggagggcctcttccccttccggaaggcgaccaggtcttcttgctcccttatgcaccgtgtctttccaccttccgagcccccggatggggggaaaccgccgtcttttcgcctcgttgttggaggaacgcaactccgcaggagttggtacccttcagccatcattcggcttcaaggattttcatcatgcagtccggttgctttcctccgctggtggttacccaagacggtgaccaccagctcctgggtggggaggagcaatccgggctacgatcttggtcccaccctcagcttcaaggatgttcatcatcctcactggggtgggtgtcgggctgagccggcgctctacctcccgcgcgggttcgtgggtcaccctctcccatggcattcgagggagagggcgctcactggccccgcgggcggcccggacttcgacgacgcggggctggtcgacggcaggcgtcgtcacctccagcgtgtcgggttcgtcggcttggctcccggcggcccctcctgccagagggcgggtgccgcgccgtgtacacgggtggaccaccctagatgccgcgcgccgctagggcgtcgttcgtgttctggggtggccctgcctttgcaccgggacggcgccttcacgcggaggccggagtccctcggctcggtcggccttgctgtccgaggctcctctagcttagttaaagagacccctcggccgctcttcgacgagccgaggccaggggtagcgccgaggcctcggaccgtgctggcgcccttggaagatggctggccgaggccccaggggtaa

SEQ ID NO: 38107 - DNA, 306 bp, Zea mays
  Peptide Sequence Number=SeqID_81482
atgccgggcgcggactttatccctcatgcgactgagtctgggtctcccatgctagctatggtgggtacaagtgcgggccactgcacgacggcagtcggggtcagtggagcattgtatgccaaggcggtgaggcctgaacgcgaacggggaatcgatggggacggttgtcatgtgtggggtcggagtaccctgatatgtcgtaccattcaggaaatggttgatggtgtgacttggcctaccaccctgccaccgggttggacggtcgagtgggatgttgctccggcaggagaggagcatgaggaatag

SEQ ID NO: 38108 - DNA, 3699 bp, Zea mays
  Peptide Sequence Number=SeqID_81483
atgaccgagccgagggactcctacacctccgggatacggatacctcactcatcaccttctgcgataacggcaccctcggtgtcaactacaccttcgacgaagtccaacctagcctcagacggcaacgcagtcggaggatatccactccgaaggacgacatcagcaccacgcccggaccatcgtcgacagggtcttctccaggaatccggctcgtgcagacagctcggccggccacctcgaagcctcagccagctgtcccccgaggacatcagcccggctcgtggcctcggcaactcgactccgacatcggtcccgctagtggacggcctggccaggctccggccgacgaagtcttcttttcgagccaactccgcctctgtccgtgctgacaccgctgcccccggcttcggctcatcgaagagcggtcgagggtttcctttaactaagcaagagaagcctcgggcggcaaggccgaccgagccgagggactcctacgcctccaggatacggatacctcactcgtcaccttcgcacgaggcaactcacacttggttaagcggttcagttagccgacaggcaagtcctagtgctcgaaatgaggaaaaacacggctccatgccgaagatacatacatgttcaggccccaacagccacaatgaacaaaacaccggcactcaaggtgccattacaaacggaactccggttccgcctccgcgggtacgaacaaccccccacattggagggcccgcggggcgacaagctccgggcgactcaccagcgacctctgtagcagcagccatggtcccaggacggacgcggccacaggaaggctctcgcggcgctgacgacctcgacggtggggaagctttctccagctgccaccacatcagcaccgacgacggcgtccgcctctccaccaacgccgcaccggcgagcgcgggccgctccaaagcgcaccggcaggtcctcgctcccgtcctcgccacgaaagcgaggaggaggacggaatgttgcatcctagctgggcagcaacagtcgccttccccggcatggctggaggacgcttcctccgcagagctggaggatggtctccaccaccagaagctggaagaggaggtggccagccgacccgtgcgagaggtagagccccggctcacctcgctctccgccccagcaaggatgatgaagatccttgaagctgagggcgggaccaagatcgcagcccggctcgcttctccccaccatcaaactggaggtcaccgtctgggccatcgcgggctaagtcttctccaacatgctccaaggtcctccccctacgacacgggggctgggtcccacgcgtcatgcaagctggccaggggcagaagaagccaaaccgccgcgcgcgcggtacgcgcaactgcccagcggttacgagcaatcctccactttcgcccaggccagcgggtgaaaggacggaccgccatgcaggcggcatgcaactgcaccaaaggggcgcaccctttcgacttcgacgcgtctagcatggaggcccaggcccacacgtcatgtaaccggcgcgtcggttgctacgtgcaagaaactgcaccgccactcgcaccgctatcgtgcctcctcgaatgcggaaccagtaccgcgactcgaggcaaccctgcgaatgacccaacagtgccaaccaggcacatcggtcacgagtcagtcagccgcgggagaaggcgcgatggtcgatacggccagaaatgggccggtagtaatggttgtggcaggcaagcggaagcagcggtcaagtcggactgggaaaggggataccacgagagggatccttctccgcaaaggaaacgggccctgagcccccctactgatcagaggttcgaaggctggcccctcggaggggttcaacagccgcctcagagcgcttgggctccgcgcccactactggtcagaggttcgaaggccggcccctcggaaggagcgagggatgaccctgggtacgttcgatacataaccaaggctcgggctatgctctcgagctcactggagacaccatgttcggcgccctccaagggcaacatggcgcttttcccccctcctccttgcagaaaggcgacgcaggggcgcgccataggaaactccgcatcccccgaccctagggcttggactcgggctcagccccagaagacgacaaactccgcctcgcccgacccaagggctcggactcgggctcaccccggaagacgacgaactccgcctcgcctgaccccagggctcggactcgggctcggccccgaaagacgacgaactccgcctcgcctgaccccagggctcggactcgggctcggccccggaagacgacgaactccacctcgcccgaccctagggctcggactcagccctggcctcagccgacggtctccgcctcgcccgacccaggggctcggactcgacctcggccttgaaagacagactcgacctcgacctcggaggagcctccacctctcccaacccagggctcggaccgaccacgtcacaggaggcgccatcattaccctaccccaagctaactcaggctacggggaacaagaccggcgtcccatctggctcgccccgataaactcggacccgatcgacggggagttcgccgcacccacttggattgcggccggccgaattggtcctcgctggcgctggccgcttaccgaccatgaaccacgtgctcgggcgtcttatccggtgatcgccgggcttatctccccttggaactcacatacaagagatagccataggtgccaggaagaggtctgcgccggatttttgccaagattcgcacgtttgcgatctcggcaagcttttgaacatgggcagaagaacacctccacgtgttcgacgagccctgaacgcgccagagcacgcccagcgcccgaccccacgcgccccgcgccgtgccaagccacgcccgtgtcccctgcccgcgcccgctcctataaagccagccaaggcttcagccgtacacccccgtgcactcttgaccttaatggagcacgagatcgccagagtttgcccggcacacggcgtgccagcggcctcctgagcacccgccaccgtagacaggccaaccgagccatcccccgccccgtccaaccctcgagagagactctgcgtgcctcggtgaagctcccagcaagaggaatcgagctctgcctcgccggagaaaccaaatcaaggtcaccagacttcaaccgaccgtcgacgaacatagaccgagctccacggccggagcaaccgccgccgacaagctcgcccgccttcgcacgtggaccggccgattccggccatcaccgtcgtcgagccatacctcgtcgtgaccgcaaggacctcccgaagccaaccccacccttcaccggacctccctcgccaccgggagccggttacacgacgcctccccagtacacggtgcagctgttcgagaagcaccgagtgccccgctgtagggtgaggatgaccctggagcctcatcccttacagccagactggcgttcgttagactctgagtctttcggataccgggctgaggatactatcgaggccattgctctccacgggctgaccaccttatgtggttttcaccccttggagctgtctactcatcccattggcttgttccccgctgaaaaggaggacgacccaatgtggaaggactga

SEQ ID NO: 38109 - DNA, 714 bp, Zea mays
  Peptide Sequence Number=SeqID_81484
atgacttgggagtttccgtcacagtatgtcaaaggcccgacgcaacaaggtgtcgagagcgtcgtggaaatgacaaccacaagcggcatcacgagtgatgggtcgggcgacccatccttctggctcctgctcttccgaaagctttgtgctgtggctcgaactgccaccatcatcgtcgtctccgtttggtctcttgcagcagtcagggtgccctatggtggcagccgtgcagtctctccaggtgactcgactatcctgtcaccgtgcgacactgtggatgctccgcaaggcgagaggaggtggcacactttacccatgagttgtgatccctttttgtcttgggtcgatcaaaccctcaaacactaccaaggtggatgcctgagattccatggcaagactgggcagggtctccctggctgccagcggtggcgcctcccaactccatggcggagctccgccggaggtgagggcacgggcatgccgggcgccctgggcgccgggaagggcttaggtgggttcggggtggcgtggagaacacgatcgtgggcacgaaactggcgtagaagcaccggagggtggcggtccgcggcgaggtggctcggtggcggcgcagctcaactccagcgagccattgcgcacatacaagggcagaaaagaaaaaaatatggacagggggaggttggttacctcgagagaggactctgggacctttga

SEQ ID NO: 38110 - DNA, 78 bp, Zea mays
  Peptide Sequence Number=SeqID_81485
atgaccggtgacggttctggtgtggagtgcacacatgcgatgctgacgcgtggggccatggggctccaccggttttga

SEQ ID NO: 38111 - DNA, 123 bp, Zea mays
  Peptide Sequence Number=SeqID_81486
atggcgggcgaaattgagctcgccggagctaaggaaaggtggctggccggtgagggattcaagttagggatcaaggtgaacatccctgatcttggctcaaggtctgaatttcagaaattctga

SEQ ID NO: 38112 - DNA, 225 bp, Zea mays
  Peptide Sequence Number=SeqID_81487
atgaggctcgttgtaggtgtcacaagcactgatgaagttgatgacgctagagatggaaacgggaacactctggaggaagaccccaagatcttcaaggtcaccccagaaggcaaggaggatgatgatgatgacaacaatggtgatgatgaggaagactatgatgactatgacaataacaatgatgaaggtgatgatggtagtgatgatgataatggtggtatatag

SEQ ID NO: 38113 - DNA, 483 bp, Zea mays
  Peptide Sequence Number=SeqID_81488
atggtaactaggttggatgtgttgggtaccgccatagcaaccatagcagaggttgatgaggctgcgtcggatggtggtgaagagatggattacggggttcgatgtggtgcaccggactgtccggtgcatcaccggacagtgtccggtgctccaagggagagcgactctgaactcgccaggcgactttcagctgcggcagacaatgctcttcaggaggaacagccgctggcagaagcgattgtggccccgggtgtacttcttgtcgcagttgtagcagaggccattgcggtgtcgctcctgttgctccgcctgggtgactcgcttgatctggcgaccctcgatggagatcgtcgcgggtgctgctgctcggggacctggcgacgccggcagaggccatggcagggctcggaatatcggggcggcgtactggtcgcgcagctcgaattgcctggctcagggtttggattagtggataaagattag

SEQ ID NO: 38114 - DNA, 1098 bp, Zea mays
  Peptide Sequence Number=SeqID_81489
atggagagtcatgatctccgggcagaaagggaatcacggcttgtgggtggcaatgagactgatggttttggttatgactatgctgctggtaagcggtattctttccgtttggaaaggatggctcgtcttaggcacactgcacgaaagtccgtcatccccttcttaccctcccgccttgctgagcgtccgcttcgccgtcccgtggccggtcagtccagccacttggagaggctgcaccaccgcctgcatgaggagcaagagcgtcgacgacaggagcagggtcagcagggctcttctttctcgctccagcaggagatagagtccgtgaggagctgctcccctgtgcttcctctggaggcgccccctgcatcaccactgggcgccccagcctctggagtagctgccggaggagacccagacgacggaggtggcgatgacagctcgagccacgacaccgacttttctgctgaccaggagccggaaggatgggttgctcgacccatcactcgcgacgctgctcgcgggtgtcacttccatggcgcgctcgacaccctgctacgtcgggcattaaccgaccatagtcgcgaggtttacccggaccgttgggaggcgacctgcttggtgcgccgtccggagaacagtctccagggtgcggaggcctgctcagagcactattctatctctgagcgggactcggctgaggcggccatgcaagatgctgcacggcgtgcgctttcgcactactgctcggttctcggtggggtagctgacggtctcaacctgaagtattatccccgtcgtccatctggcagcacaggaggcgtgattgtctcacctgttggtgaggacaatcctaggttgagcagcacagtcaacctagccgccgtgctaaacacggagctggaccatgcattagacaagctgagtagggctcgtgctgagatcgccctgctacgggctgagcgcgcggaacgtcgtcacctggacgatggttcccccactcccgtcgggagtcagcacccgtaccgctcacctcggcatggacaccagtcttacggcaatcccgactgcaagaccaagataaatctagaaccatag

SEQ ID NO: 38115 - DNA, 1685 bp, Zea mays
  Peptide Sequence Number=SeqID_81490
atgacggtggcagacgcgcgggagcagcgggcacgtcgacagccaagctcacgtcccatccgggggcagcgagagagccccctctcacggagcaacgggcgacgcttcgccttcgccgaaacaaccgcaccaaaaaaggccccgagcctccttactgatcaggggttcgaaggctggccccccgaagggttcaacagccgcctcagatcgcgtgggccctacacccactactggtcagagaggctcgggggctgctctcgcaaacccggctccggccgaaccgttgacagtgtcaacataccagcccgagaacttgggccccgaccgtacacccgggctacggccagctcgcatgagggaacaaccagaccagctgaagcattacgcaaggcattaagacctcgaaggagtgaaaccactcctccgaggcctcgagggctacacccggcgggtgcgctcgtgcgcacccaccggaaccaaatgcaaccgagaaatgctggtccccttgcaaaaaagtgcgacgaaagcctccaagcgagtgctaacactcccttcgaggctcgagggctactgtcggggaccataattaggggtaccctcaagacgcctaattctcagctggtaacccccatcagcataaagctgcagaggcctgatggggctcggactcgggctaagccccggaagacggcgaactccgctccgctcgacccagggctcggacttgggctaaggccccggaagacgacgaactccgcttcgcccaaccccaggggctcggactcggcctctgcggacgacctccgcctcgcccgacccaggggctcggactcggcatctgctgacgacctccgcctcgcccgacccaggggctcggactcggcctctgctgatgacctccgcctcgcccgacccaggggctcggactcggcctctgctgacgacctccacctcgcccgacccaggggctcggactcggcctctgctgacgacctccgcctcgcccgacccaggggctcggactcggcctctgctgacgacctccgcctcgcccgacccaggggctcggactcggcctctgctgacgacctccgcctcgcccgacccaggggctcggactcggcctcggccatggaagacagactcgaccccggcttcggaggagcctccacgtcgcccaacctagggcacaggccagccacgccgtcaagaagcgccatcatcaccctaccccgagccgactcgggccgcagagagcaagaccgggcgacgtcagcaaggacacaaccgttccaacagctgtccctccgccaggctccgttgctcctccgacagccacgacatcacgccagcagggtgccaagatctctccggctgccacattggcatggccttcttagagaaggttgggccacgcggggacgagaacggggacaggcgctctcttggggccgctcgcttccctcacccgcgtggacgcttgtaaccccctactgcaagcgcacccgacctgggcgcgggacgaacacgaaggccgcgggattcccacctctctctcgccggactccggcctcctcgctccttccccccttcgcgctcgcccacgcgctcgacccatctgggctggggcacgcggcacactcactcgtcggcttagggaccccccggtctcgaaacgccgacag

SEQ ID NO: 38116 - DNA, 555 bp, Zea mays
  Peptide Sequence Number=SeqID_81491
atggcgcttcctgtcggcgtggctggcctgtgccctaggttgggcgacgtggaggctcctccgaagccggggtcgagtctgtcttccatggccgaggccgagtccgagcccctgggtcgggcgaggcggaggtcgtcagcagaggccgagtccgagcccctgggtcgggcgaggcggaggtcgtcagcaaaggccgagtccgagcccctgggtcgggcgaggcggaggtcgtcagcagaggccgagtccgagcccctgggtcgggcgaggcggaggtcgtcagcagaggccgagtccgagcccctgggtcgggcgaggcggaggtcgtcagcagaggccgagtccgagcccctgggtcgagcgaggcggaggtcgtccgcagaggccgagtccgagcccctggggttgggcgaagcggagttcgtcgtcttccggggccttagcccgagtccgagccctgggtcgggcggagcggagttcgccgtcttccggggcttagcccgagcccgagccctgggtcgggcggagcggagttcgccgtcttccggggcttag

SEQ ID NO: 38117 - DNA, 354 bp, Zea mays
  Peptide Sequence Number=SeqID_81492
atggcttcatggataggtggcggggtggaggtcctggtgatcagctcgcggaagaagggccccgcggggggcgcgctgatccccaagggcgggtgggagctgctggacgagtccatggatgaggcggctcggcgcgaggccaagcggcggaggctggcgtggtcggggacaccggcccctcgctgggccgcagctacgacgccacgcacgagggcttcgtcctttgtgctcccgctgcgcgtcaccgccgagctcgaccgctggcccgagatggccgcccgccgcagggagtgggtgcccgccgcccaggccattgcgcgctgccctcacccgtggatgcgcacctctagatag

SEQ ID NO: 38118 - DNA, 246 bp, Zea mays
  Peptide Sequence Number=SeqID_81493
atggatgggactctggccgtggctgtctggccgatcgcggtggcagtctgggcgtctggcggatcgtggctgcgacctgcagttggcgtccgaggattagagatcgctgctggctgcggcgtgcaaggtcaggtgtctgtgaacggaacggagcgtgactgtgcgagcgggctgggaacggagcggctccgtctggttgattttttggagcggaatggttccagatctgaggagaatattccctaa

SEQ ID NO: 38119 - DNA, 828 bp, Zea mays
  Peptide Sequence Number=SeqID_81494
atgcagttgcttgcatgcagcatccggcgcgccggttgcgcgacgcgtgggcctgggcttccatgcgggcgtgtcgggagtcggaaaacccggccgcacccctccaccggcggtacccaggatggtggcctccggcttgatggtgggggaaaacgaaccgggccgcggcctctgcccctccctcagcctcaaggattttcatcaccagggctggggaggggagtgtgccgagttgaggtcggcccccgcgtgggcggcagcccgctccttcacttagtgaccggagggaggagcggttgtcgtccgcggcgctggcatctgcagcgtgcctggcttacggacgcgagcggcttcggagccgctcgcggcgccggcgtctgccacggcagctggaagaggttcttccaccggcgtgatagccaaggttggccacggaccgacccccaactctatggccttctgcctgtccttgcctctcgagttttagggcatgggcgggggcctcctggcagcagcatccgccctgaggtcatcactgctgctgttcggccccccggggcagaagtcttcatcgtcgccgctgctggggcgggcgacgacgagctgctcatcggtcttctgttgctccgcaggcctctcccccatggagtggggttgttcgtacccgcggaggagggaaccggagttccgttttgtaatggcacttcgaatgccagggagtccctcggctcggtcggccttgctgtccgaggctcctctagctcagttaaagggacccctcggccgctcttcgatgagccgaggccaggggtagcgatatcagtatga

SEQ ID NO: 38120 - DNA, 465 bp, Zea mays
  Peptide Sequence Number=SeqID_81495
atgtccggtgcaccagaggactccaactcgaactcgccaccttcgggaatttccagaggcactcgcgctataattcaccggactgtccggtgtacaccggacagtgtccggtgcgccaagaaggagcggcctcaggaactcgccagcttcgagaatctccaacggctagtccgctataattcaccggacatgtccgttgtttcactaccccattgcaaccaccagtatcatgcagacttcaatatatgtcacgatttgcatggtctcattattgaagagcacgtgtcacaactgccggtagaagttccctcgtacattgtcagtcatcagaacaacccgagagtcaccggcgttggcgacgaccatgaggtccccctatttgaagatggacagcgcggtgcagccgctctggaccgcgtccaaacggtggctgcgccggagcttgtcgaacacaacgacacatga

SEQ ID NO: 38121 - DNA, 282 bp, Zea mays
  Peptide Sequence Number=SeqID_81496
atggagcacaaaaaccgcagctctcaagctcactcaaagattcctctccaaagatttgaaatgggagaggcaagagatgtgtgtgagggagagggagaggtcagaggggtcagagaccagctgaactgcccctcaggaccagttcaaccggtcttgaccagtgagtttaggagagaaaaccccagctcaactgcccggaggcaagttcagctggtgtatggtcaaagaggttcacagctgaagttgagttcagctgaagttgagaaagctcaactcagctga

SEQ ID NO: 38122 - DNA, 408 bp, Zea mays
  Peptide Sequence Number=SeqID_81497
atgaaccgcctttctcatggtgttcatgatcttcctgttcgaagatgtccttcgatgcctagaggtgctttgcctcttgttgctaggcctcaggcagagataccacatggtggtcatgcccggtggggtgttggtcatgtgccatatggccaaggaccccgtgaaagtggctttgattcttacttccttggcggaccacaatttctttcttgtggtgatcatttcccccctttaagactagggatgactgatgtttttcctaccaccttttatggccagataccgcagaactggtattatcctcagtgtccaaaccccaatgatgtgccatttgctcaccctgatcctcctcttgattttgaagtggcacaagaggctaggtcatttgagcttcgatattttctgtag

SEQ ID NO: 38123 - DNA, 393 bp, Zea mays
  Peptide Sequence Number=SeqID_81498
atggcctttgatgatgatgcggtgggtggcgacggccaggacatcgacgacggctctacttctgaggtatcacatttcgctgatgatctcaccactgagatagaagagctaaacgttgctttggtgaatcaggacaagttgcttacgcttggtgatcgtgagaggaaagattttaaattcaagtatgagagcacgcttagggagcttgagtatgctagagcttcagttgtggtgtccgacgagactgaatgtgatgctgagctagcagagaggaacgttaggatagccttgcttgagaagactagctcagtgagtgcccctacacctacacaatgtgcactttgtgagggtttgcagttagctctcgattcccgtagacacgacaagacctag

SEQ ID NO: 38124 - DNA, 327 bp, Zea mays
  Peptide Sequence Number=SeqID_81499
atggaggtggtgttcgggtggtgcctccggtcaggtgtcgagcaagaagcggcgccagtcccgctccctcgcatgctgtcccatgcccaccaggtccttagtgacacttgggcggcaatcttgcagcagtgggaggcgctagaggctgagcaccaacgcctcagcgactggcgcacccaactggaggagcgcaccaagtcggtgtcccgacagttcctctccgagcggtcccaactcgagcaggaccgcaaggagtacaagagggacctccaaaaaggtgtgcgccagggagctggaggcatcccggagggagaagaaggtgaccag

SEQ ID NO: 38125 - DNA, 336 bp, Zea mays
  Peptide Sequence Number=SeqID_81500
atgccacccggagctggtgtcgctgccgccggatccctggctgggcatgggaagttgctggtgctgtattggcagcagccgggggtggatcgctggcaccactcccagttcaaagaaaaagggactacacttacttggggccctagaccttccagtgaccctagaagcgagatcgccgttcctgctgctgttgctgctgctgttgttgttgttgctgctggtggccctgggggagatcacccccagatggtgatggtggtggcaggacagatggtggtggtggcggtggtggcggcgggacagatggtggtggtggcggcgggactggaggactga

SEQ ID NO: 38126 - DNA, 63 bp, Zea mays
  Peptide Sequence Number=SeqID_81501
ggcttcgtcgagtgcttccggcactcggcgaagctattgattccggtagtgcaccctaattag

SEQ ID NO: 38127 - DNA, 189 bp, Zea mays
  Peptide Sequence Number=SeqID_81502
atgctatgggttattttttatgagaaactcatcctttatatcttcgcagggcttgttcctgagcaaagccttaaaaacaagaagaaagttgagaacgaagctgcacaggaagaaatcctaaagcttaaatctgaagtatctggcttcggttcaactatgctgaaaaagaaaaatctttcaagatactag

SEQ ID NO: 38128 - DNA, 486 bp, Zea mays
  Peptide Sequence Number=SeqID_81503
atggagcgaaaaatagtgaaatccctgatgagctatgcaatcaagctgccgctgagcgtatggttagtagttaagacttatgggcaggagatggttaggaagtatggagaagagaaaaatttaattgtaaatgtcttggctcgagcagccaagactctgctgagtctgggagcaccggacagtgtccggtggtgctctcagggagcagcaaaaaggtttcgtgaagagttgcgacaacaacaaatggcattcgtccaacaacaattagagtacatggctgcttacaacgcacaggcgcaacaagcaatgaacggaactggggttatgggtcacaacacaccaccattggtgatgctagcaccaggaggagcttctggaggggagggagctactaaagaagagaatccgaaccggatagacgacttcgtaaacaacttcttcacttctggaggtagtgatcacaactcaaacgtcccctatatgtga

SEQ ID NO: 38129 - DNA, 450 bp, Zea mays
  Peptide Sequence Number=SeqID_81504
atggcggaacggctttgcggcgacagcggcgctgctgcatgtttggtggggaaaatgggcaaggagagtgcgaatgagggatggggtgtgctgggggtctggggtcttcactttaaagctagggtgaggaaagtgaaaaaagaaatggggagagaggagaagagagagttaaggaaaaagaagtgtagggtggggttccttacccaggggcggtgctcggggaggcttggcatgacgtcggggggctcctgtcagctggatgatgatgaaacacggcggcagcgatcaccggtctacacagggagggggtcaaatgtggacaggacaaagaggccgggagaaggggaaaccgaggtgggttcccggtgtgttgcactcatgcggagctcactgtggcaaaggcgacaacaatggctcgacgatgacggcataacgactttgcggtggtga

SEQ ID NO: 38130 - DNA, 708 bp, Zea mays
  Peptide Sequence Number=SeqID_81505
atggaggtggtgttcgggtggtgcctccggtcaggtgtcgagcaagaagcggcgccagtcccgctccctcgcatgctgtcccatgcccaccaggtccttagtgacacttgggcggcaatcttgcagcagtgggaggcgctagaggctgagcaccaacgcctcagcgactggcgcacccaactggaggagcgcaccaagtcggtgtcccgacagttcctctccgagcggtcccaactcgagcaggaccgcaaggagtacaagagggacctccaaaagtgggtccagcagaccaaggctgtggagaggatgcaaaagtggcagcaagaactcgagggcaaggccagcgacgccgccctcgccgaggagaaactcaaggcgaaggagcagtccttggacaggcgggagacagacctcgcaaggcgagagatgtatctcaccttccgggaagaaatgctcacccggcgaggcgagatgttggccgagcacgagctcgaagcagaagagagggagaggaagttggaggagcagatccggcagttcaacgcggctcaggcggcaccgggcccccaggcggtggaggccaccaggaaggcccttgaatatcttcaggcagagtaccgtgccggggtccagcgcatcaccgcgtgggccggcgaggcaagcacggcactggtgctgtgggggatagatatcccccgggtccactaa

SEQ ID NO: 38131 - DNA, 897 bp, Zea mays
  Peptide Sequence Number=SeqID_81506
atggttggctgcctgagtgaacaggcgtcggtatccctcggcgtcgggagtccgaggaactcgggcgaagtcggggttcaggttgcgcccgaagagcgggttctcccggcgttgcctcgcatcctgctcggcttgctcctgagtccgtcggcgatcacgtcgtcgggagttccttcgttccctaaagacgcgttcttccggggtttctcctatctccgagacctcgtctcgcgagacaggctgctccggatcccgttctccggccgcgtgatgtcgtcgaacgttcctgcgtcggttcctccgtcggcgggattctcgttgaggtggttcttctccaggcgcggtcggttcgtcgtcagagacggcgggccggaggaacggaaagaacgacttgcctttccctggtctccttcttcctcgcgatccgtgtccattcctttcgtcggggaagtagacagcggagtcttccgggtcagcgagcttcccgctccagccttcccggagataatctttttccgaagagccggaggtagcgtctttccagcattttcggagtttgttggaggagacttcttttccggcagatctgcgaggcggtgtagaattccctcttcatccgctacagatgagattgtcccgaagcagaatacagatccgggacgcacggtgatcttgctgtggaaggtgacggccattgagctagcttggatcgtcgacacaccccctacctggcgcgccagctgtcggtgtttcgggtccgaccgcacacctggggttacccctcaaggttcgggccgcttagagatgcgtaacaccctacgtcctgatgagtatttgagtgcggttacaagagggctctctggaactgaggcacagagagtttacgtgagtggctaa

SEQ ID NO: 38132 - DNA, 480 bp, Zea mays
  Peptide Sequence Number=SeqID_81507
atggcgccccgcaagccctgtgacgacggcggctcgcagctctcttacggaagcaggaggacatcagcaaggactcgaccgccccgacagctgtctctccgccaagctccgtcgctcctccgaccgccacgacatcacaccagctgggtgccaagatctctccggctgccacatcggcatggccctcttagagagggttggccgcgcggggacgaggacgagacaggcgctctcctggggccgctcgcttccctcacccgcgtggacgcttgtaaccccctactgcaagcgcacccgacctggacgcgggacgaacacgaaggccgcgggatttccacctctctcacgcccgcctccggccacctcgcttcccccttcgcgctcgcccacgcgctcgacccatctgggctggggcacgcagcgacattcactcgtcggcttggggaccccccgttctcgaaacgccgacacatcatatga

SEQ ID NO: 38133 - DNA, 105 bp, Zea mays
  Peptide Sequence Number=SeqID_81508
atgccttccagtgccgaaccgcagaacacgtgggtggggtgcctcgtcgtcccaactccagatagcgttgcgtgctggtccaaccttaggttcgatctaatctga

SEQ ID NO: 38134 - DNA, 279 bp, Zea mays
  Peptide Sequence Number=SeqID_81509
atgccgcgcgctgctagggcggcgttcgtgttctggggtggccctgcttttgcaccgggatggtgccctcacgcggagcgccgaggcggaggcggcttgagaaatccccgtcgcagacgggatcactgccaccatccgcgccccgggcctccggctcttcgcgcttgtccccgcccctcgagcgtcggcgtgggcgagggcaagcttgcagcagcgcccaccctgaggcttgcactgctgcggctcggccatcctgagcgggagtcgtcgtcgtcgtag

SEQ ID NO: 38135 - DNA, 156 bp, Zea mays
  Peptide Sequence Number=SeqID_81510
atggggaagcctgtcccatcactcctcatgctcctcctcagccgagtgaccgcacttgtacccaccataaccggaatgcgagaccacgtctcaggtcgcgtgaggagggcaatctgcgggcaggttcaatcaggtgggtttgaactacaacagtga

SEQ ID NO: 38136 - DNA, 420 bp, Zea mays
  Peptide Sequence Number=SeqID_81511
atggggaagcctgtcccatcactcctcatgctcctcctcagccgatgtagggtcccactcgactgtccaacccgatggcaagatggacggccaagtcactccagcaaccatgtcctccagagaacctgtaaaaattatgccacaagcaaggctgagtatactaatactcagctagacttacccggtcagcatggatcaagcagtctcattagctgcgagaagcagacgattcgaatcgagtttcaaccttgcaagaactggtcatgcaaaaaaccggggcttgccttccaaagctggggcaggcagatcctcgatggcaggttctggtgctggatcctgggctacctcctgagcaactccttgctccggcacgaggatgtactctccgtcagcgaggttgcaatctatcgaatgcaatga

SEQ ID NO: 38137 - DNA, 276 bp, Zea mays
  Peptide Sequence Number=SeqID_81512
atggcgccccgcatactctgtgacaacggcggctctcagccccttacggaagcaagaggacgtcagcaaggactcaaccattccgacagctgtctctccgccaggctccatcgctcctccgacggccatgacatcacaccagctgggtgccagaatctctccggctgccacaacggcatgttcatcaagaggcgtgtgatcaagggggagcacaagatgatcacgttatggaggaagaagcacctcaagcccctccaactcaagtccgagcgatga

SEQ ID NO: 38138 - DNA, 327 bp, Zea mays
  Peptide Sequence Number=SeqID_81513
atgccgtcttcttcctcgtctgctacaaacacgccgccggccgacgcatcgtccgaggataccttgagcaatgtggcggcggcggagctacatccgggtgatacggtggagttcggcgtttcgaggatttcctcggtccgcgtgcacgatatgcagcagctggggtattttggcagcaaagttgggcgtgtcccgggggcggagaaggttcccgagcccgagggcgagttgatcgtgtttgaggcgtttttcaccgttggccttcgcctgcctgcacatcgctgtgtggtggaggtcctgcagagatttgaggtccaggtccactag

SEQ ID NO: 38139 - DNA, 360 bp, Zea mays
  Peptide Sequence Number=SeqID_81514
atgcgggaggtagagccccggctcgcctcgctcttcgcaccagcaaggatgatgaacatccttgaagctgagggcgggaccaagatcgcagcccggcttgcttctccccatccaggggctggtggtcaccgtcttgggggaagcaagcgacgcttcgccttcgccataatgaccgcgtcaaaaaaggccctgagcctccctactgatcagaggttcaaaggctggcccctcggaggggttcaacaaccgcctcagagcgcttgggttccacgcccactactggtcagaggttcgaaggccggcccctcggaagggttcaacggccgcctcaggccactcgggctccgcgcccactactga

SEQ ID NO: 38140 - DNA, 498 bp, Zea mays
  Peptide Sequence Number=SeqID_81515
atgacgaaaagctgggttgtgtccgggatcatactggagcgaaggcagcccaacttcacacgcacaggtgcgatcgcctccccactgcaactgaccgggtggaccccgctggtcatcatccgcacgctgcgcaactcactggtgtgtgggctcatgtctctgtggcagttacacgtggggccggactatcaggaccgtctcctccgccgcgtaaaactccgggcgcaacagaacctgcgcgtgcgccacgactccctggccggaattaccgcgacccgctcgccctatttcttctcgcgcgtctcaccccattcaccgccgcgtgggacccgtgagtcatccccacctccaagccttcgtcatcgcgcgcaatacgtcgcgccgggcgggtcacagctacctcgcgcggactcctcggctgtgcaccaaccgcaatctatgcgcccgcgatttaagcccaggccgccgcctctccccagccctaacctcgagaagtag

SEQ ID NO: 38141 - DNA, 315 bp, Zea mays
  Peptide Sequence Number=SeqID_81516
atgaactcaagactcccgaaacggagcaccgtcccggggctggaaaggttgctggagactgcccatctggagcttgacgggaagctgttcgtcaacacgcagcaggcccctacttggcgcgccaactgtcggcgtttcgagaccggggggtccctggaccgacgagtaaattgtcgccgcgtgccccagcccagatgggtcggcgcgagatggagcgcgaaggggggaggcaaccagagggagacgggcgtgagaggtggaaatcccgcggccttcgtgtttgtcccgcgcctaggtcgggtgcgcttgcagtag

SEQ ID NO: 38142 - DNA, 600 bp, Zea mays
  Peptide Sequence Number=SeqID_81517
atggagaaggaccatcaagacgctgcgcataagcgtcgggcggtcgttaggatcgctgatcctatgcgcgaggcgaacaaggcgcgggggagcacgaaggttgctgcccctggcagtagcaaaccagtgccggctgcaaaactggccgcccccgggcacagcaaggcttcggcgagtgcgaaggttgctgcttctggtgcgagcaagccacccccgggcgggcccgtgaaaggacgaagggttggatgggggcaactggctgttgtcccgcctccggtggcaaccacttcgccaacgacggttgttgaggcgaagggtgcctcgcgggactcgtgggccaccttctgcgcgagtggcaagattctgtcggccgctgccgctaaggacatggcgggctccatgtctcagcaactgaggcaagcgtcgcagcagctatcacagcagctgaaacaagcggccgatttcgccgaccacatcgcattgggtgccttgactacagactttgctgccgaggtcgagagtctccgggcgcagcatgcggatgctgtgcgggagaagtcggctgcggaaagaaaagtcgcatgctgtcggagaaggtga

SEQ ID NO: 38143 - DNA, 1740 bp, Zea mays
  Peptide Sequence Number=SeqID_81518
atggctcgtcttagacacactgcacgaaagtccatcatccccttcttaccctcccgccttgctaagcgtccgcttcgccgtcccgtggccggacagtccagccacttggaaaggctgcaccaccgcctgcatgaggagcaggaacgtcgacgacaggagcagcagggctcttctttctcgctccaccaggagatagagtccgtgaggagctgctcccctgtgcttcccctggaggcaccccctgcaccaccactgggcaccccagcctctggagtagctgctggaggagacccagacgacggaggtggcgacgacagctcgagccacgacactgacttctctgctgaccaggagccggaaggatgggttgctcgacccatcacttgcgatgctgctcgcgggtgtcacttccatgatgcgctcgacaccctgctacgtcgggcacttaaccggcgtacttggtccatcgagtatcgctgtgtggtctaccagcacagtcgcggggtctacccggaccgctgggaggcgacctgcttggtgcgccatccggagaacagtctccagggtgcggaggcctgctcagagcactattctatctctgagcgggactcagttgaggcggccatgcaagatgttgtcatggaattaccactagacgcgcagagcagcggaagacgtctcgatgtaaacgaacgcgtcgagcagtgccgtgcagtcgtcggcgtccttcacgtcctcgcgtggttcgtcccagtgctccaaatgcagcaccgccgagatggtttccccaagttgttgaaagcatgcatagttcgcctcggaatcaggagccagccagagtatgatggtcgtgaattcgtcgagcatggcacagagaaatgtgtcgtgactgtgtacattggatccagcccgcaccatgtggaatggagtgtcactgctgctgggcacggattcaaagacacctgccaagtcgtcgcccgcaaggcattgagggccctgtgtcagatctatgaagaagaagtggccgacaccccgctcagattctttctgccctttcagagagaccgtcccgcttggatggccaggatgcgtgcattggaagagcagcagctgtttgaggacaaccccacaatcgtgtacctcactgcatacctgctcaccctggatgcccagtatgatttcttggctcggcaccaacgtcagatgattgcccgagcagaagatgcagagaagcgcaaccgtcagctccatgtggatctcaccacagctcaagcccatgcaactgcattggaaagtcgtgaagtcattgctgttgaagccctgaagcaagccaaggatgagcacgtccagaagttgatggaggcctacttggtaacccataaccaacgtagagccctgcggatccaagagcctgctccatccaacccagtccaacccatgagagttgaagacccccccccccgattcttgaaggctatggataagcaagagcaccccgagtcctcccaagatcccctaccagagttgtttgagcccctcaccatgaagaagattccagcaccgtcccgtgagatcaaagaagctgcaagcaccccaccagcaccgccgccctctgaggagctacaagagccagtcctgcttgaagaagagttcgaccccatgttgccatctcagtcgccgccagaagaagtcatgaacatcagctcgctcttgacccatccaggagatgtctcagattga

SEQ ID NO: 38144 - DNA, 747 bp, Zea mays
  Peptide Sequence Number=SeqID_81519
atgccgctggagcaggaggggcggtgctcctcgatggaggtgggctcgaagatccagatgtcgcacgcggaggtggtggcgcccgctgctgcagcgctggtgatgaagagggaactctacatcgcatcgcggatccgccaaagagaaagccttcctcaacaaactccggaaaagccggaacgaagcaagaaaaagagcgacctccagtgctccgagccgagacttcctcctgcagaccaggaacagagggtccatctacccggagaactccgctgtccacctcttccacagagacatggacacagatcactaggagaaatgaggcaaacaaggtcaaggatcgtcaagctgctcttctggctcctccgccctcaaaggagaaaagaaagaagctcgtcactacgacagtcccattctacctcgatgtccttttcatcgggggaagagtggaatcagctcccatctccgacgatgaaccaaccacaccaggagaagaacctcttcagcgagaatctcgccgacgaaggaaccgacgccagaatatttggcgacatcacgaagccggagagcgggacccagcgtagcccgtgtcacgatatgaggtctcagagatgggagagactccagaagaacgggtcttcagggaaaggaggaattcccaacgacgtgatcgttggcaagctcaagagcaggctgagcaggaagcgagacaatgccgagagaatcctcttttcaaacgaaacctga

SEQ ID NO: 38145 - DNA, 1371 bp, Zea mays
  Peptide Sequence Number=SeqID_81520
atgcagccgggctgcctgatgaaaatccttgaagccgaacgacggctgaaagccggcgcgaaccaagtcttctccaacacgctccaaggtcctccccctacgacacgggggctgggtcccacacgtcatgcaagctggcccggggcagaagaagccaaaccgccgcgcgcggtgcgcgtaactgcccagcggttacaagcgctcctccactttcgcccagaccagcgggtgaaaaggcggtccgccatgcaggcggcatgcaaccgcaccaagggggcgcaccctttcgacttcgatgcgtccagcatggaggcccaggcccacacgtcatgtaaccggcgcgccggttactacgtacaagaaaccgcaccgccactcgtgccactaccgcgcctcctcgacagcggaaccggcaccgtgactcgaggcaaccctgcgcatgacccaacagtgccaaccaagcacattggtcacgggtcagtcagccgcgggagaaggcgcgacggtcgatacgaccagaaatgggacggcagtaatggcggtggcaggcgggcgcaagcagccgtcacgtcgtcagcaagctcacggaccgggaaaggggatactccgaaagggatccttctccgcgaaggaagcgggccccgagcccccctactgatcagaggttcaaaggctggcccctcggaagggttcaacagccgcctcagaacactcgggctctgcacccactactggctggcccccgaagggttcgacagccgcctcagacgcagagcgagggatgaccctgggtacgttcgatacataaccgaggctcgggctacgctcccgagaggctcgggggctgctctcgcaaactcagctccggccaaaccgttgacagcgtcaacataccagcccgagaacttgggactcgactccaagttcggcctcaggtgccataggaagctctgcctcgcccgaccccagggctcggcccccgtctcggcctcgaacgacgaactccgcttcgcccgaccccaggcctcggacccagcctcggctccggaagacgacgaactccgcctcgcccgaccccagggctcggactcggcctcggctctagaagacgacgaactccgcctcgcccgaccccagggctcagactcggcctcggctccggaagacgacgaactctgcctcgcccgaccccagggcccggactcaggcctggcctcagacgacggtcttcgcctcgcccgactcggggctcggactcgacctcggaagacagactcgacctcgacctcggaggagcctccgcctcgcccgacccagggctcggaccgaccacgtcacagggggggccatcattaccctacccctagctag

SEQ ID NO: 38146 - DNA, 1305 bp, Zea mays
  Peptide Sequence Number=SeqID_81521
atgtcttcttcctccctcatgcgtcgtgtctttccatcttccaagcccccggatggggggtacccgccgtctttccacctcctcgttggaggaatgcaactccgtgggagttggtacctttcagccatcgttcggcttcaaggattttcatcatgcggccccgtcgcttccccccgctggtggtcacccaagacggtgaccgccagttcctgggtggggagaagcaagccgggctgcgatcttggtcccaccctcagcttcaaggatgttcatcatcctcgctggggtgggggccgggctgagccggcgctctacctcccacgcgggttcgcgggtcaccccttcccgcggtgttcgagggagagggcgctcactggccctgcgggcgacccaaacttcgacaacgtggggctgggtcggcggcgggcgtcgtcacctccagcgtgtcgggcccgtcggcttggctcccggtggcccctcctgtcagagggcggctgccgcgccgtgtgcacgggaggaccacccaagatgtcgcgcgctgctagggcggcgttcgtgttctggggtggtcctgcctttgcaccgggatggcgccctcacgcggaggtcgataccccactcgcccgggagggtttgagtggggatctgccggggagccggtgggccctgccgtcagtgccgaggcggaggcggctcgagaagtccccgtcaccgacggggtcaccgccaccatccgcgcctctggcccccagctcttcgcacctgtcctcgcccctcgagcgtcggtgtgggcgagggcaagattgcagcagcgcccaccctgaggcctgcgctgctgcagctcgaccatccaaggcgggggtcgtcgtcgtcgtagtcagaacgggcggcggcgagccgctcgtcagtcttctgttgctccgcaggccttcccccatggagtggggttgctcctctagcttagttaaggagaccccttggccgctcttcgatgagccgaggccaggggtagcgatatcagtacgaacagaggcggagttggctcgaaaatgggaacctggttggccggagcctagccgggttgtctgtcagcggggccgacgccggagtcgatcagtcgaggcctcgggtcgggctggcgcccttggaagatggtcggccgaggccccaggggtaaccggccgagccgcctgctcgggccggattcccggagaagtccctggggccgcgtcgccgtccgaggctgggtcggatctcgctgaaggtgtcgtcgatgccgagggtgctagcccccttccagcgtga

SEQ ID NO: 38147 - DNA, 555 bp, Zea mays
  Peptide Sequence Number=SeqID_81522
atggtgcagggcggaccggcggcagagactcttcaacggcaagaaattcccagtgccccatgggcccttccagcaatctatgtcatggaaatactccacgtggccaggagctcaccggggcaaagggcacggcggagctccaacggcgacggggaaacgagctcgggacggcgggggtttatggcggcggcgctcgggcgtgcgcgcagcgagggggaggtggaagaggggtctgctggagcgcaaatgagggagggggagagggcgagtggggttctgggcccaagtggccggggacgaacaactgcgaaagcatttgccaaggatgttttcattaatcaagaacgaaagttgggggctcgaagacgatcagataccgtcctagtctcaaccataaacgatgccgaccagggatcagcgggtgttactaataggaccccgctggcaccttatgagaaatcaaagtctttgggttccgaggggagtatggtcgcaaggctgaaacttaaaggaattgacagaagggcaccaccaggcgtggagcctgcggcttaa

SEQ ID NO: 38148 - DNA, 928 bp, Zea mays
  Peptide Sequence Number=SeqID_81523
gcgtgctccaactcgaacccttcacagaagatcagggtcggccagcgatgcggctcgtgagggcctcccgctcgtcagcttccttgcgcatctcaggctgttgcggcacagcgccccgaggggcgcgccagaggcgcgcggataccgtccgtgccgacgacggctgccgggggcgcctagggcccccgggctttggccgccggcgcgggcgacaacggtccacgccccgagccgatcggcggaccagcaggagccgttccgcatacggccgagaacttgggcccggtccgtcgctgaggacgcctctccagactacaattcgggcggcgaggccgcccgattctcaagctgggctgctcccggttcgctcgccgttactaggggaatcctcggccgaatggccggccacgcgccgggacgctgcaccgagaacaacttgatgtcgcccaccacgtgctgcgtccggcgcggttcgccggtagcccctgcttcggcccacctcgccctgcggcgcggggggccagacgccacgtccctcgccccgcggtggggtgttgggagtgtcttttggcgtgacgcccaggcagacgtgccctccgccagaaggcttcgggcgcaacttgcgttcaaaaactcgatggttcgcgggattctgcaattcacaccaggtatcgcattttgctacgttcttcatcgatgcgagagccgagatatccgttgccgagagtcgtgtcgattaaggtgtaaccgctgcccggggagcggaaggcgggccgaccgctccgcggggcaggaggtagtactggtgttccttggcgcccggggtgccgtgggttctttttcgcggccccccttccccgcgggaggttcgggggggggggggcagcgtgccgggccggagcccggcggcacgggtgactcgttcgcg

SEQ ID NO: 38149 - DNA, 1018 bp, Zea mays
  Peptide Sequence Number=SeqID_81524
gcatagttcaccatctttcgggtcccgacaggcgtgctccaactcgaacccttcacagaagatcagggtcggccagcggtgcggctcacgggtcggatggggagctcgcaggccgttgcggcgcagcgccccgaggggcgcgccagaggcgcgcagataccgtccgtgccgacgacggctgccgggggcgcctagggcccccgggctttggccgccggcgcgggcgacaacggtccacgccccgagccgatcggcggaccagcaggagccgttccgcatacggccggtgcgcgtcgccagcccccatccgcttccctcccagcaatttcaagcactctttgactctcttttcaaagtccttttcatctttccctcgcggtacttgttcgctatcggtctctcgcctgtatttagccttggatggagtttaccgcccgatttgggctgcattcccaaacaacccgactcgttgacggcgcctcgtggtgcgacagggtccgggccggacggggctctcaccctcccaggcgtccctttccagagaacttgggcccggtctgtcgctgaggacgcctctccagactacaattcgggcggcgaggccgcccgattctcaagctgggctgctcccgtccgagggcaagctcggtcgctcgatgggtccttagggccgaatggccggccgcgcaccgggacgctgcaccgagaacaacttgatgtcgcccaccacgtcttgcgtccggcgcggttcgccggcagcccctgcttcggcccacctcaccctgcggcgcggggggccagacgccacgtccctcgccccacggggggggtgttgggagtgtgtttcggcgtgacgcccaggcagacgtgccctccgccagaaggcttcgggcgcaacttgcgttcaaaaactcgatggttcgcgggattctgcaattcacaccaggtatcgcattttgctacgttcttcatcgatgcgagagccgagatattcattgccgagagtcgtgtcgattaa

SEQ ID NO: 38150 - DNA, 610 bp, Zea mays
  Peptide Sequence Number=SeqID_81525
cggttacaccttaatcgacacgactctcggcaacggatatctcggctctcgaatcgatgaagaacgtagcaaaatgcgatacctgtgtgaattgcaaaatcccgcgaaccatcgagtttttgaacgcaagtgcgcccgaagccttctggcggagggcacgtctgcctgggcgtcacgccaaaagactctcccaacacccccccgcggggcgagggatgtggcgtctggccccccgcgccgcagggcgagcgtcccggcgcgcagccggccattcggccctaaggacccatcgagcgaccgagcttgccctcggaccgcgaccccagcccaaatcgggcggcaaactccgtccaaggctaaatacaggcgagagaccgatagagaacaagtaccgcgagggaaagatgaaaaggactttgaaaagagagtcaaagagtgcttgaaattgccgaaagggaagcggatgggggctggcgacgcgcaccggccgtatgcggaacgactcctgctggtccgccgatcggctcggggcgtggaccgttgtcgcccgcgccggcggccaaagcccgggggccctaggcacccccggcagccgtcgtcggcacggacg

SEQ ID NO: 38151 - DNA, 198 bp, Zea mays
  Peptide Sequence Number=SeqID_81526
atggcgcgcggtcaaggtggaacggagggaaaacgggaggaggcgcacggcgacgggcgggcagggctgttcggccttgcgtttggcctgaaaacgaggtcttcgccatggcgcgcgggccgaaaacaacggttcggccacggccgcgaaaacgggctaagtccaagcgcgtggaaagacaccgaggctgctacgtag

SEQ ID NO: 38152 - DNA, 1149 bp, Zea mays
  Peptide Sequence Number=SeqID_81527
atggggattagctctccctgggcagaacgggaatcacggctcatgggtaaagttgtccgcattgtaaccactgctcaggagaaggtgaagccgtggaaggagacttccaggagtttcaagactacgatgaattttagatggctcgtcttagacacactgcacgtaattaagtcggtgattcctttcctgccgtctcgacttgcggagcgtcctctgcaccgcaccgtgtccggtcagtcgagtcacctggagaggctgcaccaccgcctgcgtgaggaacaggaacgccggcgccagcacagagagcagcagggctcttcctccccaccccagcgagaggtggagtccgtgaggccccgttcctctgttgcccagctggaggcgccccctgcaccaccgcgggacgtcccggctgttggaggagctactggaggagatcacgacaacgacgactcagaccacagtacggagtcctctgagccgcaggaggcggaaggatgggtcgcccgacccatcacccgtgacgccgctcgcggttgtcacttccacgacgcactcgacaccttgctgcgccaggcttttgaccggcacacctggtcgatcgagtatcgttgtgtagtctaccagcacagtcgcgggaggtacccggaccgctgggaggctacctgcctagttcgccgtccggaggatgacctccggggtgcggaggccgtctcggagcactattccatctccgagagggacactgcggaggcggctatgcaggatgcagcacggcgtgcactctcccagtactgttctctgttcggtggcgtggccgacggtcttaaccttcggtactacccccgccgccctactggcagcacagagagtgtggttgtctcacctgttggtgagggtaaccctaggttgagcagcaccgtcaacctagtcgcagtgcttaacactgagctggatcactctctggacgagctaagcagggctcgaacgaagattgcggagttgcgtgctgagctggcagagcgccatcaccaggagggtggttcccccgctcctgtcgggactcagcacccttaccgctcgccgccacgtggtcaccacacttatggttcccctgtctgtaagaccaggatagatctggatccttag

SEQ ID NO: 38153 - DNA, 637 bp, Zea mays
  Peptide Sequence Number=SeqID_81528
atgaagaacgtagcaaaatgcgatacctggtgtgaattgcagaatcccgcgaaccatcgagtttttgaacgcaagttgcgcccgaagccttctggcagagggcacgtctgcctgggcgtcacgccaaaagacactcctaacacccccccgcggggcgagggacgtggcgtctggccccccgcgccgcagggcgaggtgggtcgaagcaggggctgccggcaaaccgcgccggacgcagcacgtggtgggcgacatcaagttgttctcggtgaagcgtcccggcgcgcggccggccattcggccctaaggacccatcgagcgaccgagcttgccctcggaccgcgaccccagccggaggtagggtccagcggtcggaagagcaccgcacatcgcgcggtgtccggtgcgcccccggcggcccttgaaaatccggaggaccgaataccgtccacgcccggtcgtactcataaccgcatcaggtctccaaggggtcccggccccgaacccgtcggctgctggcggaatgctcgagctgctcgcgcggcaagagcgggccgccgcgtgccggccgggggacggaccgggaacaaccccctcgagggccttccccgggcgtcgaacaaccgactcagaactg

SEQ ID NO: 38154 - DNA, 564 bp, Zea mays
  Peptide Sequence Number=SeqID_81529
atgctcgagctgctcgcgtggcgagagcgggccgccgcgtgccggccggggggacggaccgggaacggccccctcggcggccttccccgggcgtcgaacaaccgactcagaactgaaactcacctccacgtgttcgacgccttctgcccgcgccagagcacgctcacgcgcgcccccgcatgcccagcgccgcgcccgagccaaaccagcgccgtggcccgcgcccgagcttataaagccctcccaggcttcggctacactcttccgcacaccctccaaacctcaccggagttagctcgtcgccgtttgcccgtgcgcagcgagtccgcggctgcccaatccctctgccaccgtagaccggccagtggagccattcccaactccgtccagccctcggagaagaccgtgcacacctccgcgaagctccccgagcgaggaatcggagtttacttcgccggagaggccagtccacgctcgccggagctctcaaccccgccggagtacgtggaccgggtaaaccgctccaccatccttcgattccttgtgcacacagtcgctacgtga

SEQ ID NO: 38155 - DNA, 318 bp, Zea mays
  Peptide Sequence Number=SeqID_81530
atggcgaacgggccaaaaacggattttcggccacagccgcgaaaacgggcacgtggaagggcacgggaccctcccgtggtccccccgcgtgagacgtggaagttcgggtccacccccacgaccggctatggctggctaccgccggccagacgccctggacgagtggctgcacagtgggatggcccgttgctcgatgcgtttttcgtttctcccgcgctcggtggaccttcggtcgccgtcctcgcaagcagacccgccgcgcccagcgcggtgggatgctttggatggctcgaccgtagcggctacgctggcgcatga

SEQ ID NO: 38156 - DNA, 579 bp, Zea mays
  Peptide Sequence Number=SeqID_81531
atggcgaacgggccaaaaacggatttttggccacggccgcgaaaacgggcacgtggaagggcacgggaccctcccgtggtccccccgcgtgagacgtggaagttcgggtccacccgtgagggaaaacgggtcacgctagcgaaacccctgattctgagcaaaaacgctgtgtccagccatcttagatgggtttcgtggggtcctgggaaaatgccctggttttctgaaggcagaactccccaaagtcctgggagggggtatgcccctcagccacgacgggctatggctggctaccgccagccagacgccctggacgagtggctgcacagtgggatggcccgttgctcgatgcgttttccgtttatcccgcgctcggtggaccttcggtcgccgtcctcgcaagcagacccgccgcgcccagcgcggagggatgctttggatggctcgaccgtagcggctacgctggcgcatgagttgtcttggacccgtgactgcttgggggacccccgctgccgtgcggccgactcccggcgcccgtgtcccatcgctcgtgcatgcatcctatgcctgctgcgttga

SEQ ID NO: 38157 - DNA, 156 bp, Zea mays
  Peptide Sequence Number=SeqID_81532
atggcgctgtcacacccggatttcggggcaccaagacccgggcgcgaacataatcaccaggtgggagctcatgtgaagtgtaaggcttatcaaagaggatggttgaagctgagcattgcttttaaagttggtcaaaattttattagcaattactaa

SEQ ID NO: 38158 - DNA, 1131 bp, Zea mays
  Peptide Sequence Number=SeqID_81533
atggaccgggctttcacccaaggaagccagtgctggggagtgcgacgccctcaacaggggaagcgacgcccatggacatcaccgtcgccgaggctttcgtccaagaagtcccctagcacaaacatcaagccaagaccccgggacaacgcaggctacctccgccaacgtcgctgccctgacatcccgcccaaaccctcccagagggacatcgacatgcttgctaccgcaaaagttgtgttggatgccacccccaccggccgggcacacggaatcgggcaccaccttgcggcgagtgccccactgccacaggccagtgtcgctgcaccccctgacgacaactcggcggccgcgagcacacagcccctgcaacctctcccctcccgagccgccaggagcaccgtgcaagagggccgcaaaatcctcccaaagagccagccaaccggcaggccgatggcactgccgaccggcgctagcaccgaagctcacgccctgccccgtgacagcacgtgccacggcgcacagcggagcagccacgggtcgtgtaggacgcggacacctggcgggcgagcacgccaccgccgagagacacgcacacgccgccagcgggctagtccgccccgcccctgtccgccacctgcggcgtccacgtgggcgcacagcaccgccacggccaccaagaccatgtcccgagcgcggatccgggcgctcgcgacgccaacaagcggatgcctcgctgccaccgtcttaggggtccgcgcgagcatcccggtctgcctaggggtggatcttccaggtgcactcgatgatgctgccattacagagtcattagaactacacaaaattaagagccgccaatgggcgattttcaaaacatctgcaataaagggagaggggctcttcgaaggtttggactgcctgcgcttcacacgtgcagccaaccaaacacaaactcagataaagtcaacacacgtggtcacgcgggacgagacgatgcagctaaccaatcacatgaattattttcacagatcacgctataatggtttgtcattttttttatacactataaccggtggaatgctaggtggccaagagccaccagatcgactctactggctgctggtcgtgccgtga

SEQ ID NO: 38159 - DNA, 864 bp, Zea mays
  Peptide Sequence Number=SeqID_81534
atggccggcgccggtatccacccgttccagcagtggccacccacggcggccgcgccgcccccgccgggggccgcggcctcggtcgccgtccctcctccaccccccgtccccggcgcgcctggcaccgttggcccggacgaggtccgcactatcttcatcacggggctccctgcagacgtcaaggaaagggagctgcacaacctgctgcgctggctcccgggattcgaggcgtcccagatcaacttcaagggcgaccagcccatgggcttcgcgctcttctccaccgcgcaccaggccatcgccgcaaagactgcgctccaggatatggtgttcgatgctgagaccaaggtggcgctgcacaccgagatggccaagaagaacctcttcgttaagagatgtgtgggaattgatgcaaatgctgtggatcaaagtaaacggttgcgaacaggtggagattatactcattctccttatgctcctccatttcatccacctccaccagctgtttccatgtggggaaccccaggttatatcacagcgccacctccttacaatccatatgctgcgtatccagtcccccctgtagcgatgacttcacctgctcctgttacaggaccaactgcctatgctcctgtgcagaacacaaaggataatcctccctgcaatacccttttcattggtaatctcggtgatactgtagtcgaagaggaattgcgaagtctcttcagtgtgcaacctggattcaagcaaatgaaagtgttacgtcaagataggaacactgtttgctttattgaatttgaggtgaatgccaaggcgtggctatgtactttttggttagagaaccttagtgatgctaaaatataa

SEQ ID NO: 38160 - DNA, 1209 bp, Zea mays
  Peptide Sequence Number=SeqID_81535
ctcgccggggagctgcagcggcggcttgctgccttcgagagccgcgcggagggggccgaggccgcggcgcgagcggaggccgaacggacgcgcacgcagctcatgacttcatatcgcgagctgggtgtgcggacgagcgacttcgaggtgccggagcgagaggccggacttcgctgtctggagtgggtgcaggaggaactgcaggagctccccactgtcttggcggggttgatgtcgttcacctccctggtcacctgcgaggcagcgatgaacgcgctctctcgcgaaggctgccggcactttgaggccctcgaccaggtggatgaagattttgggcgagatatctttgaggtcgaagaccccgtggtgaaggagtccggcggggccctctttgaccggatgtggggttcatacggtcgagaggtggtccgggcgcgggccgaggctgcaagggctcaggcggagcgcggcgagcgggtggacgattttggggcgctgaacagcgcgccgcctgagccggagaccacccctgcggaggccgccactggagtcgccccggtgaccgcggaagatgcaccaggcgtccttgtacctgctgcggccggcgaaggcctactcccaagggtggccgaaggcgcgtctgatgcccccgcagccgctgtgccgggcgttgaagatccagcggagacaacggcggaggcggcggcggaggctcccgcagcggcagggccttcgcaggttcaagattttgggcctgcgcacgcaaccgctactactggttttttggcggcttcgaccgcggaaggtggaaatgaatgtggtgggtctgtttctgagttttttgattttactgactctgggagctcggctgaatggaccgaggagtcgtccgaggaggacttggactattttgcggccctggacgaggctgcggcggaggctgcgctacatgctgtggacgcgccaggcgtgcccggtcctagcaccgggcaccgacgacgaagggcggttgcgaagcgtaggattagtgcggaggaaggggctcgtcttcgcgttagtagggttggtcggcaggggctgctgtctttgccggccgtctcgggtgtgggggaaggggagctgcgaagcctttttgctggtgaggagcttaggataatgttatttaattatagagagatggggattattcctaaagttgagccgatgtag

SEQ ID NO: 38161 - DNA, 240 bp, Zea mays
  Peptide Sequence Number=SeqID_81536
atggtggagaaaggccacgggtcgcacggcggaacgacggttgcccggtcggccatcaccaagcgaagggggtggcggcagagcggaaaagggaccgggaaaggggatactccgaaagggatccttctctgcggaggaagcgggccccaagccctcctattgatcaggggttcgaaggctggcccctcggaagggttcgacagccgcctcagagcactcgggctccgcgcccactactga

SEQ ID NO: 38162 - DNA, 186 bp, Zea mays
  Peptide Sequence Number=SeqID_81537
atgaggatcaggttcaagatgatgaagatgaagatcaagaggttgagccacctcaagaagagggtagaggatgcattaagagattcagattgggtggtgactatgcaagaggagctcaacaacttcacaaggaatgaggtaccaaatgggtattccgcaacaagcaagatgagcatggtgtggtga

SEQ ID NO: 38163 - DNA, 201 bp, Zea mays
  Peptide Sequence Number=SeqID_81538
atgaaggcgcactccactataattcaccggactatccggtgtgccaccggactatccgaagatgacatgaagaagatggacgaggagatccaacgacaacaagatcaagtgctcaaggtggcgaagaagtggttcctctcgcacttcaaggtagattgccaccagaaggccgtccgggatagggaaataaacaccgattag

SEQ ID NO: 38164 - DNA, 396 bp, Zea mays
  Peptide Sequence Number=SeqID_81539
atgcctcgctcaaacgtgtcctgcgggtcgtcttcgaaggttgtcctcaacattacgacgaacggcgaggagtggccaggggttcggcgcggcggctcgggcgatgtttgcgatgacagacggtccggcgagagcgcggacaatccggtgagctcgggcaaggcgcggtcgaggcaggggctcggcacggcagggctcggtggggcatggcacggccacggacggtccggcgagctccgatgtggacgcggccgggagtggggcaacgacggcggcttggattgggagatgagggcgagctcggtaggggagagggagagggtcggcttgtcgttttatagagggagaggggaaggggagagggtgccgatggagggagagggccggccggcctag

SEQ ID NO: 38165 - DNA, 543 bp, Zea mays
  Peptide Sequence Number=SeqID_81540
atgtcgtcgcaagaggtaacactagaacttcttttaggcgatgattctaattataaatcttggataaagcactaccaagtagctgattataataacccaacccaaaaagaaagatacaatacaccatacaaggaaaaacatgtgcaatacaaaatagcgcttgcttctatggtcacacgagagaaagaaacgcagagaaaatacgaaaatttatgggagacttctacaagacatattgacatgattcaacaacttcttgcacttggaaacactatgcagcaacatgaatgtaacaatcatgacacttttggagctcctgctaatatagaaccaaaagcaaagaaatttttataccctaaaattcagggtgttacaagtagtgaggttccagatccggagatcatcgtctttgataccactattagcgacgcgtgtgacagcggcgctagaaccatggagaaagaaggggatcgggagaaggttggcggcgtgcaaatagaagacctcagccaggctaagcgcatacgcccgatagctgggtag

SEQ ID NO: 38166 - DNA, 435 bp, Zea mays
  Peptide Sequence Number=SeqID_81541
atggcttcccaggtgaagacgatactctacgagccgactccgagagcggagacccccccccccagcgacggctatccccagcggcggatctcggccctcacggttcacacggcggtagtggaggtctgcttggttgcggatgttcgcgcgtggtcgaagtggaggggaggagtaggtctcctattcctaaaagttactttaggtacaggatttcaaagtgtgaaatccacatttatctttagaaggaaaagattttttgtgttcgagcaatttggatttccagctgggacttcaaccgcagtcttgccattctttttaatcactggttcaatatttagatatccccggatgttcaacttcaaggctagggtggagatgctccattaccatgcgcctcattctgcggtacctgatcttgacctgtggggggtgtga

SEQ ID NO: 38167 - DNA, 387 bp, Zea mays
  Peptide Sequence Number=SeqID_81542
atggcggacgttgcagactccgttgtaggcacgcgcggaccaatctcgagcggccataagaagggcgtggccaggtccttaccctcccctccacttcgaccacgcgcgaacatccgcaaccaagcagacctccactaccgccatgtgaaccgtgagggccgagatccaccgccggggatagccgtcactggggggggtctccgctctcggagtcggctcgtagagtatcgtcttcgcctggggaagccatctgtgccaagtaattgggtggtgaggctgcggtgcgacgccaatcgctcgccgttgctgtcgcgccaccgtgaatccgcccctcgtcgagtaccggtctactgggtcttcatcctcggtaaattacccccctactaa

SEQ ID NO: 38168 - DNA, 720 bp, Zea mays
  Peptide Sequence Number=SeqID_81543
atgcaggcggcatgccactgcaccaaggggacacacactttcgacttcgacgcgtccagcttagaggtccaggcccacacgtcatgtaaccggcgcgccggttactacgtgcaagaaactgcaccgccactcgcgccagtaccgcaccttctcaactgtggaaccggtgccgcgactcgaggcgaccctgcgcatgacccgacagtgccaaccgagcacatcggtcacgggtcagtcagccgcgggagaaggcgcgacggtcgatacggccagaaatgggccggcagtaatggcggtggcaggcgggcggaagcagtagtcaagtcgtcagcaagctcacgccccctcctgggacagcgagagaaccctctcccacggcgtaaagatgacgcgcccgtgttccgttcctcgaacagctcgcgcacgcacaacggctgccctgcgaaccactcgtcccatcacattaactctgcggcgggacaggcgacacctttgggaccgggaaaggggatactccgaaagggatccttctccgcgaaggaagcgggccccgagccccctactgatcagaggttcgaaggctggctcctcggaagggttcaacagccacctcagagcactcaggctccgcgcccactactggtcagaggttcgaaggctggcccctcggaagggttcaacgaccgcctcaggccactcgggctccgcggccactactga

SEQ ID NO: 38169 - DNA, 516 bp, Zea mays
  Peptide Sequence Number=SeqID_81544
atgggcacgattcaggccaaggctccgctcaagggacacgatcccgcctcgcccgagcccgacctcgggcaaagacagccgaccccggaagattcacgcctcgcccgaggatcccctcaagcaacggacgcaacgtcgactcgcccgaggcacaactcggggctcggactcagcctcggctccggaagacgatggactccgcctcgcccgaccccagggctcggactcaacctcaacctcggaggaatcaccaccacgcccaaactcgagtccggaccggccacgtcgccaggggggccatcattacaacggcagctcaggctacggggaacaaaaccggcgtcccatctggctcgccccagtaaacaagtaatgatgacaccccgcacgctccatgacaacggcagctcccagccccttacgtcagcaaggagacgtcagcaaggacctgacagccccgatagctgtacttccgcagggctccagctctcctccgacggccacaacatcacatga

SEQ ID NO: 38170 - DNA, 150 bp, Zea mays
  Peptide Sequence Number=SeqID_81545
atgaagctgctgaggaaatgcgtcatctcactcaagatgaccaggaccgaagacctcaacgcagagagcttcgtcagggaaattcctacgatgatgatgaatgcaacactgcaggctaccccatggcccctatcatacaagccaccctag

SEQ ID NO: 38171 - DNA, 258 bp, Zea mays
  Peptide Sequence Number=SeqID_81546
atggaggcaagaagagcttcgaggtatcgagtgcacgggagaaggtcatggaggctgaggaacccaaagccaggggtgaagaagaagacttgcgaagtcaaggttgatcgagttgagaagagatatggtgcatcaaggatcacgactaaagaacatgacttacaactaatgagggtgttggagctcatagtttgcaatctagatcaagtcatgaagacggagttttggagtccaacatcgactttgaaagggaattag

SEQ ID NO: 38172 - DNA, 510 bp, Zea mays
  Peptide Sequence Number=SeqID_81547
atggagcagcggcgctgcgcagggctgctgctgggcgcaggccatggagcaaggagctcgctggaggttgttgtcgccgcgagcagggaggaagaaggggtgttgtgcagggcgtctgctgcacccagggagctcctgtggcaagggacagagggaggagggagctgcgcaggaaggggcgccgagcacagggaacttcggacgccatggctgctggccgagcagaggcgtcggtctacaacagagggcgcgagccagagaagggtagaggtccagccatggctgcttctacccctacgcaagggaggccagggatggagtccatgggcaggagctcggctgcagggggctgctcgccatggagagagggcacaggggaaggtggagctgctgctgcgcgaggaagaaaacagggagaagagagaatggcggctgaaaatttttgaggggtgggactgcaaaatagccaagtgcaaggaaggagcacttctatttatagatatgggctag

SEQ ID NO: 38173 - DNA, 432 bp, Zea mays
  Peptide Sequence Number=SeqID_81548
atggccgctcttaacagagaagttgaagaatatgatgattttgtgcttttagatctcgaggaggagtatagcaggctcccatacaaaacgttagctttctttaaggcggcctatgcattgtatgattctgatttctatgttaaagcggacgatgacatttacttgagaccagatagactttccttacttttggctaaagagcggtcacatccacaaacatacattggatgcatgaagaaggggcctgtttttactgatcctaaattgaaatgcaacgaggacgttacaattggatcgtggatgcttgctatgaacgtcaaccatgagaacacacatgcactttgtgaacctgactgcacggagtcttcaattgctgtttgggacatcccaaaatgctcaggtcatttgctttcttatttcttagatggatag

SEQ ID NO: 38174 - DNA, 84 bp, Zea mays
  Peptide Sequence Number=SeqID_81549
atggcgccgccggccctggtgaacgccaccgccggtgtctgggatttgtctctgtttggacatgaaaatcacattaaaatttag

SEQ ID NO: 38175 - DNA, 1029 bp, Zea mays
  Peptide Sequence Number=SeqID_81550
atgggcatcgaacatggtgtctccggtgagctgcaagcggggcccacgcgatctgaggcggctgttgaacccttcggggggccagccttcgaacctctgatcagtaaggaggctcggagcctggttccttcacagggaaggatccttttcgagcccggccgcacccctccaccggcggtcacccaagatggggacctccagcttgatggtgggggaaagcgagccgggctgcggcctctgcccctccctcagcctcaaggattttcgtcatccaggccaagatggaggatgaggcggatcagggggctgcctccgcgtgggtcggatttgccctcttcttcccctggcgtctgggggagaaatggcatcctccgacttcgcggagacttcctccagccatgccgagaaaggcgggccgccgccgcccgctctgactgtggcaatgatcacccccgccccgggcgacgaagcagcttcagcagcagcttcggggcaggtgctacggcagaagtactctcacccaccgaggacgagagccagccattcgagccgggagacggagacctagggctactggcggagttggcaatctcatcggtagagaagccgcccgtcagccttctgttgctccgcaggcctacccctatggagtggggttgttcgtacctgcggagggggaaccggagttctgtttgtaaaggcactttgaatgccaatgcttttgttcattacggctttcggggcctgaacatccgaggcctcgggtcgggctggcgcccctggaagatagtcggccgaggccccaggggtatccggctgagccgcctgctcgggccggattcccggagaggaccctggcggcgatggcccgggcgtggtgatgacgtcgtccttcggagcggaggccttcggaccgcgtcgctgtccgaggctaggtcgaacctcgccgaaggtgtcgtcgatgccgagggtgctgctgcccccttccagcgtcaagacctgagcctgcaggatcagaatgtcttgtag

SEQ ID NO: 38176 - DNA, 549 bp, Zea mays
  Peptide Sequence Number=SeqID_81551
atgccacgtggcagcatcggggcttcgcctgagcgagaagcagaagcgtatacggtatggtctggacatgtgtttgctctggacccccgcctagccttgattaaggtctgggtattctttatcccagaatcccgggaccctactgtgagtggcctggaccccacacagaggggtccggaacccatcctaggggtccggtttgcgcccgtggaggtcctgaaccttacccggaggtccggtctgcatatacagggttccggcactttcccatgggggtccggacccactattgataccttggagtatatcatcttctctggccacgtggcggtcccagagccatccacgtggtggggtcgtgcgctgtttaccacgcgactagagatagccgcgtgggtatcgcgtctttatattgtagttaggggtacccctgtttcagggtaccaacagtggcccccaggcccacctcaggggagggtacgagcctgcaggtggggccaaagcttgattagtgattggtgcaccgcttctgtgcatttgctgacgtaa

SEQ ID NO: 38177 - DNA, 1155 bp, Zea mays
  Peptide Sequence Number=SeqID_81552
atgtcttgggaggagctagaggttctagtgaaggggattactggtgagtccttcgtccctgagtccctaatcctcccccagggcatccctgcgctctgcgatgacccagggtttgaggacggcgatcttggccacgctgccgaccttcaacaagagcgacgtggtgcgccccgccacagcccccaccccttggacaagggcaagggggctgtaggcagttcctccgccctaggtggcaccggggggtcggaggaagagaagcgacaccgactacgccatgccgacgggtcattcatctcggacccccctagaagcgtcaaaggactgctggtggggccaaggaggccggctcccaagcccaaggaacgcagaggcgcgtcagtcctctgccaccaccaccatcgggggcaccaccagcagcagcagcagcaaaagcagcggtcgcctcgcttccagggtcgctggaatgtccagggccccaaggcttcctccccctctgctcccaaggtcgcgcctcctccgccccaagctgctgccgccgagacagcgccaccgggctcccatgctccagctgggggtccggcagcagcagcgccaacgtcaagcgacgtcgcagcggcggagggggtcccaactgctctaacggctaccacagcctcaacgacggcgatgccgtcaagtacaccgtcagcagcggcagaggaggccccaactgcgcccgcccccaccatcgaggtcgacgcgaggggcgcgtccagctccatcccgtcgcccactccggaggagacggaggtggtttttgggcggcggctccggtccgatgccaagccagaagcggcgccggttcccctcccccgggtgctgtctcgtgcccatcaggctcttcatgagactaaagcggcgatcctgcgggagtgggaggcgcttgaggccgaacaccagcgcctcagcgagtcgcgtacccagctagaggagcgcaccaaggcagcatcccgccagttcgcctccgagcggtccgagcttgagagggacctcaaggactacaagaaggacctccagaaggtgtatacccaggagctggaggtgggccagaaggagaagaggctggccaagaaggaggaggccttgaaccaaagggaggaggtcgtcacatag

SEQ ID NO: 38178 - DNA, 2817 bp, Zea mays
  Peptide Sequence Number=SeqID_81553
atgaagaacttcctcaggaagctgcacatcggtgactccgccgccggggatggcgcctcgtcgccttcggcacctaccccgccgccaacgaaaaagggcgggggcatcgagcataggcacgcctccgggttgtcgggctggctgagctccgtgaccagccggccgcacccacctacgccgctttctgcttctgctgcaccggcagcggcggcgccggaggtggaggagtcggcgttgacgactgcgttggcttcgtctgttgaggagaagagggtagccgaggaggacgaggagagggcgaggcgggagtcccggaaggaggcggagatggagaagaaagagaaacagcaggcggagctggagaactatcacatgcagctggccctcgagatgagcgtgagggaggacccggaggcgatgcagatcgaggtggccaaacagatcagcctcggctcctgccccatccagagctcgcccgcagaggtcatcgccttccgatactggagtttcaatgcccttagctatgacgacaaaatattggatggtttctatgacatttgtgccactggggatgagcttgcaatgtcaaccataccttctctgatggatctgcaagcactgccattttcacatggaggcaaaactgatgctgtattggtcgacagagcactggattctgagctcgtagctcttgagcagaaggctgttatcatggctgtagaatttcgctcgaaaaaatcagaatttgttgaccgctctttggttcagactctagctaatttagtttccaactacatgggtggaccagtcattgatccagaaagcatgctgttgaagtaccgaaatatgagcagtgcgttgaaagctgatataagaagtgcagttgtacctcttgggcagctaacagttggtttggctcgtcaccgtgcactgctttttaaggttttggcagatagccttgctgttccttgccgattagttaaaggaaggcagtacactggatcagatgatggagctttgaacattgtgaaatttaatgatggaagggagtgcattgttgatctcatgatagatcctggtactcttatttcatcagatggtgctgacctgggtagagaattggaagacagcttagtcgtagataatcaacatgttaacaaagatgacactagcactcagttactttcctctttcagtgaagcttcaagttccatgcacagttcatttgaaaatggatcgcttgaaaaaggatttatttgcaatgctgggcattttggtccatatgaagcaacaactgcccatagtgacaatgatgtgcttgggtctggggtatcaagttcatttgatgagctatcggtcagcacatatgcatgtgaaaacatacctattattcatgaatctaatacagatcataccatgactgaaaaaagcaaagataagtcgatcacatcaaataattcgtcatcatgttcgcctccatcttctgagataggcagtactcctgctgtacgaaggaaaaaggtcaaagacgtctcggagtatatgattagtgctgcaaaagagaaccctcagatagcagaaaggatccatgctgtgttacttgaaagtggtgttgtgccaccacctgacttgttttcagaagaatctaaggaacaaccaaaggacctgattgtttacgacacatctctgtttcaaacaacagatgaaatgataaggacaatgaatgagcttgaatccacagcacacgatggttgtgctggtcttggtccttcattgccacctgatcctggacatgagctccaaacaaagattgttccttatcggatgcctcctgacctcaagcctgtccagggattaggtgtttaccataagtttgatttccgggataacatcaatccctctatacctctctatgaaccaagtccagctcctcaggaaaatccattacaacttataaagcaaatgcctgttacagctgctgctgttgcaacagctgcagtggttgcatcttcaatggttgttgctgctgcgaaatctaacagcgatattaaactagatgtgccagttgcagcagctgccactgctgctgcagttgttgctactacagctgctgttaaccaacaatatgaatacttggatccgggttgtcaattgctttgcttgccaagttcatcaaataaattaatccaaaaaggtagacatgacttgttggatgatgatcagctggaaacaaatcatggacaggataatgcccttgagcgtgaaaaggatttggttcaagcaccccaggaagctgagcgaatctctgataggtcaactgggacagagagtgcaagatctgaaatttctcttgataaaatcgcagagtttgaaatccagtgggaagaacttacccttggagaacgagttgggctgggatctttcggagaagtgtatagaggtgaatggcatgaaacagaagtcgcagtcaagaaattcttgcaacaagatatttcaagtgatgctctggaagaatttagaactgaggtcacggtggacgagatcaaaggggcgagcggttcagggcatggaagaggggaagacctctatcgtcatagagatgatatcagcaccacagaacaggaaaggcctggtagcgtggcgcccctcctaaggggagacccgatggtgacagagctcgacacaatcatggagaatcgggttcatggcccgttcaaatgccacgaacgtgccctagagaagctagccaccatgaagggggacatgcacacggactgcggcggaacgaaggatgggcatcgacagagcatgcgctag

SEQ ID NO: 38179 - DNA, 384 bp, Zea mays
  Peptide Sequence Number=SeqID_81554
atgaagtcaatattcaatctaccaaaaggaaagtggccagaggaattagtaaaagtggtatggaaccataatactgttgtctcaaggtctgacacaaggttagaatccgagctcttccagagtggtatctcactgatggctcgggccccccggaagggggccttcttcgccttccacctaagctgcgcaggaaaagcccaaagccaatcccagggaacagtaaagcttcatagggtctttctgtccaggtacccttttgttgaaggtggttcgagcttttcctgggagtatggcatgggttacatacttcagcgccgtagcgcctgccgacattctcgcttccgcttcgtcgacccccccgctttcgcgtttgcttccctctaa

SEQ ID NO: 38180 - DNA, 912 bp, Zea mays
  Peptide Sequence Number=SeqID_81555
atgacggtggcaggcgagcgggagcagcagtcacgtcgtcagccaagctcacgtcccatccgggggcagcgagagaaccccctctcacggcgtgaagacaacgcgctcgagaagcgggcgacgcttcgccttcgccgtaataaccgcgccaaaaaaaaggctccgagcctccctactgatcagaggttcgaaggctggccccccgaggggttcgacagccgcctcagatcgcatgggctctacacccactactggtcagaggttcgaaggccggccccccaaagggttccacggtcgcctcaggctactcgggctccacgcccattactgatcaggggttcgaaggctggcccccgaagggttcacagccgcctcagacgccgagcgagggatgaccaggggtacgttcgatacataaccgaggctcgggctgcgctcccgagctcactggagacaccatgttcggcgcccatcgagggcaacatggcgcttcccccccccccctcctccttgcggaaaggcgacgcaggggccgtcaacataccagcccgagaacttgggacccgaccgtacacccgggctatggccagctcgcatgagggaacgaccagaccagccgaagcattacgcgaggcattaagacctcgaaggagtgaaaccactcctccgaggcctcgggggctacacccggcgggtgcgctcgcgcgcacccaccggaacaaaatgcaaccgagaaaggctggtccccttgcaaaaaagtgcgacgaaagcctccaagcgagtgctaacactcccttcgaggctcgggggctactgtcggggaccataattaggggtaccctcaaggctcctaattctcagctggtaacccccatcagcataaagctgctaaggcctgatgggtgcgattaa

SEQ ID NO: 38181 - DNA, 246 bp, Zea mays
  Peptide Sequence Number=SeqID_81556
atgccatactcccaggaaaagctcgaaccaccttcaacaaaagggtacctgtacccgaaactgacacagcttaggtggaaggcgaagaaggcccccttccggggggcccgagccatcagtgagataccactctggaagagctcggattctaaccttgtgtcagacctgcgggccaagggacagtctcaggtccttattgaacctattcttgcttcttccggtgttattgcttcatcaccgaattaa

SEQ ID NO: 38182 - DNA, 699 bp, Zea mays
  Peptide Sequence Number=SeqID_81557
atgtcttcgtgctcccttatgcatcgtgtctttccaccttccaagcccccggatgggggatacccgccgtcttttcgcctcattgttggaggaacgcaactccgtgggagttggtacctttcagccatcgttcggcttcaaggattttcatcacacagcccggttgcacccctccgctggtggtcacccaagacggtgacctccagctcctggatggggagaggcaagccgggctgtgatctcgatcccgccctcagcgtcgagggtgttcgtcatcctcgctggggcggggagcgaggcgagccggggctctacctcctgcgcgggtcggcgggccacctcttcttccagcttctggtggtggcaatcgccctccagccctgcggcggagatgtcctccagccatgctggggaaggcgaactgttgctacccagctaggatgcaacattccgccctcttcctcgcattcgcggcggggacggcagcgaggatctgccgacttgcctgttggtcgtctgaaccgcttcaccaagcgtgagtcgccccgtgttaaggtgacgagtgagagcggagatccttggaccgcgtcgccgtccgaggctaggtcggacttcgccgaaggtgtcgtcgatgccgagggtgctgctgcccccttccagtgtcaagacccgagcctgcaggatcagattgtcttgtag

SEQ ID NO: 38183 - DNA, 330 bp, Zea mays
  Peptide Sequence Number=SeqID_81558
atggcggaggccatcaccggagttccggatccggtgctccagaccacccccccatggccccgacgcgtgctacacgatgagaacggcaaagcgaaaatttggggaggtttcgtaccgcgtgcaatgaagggagagggagccggtcacggggatggggcatcggctgagctttataggggcgagcagagcaatccccaacggaattccgaagcttgcggcgagcggcagcaacaacccaacatgcccaacgcggaagctacgggggagatattccaggcgaggcgatgcgcgcgcggacattggcggagtttgttggggagaagcagatga

SEQ ID NO: 38184 - DNA, 570 bp, Zea mays
  Peptide Sequence Number=SeqID_81559
atgcattgcgtccttccgccttccgagcccccggatggggagcacccgtgttgtcttcgtctcgttgtgggaggagcgcaacctcgtggaggttggtacctttcagccatcgctcggcttcaaggattttcatcaggcatcccagctgcatcccctcaccaatggtcacccaagacggtgaccaccagttcgatggtggggagaagcaagccgggctgcgacctctgccccgccctcagcttcaaggatcttcatcatccttgctggggcggagggcgagctgagccggagctctacctcccgtacgggccgatgggccacctcttccttcagcatccagaggagagggctctcactggcctagcggaggggcggacttcgacaacgcggggccagtcggccgcaagcgtcgtcagctccagcgtgtttggctcgccggctcagctagctctagctcagctttcggtgccccctcgcaccgccgtgcggagtgtggccatctgcccgtcatacgggcggctgttgcgccgcgcgtaccgggggaccgcccaagacgtcgcacgctgctaa

SEQ ID NO: 38185 - DNA, 375 bp, Zea mays
  Peptide Sequence Number=SeqID_81560
atggagtacacaacgatttttcgtgccttctcgactgtatcaataacagaaccctacggacgagtaagagtacacgttcagacatcagtagggggagcagcagcaccctcggcatcgactccaccttcggcggaatccgacccggcctcggacagcaacacggtcgaaggatctccacctcgaaggaagatgtcagcactgcgcctgggccatcgccgccagggtctcctccaggaacccggcccgagcagacggctcgaccggccgctccgtagcctcagccagctgacccccgaggacatcagcccggctcatggcctcggttgcctgactccagggttggtcccgccggtggacgacctggccaggttgtag

SEQ ID NO: 38186 - DNA, 319 bp, Zea mays
  Peptide Sequence Number=SeqID_81561
atgtcggacgaccttgttgttcctgtccactttgaagttggccaagaactttgctttcgcctcctggatcatccgttccttgtgctcctcgaactggagctgctcgtcagccggcaaggcgtcaattactcaagagaaccagcggcgatgctctctggtcaggcgcggacggtctgcggcccagagccggacggtccgcgacctggtgcgaggcggcggtgctctctggggcggcggaagatcgccggcggcgcctggatctcgctcccgggagagaccccgtcggggaggagagatcctaggagttgcctaggctcgg

SEQ ID NO: 38187 - DNA, 294 bp, Zea mays
  Peptide Sequence Number=SeqID_81562
atgtcggacgactttgttgttcctgtccactttgaagttggccaagaactttgctttcgcctcctggatcatccgctccttgtgctcctcgaactggagctgctcgtctgccggcaaggcgcggacggtccgcggcacagggccggacgatccgcgacctggcgcgaggcggcggtgctctctggtcaagcgcggacggtccgcggcacggggccggacgggtcggcggaaatcgccggcgacggcctggatctcgctcccgggagggaccccgtcggggaggagagatcctag

SEQ ID NO: 38188 - DNA, 777 bp, Zea mays
  Peptide Sequence Number=SeqID_81563
atgtgggcagtcactcaatctgaactcgtacggtccaaccccagggttatgaaggctggggagcaccgggaggataaggagggggaatgttttgtccggtttggacatggtggtggtctgactccttccgatataaccgttaagaaaaaggagatcggaagtcagatggaggttcattgccaaaccagcttttgccagaatgaagatggtttccccaagttgctgagagcatgcacagttcgcctcggagtcaggagtcagccagagtatgatgatcgtgaattcatcgagcatggcacagagaagtgtgtcatgactgtatacattggatccagtccgcaccatgtggaatggagtgtcactgctgctgggcacagattcaaagacacctgccaagtcgtcgcccgcaaggcattgagggccctgtgtcagatctatgaagaagaagtggccgacacaccgctcacattctttccgccctttcagagaaaccgtcccgtttggatggctagaatgcgtgcattggaagggcaacagctgcttgaggatgacccctcagtcgtgtacctcactgcatacctgctcaccctagatgcccagtatgatttcttggctcggcaccaccgtcagatgattgcccgagcagaagatgcagagaagcgcaaccgtcagctccatgtggatctcaccacagctcaagcccgtgcaactgcattggaaagtcgtgaagtcattgcggttgaagccctgaagcaagccaaggatgagcacgtctag

SEQ ID NO: 38189 - DNA, 1949 bp, Zea mays
  Peptide Sequence Number=SeqID_81564
atggacgtcgcctccaacgaccgcgccgtctccccagatgttgccgtccgccctttcctcccgccgctcgccaagaagaccgatgacaatggtggaagcagtaagaagcttccaaaccttgtgtacttcggcggcggcttctgcctccacaccgccgtcagcttcgtcttccacgcctacctcacctccctcgatcgcagcgcgtgcccgcgccatcgtcgaatcgtcgtctccgacgagtaccgtctcgtgcccgagcacccgctcgctcccagccgcgatagtcgtggtcgagggagttctcgaggacgtcgtagaagacaagccgcacaagtcgcgggcgctggtgcgtcacgcgggaaggcccgcagcgcgccagatgacgtcgtggtgacggtggcgctgagaagcagccatatacgaaggcgtgatgcatcgaggcaaatgagggtgtcgatgacaggggcgacgcatcaagttgtcgtagagaaggccatcgcgacatttgtggtgcagcacgacgggagtgtcgtcgtaatgcacgcttgtcaaagcggagtagacgaagtagtcgaggacgagacgatgatgctagcgatgaggttgtgttggacgaagcaaagaggtaggtgtggcgatacatcgaggttcctggagtcgcggcagcgagagccacgactcatgggaaacgagcctcaatgtcgccagtggagcgccatggcgatggcgatggtgctgcccgaggaggcgacacagcgacaaccctcttgcttggccatgcattacgcgatggacgaaaaacgtctcgggaggatgacgaagaggcgcgacacaggcaggcgttccgattacgccacatgccacgccagttgcaccgtcgaagaagatgaagaagccggtgtcgagggcgcgcgagtcgactggcggtggacgatggagacgcaacccaatcccggaccgggaaaacaaaaaaaagacatagcaccaacagatatggggaattcatcggggtaccgaggcgcggcccagcggtgcgaccatccagaccggctcgcgggcgtgacaccggcggctcagcgcgggcgcggcagccctagccccggcatcgcgcgggcgcccaggcaaggtcacagccttggcgcggttgcaacatccttggcgcgggcacacgactctagcatgagcgcgcaagcccggcgcgtggctccggtgaggtcgatcggcagcgagagtcagagctgccaccatggcagcgcacgacctgaccggaagcggggattcgacccggacacaaccatcacaacgacggcatgtggaggggccggatccagctggtgcaggtcgacgggggccaatccgagcagcgccgacgaggacgatctccctaggggcgacgcgatggtagctgtgggggacagatatcccccgggtccactagaagcacaagatcatccttcgccctggatccgtattatgcttcgaaaccatttcatccgtggcagacgaagaaggaactctacatcgtatcacggatccaccggagagaaagccttcctcaacaatctccaggaaagtcgaagcaaagtaggaaaaagcgcaacctcaggcactccgagcgaagactacctcctgcaagccgggagcagaggatccgtctacctggagaactccgctgtccacctcttctatggaaaaatggacacggatcacaaggaaaagggaagcaaacgaggtaaaggctcatcaagctgctctccagaatggaatctacccctgtctccaacgatgaaccaaccgcgccgggagaagaacctcttcagcgggaatctcgttgacgaaggaaccgacgccgaaatattcggcgatatcatgaagctggagagcgggacccagcgcagcccatgtcacaagatgagatctcggagatgggagaaaccccagaagaacgg

SEQ ID NO: 38190 - DNA, 828 bp, Zea mays
  Peptide Sequence Number=SeqID_81565
atggccaacgccgacgctggcgacggcgacgaggtcatcctcgacgctcccggcttcatacgagtgtacaggagcggccgcgtcgagcgctttctgccggtcgacttcgccccgccctccactgacgccgccaccggcgtctcttcaaaggacgtcgccatcctcccagacgcctgcctattggttcgcatttacctcccattgcccccctcttccggaagttacagcggcaaactccccgtcctggtgttcttccacggcggcgggttctgcctcggttcggcgtttgatgcggcggaaccctggctgactgcccacgcggacctcgggcgcgtccacgtcggcggagagagcgcgggcgcgaacattgcccaccacgccgcgatgcgcgctggcagagaggagctgggccacggcgtgaagctcagctcgctcgtgatgatccatccctacttcctgggaggcgagagctccgagacagacgacatgggcgtagcgttgctccgcgagctcgtccggctgtggccggtggtgtgcccgggcacgagcgggtgcgatgacgacccgttgatcaatccgatggcagagggtgcccccaatctcgctagcttggggtgccgacgcgtactggtgtgcgtcgggggaaaggacccgatgagaggcagaggaaggctgtattgtgagaagctgaagagaagtgggtggcgcggggaggtggatgactgggaggcggacggccagggacacggtttccatctctcgtgccccatgagcgcagaggcggaggcgcaagtccgggtcatcgctgagtttctgacctacggatga

SEQ ID NO: 38191 - DNA, 99 bp, Zea mays
  Peptide Sequence Number=SeqID_81566
atggagaaacttgccagagttagagatatgctactaaagaaacctgtctcacaggcgaatttggaaactggctatatgatttgcgaagctgctgtctga

SEQ ID NO: 38192 - DNA, 429 bp, Zea mays
  Peptide Sequence Number=SeqID_81567
atggcagctaggttccaaagattgcgtgaggagggaaatattggtaaccctttaattttagaggatttccaattggacaatgagtgggtgaataataaaaaagaaatagttagagaaggggatgatcttgcatgggctcatgtgcatgatgcaatcggtgcttctagttcacttcaaggtcgcaacttcccaagaagagtccaatatgagtctgtttattcaaggcgttgtcaagctgctgctacacaagaggagagagttatggaagagcaaggcaacgagggcaatgaacatgatgatgaagagtacatacctaacgatgatgatgaagtggatgactttggtgaatccccacataacagtccaactcaagatggtgctggtggtgaagaaaatgcaatggatgatcttgatttgggagatatttag

SEQ ID NO: 38193 - DNA, 264 bp, Zea mays
  Peptide Sequence Number=SeqID_81568
atggctcaggcgggttcaaggtggcacgacggactcggttgtgggctcgaaactagcacaggggcaccggagggtacccgtctacggtggagtggcccagcggcgtctctagcccacatcggtgagcaattaagcgaacaacaaggcagggaaaggaaaattaggggcgcggggaggtgtctgagggcacatgcgtccttaacactagacgctgggcgctcagatacctataaatacccccgcacagtgcccgtgagaggctag

SEQ ID NO: 38194 - DNA, 477 bp, Zea mays
  Peptide Sequence Number=SeqID_81569
atgggaaagagcaagagaggtggcagctcttcgcatcactcgggcgacaagcgcaagcgcgaaccgactcctccctcggaggactccagcaactcagaatactcggaggaggagttctctgagtccgagggctctccggctcctgcctctcccccgacgtcgtctgatgattcagacgactcccaggggatcgccgcagaggtatggacctacatccgggccgtcgagcgtgccgggctcgagggctcagatgagtcggagtactcctcggacgaggagaattcctccgactcgtccgaggagggcagcggcggcgacggcggtgacgacgatgacgacggaggcgacggcgacagcggcggcggcagcggcaagggcggtgacgacagcggcaagggtggcagcggcgacggcggcggcgacggcggcggcggcagcaagggcagcagcaagggcagcaacaaggccagtggctag

SEQ ID NO: 38195 - DNA, 324 bp, Zea mays
  Peptide Sequence Number=SeqID_81570
atgcaggtgaccccggtgcacgccctgggcgctggcatcaacccgatgcagggcctggtgatggaggtgatcctcaccttctcgctgctcttcgtcacctacgccatgatcctggacccgcggagccaggtccgcaccatcggcccgctgctgacggggcgcatagtaggcgccaacagcctcgccagcggcaacttcaccggcgcgtccatgaacccggcgcggtccttcggtcccgccatggccaccggggtctggaccaaccactgggatcgccccgctactcggcgggtccctggccggcttcgtgtacgagtcgtgtga

SEQ ID NO: 38196 - DNA, 441 bp, Zea mays
  Peptide Sequence Number=SeqID_81571
atgctggtctactgcggtgtcgaatggggacatcttttctgtgccccggtggcgcgttgttctcgtgattgccggtcgttgcgttcaagcgattcaggcatgagaaagtggagagcccccatcaccaataatgcccatgtacgtggctacgtgcttgttatgtggttgttggcgccgactggaaagaaccacctggtgtggtctctgcggaggcacgaacggccgcgacagagggccagacggtccgcaatctgggcgcaagaacggctcctcctttgtgtacatccggactgtccacgtctggagctcgaacgatccacgatggcgcagagggtcgtcttcttcgcagcaaacatagatctcgcctcccaggcgggacccatcggggaggagatatcatatggtgtcttagcgtcgacaggccacccaagacgtctctag

SEQ ID NO: 38197 - DNA, 429 bp, Zea mays
  Peptide Sequence Number=SeqID_81572
atggcagccatcgcctcgcctctgctaccgcaggcgtcgctcttgacgagggcgaggaagctggtggtggcatgtgggggagcaggacgtgtcggcggcgacatggagcgatggtggcggcgaattccaggggggacgaagaatgggtcactggagggtaggggtgtaaacgccccgctggagggagaaggcgacggcgtgcgacaggctctcgagatctcaagagagaaagccaggaatggacgacggggcgacgcggttgaacaaattcaacaagcaaataaaaacaaagaaattcaaaccacggatgttgccacttgcattgccagcgatcttgttgccgatccctggaggcctggactgcaacgtaggaaggaaacctggacttgcctttgccgatccttggactgcaacgtaggaagcaaataa

SEQ ID NO: 38198 - DNA, 447 bp, Zea mays
  Peptide Sequence Number=SeqID_81573
atggagcacaatggaagtgaaacgcagatgcgtgcgtgccatgggcgtctagctaccgtgcctagatcgccactctcgcatcaaactgaaacccaaggtaaagagctcaaggacactcctactgctagcaccaccagactgcagagcaaacatcctccatcgcgtgctaagatggccgccggtctcgtcgtcaagccgtcgtgggcgtgcattgtgatcatcgtcttgatcgtcacgttgtccagcggcgcggcgtccggcgaggcgaggaggctgctgatggcggagaaacacgcggccgagggagcatgcgccggtggttgcagtcctccggtgcaaggtctcacggcgacgacgaccagcaagatggcgaccaccgacgggcggcccacggctcccggacacagcccaggcatcgggaacaagatcgctggcaacacccgatga

SEQ ID NO: 38199 - DNA, 1011 bp, Zea mays
  Peptide Sequence Number=SeqID_81574
atgaatgcgaaggcgtgcgcagcccagaggcatcatgctaggttctgcctgtgggcttatgccgcgcgcagtatgccacgtggtagcattgggtctccgcctgagcgaggaggaggtgtgtacatgataatcagatcaggtctggacacgtgtcggcaccggacccccgcctgggtcctgatcaaggcacgagtatgttctgtcttggaaccttgggaccccattgtgggcggctcggaccccatacgagggggggtccgaatcccattccaggggtccggcttgcacacatggaggtcctggaccaatcttggaggtctggactgtatatccaggggtccgacactctcccatgggggttcggactcactgttgaggccttggggtctatcactttctctaaacacgtggcggctccggacccacccatgtggtggggtcaggcgctgttgtggacccagagtagttgcccgaggctggggcgagtcatggcttggtcccacacacagcacctttaccacgcgactaagagatagccgcgtgggtactgtgcctttatacagtagcaagggaggcgcttaccgcggtggatttggcggcagccaagtcgcgcccacttctagccaacctcatgacggcaatatagcgggcctcgggggtcttcgcctcatcctttcccctcccacacgccagaaccgtccgagtagagctgtgagggtgaaccgtggacttcgtaaatcgtcgtcgcaagggaacctcgtgctcagcgtgacgcggctactggcgggtgttcctctggattcgatgggttccgtggagtgtggttatcaagttgccaggggcgattcgtgcgccagcgcctgggaattgctcaccggagttaatctcctgcggcggtttattgctgcgtgggggtgcgagtggccgtacgccggtgctgccgtcaccatagttgggcggtgtttcgtagacgtcatcgggcgggggaagacgatgatccgcgaccgttga

SEQ ID NO: 38200 - DNA, 303 bp, Zea mays
  Peptide Sequence Number=SeqID_81575
atgcatcaagaagatgatgagattgatgatgaccttcagcacatattggtttttatgctaggtgaataccggaagaggaagaatgaagatcaaccttttagacaacttgcttatggtgttccagtagtttacgttgacgagtatttgcggattggagaaagcatggctatcgagagcctacgaaaatttgtcagggcaagccatggtcgccagcaacgtttgatggccgacggcgagatgccgatgtgggaacctggcgagacgctggtgtggaaacctgggctcctattcgagttgctctaa

SEQ ID NO: 38201 - DNA, 861 bp, Zea mays
  Peptide Sequence Number=SeqID_81576
atgcaacggcggcgaccaagagcagcgcaccgctgccgcttcctcacggcggcggccgcctcgttccacatccacctcctcctcctcagcgccgtgtccgctgccggcgtcgatgatgacgcggacacaccggcgattctggacacggtgtgcgcggctacgcagactgtggatccagaggccttcgacatgagcttcgacacaaccatggagatgatctaccagaacgtgaagagctcgggcttcggtgccgtcggctccggcgagggcagcaacacagtgttcggcctcgcgcagtgcatgagctacctctcccccaccgactgccaactctgctacggacaggcccgcgtgaagctgccgcactgcctccccgccgacggcggccgcatctacctcgacggctgcttcctccgctacggtggcgacaacttcacggccgctgccaccgacgccagcgacgctgcggtgtgttccaacgccaccgcgccggctgggttcgcggccgccgccgccgcgctggtgcggaacgtcacggcggctgcgccgggcgccaaggactactactacgcggcggcatccgggcgcggcgcatacgccgcagcgcagtgctggaggtcgctcaacgccagcgcgtgcgccgcgtgcgtgggcagcgcgcgcgaccagcttgtccgcgagtgcctaccggccgcgcccgaggggtacggcctcaacgccgggtgcgtcgtcaggtactccacgcgggcgttctacctgcccgtcaacgccggcggcggcagcggcagcggcagatcgtccggtgattacattttctacctcgtgctgacctttgaatttccccgtttcacttggttataa

SEQ ID NO: 38202 - DNA, 342 bp, Zea mays
  Peptide Sequence Number=SeqID_81577
atggcgcggtccccggctgctgtgcgtgctctgcgtgcctcgacggagtccggcgcgtccgcgaaggcgctccgggtcctcgagtccaccgtgggttgcgccgagggccgtgccgcgctatgcgccaacgcggaggacgccatccctgcggtggaccgccgggcagcggacgcggctgtggcggccgagggcgggctgacgaggctgctcctcctgatgcagagcgggtgctcgccagcagcaagacagatggcgctggagctgctgaagatatacagggtgaacaccaagagctgcctcgccggctacgactccaagaccacccacatcatgccgttctga

SEQ ID NO: 38203 - DNA, 399 bp, Zea mays
  Peptide Sequence Number=SeqID_81578
atggcgggggacgccggcagcggggtggactgggagagcctggcggaggccacctccggggcaatcggctcgctcgtcagcaccaccgtgctctacccgctcgacatctgcaagaccaagttccaggccgagcttcagacgcaccagggcgcgcagaaatataggtacttcccattcatcccttccttatcgctcttctctggccgcctgatccgtgcgacgaggctcgtgtggctggctcgtcgtaggatggttttaaagctaaatgggcgggttgatgcggatttgcttagaagtgggttggaacgggttctcaggaacgccccttaccccacgctagacatgtcgtgctttttaaagtgggtcgtagatctagctacaccgtttcacacaaattag

SEQ ID NO: 38204 - DNA, 549 bp, Zea mays
  Peptide Sequence Number=SeqID_81579
atggctacaagcagcgccgacaagactgaagcgaccacgatgacagcaatgcgccgtgctgccatgaaggaaacccaaaatagcatctgcccacgaaagaatgaccttacgaattattgggcccttgggccgttcgtgaggccttttacttctttagtggacccaggggatatctatcccccacaagcccccgatctttgggttgatttagaggtaatcaactcaaagatccaaggtccaaaaaatgattccttgctgtcttctctggttttgatcactcgtccgaccaaagttcggctttgtgcttgtgccttagaggtcggcattttggattgtaagaccctggatttattgggtgcaccggaggtgcacccaatgggtgtagcccccgaccttcaaatggattttttaaggataatccgttcgaaggtcttcctttcacttgcgaaaactggcatgaggctattttgcattatgctttggaggtcagcattatgtcatcaatattttgctgctcaggtattcactgcatgctctgcacagatgtga

SEQ ID NO: 38205 - DNA, 495 bp, Zea mays
  Peptide Sequence Number=SeqID_81580
atgggggatcagatcagagaacctttgttcgtagaaatcaccatcacaatgtgttgggcaatatggatcttacgaaatggatgcaaagctttccacaagaaggaatttgctctagttattctaagagcaaaagcaaaatatcatcaacttatggggctgcaattcctcttgttttataaaaaatcaacaatgatatggagtcactacaacaccggcaccctgatggagctgttggacctgaacctccgcgagcagtgctcggaggaggatgccctccgggtgttccacgtcgggttgttgtgcacccaagcgtcaccgaaccttcggccgccgatgtggaaggtggtggagatgctcagcggcggcagggaggtgcttccccggcccacccagcctccgttcatcaacatcacggggcccaacatcaagagcgacaacttcgggtcgccgttctcgctgaaccagctctcaatgagtggggtgcaggccaggtaa

SEQ ID NO: 38206 - DNA, 981 bp, Zea mays
  Peptide Sequence Number=SeqID_81581
atggcggccaggcaggaaaggctggtgtccacggcgttcctatccagggcgcccatctcgtcgacggtgcccacgaggcgtaccagctcggacgatttggtcgccgccgccttcgcctcgccggccgcattgacgagcaacagctctgccagcctggccgcgtcgatcctcgcctccaggccgctcccgccgtgcttcacacgcgccagcgacgcggtcgaggccgccgcgtctgcggcgaggccagtggccacccgcttcttgttcgagtcgtcgatgccatccgaggccaagatcaaggctagcactctcgtggccgcctccatgccttcgacgccggtttcctcggctcttctccaaagaactgacgcgacggtctcggcgacgcggtcggcgcctggcatcgacagcttcaactcctactacgacccctcgctcaagaaggcgcggcgcgcgctgctgggcagccacggcgtgttcgtcgtggagggcgacatcaacgacggccgcctcctggccaaactcttcgacgtcgtgcccttcacccacgtgctccacctcgcggcgcaggccggcgtgcgctacgccatggagaacccggcggcgtacgtccactccaacgtcgccggcctcgtctccctcctcgaggcctgcaaggacgccgacccgcagccggccgtcgtctgggcctcctcctccttcgtctacagcctcaacgaccgcgtccccttctcggggctcagggggcgggggcatcgcgggaggtcgcgggggcacggagccggggatccggggccgccccacccaccgccctcgccgatccgccatcaacaccgatcccgtcgatggaaggtgagcggggcggccgcgttgatggcggggagcagagatcgaggagcgttgatggcggggagcgtagattgcggatcgagggtgcgtcggccgcgctgctggggctccgattcgcaggatcgacgttga

SEQ ID NO: 38207 - DNA, 129 bp, Zea mays
  Peptide Sequence Number=SeqID_81582
atggcggtcagggagatgcttgcggcctgctggatgtcccaaaagggcaagccgaaggctggacaacgcggccatcactatgactggcgcaatggcaagcgtcactacacctccggacggaggtcttga

SEQ ID NO: 38208 - DNA, 228 bp, Zea mays
  Peptide Sequence Number=SeqID_81583
atggagaatggggtgacgtcacggaagatgggcgacgagtggggacggtggcgaatgcccgcctactacagcgctgtcgccggctccacgtccatgcacgatggggtgcaggtggagcctgcaggtgctggatcagtaccaacaacaggctgggctgcgggagcggcgtttgatgaaatgatgggtgcgtgcctgcgtggagtggagacggcgacggactggaaatag

SEQ ID NO: 38209 - DNA, 765 bp, Zea mays
  Peptide Sequence Number=SeqID_81584
atgagtcggccagctctcgccgagtcacgccatgagtcggcagctgaaggagaagggtcactcggctggctgacgaagagaacgaagagacagggtcactcggcagacgaagagacagggacggcactcggccaaggaggagcttttgcggagtgccgggccaacaggcactcggcaaagggagctcccgtgagcctgaagcacaacctcaatgtcgaagaagcaaccttggccagatcgctatgccaaccgaccgtatcgcaggagcatttaatgcaagggggcctgacaccttatcctgacgcgcgctcttcagtcgacagagccgaactaagtcccgcctcgggcgccacaggaagctccgcctcgcccgaccccagggctcggcccccgtctcggcctcggaagatggactccgcctcgcccgacccccagggctcggactcagcctcggctccggaagacgacgaactccgcctcgcccgaccccagggctcggactcagcctcagctccggaagacgacgaactccgcctcgcccgaccccagggctcggactcagcctcggctccggaagacgacgaactccgcctcgcccgaccccagggctcggactcagcctcggctccggaagacgatggactccgcctcgcccgacctagggctcggaccgaccacgtcacaggaggggccatcattaccctacccctagctagctcaggctacggggaacaagaccggcgtcccatctgctcgccccggtaa

SEQ ID NO: 38210 - DNA, 222 bp, Zea mays
  Peptide Sequence Number=SeqID_81585
atgaaggataggtgggtgatagcaaagcccaaagatgaagatgatgtcaggaagaagactcttggagacgctctaaacctagcaaagaatgatgaagctagaaataagaggaaacacaagcctatggtcaaacaagacaaagacatagagaccgatgaggttctagaaaaggacttgtcgaaaccagaagcccaaggtgctgaggacgtatcccccgcttga

SEQ ID NO: 38211 - DNA, 174 bp, Zea mays
  Peptide Sequence Number=SeqID_81586
atggcggcggtgggtgcgctgcaaaggggggtgggtggcggtagtgcgctgcaaagggggcgtggggcgatggtagtgcgcatggaggcaggcacgcgtgcgaggggcacgagcttcaagggtaagcttcccggtatcttcttgggtaaggcactttttcttgagatgggttaa

SEQ ID NO: 38212 - DNA, 831 bp, Zea mays
  Peptide Sequence Number=SeqID_81587
atgaccgcgtcaaaaaaggtacgccacgtcattcgatttcgtatccttttccttttccactttctctctcttacaacagggaccgggaaacggggataccccaaaagggatccttctccgcgaaggaaacgggccccgagccccctactgatcagaggttcaaaggctggcccctcggaggggttaaacagccgcctcggagcgctcgggctccgcgcccactactggtcagaggttcgaaggccggcccctcggaagggttcaacggccgcctcaggccactcgggctccgcgcccactactgatcaggggttcgtaggctggccctcgaagggcgccataggaaactccgcttcgcccgaccctagggctcggactcatgctcagcccccggaagacgacgaactccgcttcgcccgaccccaaggctcggactcgggctcagccctggaagacgacgaactccgcttcgctcgaccccagggctcggactcgggctcagccccgaaagacgacgaactccgcttcacccgaccccagggctcggactcgggctcagccccgaaagacgacgaactccgcttcgcccgaccccagggcttggactcagccctgtcctcagccgacggtctccgcctcgcccgacccaggggctcggattcgacctcggccttggaagacagactcgacctcgacctcggaggagcctccacctcgcccaacccagggctcggaccgaccacgtcatgggagtcgccatcattaccctaccccaagctgactcaggctacggggaacaagaccggcgtcccatcgggctcgctccgctaa

SEQ ID NO: 38213 - DNA, 2229 bp, Zea mays
  Peptide Sequence Number=SeqID_81588
atggatcgcgccacgccgcgcgtttgcggccgccgcggcgtatcccaagcggcggtggaagctgcgccgtcctcctcccgcgcgcgccgccgcgataaggcgccggccgttgtcatggaccttggcgacgacgactgcggcggtggcggggccaggaagacggttggtggcgctgcaggtaggtgcgagggatccacgaaggctcctttgcctctgctgccgccgatgatggtgccggcgggagcggtggcgctgcggacacgatcgaggaggcgggcgatgctggcggcggcagtggtggaagaggcgccaacgaagaagaagaagaaggaaggagcgatcccagatgccgcggaggcgccccgtggccacgggagcaaggccgctgctacctcgatggcgacgtcgagccataagcggcgcgctgggacctcgaggtcgacgtcgagagataagcggcgcgcgcgctcgggacgtgcctcggagccagctcgcgtgggccgcgcgcgcaagcgcaaaaggaacgagttggaggcccccgctcggagagaacgtgtgaaggcgccatgtgtcagtgaaagtgatgacaacagcgggcgaggcgatgacgcttctcatgacggggatgcggagcctcgcgtcggggtcgccattggcactgatctggttaacggggatcatccggcagctaaagaggtagtggaaggtgctggtgacgaggacacaggggacggagggaacagtggcctggcatcgactgctgatgtgtttgctgaggagatggcaccctttgaagatgactacgatgatgagatgttggaggagcagcttgttggagatgtgattcgtgcttacagtaatggcagaaacttcgattcagatggagtggattgggaggcagaggatgagatggagttcaatgacgatgctgacaatagtgattttatggatgatgctgacgatagtgattttatggatgatgcttatgaaggtggcaattccaaaccaattcaaaatcatgctaagttggaaatacaagactgggtgaaccagaaagttgttttgagtggagggaggtgtgaggcgaggggcgagggggatctggaggaagaattggatgtgggaaaggaagcagatgaggaggacgtggaaccaaagagtgaagcggctccaggttctgataaaagggtcttgcagttagaaatcctaggttccgatgaggaaatcaaggtgcttgaaaatatgagtagtgccccatccaggatggcgtcagttcaatcgaagttaccaactattccatcttgtgttgcatggagaacccgatcatcatggggggtaaatcaagatagactatcgtacgatacatattttgaggaattatctgatgagccaaaagaggatgatgatgatacagaggtggaacttgatgaagttgaggatgacaacaatgacgatgacagtagtgatgcttatgataaagatgacgaagagaaggaggaagaggaagaagaggctgaaagaagaaaacttaataacaggatttgcacatccgatgaagacatgatcaatattactgttcctacatcaagatatgatatgtttaagaaaaaaaattcctcaagatatgatattgagtgggtggaggatgaagatgcaagtgttgatatgttacagccagtttcctttaagaaagatagcagctggaagcctgtggctgttggcaacgacacatttactgagcaacaaaagcgatcacgatttacttgggagcttgagaggaggaaaaagcttaagcttgagatgaagacaaatcctttgcatgagcgggatttggactcagatccgaactcatcaggttctgaccagatcagaaagtatggtttcaaaagtgatgggagtcataaagttgataggaaaaagaagcatacatcgcccaaatcgggcaagaaacccagcagcgcaatcatactaaagcggcagtctcttttgaagcttttggtagataaaatgagtggtgataaaagtttagcatcttttccatttgatcagaatcctcagcttcagtttattttcaaagaaatgcatccattggtattttcatttggagatgaagatctagtagcagctgacaggccagagcaagatgttggattggatatgttatgggctgactttgactttgctttagagtctgagaatatcggtacttattatgatgatgaggtataa

SEQ ID NO: 38214 - DNA, 324 bp, Zea mays
  Peptide Sequence Number=SeqID_81589
atgcgcggcgcgcgagccaccgccgagatctccccaccggcagcgaggggctctggatctgaccgtggctccctctcctggtgtcgtgtcacccaggaggaggcgctcgatgacttcgtcgacgacggcattgacgacctggtggtctcgctctaccagatggacctcgatcgcacgctcttcctcctccgctcctacctcctcctggagaagatcaagaagtacacgatgcatatctctaggtccgatggcctccttagtcatctctcacagcaggagcgcctggttggggcatttatcacaattgtttgtgccaccttgtga

SEQ ID NO: 38215 - DNA, 510 bp, Zea mays
  Peptide Sequence Number=SeqID_81590
atgtgtattgtcggcgcgttcgcgcaggccacggcgttgcagaacacaggagccttccagaactctgaaagaggtgccatactctcgaaacaaatagctagagtctttgctatagggctagagtctttgctagggatagcaatggtgtcgatgcatggcgatacagccgggccgagctctagccaggaagacctggcagccaccatgaagaagtgcattagcaataggcctcaggatcatccatttactcaacaacagcttccagcttccagcttgcaagactatacttgcgactccgacagctgccggcgtgaagcactggccaccgagtgctgcacgtcaacggccaatagggggcaccgtgcaggtgggcagaagcagccagcgacaacagtagggcacagggatgtatatggaccttccaaatacactaggcttttgcaagcaaccaaagatactctcagagaagaaggtagtctggctgaacggctgccccagtggaagagatga

SEQ ID NO: 38216 - DNA, 126 bp, Zea mays
  Peptide Sequence Number=SeqID_81591
atgccctgtgcattagagaagatagagaatcgccatgccctgtacaggacaattgattcattaggccctaggttggaggttgtgactgatgagttgggaagggattacttgattggtggtgtataa

SEQ ID NO: 38217 - DNA, 1035 bp, Zea mays
  Peptide Sequence Number=SeqID_81592
atgcaggcggcatgcaaccgcaccaagggggcgcaccctttcgacttcgacgcgtccagcatggaggcccaggcccacacatcatccgcgggagaaggcgcgacggtcgataaatacggccagaaatgggtcggcagtaatggcggtggcaggcgggcggaagcagcggcggctcgcgcacgcacaacggccgccccgcgaaccacccgtcctgtcgcattaactctgcggcagggcaggcggcacctttggcaggcaaagcaagcgacgcttcacctccgccatgatgaccgcgtcaaaaaagggaccgggaaaggggatactccgaaagggatccttctccgcgaaggaagcgggccccgagcccccctactgatcagaggttcgaaggctagcccctcggaagggttcaacagccgcctcagagcactcgagctccgcacccactactggtcagaggttcgaaggctggcccctcggaagggttcaacggccgcctcaggccactcgagctccgcgcccactactgatcaggggttcgtaggctggcccccgaagggttctgacagccgcctcagagcacgcagagcgagggatgaccctgggtacgttcgatacataaccaaggctcgggctatgctcccgaggctcggggctgctctcgcaaacccggctccggccaaaccgttgacagcgtcaacataccagcccgagaacttgggactcgactatgcacccgggctacggccaggctcagactcagcctcggctccggaagacgacgaactccgccttgtccgacctagggctcggactcagcctcggctccggaagacgacgaactccgcctcgcccgaccccagggctcagactcagccttggcctcagacgacggtctccgcctcgcccgacccggggctcagactcgacctcgacctcggaagacagactcgacctcggaggagcctccgcctcacccgacccagggctcgaaccgaccacgtcacaggggggccatcattaccctacccctag

SEQ ID NO: 38218 - DNA, 780 bp, Zea mays
  Peptide Sequence Number=SeqID_81593
atggggaacactcgcgtcgcttttgtcttgccgtcgttggaggaacgcaacttcgcggaagttggcagcccggctgcatcccctcgccggtggtcacccaagacggtgaccaccagttcgatggtggggagaagcaagccgggctgcgacctctgccccgccctcagcttcaaggatcttcatcatcctggctggggcggaggccggactgagccggagctctacctcccgcgtgggttcgtgggtcaccttccccctcagcattcaggggagagggcgctcaccggcctagcgggagggtcggacttcgacaacgcggggctggtcggcggcgagcgtcgtcagcttcagcgcgttgagctcgctggctcagctggctctggctcggctcccggtgccccttcccgccgcgagagcagtcatcgcgccgcgcgcaccggaggaccgcccaagacgtcgcgcgctgctagggcggcgttcgtgttcttcggctgtcctgcctttgccccgatggcttccgtcgtcggcgctgaggtggtggcggctgaagaagtcctcgtcgccgacgggatcaccgccaccatccgcgctccgggcctccggctctttggctttgatgtctggaaccctcggccgctcttcgatgagccggagccggaggcagcggtgtcagtgtggacagaggcagagttggctcgaaaagaagacttcgtcgtccggagcctggccgggccgtccactggcgggaccggcgtcggagtcgagttgtcgaggccatga

SEQ ID NO: 38219 - DNA, 747 bp, Zea mays
  Peptide Sequence Number=SeqID_81594
atgcaggcggcatgcaaccgcaccaagggggcgcaccctttcgacttcgacgcgtccagcatggaggcccaggcccacatgtcatgtaaccggcgcgccggttgctacgtgcaagaaactgcaccgccactcgcgccactaccgtgcctcctcgactgcggaaccagtaccgcgactcgaggcaaccctgcgcatgacccatcagtgccaaccgggcacattggtcacgggccagttagccgcgggagaaggcacgacggtcaatacggccagaaatgggctggcagtaatggcagtggcaggcgggcggaagcagcggtcaagttgtcagccaagctcacgtcccctcctgggacagcgagagaaccctctcccacgacgacaggcggcacctttggcaggagaagcaggcaacgcttcgctttcgccacaatgatcgcatcaaaaaaagcggccaagtccggcctcgggcgccataggaagctccgcctcgcccgaccccagggctcggactcgggctcggccccggaagacgacgaactccgcctcgcccgaccccagggctcggactcggcctcggccccgaaagacgaagaactccgcctcgcccgaccccagggctcggactcggcctcgacctcggaggacagactcgaccccgacctcggaggagccaccgtctcgcccgacccagggctcggaccaaccacgtcacaggggggccatcattaccctacccctagctag

SEQ ID NO: 38220 - DNA, 2020 bp, Zea mays
  Peptide Sequence Number=SeqID_81595
ggatcagatgcaaatactgttccttggtaaacctggagatcaaattcatgtttccatcactgtgtttgccgagaaatcagcatggccaaatgacaaaggcgtgaaaaatacactgatgtttcatgatctttatgaacaaggagtcaatgacactgaacaatctcaagatattcatcaatatggaacggtgtggaatcttattccaggggtcatcagtactatgtatgagcatcagcgtgaagcatttgaatttatgtggacaaatttagttggtgatattagacttgatgagataaagcatggagcaaaacctgatgttgttggtggatgtgttatctgtcatgctcctggaacaggaaagacacgattagctattgtgtttatccagacatacatgaaggtgtttccagactgtcggccagtgattattgcaccacgtggtatgctctttgcttgggatgaggaatttaagaaatggaatgttgatgttccttttcatatactaaacacaactgattacactggaaaagaggatcgggagatatgcaagttaataaagaaagaacataggacagaaaagttgacaagactagtcaaactgctttcatggaacaaaggtcatggtattcttggaataagttatggtctgtacacaaaactgacctctgaaaaacctggctgcacagaagaaaacaaagtaagaagcattcttcttgataaccctggcttacttgttcttgatgaaggacatacacctaggaatgaacgcagtgttatgtggaaaactctaggaaatgtgaaaactgagaagcgtataattttatccggaactccttttcagaacaattttcttgagctttacaacattctttgtctggtaaggcctagatttggtgaaatgtttttgacgaagtcaagagtaggtcgaagacattatgtctcaaaaaagcaaaaggataagttttctgataaatatgaaaagggtgtttgggcatcactgactagcaatgtaactgatgataatgcggaaaaagtaagatcaatattgaaaccatttgttcatatacataatggcaatattcttcgaactcttccaggactcagggagagtgtaattattctgaagcctcttccccttcaaaagagtatcattaaaaaggtggaaaacattggttctggtaacaacttcgaacatgaatatgtcatttctttagcttctacacacccttcccttgtaaccgccattaacatgtctgaggaggaagcttcacttattgataaacctatgcttgctaaagtgagatcaaatccatatgaaggggtaaaaacaagatttgtgatcgaagttgttcgtttgtctgaagcattaagagagaaggttttgatttttagccaatttattcagcctctagagttgataaaagagcatcttcgcaagttcttcaaatggagagaagggaaagaaattcttcaaatggatggaaagatccttccaagatatcgccaggcttccattgaagccttcaataatccaaataatgattccagggtgttacttgcatctacaagagcatgctgtgaagggattagcttgacaggtgcttcaagaattgtgcttctagatgttgtttggaacccagctgttggaaggcaagccatcagcagagcatttaggatagccaagtccggcctcgggcgccataggaagctccgcctcgtccgaccccagggctcggactcagcctcggctcccgaagacgacgaactccgcctcgcccgacccagggctcggactcagccttggctccagaagacgacgaactccgcctcgcccgaccccagggctcggactcagccttggcctcagacgacggtctccgcctcgcccgacccggggctcggactcgacctcgacctcggaagacagactcgacctcgacctcggaggagcctccgcctcgcccgacccagggctcgaaccgaccacgtcacaggggggccttcattaccctacccctag

SEQ ID NO: 38221 - DNA, 665 bp, Zea mays
  Peptide Sequence Number=SeqID_81596
atggcgccctgcacgctctgtgacgacggcggctctcagcccccttacggaagcaagaggaccggcggccacaacgtctccgtctcgccgccgacgtgtacgacgtgcaggcacgctccatcgtcggccacgctcgatctcctcatcctgctgctcgtgctcttctcgctcgccttcctgctcgcctcctcactctcgcacgtcgcgcgctcgctctccccgctgctcgccacgccacccgccgtcgccgcgctcgcccacgccaccgccgcgctgccctacttggccgcggcggccgtgctcgccgccaccgcgttcctttcttgcagccggctcccgcggcgccggtgccgcaacccgcgctgccgtggcctgcggaaggcgctggagttcgacgtccagttgcagaccgaggatgccgtgcgcgcttgtgccgggagcaccgttggcggcgccgacgcatccatgtggcgcgagatcgaggcgctgccgtggaagggcggccagggcggaaacaacccagactacgagtgccttcgcgccgagctgcgccggatggcaccgccaaacggccgagccgtgctgctcttccgcagccggtgtggttgccctgttgctaagcttgaaggatggggcgcccccaagaccaagcggcgcaacaagaa

SEQ ID NO: 38222 - DNA, 600 bp, Zea mays
  Peptide Sequence Number=SeqID_81597
atgaccgcgtcaaaaaaggctggcccctcggaggggttcaacagccgcctcagagcacgtgggctccacacgcactactggtcagaggttcgaaggccggcccctcggaagggttcaacggctgcctcaggccactcgggctccgcgcccactactgatcaggggtgggccagggttggcggcgctcaccgttgggtggaccgagtcgctaaccggctgggcctccttgtcagcgttctcttcccgaatgcaacggagtcgcgcgagattgccgccgcgcggcgcggagcgtggcgaagacccttccctcctcccaggtcggaacttcggaagttaaataggagctcccgtgacccgttctcccctcatctgccgtcatcgcacgagcgccttccccagaaacccccgccgccattgttcagaccgcggaagaaccgtgtggagatctctgggacacagggagcaaccagacagcggggaattcctcgccggaagcacttctccgccgcgggccgcactgctccagaggtggattatgtcaagacgccattgaagaagagcccgttgccgaggatcctggtgagcagcaggttgaagtag

SEQ ID NO: 38223 - DNA, 360 bp, Zea mays
  Peptide Sequence Number=SeqID_81598
atggtgaccgccggtttctgggtggggaagagcaagccgggctacgatcttggtcccaccctcagcttcaaggatgttcatcatccccgctggggtgggagccacgctgagccggcgctctaccttccgcgcgggttcgtgggtcgccctttcccgcggcgttcgggggtggaggcgctcgctggccctgcggacggcgcggacttagacaacgtggggctgatcgacggcgggcgtcgttacctccagcgtgtcggagtcgtcggccgggcttccggcggcccctcctgccggagggccttccccatggagtggggtcgttcgtacctgcggaggggggaaccggagttccgttcgtaa

SEQ ID NO: 38224 - DNA, 438 bp, Zea mays
  Peptide Sequence Number=SeqID_81599
atgaagccgtggaaggagacttctaggagttccaagattacgacgagttctaggcgtggatggctcgtcttagacacaccgcacggaagtctgtcatccccttcttaccctcccgccttgctgagcgtccgcttcgccgtcccgtggccggcgccccctgcaccaccactgggcgccccagcccctggagtagctgctggaggagacccagacgacggaggtggcgacgacagctcgagccacgacaccgacttctctgctgaccaggagccggaagggtgggttgctcgacccatcactcgcgacgctgctcgcgggtgtcacttccacgatgctctcgacaccctgctacgtcgggcacttaaccggcgtacttggcctatcgagtatcgttgtgtggtctaccaacatagtcgcggggtctacccggaccgctag

SEQ ID NO: 38225 - DNA, 348 bp, Zea mays
  Peptide Sequence Number=SeqID_81600
atggtgctggtaagtggtattctttccgtttggaaagggtacatcgggttaataacttgggttaatgctaaaacttggctttctactactagtccactacagccaaacaggatgcttgctgagtatgttgatgtgtactcacccttgctctacacaccaaaccccccccatccccaggttgtcagcattgcaaccactgctcaggagaagatgaagctgtggaaggagacttccaggagttccaagattacgacgagttctaggtgtgggttagcggcaacccccagtcggctgcctgtgaaggccgcggttatctacgtttcttttccgcactttgatttattgtaa

SEQ ID NO: 38226 - DNA, 1014 bp, Zea mays
  Peptide Sequence Number=SeqID_81601
atgagccggctcatcctctctgcgcgatgcgtgtcgtcttcaccggacttcgctgatgaccaggacccgccccagccgccgcccacactgcagccgcagggcgctccttcggctccctcagatgcgctgctaagaatggagcaagaaattttgaagttcattcatgaccctagtcgtacagagtatgaattcgatggccttccaacttcgtatctgcgtcttgctgcacatcgcctggcgcaacattacttcctgcagtccattgacataccagacaacagtttgcctgatggaactggttcacgtatcatccttcgtaagacaacattcgactgtcgactgcctgttgtccgccttgcagatattccggttaatctgccacaagaagacatctctgtggcgagagtagctattaagcagagacctcaaaagaatttccatggcatgaacagctcaagtgctcactcttctagagacaacctccaaaaaagcgttgtagaaagaaaagaggaatacaacaaggcacgagcgcagatatttaacaacagcaatagaaatcccaatgcaaccacatctgaaaacaaagaggagatggattctcggttggtattcgttggaaatgttgactatgcatgcactccagaagaagtgcagcagcactttaattcttgtggaattgttaacagagtgacaatcctgactgacaagtttgggcaaccaaaaggttttgcttatgtggaatttgttgaagttgaagctgttcaggaagctattaagttgaatgaatcagaattgcatggtcgccagctcaaggtggcactgaagaggactaacattcctgggatgaagcaaccccgcggtcgaggtttcaatcaataccggccatatgctttcctatatcttcgtgtacatgattccggctctcatcaagtgactcctccccgtcacgatgactttgcggacagatgtctcaattctagtggtggagctacgaacaacaatctgatgtcctaa

SEQ ID NO: 38227 - DNA, 222 bp, Zea mays
  Peptide Sequence Number=SeqID_81602
atggcgtgccaaggtcaccagattgcggggacgctgagggcgaaggcggggatctcgtggtggcatggaattggtgagcagatctatgtgacagcgctgggaagcacaggcagagagcgcgcacgaggatcttgtgaaatttctgagatcaagaatgttaagctcattcctcaacatgcaaaagcgggttttatccaaaggtttcgtgaaaatattcgttag

SEQ ID NO: 38228 - DNA, 339 bp, Zea mays
  Peptide Sequence Number=SeqID_81603
atggctcatgagacccctctgcccactcccgaggcccacctcgcctctggactcgacgccgaccacatcaccgccctccatgcacaggctaccggactccacaacatccgggccctcgtgtccatcgtgctggacccggcgtcctcctcactcttcggcgctatgctctcgctgaccaccgtggtgctctcgtggttccacgacaccatcaccatcgagctccaggacatcatccgcgaccagtcggacacgggccaccagtcgtggcttgctctcgaggaacagttcctcgagaaccgagacgctcgggcccttcacctcgacacccaattccactag

SEQ ID NO: 38229 - DNA, 1719 bp, Zea mays
  Peptide Sequence Number=SeqID_81604
atggcggcgcgactgccgctggggggggggggaagggcacgactgccggcagggcagagtgttgccggcgcgcggtcgccggttgggtggcgacgctgccagcaaggggccgcggttgtccgggggagggggggtggcggcgtggccagcaaggaggggcgcggccgctggtggggcagagggccgccaccggtggctagaggagggcagcggcggttggagggtgggaggaaaaagaaaatgtctaacctagctctataccatgtgggaaaccctaaccctagaatagggtgtggtgatgtattaatagacttggagttgggccagacccattatagagggggcgagaggatcctcttggagatgaagctaggcgggggcagttcaggtttcagtgcaagatccacaaatgatgaattggcattaattccattagaaccctcaacatcatcattttctattgctggagggcctacattttcaaatggtttttcatctgggattggttctagtttttcgcaagataatagctttagtcctttattaagggatggagaagatggttacaatagtctcagcaatggaactaaagatgacactcacggattgagtggattacataacttgggtaatacatgcttcatgaatagtgccatacaatccttggttcatacacctccattggtacagtactttttggaggactatacttgtgaaataaacaaggaaaatccactaggcctccagggggaacttgcaatagcatttggagagctacttagaaaactttggtcgtctggtcgaacttctattgctccacgggcatttaaatcgaaactttctcgatttgccccccagttcagtggatataatcagcatgattctcaggagctacttgcgtttctgttggatggtctgcatgaagatctgaaccgtgtaaaagagaaaccatatattgaggcaaaagatgcagatggccgcccagatgatgaatttgctgaagaatgctggaattaccataaagctcgaaatgactccataattgttgataagtttcaaggtcaatacaagtccacattgtttactcggatgattactgtaactgtattcagtggtacgggagatgttcttccaatgccttacactgtgactgtacagaaaaatggaaactgccgtgatcttactaaagcccttgctgatgtctgctgcttaaaaaattctgagacattgttgcttgcagaggtatacgaacgtcggatctaccgctacctaacaaatccaattgagggacttcatatcataaaagatgaagatatacttgttgcatacaggctccctgttggtcatgaaaaacttttgaggttggagattctgcattcgagggcagacagtggcgtcacccatggggatggagacgccgtcaacgaagatgatgcgacaaaatttggcgttatccctggagatgggcacaccgtcgtccaggatgtggtgacaaaattggcaggcgatgttgcccatagagatggggacgccggttgccaggatggcgtgatgaaggtggcatgcggcgcagcccatggagatggggacaccggttgccaggatgacgtgacaaaggtgacatgcggcgcaatccatggagatggggacaccggttgccaggacgatgccaagaaattggcaacagaagccatgggatcggatcgaaacccaagctaa

SEQ ID NO: 38230 - DNA, 168 bp, Zea mays
  Peptide Sequence Number=SeqID_81605
atggcgttcggcttgctcagcgggacgctccttggggagcacgtggacgaggagggccatctccgagtggacgaccacctacacgtcgactacaagtacaaagtagagatcgaagagcgcctcgacggtctacgcagggagaggcatggtgcgttacatggtgaataa

SEQ ID NO: 38231 - DNA, 939 bp, Zea mays
  Peptide Sequence Number=SeqID_81606
atgaaaaggaagttggatagagctactcgagcagcagtagcagcaccagctgagagagcagagcaagcctccaccacacctgcttccactgctcctgctacctctgtcactccaccagtacctccaccccatttccgagagcatgacgagacagaggttcgagcacttgctgcagatcccagactgtttgacctcaagagggctagtaccaccaggattgaccccgaccatcagtggatgaggtttcgcttcgagtgcgaggatgtcacgattcacattgctcatatcagagagctctttggtttccctcagtcgacgacgaggcttcatagtctctgctatggtatttcagaccctccttgtcgccctcatgacggagtttctcctaccatagcttacatcgcaacgctctttaggccacctttcacgaatggctcacgacgctctcttgcagatttcaccacaacaacgaagttcctctatgagctgatgaggcgcaccttcctaccacatatgggctacagagaggccaccactcacattcagctctggctcttaggtgcttttgtgtctcactcagtgttcgatgtggttgactttctgatctgtgagatagaggatacagttttggatggctacactcgactctaccagacttgtgttggtttccaccgcctggaacctaaggatgcagctcaccccagtgctctagtctccagttctacacctatggatcctttgggccccgagtggattccacaaccaccacatcatgtgccaccttgctcacacgatcacgaggccggtggttccaatgttgttcctccctctacacctcctgctattgatccagccctggcagccatccttaagtcttccacccagcagcaggctcacttggcagctgagcaggcatatcaggtagccatcctgcagtag

SEQ ID NO: 38232 - DNA, 168 bp, Zea mays
  Peptide Sequence Number=SeqID_81607
atgacgttcttggaccacagtcacttgggcgccttggccgacgcccgggcgcccatgagcttgagcagccgcggcttctttggctgtggagaaggtgtattccttgatagctatgcagaaggtggatcccttgctggtggcgtaaacagtaggtcacagagaggatga

SEQ ID NO: 38233 - DNA, 504 bp, Zea mays
  Peptide Sequence Number=SeqID_81608
atgaggctccaaagtcatcctcaccctacagcgaggtacccagtgttcctcgaacagctgcaccacgtactagggaggcgtagtgtaacctgctccctgcagtacctcccacaagatgaggggaaaaccctctcgtgtgagaccgtccgtgtgggaaagtgcgtcccctccaccagtgggtacgtgggaaatcatccgtgcgaggggtcccactcgactgtccagcccggtggcagggtggatggccaagtcactccagcaaccatgtcctccaagaaaggggctcaccgccttggcatacaatgccccactgaccccggctaccgccgtgcagtgaccgcacttgtacccaccatccgcaatgggagactacgtctcaggtcgcgtgaggagggcaatctgcggagcttgtcggcgttaggggtggacctctgggtcatcaggcgcatcgctcatcggcgggtgtcgccgtgcggtcagcaagcgccgtcgtgcacggtctga

SEQ ID NO: 38234 - DNA, 621 bp, Zea mays
  Peptide Sequence Number=SeqID_81609
atgcacgtgctgacaactttctatggatttcaccccctggagatgtcaacccaccccatcggcttgttccccgctaagaaagaggatgacccgatgtggaaggatcgggttgatcacaccaaggacgtgttggctctctaccctagacataccgctcacttgacggttcggtgcatgagtgccctatatcgtctgcaggccttgcggggtgaggcgatgtcccagcttatgggcctggtggagtctaccaagatcaccctcgataacagggaggaccttatcgtagacttgtctactgagctagtggagaaggatctccaggttgagcaaatggctaaccacatccacgagctcaacgatcaagtggaagctagggataacaccattgaggttctggaagaccagctccggaacacccagcagcagctcgaggaggcaaaccagcacttggacctgcaccatcaagagatagaggccatggaggcagatgaggccgacgaggatgtggacatcgagggaggggaggagcaagagcctgcttctagtttggatactaccggctcaactcaccctggaggaccaccttcccccgagtctagcgttgcctcttttgctcgttag

SEQ ID NO: 38235 - DNA, 756 bp, Zea mays
  Peptide Sequence Number=SeqID_81610
atggggcacaggcgtccactcggattacccatcagcagctcactggagacaccatgttcggcgccctccaagggcaacatggcgcttttcccccctcctccttgcggaaaggcgacacaggggcccgaccccggaggattcacgtctcgcccgagtgccccctcaagcaacggacacaccttcggctcgcccgaggcccagtcttcgccaagaagcaaccttggccaaatcgccacaacgactgaccgtatcgcaggagcatttaatgcaaagggctcggactcgggctcagccccggaagacgacgaactccgcctcgcccgacccagggctcggactcgggctcagccccggaagacgacgaactccgcctcgcccgacccagggctcggactcgggctcagccccggaagacgacgaactccgcctcgcccgacccagggctcggactctggctcagccccggaagacggcgaactccgcctctcccgtcctagggctcggactcaacctcaacctcggaagacagactcgacctcgacctcggaggagcctccgcctcgcccacccagggctcggaccgaccatgtcataggaggggccatcattaccctaccccttgctagctcaggctacggggaacaagaccggcgtcccatcaggctcgccccgcgctcctccgacggccacgacatcacacgaacagggtgccaaaacctctccggctaccacgacggcatgtacttagggcactag

SEQ ID NO: 38236 - DNA, 99 bp, Zea mays
  Peptide Sequence Number=SeqID_81611
atggccggagggtggtcggatggagaagacgccttgtgcaccattggatcttcggccgacggaggagatttgatcccaaggttaaaatgttgtatttag

SEQ ID NO: 38237 - DNA, 783 bp, Zea mays
  Peptide Sequence Number=SeqID_81612
atgcgcgacgagtttgttgaggacacagctgacatgagtggcccacacgccagcaaagagaaaaccgcgcgaagactgaaacctgagctgcgggacccacccgtcaacgattcgtggcgcgaggagtggaagcggatgcgcaccgtgactgccgagtgctcccaacacgccagtgagggggtgagggcggacacgagggagagactgttcggtggtccccccatgtcggtgcctccttccgtccaggaccgcgcgggctcgagggagggctcgacgagcagggggttcggtgcgcagggagggggaaggggcgaccgagcaggggtagtggtggtcgtcggctttggctccgacgtggacgtggacgacggggcgcgggcggcaaagctccggcgcggcggcggcgaacagcagcgcgagtcgagggtgcgccgcgcgcctgggcggcggtggcgtggccagggagaagaagccgcgggcccagggcgggcccagggcgggcccacgtgcgcggacggtccgcggcacagggccagacggttcgtgacctgggcgcaagagcagatcccccctttgcatgcttccggacggtctgtgcctgaggccggacggtccgcgatagcgcagagggtcttcttctccgcgaagaaccctagaactcacctcgggagagatcccttcgaggggaagagttccaaggcgttgctccaggtcggcaggccgcccggtgctcctctaatcggcgtagagtcgaagagatattgttgtggaagactaaattag

SEQ ID NO: 38238 - DNA, 273 bp, Zea mays
  Peptide Sequence Number=SeqID_81613
atggtgcgagggagctcgccatgggtctcggcgtccggctgccatgctggccgtgtggatcaaagggaggcgcaggggccagcggccatggggcggctgcgcaccagagaaggcgcgcgtgagtgcggcaccatgaccacacggattggagagactgcacgatgggacccgcctggcggtgaaggtggcaaagttgggctggcgctcaggaatttggcccgcggcgtggatgaaaagggggtgcgcgcggtaatgggccagatgggccactag

SEQ ID NO: 38239 - DNA, 1827 bp, Zea mays
  Peptide Sequence Number=SeqID_81614
atggtgaaggcacgaatgacgacgacggacgtggcggcggaggtgaagtgcctccgccgcctcatcggcatgcgcctagccaacgtctacgacatcacccccaagacataccttttcaagctgatgaacagcagtgggattactgaatcaggggaaagcgagaaggtcttgttgctcatggagagtggtgtcaggttccacaccacccaatacgttcgtgacaagagtaccaccccttcaggtttcactctgaaactacgaaagcacattcgtaacaagagacttgaagatgtccgtatgctcggatatgacaggattatccttttccaatttgggcttggtagtaatgcacatttcataattttagagctatatgcacaaggaaacattcttctcacggattcagaatacacagtattgacactactccgttctcacagagatgacaacaaaggattggccatcatgtcacgtcatcgctatccagtagaagcttgccgtgtttttggcaggactgactttgcaaagttaaaggacatgttgacaaagcctgataaggctgatgataaagaggaaattacgtctggatcaaccgatgctcaggaaacttctcaatccaccaatgatgaagtgttggtaactgaaatatctgaaaaatcactgagtaaaaaagaaaagaaggctgctgcaaaagctaagcagtttggttcaaatgcaaaagtaaacaatggtgctcaatccaataaagctactctgaagacaattcttggtgaggcactggcttatggccctgcactagcagagcatatcatattggatgctggtttggttccaagtacaaaggttgggaaagacccagagagcactatcaatgacagcactgttcagtctctaatggaatctattacaaggtttgaggactggcttgtagatattatatccggccaaaggattcctgagggttatattctcatgcaaaataagatgaccgcaaagaacatcacacccttggaagaggcttcgattaatcataagatatatgatgaatattgccctgttctgttgaatcaattcaagtcaagggaatataatgaatttgcgacatttgatgctgcattagacgagttctacagcaaaatagaaagtcaaaaggtgaatcaacagcagaaagcaaaagaggaatctgcagctcagaggctgaacaaaataaaattggatcaggagaatcgtgtgcatacattgaggaaggaagtggaccattgtgtcaaaatggcagaattaattgaatacaatttagaggatgtagatgcagcaattttggctgtgcgtgtttctcttgcaaatgaaatgagttgggaagctcttactcgcatgattaaagaggaaagaaaggctggaaacccagtagcaggacttatcgacaaactaaattttgaaagaaattgtatcactctactcttgagcaataatcttgatgacatggatgaggatgaaaaaactgcacctgtggagaaggtagaggttgatatagcactttctgcacatgcaaatgcaagacggtggtatgaaatgaagaagaaacaggaaagtaaacaagagaagactatcacagctcatgataaggcgtttaaagcagctgagaagaagacacgccttcagcttgctcaggaaaaaacagtagccgcaatcactcatatgcgcaaagttcactggtttgagaaattcaattggttcatcagcagtgaaaactacttgataatcagtggccgagatgctcaacaaaacgagttgattgtgaagcgctatatgtccaaaggagatctgtaa

SEQ ID NO: 38240 - DNA, 495 bp, Zea mays
  Peptide Sequence Number=SeqID_81615
atgtctgcaagacgggtgagacgttcctggaaaggcgactctacgttgtctggagacaccccgggtgacctgccgacccagagcaccctaaggtcaggggcgagatatagatcctacaaggagaagaaaacgaccctacgccatcacggactgtccggacaacacgcaagaaaggcgtcgcttctgccgccaagtcgtggaccgtccggcccagagccgcggtcagtccgcaccctcgcagcgagcatcgctaggcgacccggggacccatcacagaccgccgccattgttcacctcgcggagccaaacccaagacctatcagatcagttgcaatgaccaatcccaaagatcacaacaacgttgtcctagacattaacacagggctgactaactcgccggccgatgaggatgagaaattagaagcccacatgaaaaggctggacgaggaattccaacgacaacaggctaatataagcaaggtggcggaaaagtga

SEQ ID NO: 38241 - DNA, 447 bp, Zea mays
  Peptide Sequence Number=SeqID_81616
atgtataaatacagcggctcctctggttccggagctaccaatattggtagggacaccaagtgctacttcaactcctggaagccttgctccgcctcatcggtccaggagaagggcccggacttctgcagcaacttgaagaagggcagcgctctctcagccagcctcgaaatgaagcggctaagggcggctaatgatcctgtaagcttctggacgtccttgactcaggccgggggccttattgcctcgatcgctctgatcttctccgggtttgcttcaatgccccggtacgaaaccaggaatcccagcaacttcccagcggaaacgccaaaaacgcatttgtccgggttcagatttgtgcgggttgcccgtagctcgtcgaagaccagggttaagtcttccactagggtcgaccctctcttagtcttgaccatgatgtcgtcgacgtag

SEQ ID NO: 38242 - DNA, 834 bp, Zea mays
  Peptide Sequence Number=SeqID_81617
atggccgccccacgaatcgcccgtcccgtcgcattaactcctcggcagggcaagcgacgcctttggcaggcgaagcgggcgtcgtttcacctccgccataatgaccacgtcaaaaaagggaccgggaaaggggatattccgaaagggatccttctccgcgaaggaagcgggccccgagccctcctactgatcaggggttcgaaggctggcccctcggaagggggttcgaaggctggcccctcggaagggttcgacagccgccccagagcacgcagagcgagggatgactctgggtacgtccgttacatggctgaggctcgggctacactcccgagaggctcggtgataggaacagaggtgcccgatcttccgtcagcctcaggcgcaacaggaagctccgcctcgctcgaccttgggcctcggcctcaggaggaggtcttcgcctcgcccgaccctagggctcggcccccagctcggcctcagaaggtggtctccgcctcgcccgacctcagggctcagcctcaacctcgacctcggaatcaaatcaatctggtgctcaatcccatgaatgggaggaagtcctggaggctgagaactaagaacatgttgcaccatgatgcttcgaaggttcgccgtagcatcagcaccaatcatggcatcatcattagcagcaacatcactggagtcatcatcgtcaccctcaccgtcggaagcactaatgtagccatcatccgtagcaatgtgctagtgaattctgtttcttggcgggtacctgcaaaagaagtttaccaacatgtgcagcaggtgtcgaggaaggtgtatgactcgaggcag

SEQ ID NO: 38243 - DNA, 435 bp, Zea mays
  Peptide Sequence Number=SeqID_81618
atgcggtggaaaggtagagccacgcgacacaaggctgagaggcggcggtcaccggcgtacttatcggatttcgccgcggtgaacatgccccgttctcgttctcgtggcgagaacgagagcgaggacctgccgttgcgctttggggcagccgccgctcgctggtgcggtgttggtgggcaggtggtcgctgtcgtcggtgctgagatggtggcagccggagaaggtttctccgccgacgagaccgtcggcgccacctgcagtcggacctctagctctttggctttgacggcttgtcctcgtccctcgtacagggacgtgggcgagggccttcttacagcagcgtttgccatgaggtcatcgctgctgctatttagtcgcccgaggcggaggtcgttgtcgcgccgttggtgcatcggtcaccggcgagccacctag

SEQ ID NO: 38244 - DNA, 804 bp, Zea mays
  Peptide Sequence Number=SeqID_81619
atggcatcatgctctaacccagcaatgacactatcggatgtgccccctctcactgcatatagggatgctctggggaaccttccattggtggagtgttgccattgtagcaatatgatgattggtcaggtttcatacaagaaccatagctttagggagaggttctacaaatgtccaatattcaagcatttcttctattgggaggaacaatatgtggaatactcgatcaccaaatcgaagcttccaccttgcttcttaaagttaggcattgcacctatgtgtccactactatgggtcatgttcaaggacatagcggaaggagaagcaacccgtcttgaagagatcgacacactagaagaagaatggctcaatatcgtgattcagttggcacggtaccagcagtccctacgatgttaccatgatagcaaggatacaagcgagagaagggcagcacaagttatctccttcctgggaggggccttacattgtcacagagcacgagccgcaaagactcatgagcatgattcaggtcaaggcttcgtctactcaagggagcaatctcgcctcgcccgagcccagcctcgggtaggaactgaagtcctggacgaagttacgtctcgcccgagggcctcctcaggcagtgggcacaccctcggcaagcccgaggcccagctcaggcaggcttcgtcgagaagcaaccttggccaaatcgcctcacccaccgaccgcatcgtaggcgcattcaatgcgaggatcgccagacaccttatcctgacacacgtgcctcagtcggcaaggttgaagtga

SEQ ID NO: 38245 - DNA, 132 bp, Zea mays
  Peptide Sequence Number=SeqID_81620
atggtctcggtcaccatcctcgcctctaaatccgccagcgctagggagggcgccgcgccacccagccagtacttgaaaggcgtttgtggttattcagagatccttaacatttgttcagatgtggaaatgtag

SEQ ID NO: 38246 - DNA, 585 bp, Zea mays
  Peptide Sequence Number=SeqID_81621
atgacgccacgcacgaggagaactgcgcgcaagcatactggcccaattggtgtgccatgtcatcaactggccctaagacacgaggatagcagtagtgggagtaatgatccgatcggggatcttgaagcgcaagtgaatcggctccaagcggaactccgccgcaggactgacatatgggtcacagatggcgacagaatcaatgaattgagaagtgacgttcgccgcctgcgagatcagctcgcggaccgagatttagcgctcgactgggtagttcaatctcattcgcttgcctgggccaaggaggcaaaagctcaagctcgagtagaagagctcagctcggccattgatgacctgcaggcttattgcaatactctacatgaagaagttcatgtactgtattcgcaattgcaccccagtgaacctgcggatcctgtcgggacggaagtcggaccttctcatgtggcgggagaagcttttggtggcgagttggaccttttcaggccccctccctctatgaggttggtcgatgagtggtctcccacgcccgacgacgaggctgccaggagcaacaggaagcaggagtag

SEQ ID NO: 38247 - DNA, 1203 bp, Zea mays
  Peptide Sequence Number=SeqID_81622
atgaacaacaacactggcattcaaagtgctgttacaaacggaactccggttccacctccgcaggtacgaacaaccccactcgatgggggagggcctgcggagaaacagaagaccgacgaacggcgcgccgtcgcccgctccagcagcagcgacgacgacgacttctgctccggggggccgaacagcggcagcactgacctcagggcggatgctgctgccaagaggcccccgcccatgcccaaactcgtgaggcaaggacgggcagaaggccatagagttggaggtcggtccgtggccggccctggctatctcgtcggcggaataacctcttccagctgtcgtggcagacgccggcgcagcgagcggctccaaagccactcgcgtccaagagccaggcacggtgcagctgccggcgccacggacgacgaccgcccttccctccgatcattgagtgaaggagcgggccaccgcccacgcaggggccgaccccaactcggcacactctcctccccagccctggtgatgaaaatccttgaggctgagggaggggcagaggtcgcagccccggctcgctttcccccaccatcaagctggaggtcaccatcttgggtgaccgccggcggaggggtgcagccgagctgcatgatgaaaatccttgaagccgaacgatggctgaaagaccaacgggcaaaagaggagggcagccatgcaggcggcatgcaaccgcgccaagtgggcgcgcttctccgactcccaacacgcccagcctggaggcccaggcccacgcgtcatgcaaccggcgcgccgactgcttcgtgcatgcaactgcaccgccacttgcgccaccaccgcgcctcctcgactgcggaaccaataccgcgactcgaggcgacccagcgcacgacccagcagcgccagcctggcgcggcggtcagtgcggccaaaaatgggccggcagtaatgacggtggcaggcgggcaggagcagcagtcacgtcgtcagccaagctcacatcccatccaggggcagcgagagaaccctctctcacggcgtgaagacaacgcgcccgtgttccgttcctcgaacggctcgcgcacgcgcaacgaccgccccgccaaccactcgccccgtcgcattaactccacggcgggacaggcggcgcctctggcaggagaagcgggcgacgcttcgccttcgccataa

SEQ ID NO: 38248 - DNA, 1806 bp, Zea mays
  Peptide Sequence Number=SeqID_81623
atggccttcgtgcttcaggtttgccacagcaaagcatgggattcaaaaattgttacaagtgcttggtgggtgtatccacatcaagttagcaagacagctcctactggcgagtaccttactgttggtagttttatgatccgtggcaagaaaaattttcttccacctcacccccttgttatgggctttggtatactcttccgtttggacgagagctccctagcatctcatttgaatgaaaggagggttaggggtgaagatgaggccctccatgaaatggaagcagagtctcgcaagaagcaaagtaaccctgaatctgatgaagatattggtagtgaaggtgcaaataaggaaactcatgaagatgaatcaaacgggcaaactacaaacattcaacaaaacaatgatcttgagcttcctgatctgtctagcaacattggtactgccaactcatctgaactccttcctgaaatccaagctgaggaaaccttggacaatggaagttccattcttaaggaagaaacaatcgaagcttctgtttcatctcaacttgatgatctgctagataagactctttgccttggccctgcaaaggtgtcaggtaaaagctctctgcttaccagcatcccttcaagtttagcagaagatgatgatgatcttgaagtgaaaaggccaactataagagacaaaccatacatatcgaaagcagagagaagaaaattgaagaagggccaagttaatgatgaaactgctactgattctcaaaatggtgaagctgtagaaacaccaggtacatcaaagcaagaaaagggaaaggcagagacaaaggctactgattctaaagcaagtcagccagatacttcacagcaagaaaaaggaaaggcaaacacaaaggctactggttctaaattaagccagccaggtaattcacaacaagaaaaaggcaagggaagcactcacgctggtaacgctaaagtaagccgtggacagaaagggaagcttaagaagattaaagagaaatatgcagagcaggatgaagaagaaagagagatccgtatggcattgctcgcgtttgaaacatttacaccctgtactcttccaggtgaagatgattcgtcaaaaatatgttataaatgcaaaaaggctggacatctttctcgcgattgcccagaaagcacatctgaggtggaccgaaatgatggcagtattagtagaagcagagacgatacgggtaccaatactgctcctgctggtggcaacagtcctatggacgaagacgatgttcaagaaattggtgatgaagagaaagaaaagttgattgacttggactacttaactggaaacccactaccaaatgatattttgctatatgctgtacctgtgtgtgccccttacaacgcattgcagacatacaaatatcgtgtaaagattaccccaggcactgcaaagaaagggaaagctgcaaaaaccgcgatgagcttgttcctgcacacacctgatgctaccaaccgtgagaaggagctcatgaaggcatgcacagaccctgagctggtggctgcaatcgtcgggaatgccaagatcacagcgcctggcctcactcaactgaagcagaaacagaagcagaaggggaagaaaaagtctgtggatgttgtggtttgtcagttgtcgctcgaggcgcatttgggggtatatgcagcctgtcagggagtacacccctttggcgtcacactggtgaggccagagcgacaggcacgcagtaggggacccaagctgcacgtctatgatgcaattgcgatatacagctcataa

SEQ ID NO: 38249 - DNA, 492 bp, Zea mays
  Peptide Sequence Number=SeqID_81624
atgtcaagtgagcaaggatcaggtcgttacttccttagtagcgcgctacagcggcgcccgaatgcagtgaaaatgtgcaaggatctttacatcatcgatgggtgtgaaggtgtactgccccaagtagaccacgatgggagtgctaacgaactccatggcatggtttcgaggcggttcgtggaggttttgagtatggtagtaggaatcagaagggagaggaagtcttgggactttgacgtagcttttgacctattgataaccaacactttatttaggaagagagaatctcatttaatgacctatagtagtgccaacactctatgcgcgcccgtagggataaataagcaagattgcgagaataaagcggtagaaattgaaaggcgagatgtcacaacccttaaaggaggcgggcacttgaaaggaagatggcgcaaacaacatatgagagaagatggcagcctgcattctaaaggtggcctcaaaggtgcgtag

SEQ ID NO: 38250 - DNA, 462 bp, Zea mays
  Peptide Sequence Number=SeqID_81625
atgaccgggaaaaagaccacgacttctctatggaggatgaggaagaggcgggcttcctctgacggtggcactccaaagaaagccaaggtggtggtggaggatgaggaagaggcggggttggaggatgaggaagaggcgactgtgacactatccatggagaaggacgcgctggagtgcgacatctgctgcctacccttccagtccgaagttttcatggcaagtcagattaccatgcatgaggaggtggatctaagggctatagagcgagccttaactaagtcttggcttggcggtggggcttcggtctttgggtcttcgtcgatgcatctgtccctgctttcgtcggtcggtctgtccggtgctctctccgtccatccgtttggtgctctcttcacccgtctggtgcccgaccgcctccttttatcggccaaggaggggatcgaccatcagtggctttcttga

SEQ ID NO: 38251 - DNA, 336 bp, Zea mays
  Peptide Sequence Number=SeqID_81626
atgcccacaaggcgaagtcgtggtcttcgaaagtttgtttgttgctggacttcgcctaacgtgtcaccagttttgattgatgtgcttgagaagttcaaggttcaaattcatcaattaacgttgaatgccatggtggccctgaccaagtttgtctgggcgacgaccaccttcggcgagactacgctagttgaggtcttcgctactgcttgcactggcagaagaggtatgcaggtgttgttgacgatcagtttgggagatgcacttttactccgaagacggggaagactaagagaaggtggtggagttagcccctgcatgaagaacaagtgggagtga

SEQ ID NO: 38252 - DNA, 624 bp, Zea mays
  Peptide Sequence Number=SeqID_81627
atggtgatctcgcggctcgaaatttatagcccagaagccgaatcgcaaccaacatccccgaattccatcaacccaccgcgatatgcgccctacttctcgaaggaatccgttacaaggtggaagaatcagctggccgatatggcccacgtgccaaaaggcaaccagaatgtgcatatatggttaagtggggctgacccgtggcacggaatgtgccggatggtgttacattctacattcgatgtccttagagcaagggctgtcctcgacccaacgttatgtcttcatttgattttgaagcttttctgtgttacctgtagtggtagagatctggtggaagagtacttgccatgtgtgatctggcaattgagtcgacggtggtctgtcacgccagttgcccgaagggacttcgatggctttctgaagccaattctgggtcctgctttctctgttgatcttggtgatcgttcacgagatgtttttatggtggagactgaaaaggaggtagagtacttggtgggtcttgttcctgagcacgaggtagagaatggtatcaagctgagtgggggcaaggtccggcagaatcgtgtgtttagtcagatgaggatcatgtatgaagcgcaatag

SEQ ID NO: 38253 - DNA, 564 bp, Zea mays
  Peptide Sequence Number=SeqID_81628
atggctgcatgtattgatcttacttatggaaaggctgtcagcacagccttatctgtggaggccaaatatgcaaattctggaaagactaagggattcggtggtgagcggccaaatcagggccaggcgaagaaaccacggtttgtgattcgaccctcaaaccaaaatcgccctttttctcgtccaccttcatttcccttcaagcagcctattattatccgccccaacaatgcccccactaccccaaaacagccgggtgccccaggcacacgattccctgcactgccaagttcttcaactggatgttttaactgtggcaaatctgggcattttattaaagattgtccctatccaaggcaaaatcaggctaataatcagcaaggatcgggaaattcagctccaggcaagggaagtacttcgggcaagaataccaagaaaacggggcgagtatattatacgcaagtggctaccacaccggagggagagccggtgatgatggggccaggatatagatgtaattttggcaatgaattggctaacccaatacaaggcaattcccaccactga

SEQ ID NO: 38254 - DNA, 252 bp, Zea mays
  Peptide Sequence Number=SeqID_81629
atgggcggcggcgacagccatgctcgaacaaaagagggaggcgtgtacgacgccgaaggggctagtcacgcatgcaccgcgatggaggacgtcggtgtcgttgggggcgacgccgagaaggggctcacgcccaaccacgcatgtgctgaaggggacgacaccggcgagggggaacgaggtcacacccacgtcgtggagggaggcagcggcatcctacgcagtaccgggaagatagggttgcgcctgtgttga

SEQ ID NO: 38255 - DNA, 180 bp, Zea mays
  Peptide Sequence Number=SeqID_81630
atggactcaccgcctcgatgcgattgtggagatcgtgttgtcatcgacgaagacattgtgaagcacttcgtgtgtccgaacattgattatctatacgggtggcgtaagtgtcgtttcagagagtggttgtatggtcctttgtcccattggccagaggcagagagattagatgtggcataa

SEQ ID NO: 38256 - DNA, 798 bp, Zea mays
  Peptide Sequence Number=SeqID_81631
atggaagccgacgaggcctcggcgccgcctcccccgccgtggatgcagaacaagtcggccgcggccatcgaggcctcgtcgggcccgctttccgccgcggcctcccgcctctccgcccgctcccgtgcgctcccctcgtcccgcgacttccacttctacaacaacttcccggcattcaaatccccagtcggcgctgcggccgcgaaggccgacgcgtccctcggcgtgctcggcggggcttcgattctcccgacgcggcagcagccgttccccgtgggcggcgacctcgacgacgcgcacgactggctcgtcgccctcaacgacgacttgctcgagcggttcggcgcctccaccgacgagttcaagaccctgcggcggaaggaggagacttccgggcggagggcggcgccgcaggctggggacgggttccaagtggtgtgcgggaagaagaaaaagaaggtgggcgatggtggcgaggaacgcgtcggcagagttgaggctttcggaggttttggctctgtgaggatggtcaccaaggacaaggcggccgcgccgggggtgaaggcgaaggtgcccttccacatccgcaccatcccaaggccccaggatgtgtattgtattgtggtggacaactccagcaagccgttcgagcatatcttgcttgatcgcagcgaggatggcactcgggtcgtgcacccattgcgcccttcacacccacgagtgcgcgccacgcacaagccgcacgccgtcctgggcgccgactctgtccagcctcctgctcgagcgctgaacctctaa

SEQ ID NO: 38257 - DNA, 84 bp, Zea mays
  Peptide Sequence Number=SeqID_81632
atggaggcacaagatcttcgatgtattagagcaagggataaggacaaggtgactgagggtgttggagctcatggacaactttag

SEQ ID NO: 38258 - DNA, 1380 bp, Zea mays
  Peptide Sequence Number=SeqID_81633
atggggctgagcagcatccggcgggaggtgctggtctccgccgtcttcacggcgctcctcgtggcctccatcctcctcctcccctcgctcctcctaacgggcgctgggcccatcaggtggccgtccctgtccccgtcgaaggatgccggcatcggcgaggaggaggagcagcaggcgcggtaccccgtgacgttcgcgtacctgatctcggcgtcgacgggggacgcgtcccgcgccgcgcggctgctggcggcgctgtaccacccgggcaacagctacctgctgcacctggaccgggaggcccccgcggaggagcaccggcgtctggcggagctggtgtccgggcgcggcgtgtacgcgcgcgcgggcaacgtgtggatcgtgggcaggcccaacctggtaacctaccgtggccccaccatgctgaccaccacgctgcacgccgtcgccgtgctgctccgcctccgccgccgctgggactggttcatcaacctcagcgcctccgactacccgctcgtcacccaggacgatttgatggaggcgttcgccgggctgcccagggacctcaacttcatccagcacacgagccacctgggctggaagataaagaagcgggcgcggccggtgatcctggacacggcgctgtacgaggacgggagggcggagctgatccgcccggtgaacatctccaccaacctcaggaggctgcccacggcattcaagctcttcacaggctcgccaatccaggcagagaccattgcggttggcaatggcaaagcaaaacacgcacgcatccgcccacccatcctgtcgcgggcgatgacgacgctgtcgcgtgcagggtcggcgtggacgatgctgtcgcgggcgttcgcggagtacgtgacgatggggtgggacgacaacctgccgcggacgctgctgctgtaccacgccaacatcgtctcctcgcccgagttctacttccagacggtggcctgcaactcgcgccggttccgcaacgccacggtcaaccacgacctgcacttcatccgctgggacaccccgcccaagcagcacccgctctacctcaccgccagggactaccgccggatgctgctcagcggggccgccttcgcgcgcaagttcagggacggcgaccccgtgctggaccgcatcgacagggacatcctccgccgccgggaccccgccgcccacttcgcctacggcggctggtgctccgaggccggcgaccaaaacggcggcgccgcgctctgctccaacccgcaggagcccgggaggcgcggggccgtcaagcccggcgccgggtccaggcggctcaaggccatgctcaggaagacgctgtcgccgaggaatttcaggaggcagcagtgtaggtag

SEQ ID NO: 38259 - DNA, 255 bp, Zea mays
  Peptide Sequence Number=SeqID_81634
atggagaaggtgaggaggtgtgggaccgcggcgacgacaaaggctcgagacggcggcgtatggctaagaggcgaccacatggagaagaggaggaggtgtgggaccgcggcgacgacaaaggctcgaggcggtggcatatggctaagaggcggcggcatggagaaaaggagccggtgcggggaagaggagttggctcctgcagcaatccaaacagctgcaacagtgtcggcttgtagccagccgaacacgccctaa

SEQ ID NO: 38260 - DNA, 351 bp, Zea mays
  Peptide Sequence Number=SeqID_81635
atgtcccaagggcacatttccctttcaaataggcataaggcaaaggacataagtaccataaaggatggagttaagacaggacctgcaaatggaagagaagagggtacttctaagggtcatacaggatggaattgggatagaacctgtaaggcgacaaggagtgaaaagaaatcaagagagataggtaaatcacagctcccaaactgggttgaaagaaaggggaggcttttaaaggatgcgttcaagtcttgtgtgcgttgctcattccccctttgctctgtgttctttgtgaacttcaattgtaagggcgagaggctccaagttgtggagattcctcgcaaacgggattga

SEQ ID NO: 38261 - DNA, 336 bp, Zea mays
  Peptide Sequence Number=SeqID_81636
atggcctgggcgttggccgcgacagatgcctgcagtgacttgagagcctcggcaaaggccttgaagtcattggaatcgcccatggctggaacgcaggacgccatagaggacgttggtgaggttggtgctgcggctgggggtggtggtgaggtggtggcagctggtgtagtggtggactgggaagaggatcaccgggatcgtgatagcaggttgtcaagggcattaagccctcgagcagctggaccacggctacgtaactcgtatccgtcgtccgtcttctccggtgaggtattcctccgccgtaggcttagagagtatagggagatgggagattaa

SEQ ID NO: 38262 - DNA, 1617 bp, Zea mays
  Peptide Sequence Number=SeqID_81637
gtcgatttggaacacaaccattataggtcgtttcagggtttgacatgcttgatgcagatttcaacaagaacagaggactttattgttgacactcttaagcttcgtaaatatcttggtgattatctaagagagtttttcagagatccaaccaagaaaaaggtaatgcatggtgcaggtcgtgatataatatggcttcaacgagacttcagcatatatgtgtgcaacctttttgacacaggccaggtttgcaagcgcagcaacgaaatttgcttgcaactgtatgagaaggagcagctgactgatacatcatatctacatatacatgggttgaaagaaaacgagctgaatgcaacgcagctgtcagttctttccagtctatatcgatggagagatggcattgcccgtgctgaggatgagagcactggctatatattacccaataagactctacttgagatagcaaaggagatgcctgtgacaagtgggaagttgaaaagaatgattaaatcaagaaattcgattttggaacgaaatctcaaccatgttattaacaatataagggatgccatagcagcttctggtgcttttgaaagtatagtggagcagctgaagaagggaaaactggaagagttaacattggcagatgtgaagaacagcagtgaggacactgaaatgattcctgctgttgatgttgataacattgaagatccgagtgatgaatctgctgtagttcctgcagtgattacaaatgtcggtgctgctccctgtattacaagcgaagcttccttgggtaatatgcatttagaggaccctgtgcctaaaacaaaggactcgggtgcttcatcagggtttactggactgacagacaacaaaaagctgagcaatgaccagcagcaagcagcaaaggctactgttcaagtatcaaagaggcctacagcttttggagctctgtttggaaaggcagctgctggaagaaggccagatcttttcctaggattttcaaatgttcagggtaagactaaggtggacaagataacgtcttccgtggtacttccttttcatcatttctcaggtggtgcaaaactttcatcagccgcccttccagcgaaagaatcgttgcattctgaaccagacagcatccaacacagtgatccagcttgtcagttggaagaagtgatacagttggacatgggaacagacgagcaacaaccaccagaaaatggcaacgaggatgatggacactgtgagactgaagacacggagatgtcaaagtccccttcaggtgacccgtctgttaccgagcaacgattccgatcactcaacgaagaaagaaacgttaagcagaaccagaagacacctcgagaattcgaatttagtgttccggtggtgccttttgattatgccgaagccagaaagaatctcgtgtctagtttgcctaaagctgagaggagaaaggacgatgccgttgccagggctataaatacagacgctggagataagcagaggggttcaaaaaagccaccaggtgggggagagaacgagggaaatttccagcatccacgaagacggcaggctttcccgccttcaggcaatagaaatgctacgtatcaccagtag

SEQ ID NO: 38263 - DNA, 1194 bp, Zea mays
  Peptide Sequence Number=SeqID_81638
atggctgaaaggtaccaactcctgcggagttgcgttcctccaacgatgaggcggaaagacggcgggtatcccccatccgggggcttggaaggtggaaagacacgatgcataagggagcgcgaagacatggtcgccttccaagggggtcaccctccttttaaaggcgactatccctacttgcgtccccagccgtcacgggctgagtcttctccaacacgctccaaggccctcccctgcggcgtgggggctgggtcccacatgtcatgcaagccggctcagagcagaagaagccaaaccgccgtgcgcggcggtgcctctggcaggagaagcaggcgacacttcgccttcgccgtaataaccgcgccaaaaaagggaccgggaaagggggataccccgaaaaggatccttccctgtgaaggaaccaggctccgagccaccctactgatcagaggttcgaaggccggccccccggaagggttcgacagccgcctcagatcgcgtgggccctacacccactactggtcagaggttcgaaggtcggcccctcggaagggttccacggccgcctcaggctactcgggctcccgaaggctggcccccgaagggttcacagccgcctcagacgccgagcgagggatgaccatgggtaccctaggacatttccgagaccagcgggagcgatcttgtaacggaatcccatcagagggaggcatcgagccctcggaccccgtcgccaggggaccgggtccggtagatcacacgcagaggctcgggggctgctctcgcaaacccggctccagccaaaccgttgccagcgtcaacataccagcccgagaacttgggacccgaccgtacacccgggctacggccagctcgcatgagggaacaaccagaccagccgaagcattacgcaaggcattaagacctcaaaggagtaaaaccactcctccgaggcctcgggggctacacccggcgggtgcgctcgcgcgcacccaccggaacaaaatgcaaccgagaaaggctggtccccttgcaaaaaagtgcgacgaaagcctccaagcgagtgctcacactcccttcgaggctcgggggctactgtcggggaccataattaggggtaccctcaaggctcctaattctcagctggtaacccccatcagcataaagctgcaaaggcctgatgggtgcaactaa

SEQ ID NO: 38264 - DNA, 897 bp, Zea mays
  Peptide Sequence Number=SeqID_81639
atggttgccatccaagggggtcaccctccttttaaaggcaactctccccacttgcgtcctcagccgtcgcggactgagtcttcaccaacacgctccaaggtcctctccctacgacacgggggctgggtcccatgcgtcatgcaagctggcccaggacagaaggagccaaaaccgccgcgcgcgatgcgcgcaactgcccagcagttacaagccttcctccactatcgttcggaccagcgggtgaaagggcggaccgccatgcaggcggcatgcaaccgcaccaagggggcacaccctttggacttcgacgcgttcagcatggaggcccaggcccacacgtcatgcgggcagaagcagcagtcaagtcgtcagcaagctcacgccccctcctgggacagcgagagaaccctctcccacggcgacaggtggcacctttggcaggcgaagcaggcgacacttcacctccgccataatgatcgcgtcaaaaaagggactaggaaaggggatactctgaaagggatccttcttcgcgaaggaagcgggccccaagcccccctactgatcagaggttcgaaggctggcccctcggaagggttcaacagccgcctcagagcactcgggctccgcgcccactactggtcagaggttcgaaggccgccccctcggaagggttcaacggtcgccttaggccactcgggctccgcacccactactgatcaggggttcgtaggctggcccccgaagggttctgacagccgcctcagagcacgcagagcgagggatgatcctgggtacgttcgatacataaccaaggctcgggctatgctcccaaggactgactggcagactggcagtgacagaggggaacagtgcagaaaccggttgaaccggttttag

SEQ ID NO: 38265 - DNA, 546 bp, Zea mays
  Peptide Sequence Number=SeqID_81640
atgaactgcgaactgtccggagctgagtcaagtaccgtctggcaccatgcacggactataatgcgcggactgtctaccattaaaagtctgatcaacccgaagcagctaagtccagcctcgggcgccataggaagctccgcctcgcccgacccccagggctcgggctcaacctcgacgctggacgacggactccgcttcgcccgaccccagggctcggactcagcctcggctccagaagacgacggactccgcttcgcccgaccccagggctcggactcagccttgacttcggaagacgatgaactccgcctcgctcgaccccagggctcggactcagcctcggctccggaagacgacgaactccgcctcgcccgaccccagggctcggactcagcctcggctccggaagacgatgaactctgcctcgcccgacctcagggctcagactcagcctcggctccggaagacgacgaactccgcctcgctcgacccccaggctcggactcaacctcgacctcggaggagcctccgcctcgcccgacctag

SEQ ID NO: 38266 - DNA, 459 bp, Zea mays
  Peptide Sequence Number=SeqID_81641
atgcacaaaaccccttcaaaagaataccaagctttccaagaagggcatgagcaaatccatggtgagaaaattaatgttcatatgattttctctaacaatgtacctatgtgcttcaacaaagaaagatcaaagagaagcgataggaggtgctatggatgcaaggagaagggccatgaaattgattcatgcccccacatgaagaatcaagaccttgcacgatcaagaaagatgaccatcaaaaaggacgaaagcaaaaggcaaatgcattgcaaggacaagcatcacatttgctacaattgccgtgaaaaaggtcatctattcaagggaataaggattaacctttctgggaatcaagcaaaaggcctacaaccaagtgatatccaaaggatgccacataggaaaaatgaagcacttgagaatggacttaaaagattttaccttgctttggaaaggatctaa

SEQ ID NO: 38267 - DNA, 660 bp, Zea mays
  Peptide Sequence Number=SeqID_81642
atgttttttgaggaccttcgtaagccgaaggcccccaacagctccaggggcgccacgtggccagaaaagatgatatatcccaggatgcaatcagttggaccagacctccacgaggaagcatcagacccctgtacgcacagcctggacccccgaatacggtccgggactcccaagcggagacccaatgctgccacgtggcttgctgcccgtgacgtaagccagcgggtggagcctaacgcggcgtgcctgtccagtccattgccaaacagtacgcccgtgctgcaaggtgcactgtgtccatcatcacttatgcgtggccagggggatttcggccaagctaagctcgcggtcgtgtgggcagccgacccatcttggcctgccaacgggcacagcgcggagacggcgctcgccggcgacgagacgactcggggtgggatgtcgtgcgggggtgcgagcatagtgggcaaggatgaagcagtgtcgaactccactggcgcggaagtgatggtggagcgggggaggacggtggccggtggggatcgtgtcgatgctgtgcgcggtgagggagagggagctgacattcgggccccactggaagagggagagcaggcgcgcgagagcgagagggaggcacgactaacgagtggggccgagcggtag

SEQ ID NO: 38268 - DNA, 468 bp, Zea mays
  Peptide Sequence Number=SeqID_81643
atggccatgctcggccctctcatccatggcgccatgaacaccagctaccttctcttaacggccgaactcgcctgtctcatctcctggccgcgtgctcaactcatccccagttcttccctagatcgtctcctgctcctctggcactcgtctttgtcctgctcgcgcaagccatttggttaccgggctgaccccgacgacgccctcgtcccctacccctgcgctcctccctgcgacgcagccgggcccctgcgcagggggtggcacggcaacccgccaatggtctctatggaaatggtggcatctgttatggctcttatatcctcgctcagggatctaggtatgggcatcgtcccacgactttttcatgagggcagaggtgataatgaggatgatggttttgattatgattatggtttatgtattctttccgtttggaaagggtacttttgggttaacaacttgggttaa

SEQ ID NO: 38269 - DNA, 639 bp, Zea mays
  Peptide Sequence Number=SeqID_81644
atggccatgacgtggccatgggaggaggtgtccgccatggagagcagggagggaaggtcttgcgtgctgctggtggagaggaccaagggagatcgacgccatgtgttgaacgcaattgccgaaaggatcagcggcatgggagatcatgggcatgcgaggctgtttcctaggaagaggaacatgagccgaactggctgggccacacgacgagtgcggttagcagctaacccccttaacagtagcgttgatatgcacttggtgaagatgctgtcgactctgatcttgactaatttggaggagctggaagtggccaaccggataggtgcaagaggaaagggtatagatagaaaaggagaaatcaagttggaaaagagatggctttgttcagccaaagacagcttggtctgggtgcaccggactgtccggtggtgcaccggacagtgtccggtgcgccaggccggcgtctgtcaactggctgctctcgggaagcaattaacagcgtacggctataaatcaccggactgtccgtgtaagggcgagaggctccaagttgtggagattcctcgcaagcgggatatagtaaacaaagcaaaacaccgtgtattcaagtgggtctttggaccgcttgagaggggttga

SEQ ID NO: 38270 - DNA, 918 bp, Zea mays
  Peptide Sequence Number=SeqID_81645
atgctggacgaggtcgcaagatgggacgacctcgtcacaggtcttcgtccgactgagtgggtgcttgacatggtgtaccgcctacttggatgggatgcgccggcgttcggcggaaggatttgcgtcggcgccatcctccccggtgaacttgccactagagagttcgtgctctttttgtcttcaacctccccagtgggttggtgccaccgatcttgcctttcctctgctggaggtgcacgaccccgtgggggcggcgctcttccaccggtgcttggctttaaggatattcatcagccttgcagtggtggggagcgagctgggctgcggctccgtctttcacatgagctggtgacccgcctcttcctccagcaatcggaggaaaaggatgatcaccagccttgtgaaggttggaggcgaacttcggctacgcggcaccggccagaccgcatgcgccgtctgccgtcgcgcttccagctccatggcttggatggtcttgtcctcaccatcataggaggacgggggcaagggcctcttcgccatggcgcatgcactgaggctcgatttgtcaaggctgcagaccagcataccaaagaaagagttggtaatggcccccaggagggtctagtctgggaagccaagttgtgcgtccggaccccctggatggtggttctagatactaggacacccgtcatagagtggtggagcgtgcaggcccacgaccaacaggccgggcttatgagggcagacctcaccgggctggcgtacacagatgctctagtggtcaggaagaggtactccttcagtcgtagcaagatagtcacccccgggtcggcgtattcccgtcaccttgaaggccatttctgcatggatttgtcagaagcctggacccgtggggaggcggtttccgggggaaggtag

SEQ ID NO: 38271 - DNA, 516 bp, Zea mays
  Peptide Sequence Number=SeqID_81646
atggccggctgccgtgccgcgccctacgcaggggcccagctgcgccgcagggaagagcgtaggggtaggggacaagggtgttgtcggggccggcctagcctatgcgcgcaaggaggagcgcagggtgagaaggggaaaggagcatacctggtgaccgaatggcttgcgcgagcacgacaaagacgagtgccaggggagctggagacagcctggggaagaactagggacgagttgagcacgcggctaggagatgagacaggcgagttcggccatcaggggaaggtagctggtgttcatggcgccatggctgagagggccgagcacgcgcgtgcgtgggacgccatccggcctggcgcctgggctgcgggccaggccagcggcggctggaaccgctccccacgctttggatggggccgagcacgcatggggctcactagccagccgacggcgcagggcgggcgcatggcatgcgcgtgcggctggtgcgggagcggctacggggagtgttggagctag

SEQ ID NO: 38272 - DNA, 213 bp, Zea mays
  Peptide Sequence Number=SeqID_81647
atgggcaccgaacatggtgtctccggtgagctgcaagcgggcgttgccgtagatctcgccttgattgttggccagcttccgaagcaccaggtcgcccacctggaggtctcgggaccggacccctcgggcgtggtagcgtcgcagggactgctggccctcgtcctcggggagccgtattccaggtcagtgggcaagatggcctcggccccgtag

SEQ ID NO: 38273 - DNA, 1299 bp, Zea mays
  Peptide Sequence Number=SeqID_81648
atgtggccggataaccgtatcgcccgtgacgcgcactatctttaccggtatgaccgtcacggcaggctgacggagaaaaccgacctcatcccggaaggggttatccgcacggatgatgagcgcacccaccggtaccattacgacagtcagcaccggctggtgcactacacgcggacacaatatgcagagccgctggtcgaaagtcgctatctttacgacccgctgggccgcagggtggcaaaacgggtatggcggcgtgaacgggacctgacgggctggatgtcgctgtcacggaaaccgcaagtgacctggtacggctgggacggcgaccgcctgaccacgatacagaacgacagaacccgcatccagacgatttatcagccggggagcttcacgccactcatcagggttgaaaccgccaccggtgagctggcgaaaacgcagcgccgcagcctggcggatacccttcagcagtccggtggcgaagacggtggcagtgtggtgttcccgccggtgctggtgcagatgctcgaccggctggaaagtgaaatcctggctgaccgggtgagtgaggaaagccgccgctggctggcatcgtgcgggcctgacggtggcgcagatgcaaagccagatggacccgcacggaaggggcaacagaatggtgcgcagaaatacgatgaatggggcaacctgctgaatgaagagaacccgcatcagctgcagcagcttatccgcctgccggggcagcagtatgatgaggagtccggcctgtattacaaccgccaccgctattatgacccgctgcaggggcggtatatcactcaggatccgattgggctgaaggggggatggaatttttatcagtatccgctgaatccggttacgaatacagatcctctggggttagaagtttttcctagaccattccccttgccaattccatggcccaaaagccctgcacagcagcaagcagatgataatgctgcaaaagcattgacaaaatggtggaacgatacagcatcacaaagaatatttgactctctaatattgaataatccgggactagcattagatataacaatgatagcttctcgtggaaatgttgcagacacagggataactgatcgtgtcaatgacataataaatgacagattctggagtgatgggaaaaaacccgacagatgtgacgtacttcaggaactaattgattgtggtgatattagtgctaaagatgcaaaaagcacacagaaagcctggaattgtcgtcactccagacagtcaaacgataaaaaaagatag

SEQ ID NO: 38274 - DNA, 543 bp, Zea mays
  Peptide Sequence Number=SeqID_81649
atggcgagcctgcaagcagccctgctccttctcccggcgttctccgtcgtggctgtggcggcacggtgggtgtgccgcgcgctggcgcgctcccatttggcgtgcctcccgtccggcagcccgtcgttccggtacctggtctcctcctcgccgtcgtcgtcgtccgtggtggacaagggcggcggcgagctgccggtggcgctttattcccggaggacgaagcgccgccgctgcgttggcgaggaggaggaggaggaacggtgcgtgttctgcctgagcagcatcgaggaggggtcggaggtgagggagctccggtgccggcacctcttccaccgcgcgtgcctggaccgctgggtccgggcgcggccggcggcgacgtgcccgctctgccgcgggcggctcctgacgtcgcttccgtgggaggtggcggggtactaccacgacgaagaggaagaggaggaggtggagatggaggaggagtcggacatgatgctgttcatggcgtgcgtgcacagccgcagcagctggctgtggccgtcgtga

SEQ ID NO: 38275 - DNA, 2355 bp, Zea mays
  Peptide Sequence Number=SeqID_81650
atgtggtctccagaagggaatccgttctctagagaatatgcaataagaaccccgaaagatcattctgccatggaaaatgattctcctcgttcaaaatactgttcttgctcagcagggcactctcctgttagctctcctgtcgctatacagtgcagatcaacaagactaggcaatttattaaacaggaacgaagtactagatcgttacattgatagagggcatggagatgcaatcgtagatgagaaacagaagcagtgcgtacctacggtttctaatttgggaaggccacctcgaccccactctacagtaccatccataccgagaccattcaaagagacaacggaaagctacccagatgtggacttaaacgacgccttcctttggcgacttgctcaagagggtataggagatacccacaagattacaactatgtgcagtgcatctagacgccacataaacatgtcagatgcttctgaaagagaaagtgcaacaactgttgaagatatttatgaagatttgcaagatgtgagacttccaaatgttatctgcccctccacttgtcctaactcagcggtagaagaaactgatgacatgttgcttcaaagagttaaggaagttgagtcaaggtttactattccttgtggagatgaatatgaatttagcatgctcaggtataaatcatcaacctcaaatgacatgtttcagttgatccagcaattgactgaagataggaaacagttagcatatgaattgtcttcagagatcaaagcacgtgttacagaaagatttgctgccaaagagcaatacaaacaattaaagaaagaattggacaacagaactagaaggctggagaaggagaagagtgaagtacaaactacactggaaggagagatggatagaaggtcagatgattggtctatcaggctatcaagatttcaatctgaagaagagagactacatgaacgggtgagagaacttgcagagcagaatgtgtcatttcagagagaagttacttctcttggagcaactaaggctgaagctttaatgaaagctgcgagtttggaaacgcaaaatagcaaactaaatgacgatctagagaaactaaaaaatgagcatgagaaactgcattattcctcaacagatttgcaggctcgctttgctgagattgtagaggaaagggaccacatccgagaatatttgaaggccaaggagggagagaacaaagcattgcacaaagtaattgcaagactacaaacaacatgtaatgagcaggaaagaacaatcacaggcatgagacaaggatgcatagacgaattaggtaggaaatttgttgagtacagcaccaatgataaaacgagaaaattacaaatggaacttattagactgactggggtggagcaaaagttgagaggtgaaattcgatcttgtaatcttgaagtaaaatctctcagacaagagaacattgcactcttaaatcgtttacaaggtgctggaaatggagcaagcttctcctcgattcgacttgatcaggagcttcaagctagggtggacaacctgcaaatgcaaggcttgtcactacttgataagattagccaactttgtaccaaattgctggatctgatgaaacataagagacatgaaaatgaatatttgtgtggcaatgatgtgtcaacattcagtgattacatatttgagtaccagagcatcaaaggaggaattgaaggtctgaagctaagtttgaaagcaataaattctatactagctgaaaagcaaaatgctaaagaaaaatctggtgaaattgtagctgaaggtagtccttccaaagatcaaacggatgattttggactcaagctgaaagaagaggctatgctgaatagagtactgaaggaggcagtcttgtcaaaagaagttgccattgaacaattgcaatctgatctggcatcttcacttcgcatccaagacgttatgagaaacgagatccagagggttcaggatgagctttcttgcataacccacaaagctaagcagttggagcttcaggtatccaagaaggatgagtcaatcgatgagatccaacaggatttccaggaatctgcaaaggagctggctgctcttcgtggaacactgaaaacagtgacggaggagagggacctgtcgtggcaggaggcgaagcagctgagacgaaacatcagcatcatgcaggacgaggttgtatcgctgaagaagaagatcgaagccctggacgaagacatacttgtgaaggaggggcagatcacaatattgcaggacagcatcgacaagccgttcgacatcatctgcagcccaagatcgatgagggagttcgatatggcgtga

SEQ ID NO: 38276 - DNA, 609 bp, Zea mays
  Peptide Sequence Number=SeqID_81651
atggacgccatctcctgcctagcgcctctgctggcgacctccatcgcagacgcggccatcgcccgggcgctccacttctcctcctcctcctcctcctcctcctccgtcgccgccaccaccaccaccatcatatcaccagactcctcctccgcctcctcccaccacaacgacctccccccggtgccggtgccggtgccaccgcacgccgcctccttccaccccgtgcgccagaaccaccaccaggcgctggcgctggcgccgaggggagcgcgcgcggggaagcgccggtcgcgagcgcccaccaccacctacatcagcaccgacaccgccaacttccggctcatggtgcagcagatcaccggcgcgcaggaggcggacggcggcgacgtggccggggtggacgtcacggcgctccaggtccaggcggccgcgctgctgggcgccgccgccgccgggagcccacagctgctgccgggcgacgacgaggcgtcggcgcttcgtcgccaccagctccaccccctcgaccttcagcagcagccatgcttcccgacgctggactcttggaacgtcatgtacgagaccaacagcagcggcgcgggaatgctgtga

SEQ ID NO: 38277 - DNA, 990 bp, Zea mays
  Peptide Sequence Number=SeqID_81652
atggagcgcccaactgtcagttcccctcggccgcccctcggtcagctccacgacctcagttccactctcgtaggctgccgcgtccgcccctcggtcagctccacgatctcaactccactctcgcaggctgccgcgtccgagtcagttcccctcggtcagctccacgacctccacttctttgacttcaatgcgctggattatggagatatatggtgccgcgtccgattcagttcccctctcgctcccttcctgcactttgccgaggtccgcaagctcccttcccccttcgtcgttgggcattctgtacttccactgtcgacacatattcagtgcgacgtttacagctttggtgtcatattatgggagctggcaacgcttagaatgccatggagtgggatgaatccaatgcaggttgtgggggcagttggtttgcaggatagacgacttgatattcccaaggaagttgatcctctgggtggtgaagatgataactttgctattgtgtttgctgctatgggagtgaacatggaaaaaactcaattcttgcaacgtggttttgaagagaacaattccatggaacgggacaccctttttctaaatctgacatattctctatcaggcccgcgtcggcgggtcccacgcgacagagacatagcgtacccaggacgggggaatggaaggccacgcacgcacgttgtcgtctttctcgtcgtccggtcccacttccaccgcgcaaaaggccaaaggcaaaccacgcgctcacctggctgcctccccctctcctctcccgacgctcccatgccgccgccgccgccgccgagcgtgcggggcttcctggacgcgcacttcgcctcccccgacgacctcgcggcggcgcccgcgctcgcggagctcttgcgccgcgagtgcgacgggctcgacgcctcgctccgccgcgccgaggcgcggctcggtgccgcggcccgcgtcctggctcgcgcgctactctga

SEQ ID NO: 38278 - DNA, 336 bp, Zea mays
  Peptide Sequence Number=SeqID_81653
atgcaccaaaccccactcgacaccatccactactcgccgacgtggaggtcggaggctaggattctcttcctctgcaactacgagaactgcggcaaaacctttgctgatgttaacgcgctccgcaagcatgctcacattctcctgcagcacgggatggtggcggccttcgcgcgggcagcgtggctcaaggagtaccacgagaaggtgctggtggagatctacagatctatcccatacctccgcgacgccacccctctctttcctctccgctcctttcaagcggcgtcggcatgggtcgtagatccttttctctcccttctatgttttctccagtaa

SEQ ID NO: 38279 - DNA, 426 bp, Zea mays
  Peptide Sequence Number=SeqID_81654
atgggcgaggtggcaccgctgatcccagccacccggaggaggacgatgtctcgcaaggccgcgggggcagtggaggcggaccgacccgctgaagatgtatctgaggagaagacattgaagattacgatagctttgaatcaggaagctgaggcggtggcaatcgcatcaaaggaggagaaggggctgcaagacgaaccgaaaggtgagaaggaagacaagaagactcttgtagaacggtacatcgtgaaggaaacccagccaaatgaaagcctctatgagaagaagcctgaagaaccaactctcgtcctgacatcattggtgattgagatactacaaccaggagcaaaccacatagttaccaatttgaatatgtcgaaaatgcacctcctcctaagactgggaacaactcagaaggcaaacagatga

SEQ ID NO: 38280 - DNA, 700 bp, Zea mays
  Peptide Sequence Number=SeqID_81655
cccggtccgtgcgctgctcctgcctctccagaaagccaatgacgtgtggggcctccttaccaggccgttcttcctcaccgtaacaaacggcgccgactacatgcagagggtagagagaaggagggagtgcgccgccgcggtctgtgttcgtgaatcccgcaacacgccgtcaatcggtgcccgcgggtggccgtggaacatcgccgtcgatcggggaaggtgcgaggaccatcttcgggcggacttcggactgtttgcgcgggcaatttctcaccggaaatctaacaccgcggcggggccgccatttgccgtggccgggacgttctacaaccgcatcgtcggtaagaagttctcctctgtgctcgcctcgtcctcctcgtcatgtagcaccgatcaatttagatttaggggcactagttcggtagatgaccgtatgccggcgagggcctccgccgtgctcgtgggcggcgccgccgctctgtcgacctgggagaagagagtttgggggaaacgacgtggggcgttcatccggagatctacggctgagatcaattggcgcatagcgttttgtcgtattgaactgggaccgtccgatcgggatcggatggcggtcatcgctctgggcttcattaaaccaggggcgtcggatctggatccagcggatcgcgcagcgtaccggttcgccgcgatccaggcctaa

SEQ ID NO: 38281 - DNA, 384 bp, Zea mays
  Peptide Sequence Number=SeqID_81656
atgacggcttgtcctatgatccttcggcgcgagccatatccctgtcactgtcgctttctcccgcctcgtccccctccatcacatgcgcacggtcgcttttgccagaagactcacgccgtggatctgcttatggcgtgggggctctgggcaagccacgcctcgccgggggagaaacagagggatgaccttggttcgttgctcgccggggggaactttgccgtggagccaacgaacggttggagacctggcagggtagggatcaccggctgctcgggctcctgttcggcggacaccaccgcagaatgggaacgctcactgctctgtttacctcacgtgaggaagatgaaggaggaccgttggatgcgcaatgaagaatggaggtaa

SEQ ID NO: 38282 - DNA, 489 bp, Zea mays
  Peptide Sequence Number=SeqID_81657
atggagggtaggggcatgagcataataaaggatggagctaaagcaatgattgtaaccgacaagggagacaatgcaaccaaggtcaagataggtaaaacaccattctcaaatcgagatggaaaagatgatatttcaaaaggtaggcataagataacatcatggaaagatctagagattacaaagagaggtcaagggtcaaaggtgatgataggcaaggatataaaaggaagaggaaacaagggtggtcaagggcatgttaaccgaaatatttcaaacagatattgggatataaaggtcagcggtcctacagtcagcacgactttgataccacttatgtcacacccggttttgaaggcagctgactggggggaggtcgctagcctaatcctcgaactcatcgaagtcctagaactcctggagattcgcctcgacgacttcttcttttacctgagcatagattacacccaaaggcaacctagtgttttgtga

SEQ ID NO: 38283 - DNA, 132 bp, Zea mays
  Peptide Sequence Number=SeqID_81658
atggctgaaagagcttgtagtgacccgtacgcctgtagtgacccgtattgcttttggcggaaggagaaggtgaggcacacctgtagtgacccgtacgtggtcgctcttgttgcaaagcttgtagccttgtag

SEQ ID NO: 38284 - DNA, 396 bp, Zea mays
  Peptide Sequence Number=SeqID_81659
cctcttgctcgaatgggtgctacggttactgcaattgatgttgttgacaagaatataaagattgcaagtattcatgcggcatctgatccaacaactgcttcgattgagtattgttgtgcaacagctgagggactggtaaaagagaaaaggttgtttgatgctgtaatttctcttgaggtgattgagcatgtcgccaatcctttggagttctgtgaatccctctcggctttgacaattcctaatggtgccactgtcgaagagatggcagggttcgtttacaatccgttgagcggagaatggtccctgtcagatgatatcagtgtgaactacattgcttttggcgtcaagaagggcgaggcatcatcgacaaatgacagagaagcaaatttatcatag

SEQ ID NO: 38285 - DNA, 1158 bp, Zea mays
  Peptide Sequence Number=SeqID_81660
atgcatgcggcatgcaaccgcaccaagggggcgcaccctttcgacttcgacgcgtccagcatggaggcccaggcccacacgtcatgtaaccggcgcgccggttactacgtgcgagaaaatgcaccgccactcgcgccagtaccgcaccttctcgactgcggaaccggtgccacgactcgaggcgaccctgcgcatgacccgatagtgccaaccgagcacatcggtcacgggtcagtcagccgcgggagaaggcgcgacgatcgatacggccagaaatgggccgacagtaatggcgatggcaggcgggcggaaacagcagtcaagtcatcagcaagctcacgtcccctcctaggacagcgagagagccctctcccacggcgtgaagacgacgcgctcgacaggtggcacctctggcaggcgaagcaggcgacgcttcacctccgtcataatgaccgcgtcaaaaaagggaccgggaaaggggatactccgaaaaggatccttcttcgcgaaggaagcgggccccgagcccccctactgatcagaggttcgaaggctggccccttggaagggttcaacagccgcctcagagcacacgggctccgcgcccactactggctggccctcgaagggttcgacagccgcctcagagcacgcagagcgagggatgaccttgggtacgttcgatacataaccaaggctcgggctacgctcccgagcctcggacgccataggaagctccgcctcgcccgaccccaacgctcgggactcagcctcggctccggaagacgacgaactccgccttgcccgaccctagggctcggactcagcctcggctccggacgacgacgaactccgccccgcccgaccccagggctcggccacagcctcggctccgaacgacgatggactccacctcgcccgaccccagggctcggactcaacctcgacctcggaagacgggctccgcctcgcccgaccccagggctcggactcagcctcgacctcggaagacggactcgacctcgacctcggaggagcctccgcctcgcccgacctagggctcggaccgaccacgtcacagggggcgccatcattaccctacccctagctagctcaggctacggggaacaagaccgacgtcccatctggttcgccccg

SEQ ID NO: 38286 - DNA, 519 bp, Zea mays
  Peptide Sequence Number=SeqID_81661
atggagggtgaccggtgggcccaggccctcgcaacagagcttgggctgttggtttcggtggagatgaaagggcacacttccacaggtggcgtgctccttacgcggcggttcgccttctcctcacacgttggccaacatccgaggagtatgacccctggacccaggccccctgtgtcagaagctggaccgctgcccttggcggagggtggaaggcgagccgagttggggtcctgccttccgcatgggctggtgacccgcttcttcctccagcatttggaggagaaggatgttcatcagccttgcggaggaggcgaacttcggctatgcggtgccagccggcccgcatgtgccactagccgccgggcttcctgccccttggcttggatggtcttgtcctcactcccgtatggggacgggagcgatggcctcttcgccatggcgagcgcattgaggtggtcgccgctgctggcgagccactggcgagctgctggtgcagagatggtcaccgccgctggctag

SEQ ID NO: 38287 - DNA, 597 bp, Zea mays
  Peptide Sequence Number=SeqID_81662
atgggcgggaccggagccaccatgtgtccaagaaggtgggatgctccaggacatcagaagttagttcggacccccatgggagtggcgtatccatactaccgcatgttctgtactcatgatgactcgcgcgttaccgagaagcagcggagagaagccaaaactataagcgtctgggcattactacactcggagaggggcggcatgatggtgcaaatcgttgagcaccgcgccgagacttcagtggatttcctgctaggaagttgctgcgccacccccccaagctccacggcctcaccgggggccatgaagcagtggcgtgacgacgtcgaccgaatgctcggcatggcgcactctggctcgaccagatcgaggccacggtcatcctggcgccaacataaggcgtcggcatctgtgcgctcaccctcgatgagggcagcaccgactaaggacttgagggcagagctcagccgccggcgcacggcggaggacgctccagtctctcaggagaggtctaatgacctgcgggcagaactcaaccgcaggcgtgtcggtgaagatgcccgtgtctctctagagagggcgcaagagcatcgatag

SEQ ID NO: 38288 - DNA, 1998 bp, Zea mays
  Peptide Sequence Number=SeqID_81663
atgacgctgcggatggagccgccggtgccgccgccgcggcggtcggtgtcgacgacctgcgaccttcaccctgaggagaccttcacgggcttctgcgccgcctgcctccgcgagcgcctcaccgggctcgaggccaacgccgccgcggccgccgcgccgggccgcaagtccacctccgctatccgctcgctcttttcccggccgttcgccgctgccgccggcggagggccctcgggctccggtgccgccgcgctgccggacctccgccggtgcaagtctttctcctgcgggagcgggggcgacgcgctggcagccgccggcggggcgtacgagccgcagcggcggtcgtgcgacgtgcgcgggcggagcactctctgggcgctcttccaccaggacgaccgcgagagggtccgcgacggcacagcgttcgtcgccttcccggcctcgtcctccaccgccgcggccgcgctcgccgccgaggtccttgcgccgccgccccctccgccggcctgcgtcgctgagatgttcttggaggaggagattgctgtcgccgaggattccgacgagattgttccggtgatggagcccgtcttggtggccgacacctctgaggagatggagacgggggtgaatgcggcgcgggatgttagggccatgaaggatcacatagatctcgagtcttcgcagtcgcagcagcccaagaagccgccgcccaaggagatggagatcgccgggagcttctggcttgctgcctcggtgttcagcaagaagtggcagaactggaggcgcaagcagaagctcaagaagcaggaggccgcgggcagcaaggctgctgcggcggcaatgcccccaccggagaagccctccaagccatcgttcctccggcgcagccgcttccgccgtggtgaagccggctctgagttcgccggcgggcggcgctcgtgtgacaccgatctaagattctccctcgacgccgggcgcatgtccgtcgacggcatgggcttcgcctgggaccaaccccgtgcgtcgtgggacggctatctgttcggcgccggcgccggcgccggcattgccctcggccgcgcgccgccgccgctctcccgcctgcctcccatcctctcggctatggaggactcccccgccggcatcgtggagcgctccgacggtcaaatccccgtggaggatgactcccagccggagcccgaccccgacgcgaacgtccctgggggctcggcccagacgcgagactactacatggacacgtcgagccggaggcgccggagccttgacaggtccagctctgtgcggaggtccttcgaagtcaccgacccaaagccagtggcagtgccagtaccagtacctgttccagcgaccgcaccggccgccatggtcaacggcaaggaatcccctctaatgggcagctcggagttctaccacttccaccacgccgaagacctgttcgaccaccggttcagcaccaactcactcgtcgaggacttctccgccagcctggacgccgccttccccggccccgcgaagaagccgccgcggcggtggcgcaaggcgtggagcctctggggcctgatccaccgccgcgccgcggggcgcgggaacggcgcggaccgcgcgttctcggagccgtggccggagctgcgcgtccgcgggcacagcggcaggatgcagcggtgcaacagcaacgcgtgcgcgcggagctccttcagcagcaacagcggcggcgggctgggcagctcgaggcgcagctacgtcgtggacgcccacggccacgcgaagcggaggcgcgaggagggcgcggcgctggagcggaaccgcagcgcgcggcactcgccggggccgggcaccgccgacagcggcatgctccggttgtacctcacgccggttcggagcgccagcggccgccggaccgccgtcttccctgtgaaaggcaggcggccgctgaggtcgccgtcgttggcgcggacgatgctggggctgtactga

SEQ ID NO: 38289 - DNA, 165 bp, Zea mays
  Peptide Sequence Number=SeqID_81664
atggagcgaggaacaccggaggggattagggttagggagaggaccgggagaggaagagtgaacggcacggagcgtgactgtgagagcgggattggaacggagcggctccgtcccattgattttttggagcggaatggttccggatctgaggagaatattccctaa

SEQ ID NO: 38290 - DNA, 1533 bp, Zea mays
  Peptide Sequence Number=SeqID_81665
atgggagacgtgttgattccaagcctacggtgtgggaacttatctgtgacgatatgcgtccgtgtttctcggttttgggacttttctgatcctcaggatgatgcaaggctgttacactgtgatatggtgttgctcgacgaagagggaaatagcatacatgctacgatatacccacccttcatagagaaattcaggccactcataaaagaaggtagcgtgtacaacatgacatactttcgagttcgagcatcaaacaacttgtacaagccagttccaaatgatatcatgattaccttcacgaattggaaaaagttagagcaagttattgagattcctcctgcatttcctacacttacatactccctcactcacatagaccagatccattcgcgcatcgaccataaagactactatacagatgccattgggatagttacttcagtctcgaatgtttcgccacatcgctcaaaaggacagcaagcttccagcttgaagaggaacatttccatatgcagtgcaagatgtatgtgtttgtgcctcatgttccatgttcgaactgaaaacagcagaggtgcttcggtcaatgtcgtgttgtggggtgcccaagccaccctattcccaggagagcgcatatacgagaatgggcagaattccccacagattgtgctatttgttggcacgctcgtcaaaaaatatgcagatggtctttgtctgactggaagctcaccatgtaagtggtacatcaatccatccattcctgaggcagaaacccttatgtccagcgcacgcggtgatcataaaccagtgaagtggaatgcaactgtcacttcgagccagcttatatctcctgttgctgaggagcaaaaggtgtcgtatatcaagtatctccatccctttgaaaacaagggaaaggagttcttggttactgtcactataaggaaaattgacaacaagtggtggtataactcatgcagaaaatgtgcctgcacagctgtcactcacggagactcttacaaatgcacaaaccgtgattgcgctaacattgctatgcccgtccaaaggtataaaatacttgtcatcgcaggagacgagacagctgacacagacttcattctctttgggcgcgtggctcaaagaattgtcaaaagaccttgcgatatgctcatagcgaacactccatcaggcttcattccagatgcaatcacgaagctgcttgaaaggacgttcgtttggaacgttagcttctctgggcacacaattaactctggaaacgtctgcttccaggtcaatgctaccataaaggaactaggcaatcagaatgttgacatttcaacgtcaaccgcagggacacaacagtcttcgtttatgttctcacagggtgcaagcagcagcatgaaagacactcctcacaagacagacaccttgtcttcacctctgacacctttgacgcctcagggtagcatcgccactacaaagtatttggttaactttgatcatgatgctacgcttatcacgcttttgatagactgttga

SEQ ID NO: 38291 - DNA, 1191 bp, Zea mays
  Peptide Sequence Number=SeqID_81666
atgactgtgttgcatcattcccatttgccaactgacacaaaggcagagcgaaagggctggtggccgcacacgagcgtcagcaccgccgagatcgcggccttgtgccgcgcgtcagagcgagtcacgcagacgtgtagcgggcggtggtgcgcctgcgggcatcgcaggtctctcatcgtctcgttcacctaccgcgagcaccgacggggcggggaatcgcatggtcggtgttccacccatcgcccggggcgaacggctggacgggtgggtcggtgttccggtggccgaccacctggcgggtcgcgcgatcgcaaggggcaggcgcctctgtctcggctcggcccagtcaccatctctccccatcccctttgccaccctcagtcttctccctcctcagggcaggcaggggcgccggtcaccaagcagaagaagggaagcgagagcacgaagcctgatttggtttgctttttgttgcccagactcggagggagttggtgcctctgtgtctctgtgtgtggagatggaccccaagttcccccacccccaccgctaaacaaaacggagcccaccaccgcgacgaccaccaccacctcgaccgcgcagcagcagcagctggatcctaaggactaccaccagcagcagcagccggcgcagcacctgcaaatccaaatccaccagtcgccgcagcaggacgggggcggcagagggaaggaggaggagcagctgcaggtggtggcgcagcccggggagaggaggcagcagccgctcgcgcccaagcggagctccaacaaggaccgacacaccaaggtcgacggcaggggccggcggatctggatgcccgcgctctgcgccgcgcggatcttccagctcacgcgggaactcgaccacaatggagaacgtgaggatatggaaaggaaccgtgtgcgggcgtggcggctgtcctcgtctgtggtcgcgaggacggcggcgggggctgcgggcgcggggaggggaatcgctggcgggggcatgcgtccgcggatcttgccgcctgcacggtatggaggaggaatcgggatggaggaggaatcgcgcgatggcacagggcggccggtgttcgcggcggggatggcggcaggcggatcgtggcagacgagcgggcggacgggattaggaagcgggggcagtctacagtcctctcttaatagttaa

SEQ ID NO: 38292 - DNA, 494 bp, Zea mays
  Peptide Sequence Number=SeqID_81667
atgccggacgtggccagagggtcccaccgtgacatggaagcagcgaggacgcaggcagggcagagggtcccaccgttacagtacagccaaaaaaaatacgaagcagcgaagaatcaggcgatgcgtctgcctgccgcgcgcctgcgcgacgcgctgcccttcgtctgcgctccgctccagatctggagccgtcgcctcctcgcgccgtcgcctcctcgcgccgtcgcctgccgcgcggccgcgtggaactcgcctccagatctcgccgtggatttagtcgtcaacgcgtcggacgaggtcaccatgacaccgagcgtcccatcggtcgaagcgtgcggtggacgcccctcaccatccctctacagctacagcgcgccctacttcgcccgctgtgtgcccatgtcgtcctctagccaaacaccgtgcttaggactcccccgctttgacgctgatggcgttcggcgagttcttctgaaatccctccgtgcgtccag

SEQ ID NO: 38293 - DNA, 963 bp, Zea mays
  Peptide Sequence Number=SeqID_81668
atggccttgcgcggaggggagcgcgcccaaaatcgacaagaggaggagctggcgcgtagacacaccaggaacaacggagggagctcgccggaggagggagctaaagcggtcggacgagcgaggcgtccggaggaagaagcacactgttggagacgagacaggaggaggaaggtggaagactcaagagtcaacaagaccagaccagtgacggcttcttccccgatggacgcgaacggtgggacgcgctccgccgctttccccccagctgttgtcaacgcgacccaccgtgcgaggtgctgtgagctttatgatattgtcattgatggttcaaagaagtttgaaccacattattattcttacgttgcaacttggaaaggagaaatctcacaattatcagctaacattaaatatatatgtgtgctaatctgtataattgatccagtggagcggcttacagttgaagaatttgtgcaccacccatttctttctgaacatgctccagagaggaccttgagccggacattatctgaaataagagatggctttccaataaataatatcagtccaacaaggccttcaagccaaagttcacaagaagattgtatgccttttcctttggatgatgagtcaagtggacaggaggagggtccaattcctgacagtaagagtccgatgaaatcttatgggtttcccacagatttccctatcattgattcattagagtttgtagatcaggaatatgtatttgtgtctggaccacacccagagggatcatcgtcttcaacaaatgcctctcagcagcttaacttaccggcaaaatatgataatttgtctgtttcaccaccgaagttaactttcttgagtgcaccaataccgataaacggtttgccgattaatagacaacaatctgctgggactggtagcttcgacaaccactattctcctgcatctgtcacttcatag

SEQ ID NO: 38294 - DNA, 1203 bp, Zea mays
  Peptide Sequence Number=SeqID_81669
atgttcctgttcgagggccccttcggatccgtcctgcacatcaccgactgcctcagcgccctgacgccccacctcgcccgccgcatcgactacctcttcctcgcgcggtgctccctgcgcttccccgccacgcaggactccatccgccaggtgatcgactgcatctggaagcacccgagcgcgttggttgtgtatctcgtgtgtgacatgctggggcaggaggacgtcctcgtcggggtgtccaaggcgttcgggtccaagatctacgtcgacagggagaagaactccgactgccaccagaggctggcgcatgtcacgcccgagatcctcgccgccgacgacgccgcaccctccacccgcttccacgtgctgtcgttcccgcggctgtcggagcaggccacggagatcctcgcgcaggcgcgcgccgcgcgccagctgaagcccctcatcatcaggccctcctcgcagtggtacgcgtactacgacccacctccaccggaggaggcatcgacgcagcagcagcagcagaaaccggtgctaacggaggccatgtgcgacgagttgggggtctggcacgtctgcttgtcaatgcactcctcccgggaggagttggagcaggcgctggggatcctcaagcccaaatgggtcgtctacaccatgtcgtcgtgcatggtggtggacctcagctatgcagtgctgctgacagtagaagctgtcgagaagctcgaggaagtgttcagcgcttgtgctccctctaatgatatcagccaggcactagaggagggtgcagaagcaacagtggttgatttcgagtatgagagtgtcgagatcattggtgacgatgagcttgaagccaaggattctgcaaatgagcttgagttttgtaggcatagtaagcctattcaagtggttgggttaactgaagctgcaacaagggaacagaatccggtctctgatgaatctgagctgctgaacgacatcaaatctgatggcggagtagaagtagttgatctaactgaaggtggaaagaaagagcataatttgggtgcagagactgaacatgatagagggaacagagaggctgaactgggggcgcaagaacagaacctgaatgctcgtgctcgtttgacggtgggagtttgcaggcctaaggtgattgctgacgaaggtacggaagcgactgaaggaaacgaatcaagctga

SEQ ID NO: 38295 - DNA, 522 bp, Zea mays
  Peptide Sequence Number=SeqID_81670
atgccgtacacagctccgcggccgtcgccgcagcagcacagccgtgtactgagcggcggcggggcgaaaggcggcgtcgcacggggcgtcgcgatcgcggcgcccgtgggggcggtgtggtcggtggtgcggcgcttcgaccgcccgcaggcgtacaagcacttcatccggagctgccgcctcgtgggcggcggcgacgtggccgtggggtcggtgcgcgaggtgcgggtcgtctcgggcctccccgccaccagcagccgcgagcggctcgagatcctggacgacgagcgccgcgtgctcagcttccgcgtcgtcggcggcgagcaccgcctcgccaactaccggtcggtcaccaccgtgcacgaggccggcgccggcgccggcaccggcaccgtcgtggtggagtcgtacgtggtggacgtgccacacggcaacaccgcggacgagacgcgcgtgttcgtcgacaccatcgtgcgctgcaacctccagtcgctggcgcgcaccgccgagcgcctcgcctag

SEQ ID NO: 38296 - DNA, 241 bp, Zea mays
  Peptide Sequence Number=SeqID_81671
aaaccaaacacccccttattcggatgggctgaatgacaaatcatcgccccctatccggggtccatactacctggaaaacaacaagattgaaataaaaagatttgacaaggaaagacgccacgatttcatcgagatgctgaaaggttttgtgataactcaggtgtcttattcagaccattttgctaacatgtggacaaaggtaacggaggaaacagaagtatatgcaaacaggagcagctga

SEQ ID NO: 38297 - DNA, 912 bp, Zea mays
  Peptide Sequence Number=SeqID_81672
atgacttcccatgccccagccggggatccaacggcagcgaccccagtgttaggcggcgtcgtagtggcggaggaggtcccaactggggggttcgcgcccactctagacactgggggtgacacaggaggcgcgtccagctccaacccccgcctgctccggaggagatggaggtggtgtttgggcggcaactccggtcaggttcttagtgaaactgaggcaacaaacttgcgagagtgggaggcgcttgaagctgagcaccagcgcctcagtgactggcgcacccaactagaggagcgtaccaagtcggcgtcccgacagttcacctctgagcggtcccaactcgagcgggatcacaaggagtacaagaaagacctccagagggtgtgcgctagggagctggaggcgacccgaagggagaagaaagtggccaggagggaggaagccgtgacccagagggaggccctcacgacggagtaccaggccaagctaagtgctctggaccaggctctggaagctaagtgggcccagcagcaagagctcgagggcaaggccagcaacgtcgccctcgccaaggagaatcttaaggagaaggagctgtccttggacaggcgggagacggatctcatcagcatcatcaacttccccctggtacttggccccctgggaggtaggctcgacgtgtctgtaagtgcaatcaaccccaatctgccagtcagactgggagtcaggtcaccaggggtgtcagggggcggttcaaccgccctagggggcggttcaaccggtcctgacgtgtctgacctgcctgcaggtcagtctgccagtcagtctggcagtcagactggcagacagtttgctgacctgtcaggggacggctcaaccggttttctgcgaggtttctggtcaaacggctag

SEQ ID NO: 38298 - DNA, 345 bp, Zea mays
  Peptide Sequence Number=SeqID_81673
atgggggcagcggagcgcgatggcgttgcgattaaaaagctctcgagactcttcaagtctgtcctgggctttgaggtggacaatagcaccttcacagaggcccaaatcagggccatgttctaccccaagttcaaaaatgataaatccgatcagaagacaaggaccaaaatgattgatatggtgtcccatgggcttgcaaacttgaaggttacactcaagcattctagttccctcttcatgtatgatggtcaccatggtggtgcatatgtgaagaatagcttcgggaatgtgtatgctgcattaatctgtgccgattattatatgttaagtgtttgctatgcctga

SEQ ID NO: 38299 - DNA, 384 bp, Zea mays
  Peptide Sequence Number=SeqID_81674
atgttgaggcaaagtacaagctttggccccacctgcaggctcgcatcctcccctgaggtgggcccgggggccactgtcggccataactcgccccagcctcgggcgactactctgggccagcaacagcacctgaccccaccacatgggcgggtccggtgccgccacatgtccagagaaagacctccacgtatgcgaaccagacccctggaatgggatccagaccccctgtatggggtccaggccacccacagtggggtcctagggtcccaggacagagcatacctgggccttaatcaggaccgaggcgggggtatcttcggactcaagtcaggcatcacagtagaccagaataatacgaaggttggtgaagcgccgaaggtgtaa

SEQ ID NO: 38300 - DNA, 912 bp, Zea mays
  Peptide Sequence Number=SeqID_81675
atgaacgcgctgtcccgtgaagggtgccggcactatgaggtcttcgaccaagccgatgaggatttcgagcgcgagatttacaaggttgaggaccctgtggtgaaggaatccgcgggagccctcttcgaccggatgtggggccctcacggtcgggaggtggtcagggagcggtccgagacggcgaggggtcaggcggcgcgtaacgagaaggtggaggacttcgaggctttgaacagcgcgcagcctgattcggagtcgaatccggtggcggctgtgtccgaggcgccgcccccagaaaccgtcgaaggtgcccttgatgcccccgcagccactgcggccggcagtggctcgtcgccaactgctgcgccgagggctgaggatcctgtgaagatggcggcggagccggcagcggaggatcctgcgacggctgggtcttcgcaggttcaagattttgggcctgcgcacacaaccgctactgctaatttattggcggcttcgaccgtggatgatggaaataaatcggatgagtctgcatctaagttttctaattttggtgactctgggacttcggttgaatggactgaagagtcgtcggatgagaacttggattattttgcggccttggatgtggcagcggcggaggcttcgccgcgtgctgtggatgctgaagttgtgcctggtccaagtgctgggcgcaggcggcgaagggcggttgcgaagcgtagagtgagtgaggcggacggcggtcggcttcgtgtgggcagggttggcaggcaggagctgttgtccttgccggccgttgcgagtgcaggtgagggggagctgcggagtctttttgcgggtgaggagttaaggataatgctatttaactatagagagatgggaattattccgaaggttgagccgatgtaa

SEQ ID NO: 38301 - DNA, 219 bp, Zea mays
  Peptide Sequence Number=SeqID_81676
atggggtccaggcacagtgcttgctctgccaaggctgggtgccgaggttctttcgttttgcttttgttagtcaccctactgcggggagagagatacttgatcagagatggttggtttacagatgacaaggatgatggttatgactatggtaatggtaaagaagaaggcgtcgaggcgaatctccaggagttccaggacttcgacgagttcgaggattag

SEQ ID NO: 38302 - DNA, 417 bp, Zea mays
  Peptide Sequence Number=SeqID_81677
atggtcaacgtgagcaggtacccttttcccttcttcctcctgtgcctcggcgagctcccctacagcctggtcgtggtcgagccacccttgcccctgcgccccgacgagtcccccagacgcgaggcccacgcggcggcctacagccagccaggccgtgtgatctgtccagcctgctccgccccctgcgctccctccgatgcacctggccacccgcggtgccgccctgtgctcccggcgcggctgttcgcagccttgcgcggcggccttcatggattgcccgtggcagcctgcgcaacagccggcgtggtagcttgcgaggcttgccagcggcagccccggcgtggctcgctcggcgtagcctgcacgacgtgtgcgaggcttgccagcggcagccccggcgtggctcgctcggcgtag

SEQ ID NO: 38303 - DNA, 219 bp, Zea mays
  Peptide Sequence Number=SeqID_81678
atggggtccaggcacagtgcttgctctgccaaggctgggtgccgaggttctttcgttttgcttttgttagtcaccctcctgcggggagagagatacttgatcagagatggttggtttacagatgacaaggatgatggttatgactatggtaatggtaaagaagaaggcgtcgaggcgaatctccaggagttccaggacttcgacgagttcgaggattag

SEQ ID NO: 38304 - DNA, 1258 bp, Zea mays
  Peptide Sequence Number=SeqID_81679
atggccgcaatacctcgaacctcggaggtcatggagagatcggagcccatgcatgttggacctatgccgccatccaacctccggctgcatcagtcggggttgaattctgggaatttgcggaaggaaaacagaaggcatgattccaaatcgcatcacctatctggtcgtgttgaaattgaggagcaatcgattgtgaatcaggaattttgtgcttgcaataatgattcctcgtttgaatttgttgatttgcggagtatgaaaatcaaacatactcctatgatgcttcgttggaaatccgggagaaatcaaagccttaatccatggaaaattcatggagacttgattccgtcctggatcacgccccctcggggagatgctgttttgcctcaatttcgggattctagagggtgtattgaggaaaagtgtaaggcggtggtcaagaaaactgaagaagttgaggggctttggggaaaaatacctgaatcagatatatcgaggaatgcgaacgccgaatcggctcatttgtgttcccctccaaaccctaagccgcatacctacatctcttctccagtgcacacatcaaaaccacaaatcgaaagatttgttgggcatttctgggggagatctcagaagtcttatgcaagtgtggtgaaagcaaactgtgctccaatcgttgttgtgaagatgcagccaagaggagcaggtcgtcgtggagctgcgcacggatatggtcgcggatctggtcgcgatcacgtctggaggagaatcgaagatggagctatacaaaatcaaaaaggtggtcgcactattgaggaggcggacatgggggaggatggtgataccttgaatcaaggtaacccatctccctgggaaggtcaagttaacagatctgaagaaaagaatgaagatagttggaaagtcaatgctaaaggctgcttgcaaaaaggatggttcaggataagtggcattcctatggagcaaagatctctggtgacaattgcaaaagttggtgggctagtgggtaaggtgatcgaaattgatgaaagaaccagactcagaaatgaatatgtgagagctagaattgcttgcagggatgtcactgtcgttcctggagttgtggaaagttctcttggattgtttttgtatgattttttctttgaaagggaaatccattcggaagaggacgaacaatctttagaggcagggattagagttgatgactcataccagaaagctgcaaaaagatccaaatatgaag

SEQ ID NO: 38305 - DNA, 417 bp, Zea mays
  Peptide Sequence Number=SeqID_81680
atgggggagcgttgccgaggcggggggagcagcgccgagggggtagcggtgccgaggtgggagctagggttgagaacagtggcgaagccaccaggggggccgaggtgggcctggcaccccccaacaggtatgctctctagtggaaaagtatcatcactttgtgcttccttaaatccaatacttggctcttttgacatagaaaaggctaagcctgccccctctgtcttcggatcctggcttcgcccctggttgagaacgcatgcacgggaactgggttgggggtatgagctagaggcaagagacgtgacctgggagggggcccaggaggcagagaggagatgcgcgtggggagcgtcggtgggggtgtgggggcgtgagcagaaccatgcaccatggtgtacattaggttctatatag

SEQ ID NO: 38306 - DNA, 819 bp, Zea mays
  Peptide Sequence Number=SeqID_81681
atgaggttgcagaaaccaaagcagaaggcaagcgcaaatggtatggtaaagaaccaccgccagcccctcatctgggcatataaaggcctgggcgaaatccacccaaaacttcgcccgaacccgtcgcgaaattcaaactcgaagggcaagcgacaccttcgacatgcgaagcgggcgccgtttcgtctctgtcatgatgaccgcgtcaaaaaagggaccgggaaaggggatatttcgaaagggatccttctcagcgaaggaaacgggccccgagccctcctactgatcaggggttcgaaggttgcgccctccggggttcggcaaccgccccagagcactcgggctctgagccctttactgatcaggggtttgaaggctgtcccctcagaagggttcgacagccgccccagagcacgcagagtcagggatgaccctgggtacgtccgttacatggtcgaggctcgagctacgctctcgaggtaccctaggacatttccgagaccagcgggaacgatttgtaatggaatcccaccggagggaggcaccaagccctcggaccctatcgaatgggtccgggtccagcaaatcacctgcagggaaagactaacaacagtcgcggtcactcccgagttcagcctcgggcgcaacgaggagctccgtctcgcccgaccccaggtctcgacctcagcctcggcctcgggaggaggtctccgcttcacccgaccccaggcctcgacctcagccttggcctcgggaggagtcgccgcctcgcccgacctctacctcggaatcaactacgctacaggggatacatcatga

SEQ ID NO: 38307 - DNA, 399 bp, Zea mays
  Peptide Sequence Number=SeqID_81682
atgaccgtcgtcgttgtcgtgctgcgaggggagcagtaccatgtcgtagccgccgtcgagggacatgaacttgaggcttccgaagcggagcaccgtcccgggctaaagagattgctgaaggctacccatctggaactcaacgggaaagtgatccccacattaaatgcgcatgcgatacggttggttggtaagacgatttgggcgaggtcgctgcacgacaaagtctgcccgagctgggcttcgggcgagccgagggtgcgtctgctgactgaggggaccctcggtcgaggcgtgaatccgtccgggactaccgtccttgcccgagactgggctcggatgaggtcgcgtcccttggtagacgaggcctacgctttatcagtcgtttatggcttgttctga

SEQ ID NO: 38308 - DNA, 738 bp, Zea mays
  Peptide Sequence Number=SeqID_81683
atggcctcgcgccgccgcaccctgctcaaggtcatcatcctcggcgacagcggatatgtgaacaagaagttcagcaaccagtacaaggctacgattggggcggatttcctcaccaaggaggtgcagttcgaggacaggctcttcactctgcaaatatgggacactgctggtcaggaaaggtttcagagtcttggcgttgcattctaccggggagcagattgttgtgtcctagtctatgatgttaattctatgaaatcgtttgataatcttcacaactggcgtgaagagtttctaattcaggcgagcccatcagatcctgacaatttcccttttgttctgttgggtaacaaagttgatgtagatggtgggaacagccgtgtggtgtcggagaaaaaggcaaaggcatggtgcgcctctaaagggaacatcccgtactttgagacgtctgctaaggatggaacgaacgtggaagatgccttccagtgtattgtaaagaatgctctgaagaatgaaccggaggaagaatttctcctgctatgtacccaagggcgcatttcccatgctgtcagtcaatccgtagacttcatttgtgcagttccatcagtagcgtcataccttgtgaatacagttggacaaaataagagcaagcctgaactgaagttcgtctctgtgtgggatgggggtcgccttttcctcgctttctgcttcaatgcgagttgccacacccgtgctggctag

SEQ ID NO: 38309 - DNA, 549 bp, Zea mays
  Peptide Sequence Number=SeqID_81684
atgagcgtgaccaagttcatcaagtgcgtcacggtgggggacggcgcggtgggcaagacctgcatgctcatctgctacaccagcaacaagttccccacggattacatccccacggtgttcgacaacttcagcgccaacgtctccgtggacggcagcatcgtcaacctgggcctctgggacactgcaggacaagaggactacagcagattgcggccactgagctacaggggcgcggacgtgttcgtgctggccttctccttgatcagcagggcgagctatgagaacgtccttaagaagggcgaagaactgaggaggcagatcggcgctgcggcttacatcgagtgcagttccaaaacgcagcagaatgtcaagtcggtcttcgacacagccatcaaagtggtccttcagcccccgcggaggagggaggcgacgcctgccaggaggaagaacaggcgtggctccgggtgctctatcatgcttcaaggactgacaattgcaagaatgcagtgtttatgtaagaggttgtttgctggaataggattgctgtaa

SEQ ID NO: 38310 - DNA, 1029 bp, Zea mays
  Peptide Sequence Number=SeqID_81685
atgtcgcgtctcctcctccgccaccgcagcttcctcctcccaggggcgcggagcgacgccagccaccccttcacggccgcctcctcctcctcccgctcctcatacacttcccggttctcccctctcgcctaccacgcctccgccgcggccacggccgcaggcgcccaatcagagggtgcggcggccgagtccacacccgcagcgggcgaccagccctcatcgacacctccccccgcggcacgcgggcggtggggcttgctcaagttcggcgccttggcagcagtcgccggggccatcggcggcgtcggatacgtcacctacgcctattcgctgaatgaagtggaggagaagacgagagagttcaggaagaacccaaggctgctcatccctgaggatgcctccacgttcgagcttagctttgttggatatgtttttatcttttgtaccttcttgtccttactaagaggtgtacaatcttgggccgcagttcctgtttcagctatagagctgtatttggatattaggagcacaattgaagaccatgtcaggggatttactgaacccacatcagacaaactgctaccagatctacttcctcaagatcagcatgtcttcaccctagttcttgatctgaatgaaactcttgtctactctgattggcagtatgttgaacctgtgtttgagaggctgaactcaaggggtaccatttcacacaggctatcaagacctgcaactaagtacgtggatggaaaacattaccgggatttgtcaaagttgaacagaaaccctgctcaagtgatctatctcagcgcccatgctcttgaatcttgcctgcagcatgaaaattgtgttgaaatcaaaccttttaaacttgaagataaaaatgatacccaactgctggatctcattccatttctcgagtatgttgccatggctagaccttctgacattaggacagtgctggcatcctatcaaggtcatgatgttgctgctaagtttattgagcgttcaaaggaacaccagcggtaa

SEQ ID NO: 38311 - DNA, 627 bp, Zea mays
  Peptide Sequence Number=SeqID_81686
atggagaatcacaataagtccttgcctactcgctctagaagttctttttctgagtttgtgtctaacccacctatctgtgaagagggttgcagttctaggaatagaatgtggccttctttggacaagccagtaatcgaggccaagctgaacccagatgatgacgtggttgatgctggtttggaggatgtcgtggaaggtggacatggggtgaaaacgactaggtttgtggtggatgtggaagatgaggaggaggaagagggtttatctatgtcggctgtcgatggtatacttgaagagggcgttcatgaggagctactgcttgagttacctgaaatcaatgttattgatgtctgcatagattacccggatgaagtaccttccacttgtttgatggctgggccagaggtcatggaattaccactagacgcgcagagcagcggaagacgtctcgatgtagacgaacacgtcgagcagtgtcgtgcagtcgtcggcgtccttcacgtcctcgcacggttcgtcctaatgctccagatgcagcaccttcgaggtatccacacgtacagggaggaagcgccgcgtaccgaactgctaggttcgcgacggcggcttggcgagggcgagaggtga

SEQ ID NO: 38312 - DNA, 300 bp, Zea mays
  Peptide Sequence Number=SeqID_81687
atggactatggtggccggatgacctggaggtttggtgtgatgtctcttgagaaccccgatgagaggaatgagaatacaggtgtgacgcaaaagcgaatgccccgtcagcgtgaacagtacgggaatactgttcacctatttataggcataggtcgcagcacatgcaaaattacattaatgccctttacatttatcaataactctatagtaattcttcaaggtctagtttggcttttcatctttaagtcggtttccccttcccgccatgataccgaagctcttctgcatatagcttcatga

SEQ ID NO: 38313 - DNA, 4365 bp, Zea mays
  Peptide Sequence Number=SeqID_81688
atggccgttgttcttggctggtcgtcatcttggatctgcggggaagaggacggcgggcggctcaccctcaccgtcgcgtccaagtgcgtgcagaggacactcatagactgcgtcaatgtggtcctgttcatcgcgtacgtctgcacgctggctgccgcctgcgtcaggcggcggcagcgctctgcagatgcgagcagcgggaggagcggcgctcctagtaggtgggtgctgctcgtcgtctccacgtgctgcgtggcagctgccgtggcctactgtgtcacggctctccaagacgcctacgacatcaagacggcggttccttacttcgtcaggggcctggtctggatcgcgctggcggcctcgctgcacgcccagccgacgaggccggcgagggtcgtggccgtgctctggtgggtgctcttgtcgctgctggccaccgcgtacaattcggagatccttgccggggggcacagcctggacctcgcggagatgattgcgtggccggtgagcctcctcctgctgctctgcgccctcggctccctgctgccgcggggcgacgggcaccactaccgggacgcctccaacggcagcagcggcttgtcggagcctctgatcggcaatgacagaaccgtgccaacctcggagttgtaccgcgctggcctgttcggccagcttgccttctcgtggttgaaccctctgctccgtgtcggccgctccaaggcgctggacctcggcgacatcccgctcatcgccaccgacgacaccgcgcaccacacgtcgcagcagttcacggaggcctggagccgccacgtgagcgacaaagccaggagccgccggggcgtgggcagcaacagcctcgccctcgtcttgggcaagtgcttcctcagcgagatcctgctcaccggcttctacgccttcctgagaatgctgtccatagcagttgcccccctgctgctcttcgggttcgtgtggtacagcaaccaggaggaacgagacctccgggtcggcctgtcccttgtcggctgcctgctgctcgccaagctcgtggagtcgctgtcgcagcggcattggttcttcagctcgaggaggaccgggatgcgtatccggtcagcgctgatggcggtcatcttccagaagcagctcaggctgtccattcaggggaggaacaaccactccactggcgagattgtcaactacattgcggttgatgcgtaccggcttggcgacgccatcagctggctgcacatggggtggacctcgccacttcagctcgtctttgcagttgccacgctcttctgggcactcaagcttggggctcttcctggtctagtcccgctagtcatctttggtttcctcaacgtgccattcgcgaaaatgctgcaggggtaccaggccaagttcatggttgcacaggacgagaggctccggtccacgtcggagatactcaacagcatgaagatcatcaagctgcagtcgtgggaagacaagttccgcagcacgatcgagtcgctcagggacggcgagttcaaatggctgaggcagacccagatgaagaaggcctatggtgcagtcatgtactggatgtccccgacggtcgtctctgctgtcatgtacacagcaacggccatcatggggagtgctcccctgaatgctagcacgctcttcacggtcttggccaccctgagggtaatgtctgagccagtgaggatgcttccggaggtcctcacaatgatgatccagtacaaggtggcattagatcgaattgagaagttccttctcgaagacgagatcagagaggacgatgtgaaaagggtaccttcagatgactctggtgtcagagttcgagtccaagccggaaatttcagctggaaggcaagcggagctgatctgtcactgaggaatgttaaccttcgcgtgaaccgaggagagaaggtggccgtatgcgggcccagttggctcagggaaatcttcactcctgttgaagtttttggttcagtagcatacgtttcacagagctcgtggatacagagtgggactgttcgtgacaacatactctttgggaagcctttcaacaaggaactgtatgataaggcgatcaaatcttgtgctctggacaaggatatcgaaaattttgaccatggagacctcacagagatcggtcagagaggactgaacatgagtggaggccagaagcaaaggattcagctggctcgagccgtctacagtgatgcagatataagctcctcgaactttatccatgaaatggaatgtgtgatgacagcacttgcagagaagactgtcgtccttgtgacccaccaggttgaatttctgactgaaaccgataggattctggtaatggaaggtggtcaagttagtcaacaagggaaatattcagaactcctgggatctgggacagcatttgagaaactggtgtctgctcaccagtcttcgatcacagcattggataccagtgctagccaacagaaccaagttcaagggcaacaagagtctgatgaatacatagtgccaagtgcgcttcaggttataaggcaggccagcgacatcgacgtgaccgcaaagggcccttcagcagcaatacagcttacagaagaggaagagaagggcattggcgacctgggatggaagccatacaaagaatatataaatgtatccaagggggctttccaattctctggcatgtgtattgctcaagtgctcttcacgtgcttccagatcgcatccacatattggttggcagtggctgttcagatgggtaacgtcagtgctgcacttcttgttggggcatattctggactctctatcttcagctgcttctttgcctactttagaagctgttttgcggctattctgggtctcaaggcctccaaagcattctttggcgggctaatggactccgtattcaaggctcccatgtcattttttgactcaacaccagtgggaagaattttaacgagggcatcttcagatttgagcattctagacttcgacataccttactccatggcttttgtggcgacgggcggcattgaggttgttaccacagtactggtcatgggtactgtaacttggcaagtcctggttgtagcgatcccagttgctgtcaccatgatatatgttcagcgagtttttgagctaacacatagttttcaattcaatcaaaacatgaagaggcactacgtttcctcagctagggagctagtaagactcaacggaacaacaaaggcacctgtaatgaactatgcatcagaatcaattctcggtgtggtgacgatcagggcatttgcagcaactgagaggtttatctacagcaacatgcagctcatcgacactgatgccacactgttcttccataccattgccgcacaagagtgggtactcataagagtagaggcactgcagtccttgacaataatcacagcagcattgttccttgttctggttcctccaggagcaatttctccgggctttgcaggactttgtctctcctatgctttgactttaacttcagcacaaatattcttgacaaggttctattcgtacttggaaaactacatcatctcggttgaacgaatcaagcagtatatgcacctcccagtggagccacctgccattataccagatagtagacctccaacttcgtggccgcaggagggaaggatagacctgcaagatttgaagataagataccgtccaaatgcgccgcttgtcctcaaaggaatcacttgcacttttgctgctgggaacaagattggggttgtagggaggacaggaagtggaaaatcaacacttatcagctcattgttccgtctcgttgatccggcgggtgggaggatacttattgacaagttggatatttgctccattggccttaaggatctaagaactaaactaagtattatccctcaagaacctacacttttcaggggaaccgccttggagaagtgtcaactgaagacagcaatcagcaccacctctgctcttctggatacagttgtgagtgatgatggcgataactggagtgctggacagcgtcagctcttctgtcttggcagagttctcctacgcaggaacaaaattctagttctagacgaggcaacagcatccatcgactctgcaacagatgcaatcctgcagaaagtaatcaggcagcagttctcaagttgcacggttataaccatagctcacagggtaccaactgtgacagacagtgacaaggtcatggtcctgtcctacgggaagcttctagaatatgaaacaccagccaagctgttggaagacaaacaatcagcatttgctaaacttgtggctgagtattgggctaataccaagagaaattcaacatga

SEQ ID NO: 38314 - DNA, 408 bp, Zea mays
  Peptide Sequence Number=SeqID_81689
atggacgctgtcagcctcgacttcctctggccgcggcatccgtcttttatgaaacagcagctgccgttgtccctccctggctctagctctccaagccgatgctgctcgctgccccctctccaagctgacgccccaaccaaggctgcctcccccacaacagcaccttgcccatggccgagcttgtccctacagcgtggatgctatcgccctccccacgctagcagcaagcagtgccctcccctttctgcagcaagtggatgctcccagcccctcccttgttcctatggccatttccagccatctcccatggccgaccccaactcctcccatggacgccgttccctccctgctccagttttctccatggttgcggccttgtggaaccacgcaacctctgctgctcccatg

SEQ ID NO: 38315 - DNA, 582 bp, Zea mays
  Peptide Sequence Number=SeqID_81690
atgagagggagatgggcgcgccatgggagcagagaagggagctgggggaccgcggctggagcaggcaacccggggtgcggcgagctcgagcaggggcatcgccggcgagcagagagggacgctgagcagggagcagagcacgccatggcagggagaactcgagggaaggtaaccggcaatgcgcaggagctccacggctggaggttgaagacgacctggcggccggcggcccggcgcgcgcaggaagaagctccacgtagcgcagagcagaacgaggagcaggggctagggcgcggcatgggagcagtcgcgccatgggagcaggccgactatgcgtcgcgagtagaggggtgggagtggagggaggagagaggagcggctgggcaagcagccatgggagcaggggagctctggccggcgctggagaccacaactgggcgagcgctgggagcttcgatggcggagctgtcaccggcgagagaggatgcaggggcgctcgccagggagctctgcgagagagagatgggcactggagagagagcgcggcaagggaggaagaagagagagcagacgtgcgtgtaa

SEQ ID NO: 38316 - DNA, 786 bp, Zea mays
  Peptide Sequence Number=SeqID_81691
atggcgaagaggaccaaccctcaacaatggctgttctcccactctcaaaacccggtagcctgcgccaaatccggccgatttgttacggcgctgttgagagttcttccgggagatggggatgcggatagatctaacgagccgaccccaccagacgacgcccgtagaaccccgagcacccaggtagagaaggttgggctggcgcggtataatgtctggcggtgtgggctgagtgccacgagcaaagtgggccaaggtggagaattgtccgaaagtgaggagccctgggcttcccattactgcaggggagccccggccacctaccgacccgggccgaccaaccagcgccggtgctacatctccagactgcccctgctccgtgcggacccactctccagcgcgactgcacggctgttgttcccgcgggtggagatggcggcggtcaacctcctcgctgagtctgccgcggtgcgcttgagggcgtcggcgccgccgggcgcgggggaggagctcgcggccaggctcacggagtgcaggttccccgccacggcgcgtcgagggggagcggtcgcgggggctggggagagcgcgcgcaagtggagggagatggcggccaggaaggaggaattcctgctgcggagccggggccgagtcgcatggacgatcgtcgcgctttgctgtggctcgcatgcgtcccacatcctgcactcgctcggtatccatgtcgaccacgggattaacagacttgtcctgaagggcatcgagcaaactggctcatcagttatgtaa

SEQ ID NO: 38317 - DNA, 222 bp, Zea mays
  Peptide Sequence Number=SeqID_81692
atggcgctcaggcgaggggtccctgcattggaggttcctagaaactatagcagtttgtctgctacagctgaactctcaccgctgctcgagccgtacgaccccctggccgatcccatcatgaaagaagcgctggatgtaatgagcgtcgctaactccatcgtcgacgaagtcgtcgataggctgctgaatgaagccgccgagaagattcttaaagaagattaa

SEQ ID NO: 38318 - DNA, 573 bp, Zea mays
  Peptide Sequence Number=SeqID_81693
atggagtgtgttaagaaaatgaaagctagcttcgccagcgttggcgcattctcgagcgaagaaagctttacaagaggcaaccccgaaggtgccatcgaatggattaatcacgaagctgaggccttcgaagagattttaaatagccgcggagacatatgcgcttcttcgggtgccagggggattgcaagcattttggagaaaaagggctgcgaacatataaagattttagcgcaatccgaagctactttgtccttcgaagatgcaaaagatccttcagccgaagctagtatggctggtggaaaatttttcaccgatatctgggacaatggtggtcgagaaatggcccgagaaattatccaaaaaagcgaaaaaggcatccatgacgctagaaaagtggcagaggctgttgaaaaaagcgcagagcccgaagggcaaatagatcctactaaagcgtctccgggccctcacccgaaaggagacgatgaaattaaaaagatggctgaagctatcatggatcaagtcgtcaatcaactcctgaacgaagctgcggacgtagtacttagggaagactag

SEQ ID NO: 38319 - DNA, 513 bp, Zea mays
  Peptide Sequence Number=SeqID_81694
atgcccagctccaaaaagaagcacatgagtgttacattgatggatggactatcacctgcacacagtttcagccccgtcgtcgcatcagtcgaccgcgacgccgccaccgaccgtcggaccgtccgcgctcctcgccggtgtccaccaccgcacctcgccggactgtccgcccacaccgtcctcgttccccaagccgcgacctcgaccaagcacctgcagcctagcccctccgtgctcttcctcccctcacccccggagctctgtccgcgctcaccgtctgccatcggcgcgaccgcgcagcaccccgactggaccgttcgcgccccgccgtccgaacgcttcgccggagttacgtcgtccgccttcgcgccgtgcccaaccacccagccggagctccgcccaacgccaagacttcttcgtccttggtcgtgcctcgtctcaccgcgaccaagttcctccgttcaccacaaggttgaagacaacccaaatattttattaactcgaaaatcatag

SEQ ID NO: 38320 - DNA, 153 bp, Zea mays
  Peptide Sequence Number=SeqID_81695
atggccatgatgggttcaacatctgaaaagatgtacctctgtcaggtgatgaaacagtcgagttttgctatttctgctcgaaggtggtgccaaagcaggaggaaaatcagtaaacttgttggcgggaggatgtttttcctcccagttatgtaa

SEQ ID NO: 38321 - DNA, 195 bp, Zea mays
  Peptide Sequence Number=SeqID_81696
atggctttggtacttgagaaagccggttgtgatcatgttaaatttgtacatgaagctaacttcggtgtgaccgttgaagatattaagggacctttgaagagcatactcagcgccatgaagagatttttcttcgagttatgggataagggtggccaacatctagctgctttggaagccaaagaatatactaggaag

SEQ ID NO: 38322 - DNA, 519 bp, Zea mays
  Peptide Sequence Number=SeqID_81697
atgctgctcttccgccacggggggaagacgtcatcgagtccgccgccgccgggcgggctgacggccgccattgtcgttgtcgcgcggtggacaaaggagtaccatgtcgtagctaccgtcgagggacatgaactcgagactcctgaaacggagcagcgtcccgggctgaagaggttgctagagactacccatctggagcttgacgggaagttgttcgtcaacacgcagcaggcccctacctggcgcgccaactgccgagaggagccagagccctatgtacatgccaatgtggctgtcggagaggtgctagagcctagtgcatgcgatgtcgtggtcgtcggaggagcgcttgagccctatagaagcacagctgtcggggctaccaggaccttgctgacgtctccttgcttccgtagggagctgagaaccgccgtcgtcatggacgcacgcggggtgccatcattgcttgtttaccggggcgagccagatgggacgccggtcttgttccccatagcctga

SEQ ID NO: 38323 - DNA, 258 bp, Zea mays
  Peptide Sequence Number=SeqID_81698
atggcggcactctgttctcccactctcgcagtaaatggcggaccctggcgcggcgtggagaagctagacttggtagcttgcgccaaatccagtcgatttgttacggcgctgttgagagttcttcggggagatggggatgcggatagatctgacgagccgaccccaccagacggcacccgcagaaccccgagcacccaggcggagagtatgccacgcaagcccgatctgccagtgccgcggcgcgatgcacgcgactag

SEQ ID NO: 38324 - DNA, 546 bp, Zea mays
  Peptide Sequence Number=SeqID_81699
atggccatgatgggttcaacatctgaaaagatgtacctctgtcagatatggcgcgaaccaagactacccagcgcaaagcaacgggaccgcatggtgtaccccgacatcagctggcctctagacatgaaggaagcagaagtggaaatgtcattgcgaactcgtgctcatgatggggcgggaacttcccgcggctggaaggacactcccaacccgctacttgtacctcctacactggctgaggctatcgctgccttagtcaacgctatcaccgacaacacgcgtttcttgcgtgaaatggcaggaaatcaatttcagcaacacggaggaagaggtcaacctcaaggaccacgagactccacgggctccagcgacgacagcggtggctctaacggcgaggagagtgagagagagagaagggggcgagcttgggtagaaaggaaaagagagaagctcggcgtcggttttatagaggagagggagggagaggagagggcggctggggtgcttcatggccatcaatggcgtcagtttcatcgaggagagtaa

SEQ ID NO: 38325 - DNA, 1617 bp, Zea mays
  Peptide Sequence Number=SeqID_81700
atgcaggtggcgtgcaactgcaccacggggacgcaccccttcgacttcgacgtatccagcatggaggcccaggcccacacgtcatggaccgggaaaggggatactccaaaagggatccttctccgcgaaggaagcgggctccgagccctcctactgatcaggggttcgaaggctggcccctcggaagggctggcccctcgcaagggttcgacagccacctcagagcactcgggctccgcgcccactactgatcaggggttcgaaggctggcccctcaaagggttcgacagtcgccccagagcatgcagagcgagggatgactctaggtacgtccgatacatggccgaggctcgggctatgctcccgagaggagtcaaaccactcctccgaggcctcgagggctacatccggcagggccgaagtgaccgcagtcacttcgcccttccactgaccgacctgacaggaaaacagcgccgcctgccccgctccgactgctgtgccacccgccaggggctcggcccccacctcggccttggaaggtggtctccgcctcgcccgaccccagggcttggcctcaacctcgacctcggaagaaggcctccacctcgcctgaccccagggctcagcctcggccccgacctcagaaggaatcgcgtcctcacccaaccccggcctcggcctcaggaggagtctccgcctcgcccgaccttgggctcggaccgaccacaccacagggggtacatcattgccctacccctagctagctcaggctacggggaacaagaccgacgtcccatctggctcgccccgcatggagttatcctggaagacagctcggaggaacttctgccgatgcccaccccgttggcacagtcactggcctttgcagctaggtcatcaacatcggcaccgcctacaccagccgttcaagctcctacacccggaggcgacgacccagatgactctggggacgatgatgatgaggatgacgacgacgacgaggacgaagacgaacaagtcaacgaagaggccaactatgcccagcaggactacttcatggggtttgggcctgtcaccgaacattacacatcaatgttcgagatggggcacttccccaacctgttgcaagacatgctgcacgcgttaggaacctacgtccgacccttgtacgagacaaggcgagtgtgcgagcctccccgggcttgctactacatcactcgcattcacgtcagggtgatggatgcaggggataggggattcaggactctaccagctcatgagtccctgacactgctatccacctatgctgcttcagtcagcgatgctgccagacgaactttgtggtctgtgagccacacctactggcagcagctgcatgacatgatgttcaggcattttcctctgcgtctgagtggaggaagccagaccagcatcgttccaggtggagctggtgaggatcgcctcaacaccctagctggtgtaatggccggtctcaacaccgacctagacagtgccaccctggatctctctagggtgcatttggaattggagaatgcccacgctaggattgcagccctggaagcccgacttcaaggacgggatccgcctgaagcctag

SEQ ID NO: 38326 - DNA, 1338 bp, Zea mays
  Peptide Sequence Number=SeqID_81701
atgggatggtcgccacggcccccgcccatcacccgcagcaccgcatcactccgcctcgtcccccacttctcgcacttccgcttcagcttccaccgtgcccaagagtcacgaggcggcggcgggtcacgccgacgtactctcaggtgctgcggtgggactgcccctgctgctgccgcgggggcggcggaggggaggatggccgcggcgacggcggcggacatggtgtgggtgagggtgcttgaggatggcgtgttccggttcgacgcgtcggaggcggcgcgcgccgccgcggggcccagcctctcgttcgcggacccgcggcggcgggaggcgccgcatgacggggccgacatgcccgccgttgtcccggtatgcgaggtcgcggcggggggatcccagaaggtcgtgataaagtcacctgaggtcatagtgccttgttacaactttacaaatcagggcagaacaagaaaacccttcaagggtgtgctatctagtgagcaggttttcacatggaatacagatgcatggggttttgggccaggaaccacttcgttgtaccagtcacacccttgggttttggctgtcctccctgatggaaaagcattgggtgtccttgctgataccactcggcgttgtgagattgatttgcgacaagaatcaactataaagttctctgccttatctgcctaccctgtcatcacttttgggccatttaatactccagctgatgtcatgacatctttgtcgcatgcaattggtactgtgtccatgccgccaaaatggtcacttggctatcatcaatgtcgttggagctatgattcttctgagaaagtactcaaggagaaggatggacctggtgcattggtggggatcgacaatcgtataaggaggctctggtgtcttcttggtcccttgcttcccatggtgtcttcttggtcccttgatggcgactgggtgaaggttgaaggtcgctgtgctcgtcgtttggcccgccgcccttccaatcccactctcaggcctgcttttgttgatttgtgtgggagacgcttcaattgcttctcacttgatcatcagtcggtctccaagaaaatctcagtggtggctggttcgaagcgtgccatggagggcgactcggtggtcggtggttttatcgctggtgaaggtgcgaagaggtacactcgccgtgggcagcagaggcggagggctaaggctggtggtgggctagatgatcatatacgactgtcggtggatcgccgccgctgtcgccggtggtttcttcttctcctgcgttggactctattggccagtgagattcattgggcgctctgggagggttga

SEQ ID NO: 38327 - DNA, 243 bp, Zea mays
  Peptide Sequence Number=SeqID_81702
atggaggcggcgagcaacactctggccatggtgaaggagcatgggaggccagcagcaggctgtgagaggccaccagcgatagaaaagaagcccgagggcacggtcgggcggagcgtccatggggaagggagcaggcccatggctggcggtgaggaggagggcaggcagcacgtctgcgccaatcttggggaggaagggggctcgaccatggccgacggctggggtggggttcctgacagctag

SEQ ID NO: 38328 - DNA, 282 bp, Zea mays
  Peptide Sequence Number=SeqID_81703
atgcccaaggtcacagtggatgaggtcgaaggggtgagtagctcaggatatggaagaagagaagggcaagcgagtgtgacgcccaagctgacaggcatggcaaagcgaggtggcgttgccgtgggggcaagggatggccaaggtgaccgagctggagaggacgtcgtggctagggtggccaagacgacagtgccaagtggaggcagaggcagtggagacgaggacgtagggtgtggcaacatgggcagagaaaggtggggcggggaagcgaatgggatatag

SEQ ID NO: 38329 - DNA, 210 bp, Zea mays
  Peptide Sequence Number=SeqID_81704
atggggaagaagcgggcgttcgtggcctgcatcgaagatgagcaggcgaacgcggaatcgggcacggcggcggcgattccaggcggctgtgtgtccgtgctcagtagagccgaacaatgcctgaacgaccaagttgaagagtgctggcgatggggcccatatgtcaatgaaaagagggagatgagaataagtggggaggggctgagctga

SEQ ID NO: 38330 - DNA, 1008 bp, Zea mays
  Peptide Sequence Number=SeqID_81705
atgggaagtcttatgttgggtgctggtcgtggtcgacaggaacgggggcatctggcaagctcttatagttccggctcaggcagattggatacgggcatagttcccaaagctttaccctgtagtctagactataagttggttacgaagtttgaagatgaagatatcatgctgaactccatggatgctagtctagtgatacccccgatccgattccctgatccaatatcaatggtagatgatctccattccattggttgcaaagcaatctggatgcttgacccagggatcaagaaggaggagggttactttgtttatgatagtggctcaaaaagcgatgtttggattcaaaaggcagatggcagtccattcgttggagaatatgcctcacatagtctacattcaggggaggtgtggcctggtgattgtgttttccctgactatacatctgaaaaaacacgagcttggtgggctagtttggtaaaggacttcatctctattggtgttgatggaatatggaatgatatgaatgaacctgctgttttcaaaactaccacgaagacaatgcctgaaagcaatattcataggggagatgctgatattggtggtgttcaaaatcattcatactatcacaatgtctacggaatgctaatggcaagatctacttataaaggaatggaaatgggcaatgcagctaaacgaccatttgttcttacacgagctggttttattggaagtcagcgttatgctgcaacatggactggtgataatctttcaaattgggagcatctgcacatgagtctaccaatggttcttcagttgggtctcagtggtcaaccattgtcaggtcctgatattggtggttttgctggaaatgctactccaaaactttttggaagatggatgggtgtgggtgcattgtttccattttcacgtggccatacagaaactggaagcattgaccacgaaccatggtcctttggtaaagaggctagatacgttcataggtag

SEQ ID NO: 38331 - DNA, 255 bp, Zea mays
  Peptide Sequence Number=SeqID_81706
atggcgaactacatcgccgacaccatgtccctgcccaacttcaacatggcacgcaagaagcttgtcctcaaggaattttgccatggtcgaggctacgaacttcgtagtcgaggccccgctgtcttgggcaccgacgcccttgacacttctagggccaaaaagaggagtgtccacgatgctctcacatcaaggaactgggtgaatgacatcagaggagctatctctaaagcgcaggagaactgcgcatcattttaa

SEQ ID NO: 38332 - DNA, 684 bp, Zea mays
  Peptide Sequence Number=SeqID_81707
atgacccatatgtctaccctctactctactttcggcgaagataccatgtgggaacaacgcttcatcaagtgggaacgatgcttcatcaagttcaattgcaccaaagaggagtgcatcgtcgttctggagcaatctagtgtcgagctcgagaagtggcttcccttggtggacacggccttggacgacgtcaagttgaaattacgtaagatgaacaagcagtgggatcatgcaatgctggagttggcgggctccgatcagggtctcctctgcaagtcggatgtttcatctgatcatcagatccaattcctcccgttgacggcccgagtgggcaccatggtaatctttgtcatcgagatcaggggtttgggtctcacgaccttcatccctggcccggtcaagggaagaggtggccctttgttgagaaatgcacaggggtcatacttgcaatgcaactattcaactgcatgctcttcaggagacagtgccaattcttttatcaatcaatccactgtcagtaggttgggtttggttactgtatcagctgctcctattcaagtccaagttgctaatgggggtctgttgtcttgttccatagtggttccgcaagctttctggagtcttcaggggtgccattttgtgcaggacttacaagtgttagcattacccacttttgacatcctctag

SEQ ID NO: 38333 - DNA, 249 bp, Zea mays
  Peptide Sequence Number=SeqID_81708
atggcaagtagcagcaggagtgaagaaatcgaagtggttgatgctgaagcaaatttagagcagcaacaggatgacaggcagcaagatggagctgtcgagccagagaacttgacagaaggagcaagtgcacaaaaacatggaaacaaacgaacaagatctgtggcaaattcatctacagatcaatcgcaaccaaactctcacaagtccaaggaaatgaagctcaacataaggccagaactcaagaagtga

SEQ ID NO: 38334 - DNA, 318 bp, Zea mays
  Peptide Sequence Number=SeqID_81709
atgtgggccctggacgcactgaagatcttcttcccagccatcgcaacgaccggtcgattcctccgccactgccgcgcgaatctctccaagtccggtagcctcgtccagggggattgcgggtcgtcgatcacggatcctgtggcccgtattgaatacatttcacatacgatcagatctaatctgtgccctcggatgtggatccaatggtccaacgccacccgtaccccttcggccagtccattttgcataagagaccctggaccttttggaaatagaacccaccgtccaccttgggattactctgagtctggggaataa

SEQ ID NO: 38335 - DNA, 1212 bp, Zea mays
  Peptide Sequence Number=SeqID_81710
atggcgagggagaggatggggcgagctcgaaagttgtccttcccccacgcgggaaagacgtcgtcggttccgccgccggcgggcgggctgtcgaccgccattgtcgccgccgcacggcggtggaaggagtaccatgtcgtagccgctgtcgagagacaggaactcgaggctcccgaaacggagcaccgtcccgggttggagaggtcgttggagactgcccatctggagcttgacgggaaactgctcgtcaacacgcagcgtgcccctacctggcgcgccaactgtcggcgtttcgagaccggggggtccccgagccgacgactagcgagggtgtggaggaaggaagggataaggcgtttggtttacccggaccggacgacaggacaccgtcgggggttcgctgcaacgcatccacagcttctcaggcctaggttgttcgacgactaccgtgatgaagatttttatgggctaccgcgcaaatacagtattgtggctcgggtagaagttaaattcccgattgaaccacgttttcgtgatagacaacatttcatattatctgacatcaatggagccaagatcgaggccataacatatatgtatgagacagtcaaacatttcgacaatttgctccatgaaaagcatgattacaagatgcataatgtaaagttcagtcttcatccgggtgaatttaattttcgtcatctaaatggtcccatggaattgtgtcttgatcaacaaactatcgtggaaccatacactgttccaattcaaatggcgccattcccaaaacaaatactcttgaaccttgctgatattgccgagttgccaaacaggactttagtcgacataatggctattgtagtccacttggatacaattcatcgcacaatgtggggccctttcagaaagattgttataatggatgctagggggtatttacatatcattaaagtttggggtgacctactaaacaaaaatgcactccgctgggcgttggctaaggaggattatggcataataattgggactatgtttagacggttcagaagacaagagtgcctcgagtcttcggatcataccacaatacacttcaatccgttccatcacaacacccatcattttggacatgtgattaattgtggcattcattgcagcaattcaaagagctttggtggcgcggaacaaccgtcagtttgtggttacatttcttga

SEQ ID NO: 38336 - DNA, 975 bp, Zea mays
  Peptide Sequence Number=SeqID_81711
atgccgacgaggagcaaactactgaaactaggcaggcagaaattttgtaaagaagcacacaaagcggcaagcaaagcaacggccaataaagataagcggggcgaagggtccatcacgaccacgacgtcgcccctgcgaccacagagaaagtataactcctccagcctggatggggtcgatggccgaacacgcatctcgcgcacggggcaacgccgagcttcccgctgcctgctccgtgctcgctcgagtggcggcagcaagatagagcgaaggagtgaactttcttttgttttggttgagaagaggccaccaatccgcatcgtcgaaggggctcgctggccgctttctttaaagtttaagcgctcccgcggtggaggccgaatcactcctggccacttcggcatctgccgatgccgatgcctccactgcccctccgctccgttgccgctgcataaatacccctcctcgccgctccgggctgaccaagggctccccgccttccgactccggcagggagaggcgaaacctttggtcggttcgttacgcgcgttgatgacggagctgtggatggaggtgctgccgccctacttcgcggggcaggcgggcgggtggttcctgctggacaggcgggccgggcccggggcgtggacgctcgaggagaacaagatgttcgagcgcgcgctggcgcgcgtcgactgggacgcgccggaccggtgggagcgcgtggccgcggtgctgcccaggaggacggtggccgacgtcgcggcgcactacgatgacctggaggtcgatgtcggctccatcgaggccggcttcgtacccttcccccgctacggcggctgcggcggcggcacgtcgcaatcggccgccgggttcacgttcgagtgggacggcgacgcgggcgggacgggctttaataagcgctcctgctacgtggttggcggcggcggcaagcgcgagtgtcggggaccataa

SEQ ID NO: 38337 - DNA, 672 bp, Zea mays
  Peptide Sequence Number=SeqID_81712
atgcccagaaggaccgatgaacaggaggaggacccagaggtcagagccccgtcgccaagccaagactttgctatgactccactttgtaaccacctcgaccatgataagggacttgggaacctctcctccctctctcgcttgcttaacaacgatccattccgggagcctcgacgacgaaggcgaagtgggcagggccccggaagcctagctcctccaccaaggaatcttggcacaaccgcgagggccagtagtggcctccgcatcgactacacccccggagcggccatccgctttggaaatcttgatttcgcccatggcagcctcaaccttgctccgcctgggcagcgtgagaggcacatgccagcctcgccttctgaggttgatgaaataaggcgacagatcacggtccatatagggccaaaccccacccctgtcgccatcccgcctcggctgcaccatgccccgatggtgatcgctaccctagtggcctgtggccatctccccaccttcgatgaattagagtttgtacgggtggccgacgacggtgggggcctcatcttcgacacgctctgcacggactcggaccatagttcccctgcgagcgaggaacgacgaccacccagcttctgtggccccatcggcggtacaagcaaagtggggcgccacacatga

SEQ ID NO: 38338 - DNA, 579 bp, Zea mays
  Peptide Sequence Number=SeqID_81713
atggatcctaggcggataccagtattgtttcgtcttgccaagcagttatcatcatttgcttcatcaaaagatagttatatggtgctagccgcggcggcctacctcctcctcatctccctcaagttccgccgcgtgctggacctggcggccaccgacctcgcggacgaccctgccgtcgccgccttctcctctccgtcctccgccgaccacctgcccccgcctgggtccgcttccgccacctcctcctcctcggccctgttcccggtctgccccttctggcaccgctacgaccgtgtgtccctccccgacctcgcgtcccgcaaccgctctgcactcgaccgcatggccgacgacgcctggcgctcggcctcaccgcctgggaggacgccgctgccttcgcgagggacccctgggcgctgctcctccaggctccagcttctctgcctccactttagacgccgcctcctccatggtgcctgctgcagggaattgcggaggccgcagcgttggtgccgaggaatcacggaagcctcggtgttggcgatgacgcgttgtgagagcaagggagcagatttctag

SEQ ID NO: 38339 - DNA, 594 bp, Zea mays
  Peptide Sequence Number=SeqID_81714
atggcgagtggaggtgggactccttcggctggaaggaggacgggaggattgggtcggaggataagtcactgcagaaagtcaataaagaacaaaaagaagacaagcaaactcaagcccttgaaaagagtgtgtttgtcgcctaaatcagaagtcatactagaggaaacctctatagataatgcaccctcaactgagattaaagtgatgaatcgccacaccattattctaacaagctttaaagaagttcaagaaaaatcaagttctatttctgaagccttgtcacctaggctgaaggaggaccttaatgattcagattcaaaatcagtggctagaactaaaagtgatggcagaactttcatcccatgcattccagtgaaaagtgttattgtgataaagcctgagagattgaaaaggaaaggaatagggtctcaagattgtgcttcagactcatggacatctgaagaagatgcagttctttgtggaactgttcatgagtatggtcctctttgggaattggcaagtgattttcttcaatatttgccagacagttccttgtatatgggaagatatcatcatccttgtgcattgttgtga

SEQ ID NO: 38340 - DNA, 363 bp, Zea mays
  Peptide Sequence Number=SeqID_81715
atggcccacctccagctcatggcgctcaccggcggcgccgacgacgagatggaggaggtcgcgctgctgggatcctacgacgaggaggccggggtggggccggaggcggagggggaccgggcggaggccggcatgcggcgggtgcaggtgcgcgtaaccggcatgacgtgctccgcgtgcacgggagccgtcgtggggcggaggggggggggcgctggatccgcgtgcgggcgggcgatccacggggaggggcgctggatccgcgtgcgggctggcgtgagcgggattcgcggcgtggatgttgaggcgggagcggtctacattgtagacttaataattagtagagatagagatagagaataa

SEQ ID NO: 38341 - DNA, 840 bp, Zea mays
  Peptide Sequence Number=SeqID_81716
atggcgagggagaggttggggcgagctcgaatgttgtttttcccccacgcgggaaagacgtcgtcgattccgccgccggcgggcgagctgtcggccgccattgtcgccgccgcgcggcggtggaaggagtatcatgttgtagccgccgtcgaaagacatgaactcgaggctcccaaaacggagcaccgtcccgggttggagaggtcgttggagactgcccatctggagcttgacgggaaactgctcgtcaacacgcagcaggcccctacctggcgcgccaactgtcagcgtttcgagactagggggtccctaagccgacgagtcgggcgacgtggaggctcctccgaggccgaggtcgagtctgtcttccatggccgaggccgagcccgagctcctgggtcgggcgaggcggaggtcgttcggcagagaccagggcggagtccgagccctgggtcgggcgaagcggggttcgtcgtcttccggggccttagcccgagtccgagccctgggtcgggcggagcggagttcgccgtcttccgaggccttagcccgagtccgagccctaggtcgggcggagcggagttcgccgtcttccggggccttagcccgagtccgagccctgggtcgggcggagcggagttcgccgtcttctggggccatagcccgagtccgagccctgggtcgggcggagcggagttcgccgtcttccggggtcttagcccgagtctgagccctgggtcgggcggagcttcctatggcgcctttggcaaggcctggctgcctctttatgctgatgggggttaccagctgagaattaggcgtcttgagggttacccctaa

SEQ ID NO: 38342 - DNA, 1044 bp, Zea mays
  Peptide Sequence Number=SeqID_81717
atgagcaagaacacaagagacacaagatttatcccgaggttcggtcacaccaccaaggtgccctacttcctcgttgaggagcccacaaagagtcgggtctctttcaaccctaatcctcccttcgccgaccacaaaggtcaagcccacacactaatctttgctcaaacgagcgggcgcaaggagaggatccaggtgtacaatggggatgcagcagagtgctacgtgtctagcgggggagagctagcgccctgggtacatgccaatgtggcagccggagagaacttggcgcccagctggtgtggtgtcgtggctgtcggaggagtaacggagcctggtggagggacagctgtcggaatagttgggctcttgctgacgtccccccgcttccgtaagggagctgagagccgccgtcgtcatggtctagcggggcgccatcattgcctatctggcggagctagccagatgggacgtcggtcttgttctctgcgtcccaagtcggctcggggccgagcccgagctcctgggtcgggcgaggcggaggtcgttcggcagagaccagggcggagtccgagccctgggtcgggcgaagcggggttcgtcgtcttccggggccttagcccgagtccgagccctgggtcgggcggagcggagttcgccgtcttccggggccttagcccgagtccgagccctgggtcgggcggagcggagttcgccgtcttccggggccttagcccgagtccgagccctaggtcgggcggagcggagttcgccgtcttccggggccttagcccgagtccgagccctgggtcgggcggagcggagttcgccgtcttctggggccttagcccgagtccgagccctgggtcgggcggagcggagttcgccgtcttccggggtcttagcccgagtccgagccctgggtcgggcggagcttcctatggcgcctttggcaaggcctggccgcctgtcagtctcactctttgcgttaaatgcccctgcgactcggtcggtcggtgcggtgatttagtcagggttgcttcttaa

SEQ ID NO: 38343 - DNA, 438 bp, Zea mays
  Peptide Sequence Number=SeqID_81718
atgaatgcgccaccttccatcgacgggatgaatgcgccaccttccatctacggcctgcgatcccccaaatccccgaccttccatcgacgggcgaggcgcgggatcggggcgcggctcgaccttccattcatgcggactgcggctccccgaccttccatcgacgggcgacggggagcggatttcgtgagcggcggattgacgggcggggatttggggattggggcgcggccgcgggagtggactgcgggcgatggcagcggtggaaagacgtacggggatttggtgggggactgcgggcgcgggagcgggagcggaaagcgggcgcgggagcggactgcgggcgatggcagaaccatcgagtgtggacgcctacagtccacacatatgagtagtagagatctgtggtgcaagttatatttgaagtgcaggacattttga

SEQ ID NO: 38344 - DNA, 261 bp, Zea mays
  Peptide Sequence Number=SeqID_81719
atgtgggccctggacgcactgaagatcttcttcccagccatcgcaacgaccggccgattcctccgccacttccgcgcgaatctctccaagtccggtagcctcgtccggattagctcatcggtaggtagttggtcgccggcaatttctcgacggagcagggcctccgtcgcgtgcggtgaactacgtgggcacgggattctataccccgacctcgggcgggtgcactacccagcgattcgcggtgctctgcgcatagtgtag

SEQ ID NO: 38345 - DNA, 804 bp, Zea mays
  Peptide Sequence Number=SeqID_81720
atggcccctcttgcgacgtggtcggtccgagccctaggtcgggcgaggtggatgctcctccgaggtcgaggtcgagtctgtcttccaaggtcgaggtcgagtccgagccccgggtcgggcgaggcggagactgtcgtccgaggccaaggccgagtccgagccctagggtcggggcgaggcggagttcttcgtcttccggagccgaggccgagtccgagccctaaggtcgggcgaggcggagttcatcgtcttctggggccgagcccgagtccgagccctggggtcgggcgaggcggagttcgtcgtcttcccggggccgagcccgagtccgagccctggggttgggcgaggcggagttcgtcgtcttccggggccgagcccgagtccgagctctcgggtcgggcgaggcggagtttcctatggcgctcgaggccagacttggctgctgtcagcctcactctgtcgagtggcacggcagtcggagcgacgcaggcggcgctgtcttcttgtcaggccggtcagtggagcggcgaagccatccttgcattaaatgctcctgagatacggtcggtcggtgtggcgatctggccaaggttgcttcttggcgaagactgggcctcgggcgagccgaagctttgtgctgatgggggttaccagctgagattaggagtctttaagagtaatcccaaggtggacggcgggttctatttccaaaaggtccagggtctcttatgcaaaatggcctggccgaaggggtacgggtggcgttggaccattggatccacagtcgagggcacggattag

SEQ ID NO: 38346 - DNA, 780 bp, Zea mays
  Peptide Sequence Number=SeqID_81721
atggctgaaaggtcctcccgctatgacacgggggctgggtcccacgtgtcatacaagctggcccagggcagacaaggccaaaccgccgcgcacggccagcgggtgaaagggcagaccgtcatgcaggcggcatgcaaacgcacccaggggacgcaccctttcgacttcgacgcgtccagcatggaggcccaggcccacacgtcatgtaaccggcgcgccggttactacgtgcaagaaactgcaccgccactcgcgccagtaccgcgccttctcgactgcggaaccagtgccgcgactcgaggcgaccctgcgcatgacccgacagtgccaaccgagcacatcggtcacggggatcgggaaaagggatactccgaaagggatccttctccgcgaaggaagcgggccccgagcccccctactgatcagagagtgaggctgacagcagccaagtccggcctcgggcgccataggaaactccgcctcgcccgaccccagagctcggactcgggctcggccccggaagacgacgaactccgcctcacccgaccccagggctcggactcgggctcggccccggaagacgacgaactccgcctcgcccgaccccagggctcggactcgggctcggccccggaagacgacgaactccgcctcgccccaccccagggctcggactcgggctcggccccagaagacgacgaactccgcctcgcccgaccccagggctcggactcgacctcggctccggaagacgacgaactccgcctcgcccgaccctag

SEQ ID NO: 38347 - DNA, 66 bp, Zea mays
  Peptide Sequence Number=SeqID_81722
atggcgccaccgcggttggggcaggacaccgtcgctcagctcggactaagcccagggattgattaa

SEQ ID NO: 38348 - DNA, 273 bp, Zea mays
  Peptide Sequence Number=SeqID_81723
atgacaccatggtgctggtcgaggctagataggacggacgatggggttatgaagaacgacttttatagaccacgacggagtccgaccagaggaacagcagcagcaaaaaccacggtgttcgttggcgcaagcttcggcgaaggggatgaacccgacatgcgggccccagccaccagtgaccccacagccacgcaggcgcgcgagtggcttagtgagcacggctatgcacggaagttgggccggacagtgtgtaatcgaagctggttcgagtaa

SEQ ID NO: 38349 - DNA, 1191 bp, Zea mays
  Peptide Sequence Number=SeqID_81724
atgactgagcttgaagtgatgccagctgacctaaagcttcttgcaaagagctgcaagtcactgatttcattgaagattagtgactgcgatctttcagatttgatagagttcttccaatttgccacagcactggaagaatttgctggagggacattcaatgagcaaggggaactcagcaagtatgtgaatgttaaatttccatcaagactatgctccttgggacttacttacatgggaacaaatgaaatgcccattatgttccctttttctgcaatactaaagaagctggatttgcaatacactttcctcaccactgaggaccattgccagctcattgcaaaatgcccgaacttactagttctcgcggtatcatctcctgctcatgtgaggaatgtgattggagatagaggattaggagttgttgcggatacgtgcaagaagctccaaaggctcagaatagagcgaggagatgatgaaggaggtgtgcaagaagagcagggaggggtctctcaagtgggcttgacggctatagccgtaggttgccgtgagctggaatatatagctgcctatgtgtctgatataaccaatggggccttggaatctatcgggacattctgcaaaaaactatacgacttccggcttgttctacttgatagagaagagaggataacagacttgccactggacaatggtgtccgagctttgttgaggggctgcaccaagcttcggaggtttgctctgtacttgagaccaggagggctctcagatgcaggtctcggctacattggacagtgcagcggaaacatccagtacatgcttctcggtaatgttggggaaactgatgatggattgatcagcttcgcattgggttgcgtaaacctgcgaaagcttgaactcaggagttgctgcttcagcgagcgagcactggcccttgcaatactacatatgccttccctgaggtacgtatgggttcagggctacaaagcgtctcaaaccggccgagacctcatgctcatggcaaggcccttctggaacatagagtttacacctcccaatcctaagaacggaggttggctgatggaagatggggagccttgtgtagatagtcacgctcagatacttgcataccactccctcgccggtaagaggctggactgcccacaatccgtggttcctttgtatcctgcgtga

SEQ ID NO: 38350 - DNA, 192 bp, Zea mays
  Peptide Sequence Number=SeqID_81725
atgagcaagggaaagcaagatgttgctactaataagacggtagagaatagaagaaagtctttaggggacccaagtcctagcaaaaagtctttagggatcttggtccgtcaaggtctaagccatcgacgccccatcgatggaggagctggcgtgctgaaggttgacacgatgatgaagaacaacggagcctag

SEQ ID NO: 38351 - DNA, 465 bp, Zea mays
  Peptide Sequence Number=SeqID_81726
atgggcaagagcaacaaacgcaagcgtgagccgactcctccttcggaggatttcggcgactcggaatactcggaggaggagttctcctccgagtccgaggggactccggctcccgtctctcccccagcgtcgtctgacgactcagacgactcacagaggcttgccgcggaggtctggacttatatccgggccgtcgagcgctccgggctcgcgggctcggatgagtcggagtactcctcggacgaggaggactcgtccgaggaggacggtggcggcgaagacgacgacgacaacgacgatgatgtcggcggcgatgacagtgacggcggcgatgacagtgacggtggcggcaggggcggcagcaagggtggcgacggcggcagcagcaaaggcggcaacggcggcagcggtagaggtgacagcggcggcagcagcagcaagggcagcaacagggccagtggctag

SEQ ID NO: 38352 - DNA, 207 bp, Zea mays
  Peptide Sequence Number=SeqID_81727
atggtgccgccgcggttggggcaggacactgtcgctcagctcggactgaggccatcgagcttgcatcgaacggttcaagtcccgtaccggttcattatgttaccgattgggttctgtcctttggatctcgatcggatggctcagggtgatcccacctccacagactcgtgctattcacaaatgagccctcagacttcatttaaatga

SEQ ID NO: 38353 - DNA, 4713 bp, Zea mays
  Peptide Sequence Number=SeqID_81728
atgaaaaatcattttgccactgttgatttggcagttccaaatgtgaatctagatgatgatagcgattggttgcataggaatgagacattcaagtcagacgatgctttcacaacgagagaccttctgacaccaggcggtgtgcatgaaacttttggtaacacgcctaaccataatttgggaagggccgcctactttagagagcggtacaaaaacttaactccagccgagagggagcttaggcgtgaacgccttaggttgtataataatacaccaaagcggaaagagtcaaagatagagtacataagaaaacgtagagcactgttggctgacacattgagtcaggagtccatcgccatggagtccccaacatatacccctaaggttgtgcaccctacaacagatgcaattgaacctgatggatccgcagttaccccctgcgactgggttattcctgatatcgccagtaacccgttcctgccagcttcaacaaagactgaggatgctgattcactgcgtatgtctactagaccactaagacgtaaacaacatgtgccacgtggtgaaagacaagctatcttagcccgtcgaaactggcaatttgaagcatccatttcaaggaacatggctactgcgactgaggatactattagtgacgccgaggaaggggatgattggacacatacccagtcgaagccaagggtcatttccaatgttgatgacgatgacggtgttgtatttgaagacgatgctgatgagaacgagggatacctattcgctgggcaatatgaggataccgatgaggatatagagatcgatggtagtcaagatgaatcgactgccactgatgttcctgacccgtacgacaaggtgtatagcaacatccctgaagaaacacatatgctaaagactgttcccaactgcagttattgcaccgcgaagaagtttgagtatgagtcacctggtttttgttgtcgtggtgggaaggttgagctagccccactggagacccctacccaactcaagaggttgtgggatagtgcagactctgatgctaggcactttcgtgacaacattaggttttttaatggccacttttctttcacttccctatattgttgcctcgatagtatgacaactaatgtaagggattctggtatatacacgttccgagcacagggcatgatgtaccacaatatcaagtcatttggtagggagggtggggcagagcataaacaccttgagctttacttttatgatgatgatcccactctcgagcatcggtaccgtaagtgtcgcgaagagcatcaacagaaagacaaagaggttattcgacagatagtcgacatactacgtggaaacccgtactccgagcaccttaggaccatgggccatgttgataaccttgatgactatcgtatcgcgttgaacctagaccagacgttgaaccagaagacatataacacacctctcacttccgaggtggccgctgtctggatcgaagggagcgaagggcgaggccagtttagcaagagtgttatgctccatgggaaggacagttcaagccactgcatccgctcataccatggatgctacgatgcactatcatatccattgttcttccctagaggtgaacttggatggcatgcaaatatcccaaaggttggagtatccatggacgaagttgatgcataccgtgcgacacatagggcaagtaatgcaaatgatgaagatgcggaatctcctagccatttatgtgtgtctgtacgtgactactactgctacaaattccagattcgccccggggtattcaatccaatacttcatggaaagcggcttttccagcagttcgcggtcgacacgtacataaagattgagagctctcgtttagattacatacgcaggaatcaggatcggttaagggcagacctgtaccagggcttggtggatagcatggtagatggagatattagagcagagaagacatatttctttaccatgacatgtaaccctaactgggatgagataaggagggagcttctccctgggcagacaccgcaagatcgttcggatcttgtagtgcgtgtctttcatgcgaagctacaagagttaaagcataggctgactaaacaggatattcttggtaaggtccgagcctacgtctatgtcgtggagtttcagaagcggggtttgccgcatgcccattttctactcataatgcagaggaagtacaagctcacatgtcctgagcagtacgaccttttgatctcagccgagatcccaagcaacaagtaccctgaactacgaaagatggttatcaagcatatgatgcatggcccgtgtgggtcgctaaaccctaactgcccatgcactaagggtcgtaactcgtgcaagaatcattaccctcggcctttcagtgacacaaccttgcaagggaaggattcgtaccctatttacagatgtcgtgacgatgatcgtaaagaaaaggtccgagggtgcgaactagacaatagatgggttgtcccttataacccatacctccttcgtctcttcaattgtcacatcaatgtcgaggcatgtgggagcatcaaggctgttaaatacctgttcaagtacatatacaaaggccatgatcgtgcgtctgttgttatgagagatgcgagcaaagcagatgatgatgttgatgagatcaagcagtatagagatgcaaggtgggtgactcctccggaagccttgtggaggatatacggctttgagcttagtcagatatctccacctgttatgcagctgcaactccatcttccaaacatgcacatggtggcgtttcacgagcggcaaatggtcgagcgagtcgtcaaccgtccaggtgctgataggtcgatgctcatagcatatttgaggcgaataggctacacaaggaggctcgtggcatcctatatcgtgacttccctgagtggtacacttggcagagtggtaagggcaaagtatggcaacgaaggaaacgagatacaggtggacaagtcgggtgagcgctattatctttgtgttctcctaaaccacgtgactggcgccgcctcatatgtggatctaaggacagttgatggtgtcaccctaccgacttttcgtgaggcagcagagataaggggactacttgagtcggacaacacactggatgagtgtctcactgagcgtgctcttttccagatgccatcggcgctgcgacgactttttgccacaatactggtgtactgtgagccaagcgatgtggctgtactctggcagaaacacaaatattctatgtccgaggactatcaacacaggagtcagaacaaaactcatgttgagcagatggtattgattgacattaggaacatgctgcagtcaatgggaaaggacataaagacattacctctacctcctatcatcgacgcgtatgacgatgctattggtactgctagggaggtttacgaggaggaaattatccaaccgacagtgggagatgtggctcttaaagactctcttaacgaggaacagagggccgcctatgataagattatgtctgccgttgacaccgatcagggcggattattctttgtggatggacctggtggcaccgggaagacttatctatacagagtgctgctcgcgacgctacgcaaccagggcaagattgcagtggcaacagctacatctggcgttgcagcttccataatgcctggaggaagaaccgcccattcacgcttcaagataccactcactattgacgatggcgctgtatgtagcttcacgaagcagagtggaacagcagagttgctacggaaagcgtctctcattatctgggatgaggcttctatgactaagagacaagcagtggaggcactggacaatagcatgcgcgatataatgggtcgacccgcactgccatttggtggtaaaaccattgtcttcggtggagatttcagacaggtattgcctgttgttcgtaaagggtcaagggctcaagtggtcgcgtcttcgctacggatgtcttacctatgggagtccatgtcccacttaaagcttgttagcaacatgagagcaaaaaacgacccttggtttgcggagtttttgctgcgcgtaggcggtggaactgaggaaacaaatattgacggcgacatccgtcttcctgatgatgtgtgtgtgccttacactgggagtgacaatgatcttgacaacctaatagacttcgctttcccaaatctcaacgaaaatatgtctgattccacctacatcacttcaagggcgatactgtcaacacggaacgactgggttgatatgataaatgttaagatgattgatcgttttcaaggggagcatatggtgtaccatagtttcgatagcgccatggatgatccccataactactacccacccgagttcctaaacacattgacgcctaatgggctaccacctcatgttttgaagctcaagattggatgtcctgttatattgctccggaatatagaccctgcaaatggactttgcaatggcaccagactggtcgttcgtggcttccaaagaaatagcattgacgcagagattgtactgggtcaacacgttggaaaatggattttcctaccacgtataccgctgtgtccctccgatgaagagatgttccctttccagttcaaaagaaagcagtttcctgtacggcttagcttttgcaatgacggttaa

SEQ ID NO: 38354 - DNA, 936 bp, Zea mays
  Peptide Sequence Number=SeqID_81729
atggaatctctatttgtaggcttgtctcataacaagccaaaaaaatcggtggcaaccgcaatagttcgagaagttttatctcatgactggttgctcctagactatatttgcacacaaggtgatcttgccctcatcgattttattaaggaaatcccttgtgaaccaagggtagaagtcgtgcttattgatgatgcctttgttgaaaggaagtggatggagtgtttatttcagccgaacgcatatttaggtgacgaggttatagactgttacataaatttgataaaagctcaaaagcatctaaagtgccgatctggaggtcgcgttcacatagaaaatgctttccagttcaatttcctgaagcgagatggtgatgttgaaattaaaacagaggagctatatccaattaaagacatgacacaaatatgtagcgctgaacgaagggtgttactgtacctagaccatgacatggtgtttattccgataaacatccgagagacgcactggtatcttgctgttatccatgcaagaaatatggagatacaagtgctcgattcacttggtagttcacaagaccgcaaagacctcactgactctattaaaggactacaaagacaaattgatatgatatctcaacgtatggagttaaaagaccacaggtggccagacctccaagttgcttcttggccgctcagagaaattgacatgggatatgcaaagcagacagatagctcttcatgcggtctctttcttttgaactatatcgaatactggacaggggatgaactgtctgacagttttacccaggtattttcggattcagaattatggatatggagcacgaccaggacgaaggctgagccagacgaaagtcgggggcagccgaagctgtacgcagggaagcttcggcgcgatggcacaagggggaaccgaccttaa

SEQ ID NO: 38355 - DNA, 984 bp, Zea mays
  Peptide Sequence Number=SeqID_81730
atggccttggcattcttcttgattaagaagtacgagggggccagttcaccggacagcaatggcgatgacggtggagacagagaagaggtgttaccacgtgtcagacctggtgttgtttatcttgaagattgctggaagacatgccttgagggtatccaccctggctggctgctggcatttcgcgttgtggccttcttcgttttggcttcgctgctcgtggtcgacatcattactgatggatggagtatcttcctatactacactcatttagcccattttcatcccagaattagttccactaccaacaataaaaacaattatgctaaaatgatgttgtctgatggggcggagccgcacctgatgaacatccagttccagaagaagatgcagctgcaggtgcctacttcagtagggatgctattccctctggcttgtgatgctacacgcccagcaagatctccatccgggccggtgatggcttccacaacctcaagttgctcaagaaaatcatttcagcatggtgatcaaagtttgagcgctccagatgatagctgcaggctgacccttggacttgggccaacaccaaatctatattctgctgatagtcactcatttggtggaaacaaagcttatcaatcagcaactttgctcagtcaacattgtgccacaaccgatcctggtttaatgttgggtctttcaagatgtagctcaagaaatttgcaatctacaagagcgagtggcagcaataattattcacctgcaaggaagactgttatcatcttaccacttattgatgagggatcaacttcagcaaaaaggaaaaaaggtgtctatttgctgccacttctgtttgtgccaagatcagaagatctttgtcttaatgaaacatctacagacacctatgcccaacaacatgttggaactgaatgtgatactgaaagcggacatgatagatctctgaagtcttcacgagattcagcctag

SEQ ID NO: 38356 - DNA, 405 bp, Zea mays
  Peptide Sequence Number=SeqID_81731
atgcaggttcaatggttgctcaaaaggtgcaagggatgcatcaggactctgcatttctcatggcggtggccagaggtgccagaagccatctcgtcagcagctgatagcaacatggatcatgccatctcgtcatctggccatggcgcatggtcagactgcgtcgactcgtcgggagacatgcagagcgccggtaggctcctgataccacttcaggtgcttgtccctggctcactgaaggacgctccttcgtgtggtctagcaggcaacggccgggacgacggagtgagccggaaccagagctgtgggctcgtggtgcctgagggaagggttcacggtggagggctgatgtccatgctaggagttggaggcaacctgggaagcaatcctgatggttcgaaagcctga

SEQ ID NO: 38357 - DNA, 189 bp, Zea mays
  Peptide Sequence Number=SeqID_81732
atggaggcaagaagagcttcgaggtaccaagtgcacgggagaaggtcaaagaggccgaggaacccaaagccatgggtgaagaagaagattttcaaagatgttggagctcagaaatgtcaatctagatcaagtcaagctgacttgatgatttatgagtccagcatcattctcaatcatgccaaatgttaa

SEQ ID NO: 38358 - DNA, 384 bp, Zea mays
  Peptide Sequence Number=SeqID_81733
atgggtctgaagaactacgggcgaggggactggaggaacatctcgcgcaacttcgtgaggagccggacgccgacgcaggtggccagccacgcgcagaagtacttcatccgcctcagctccggcggcaaggacaagcgccggtcaagcatccacgacatcaccaccgtcaacctccccgacgacgacgacgacggcgatgacgacgacaccggcggcggcaaccccccagtcatctctgagcagttgggcgtcctcgtcgacagcaggcccccgccgccgcacccctaccgccacttgttgttgccgcacccctacggcaacgtgaaactcgagccccgtcacggcggcttcctggatgactctgttctgatgcagagccactga

SEQ ID NO: 38359 - DNA, 132 bp, Zea mays
  Peptide Sequence Number=SeqID_81734
atgggggctcggtgtatgcggctcgctctgctaagtttggttcgcctcttgggggcgagtggtgatgagaatgatggttttggttatgactacggtaacggtaaagaagaaggcatcgaggcggatctctag

SEQ ID NO: 38360 - DNA, 840 bp, Zea mays
  Peptide Sequence Number=SeqID_81735
atggaggtatggcatgtaccaagactacccagcggaaggcaaccggacctcgaggcatgcctcggcaccagttggctccttgacatgaggggagcagtagtggaagtaatgatcccattggggatctggagccgtctcggccgcccaccccactacccaccgcagccgccactcccagagtcccagtcgtcctcgtcccagccttccctggaggtggaggccaggagcccaggacccagcgccccacgcggccacgcgggcacgcggccgcgccactgcggcagtccccgtccaggctcccaggcggcgccgcggcggccaggccccaagccccaaccgcgcgcccccgtggccccgtccaggctcccaggcggtgccgcggcggccaggccccaagccccaaccgcgcgcccccgtggccccgtccaggctcccaggcggcgccgcggcggccaggccccagccccgcgccctcgcccagcactccagcaggcagcagcccgctgcccaggaggccaggacggccaccagtcggccagtcttcaggcttcaatcttcatcccgctgccccgctgcacgctgccccgagcggtcgagctacgcctgcgcggctgcgaccggcgaccgtccaccggatacccgatacccgacggatacccgttgcatccgaacatgccaccggaggttgctgcaatgggagctggaacatcaggagcagctagtggaggaccttatggggagttggatctctttggagcccctccttccatgaacctcgcagatgatcgttctcctgaagctggcggtggagcgagagcagccaaggatgaacataactag

SEQ ID NO: 38361 - DNA, 660 bp, Zea mays
  Peptide Sequence Number=SeqID_81736
atggcccccgacgaggccgtggagcttggagggttacatagcaactccatggctgcagacaacgccccaccaggagcagcccccgacggagccctagatgtctgcgcgggcgtgtgctgctgcgcagcgtgcatagcagcagctccaggcgtagggcggaattgggaggacctgtcctttgacggcaagggacaccacactcaggttaaccttacgttgggttctctttgccaccttcactaccctagtatagtgaaggtgtcatacggtgataccatcgatgagcttcgatattggttgcctgacggagaggattacatggggcacgctgaacgtgtgttccaaaacaatgcaaagaagctggtgaaggatgccatatactatgcgagaattcaagctacaaacctatattttcaaaatcatccggaagaagcaggccccttgaataaaaaggaagggtcctcaaagatatatttgactgaggatcaatatcgtgaggtgatggttccatggatggcgctcgtgcctgatgtgtactatgcttggaagctacaagtggctaaaagcctagtgacattgaggtctactaggagggccacaaaggaccagaccctaacaaccctgaccagttctgcagccagacagccacagatcggctga

SEQ ID NO: 38362 - DNA, 327 bp, Zea mays
  Peptide Sequence Number=SeqID_81737
atggtgagcaagagctataaaattgagcaaataaagcaagaggcacaaacagcgtaccaaatgtggtcaggggctgacttgtactcgcttttgcgtcacacttgtactctcttaccttctatcaagccgaagcatttgagaacaagtccccaacagtcgctttcatcttctccaccgcagagagactttgtcctgttcgcccaacttcatttgaaggaagcaccaaataatcgcattggaggagctgttatcagaaaatcatacatgaagaacgtagaccgacctctgtctaatccaaagcgcattataattcattctactcaatag

SEQ ID NO: 38363 - DNA, 1479 bp, Zea mays
  Peptide Sequence Number=SeqID_81738
atggcccctagccccttggacaagggcaaaggggctgcaagcagtgcctctgccccaggtagctccagggggttggaggaggagaggcgacgcaggctgcgtcgcgctgacgggtcgctcgtttcggagccccccagaagcgccagagggctgcaggtgggaccgagaaggccaacacccaggcccacgacgcgtagaggcgcgtcagccctccggtgccgccgccaccaccaccatccagggatgatcactcccgggagcaccagcaacagcaacagcagtagcaggagcggcgatcgcctcgcttccagggtcactggaaggtctagggcccctttttccacgagtctaatcatcatgccgacaagtcttaacccatcatctgtttgccagggcttcttccttcgctgctcccaaggccacgcctcctccgctagataccaggcccaccgacagccaggggtccagcggcagcggctccagcgtcaggtggcgtcgcagtggcagaggaggtcccagctggaggattcacgcccactcccgacactgggggtgacacaggaggcacgtctagctccaaccccccgcctgctccagaggagatggaggtggtgtttgggcagcgactccggtcgggtgccgagcaagaagcggcgccagtccccctccctcgcatgctgtcccgtgcccactaggttcttagtgaaactgaggcagcaatcttgcgagagtgggaggcgcatgaagctgagcactagcgcctcagtgactagcgcacccaactggaggagcataccaagacggcatcccgacagttcacctccgagcggtcccaactcgagcgagaccgcaaggagtacaagagagacctctagagggcgggagacggacctcgctaggcgagagacagatctcgccttcagggaagaaatgctcacccggcgaggcgagttgctggccgagcacgagctagaagcagaggaaaaagagaggaagctggaggagcagatccgccagttcaatgcagagcaggcggcgttgggcccccaggcaatggaggccaccaaaaaggcccttgaagatctccaagcagagcaccgcgccggggtccagcgcatcgtcgagtgggccggtgaggcaagcacggcactagtgccactagggatgagccccatcccagtgtcggagctgcgagtgttgatctctgatgccctcccggtgttggactccgccgccgatcgcctccggcgcctggatcagatcctcggtgcccgcctggaggcagagggctgcaagctctaccgagcagtggttgaatacgtcctgacgtgcttccggaaccacgaccccatcatatccttggcgccggtgatcgatggtccggtggccgccacagaagatgtcgcccgggagagtgtacaagatgcggtggagatggtggccgcacgctttcagcgtgatcctgccgacgctgaatag

SEQ ID NO: 38364 - DNA, 711 bp, Zea mays
  Peptide Sequence Number=SeqID_81739
atgttcggcgccctccgagggcaacatggcgctttcccccctcctccttgcggaaaggcgacgcaggggcgtatgaaaaaagccgagtctatccttgaccgtcctctcgctctgtgcggaggctcgggggctgctctcgcaaacccggctccggccaaaccgttgacagcgtcaacataccagcccgagaacttggaacctgactatgcacccaggctacggccagaaaacagcgtcgcctgccccgctccgactgctgtgccactcgacggagtgaggctgacagcagctaagtccagcctcgggcgccatggcaagctccgcctcacccgacctagggctcggactcagcctcgaccccggaagacggactccgcctcgcccgaccttagggctcagactcagcctcggcctcggaagacggtctccgcctcgcccgacccagggctcggactcaacctcggcctcggaagacgatcttcgcctcgcccgacccagggctccgactcagcctcgaccccggaagacggactccgcctcgcccgaccccagggctcggactcagcctcgacatcggaagacgaactccgcctcgcccgaccccagggcccagactcgacctcgacctcggaggagcctgcgcctcacccgacctcggtctcggacccgccacgtcacagggaaggccatcattaccctacccctagctag

SEQ ID NO: 38365 - DNA, 603 bp, Zea mays
  Peptide Sequence Number=SeqID_81740
atgccgtcgtggttaggccagaatcctcgccgccgacgtgctcccccgcctgcgcacgaggcccgaccaactccgaccatccccgacgccaacccgcacatcggcatgaccgtcgcaacctccccaacatcgtcgaccacttcaccggagctaattcgtcaccgctatgttgtagttcaaacctactctaaaagcataaatggaaaaaggaaaaagagagaattagtaaaagtgataaatcttacccatactgatttcagcaaggatcttgataaacttttcactaagacactaaaaattgcaacctcgctgacggagagtacgtgctcattcccgagcaaggagttgtccaagaagaagttcaggagccagctcaagagcctgccaccgaggatccttccgcagcctcagcttttgaaggcaagccccggtatgctacaggatatggttgacggtgtgacttggccttccaccctgccaccgggttggacggttgagtgggatgctgcctcgacaggagaggaccaagaggagtattgggctaggccttgccctattccccagtatcgtcgttatcgattatccgctgcattttacttatga

SEQ ID NO: 38366 - DNA, 882 bp, Zea mays
  Peptide Sequence Number=SeqID_81741
atggggagcgcccgcggttcttctgtcttgtcatcgttggaggaacgcaacttcgcggaagttggtacctttcagccatcgctcggcttcaaggattttcatcaggcagctcggctgcatcccctcgccggtggtcacccaagacgcgcgttgggctcgctggctcagctggctctggctcggctcccggtgccccctcccgccgcgcgagcggttgtcgcgccgcacgcaccggaggaccgcccaagacgtcgcgcgctgctagggcggcgttcgtgttcttgggctgtcctgcctttgctccggtacgacgcctctgcacggaggtcggtgctcactcgtccgagaggatccgagtggggatccgctggtgggcagatggcttccatcgtcggcgctgaggtggtggcggctgaagaagtcctcgtcgccgacgggatcaccgccaccatccgcgctctgggcctccggctctttggctttgatagcttgtcctcacccctcgagtggggacgtgggcgaggggctcgttgcagcagcgtccgccctgaggccatcgctgctgctgtttggccacccggagcggaggtcgttgtcgctgctgccggagcgggcgtcggcgagccacctggggtttcgtcgccccgcaggccctccaatgtggggggttgttcgtacctgcaggggcggaaccggagttccgtttgtaatggcaccttgagtgccggtgtctgttcattgtggctgtcggggcctgaacatgagtccctcggctcggtcggccttgccgcccgaggctactctttcttagttaaaggaaccttcggccgctctacgatgagctggagccggaggcagcggtgccagcacggacagaggtag

SEQ ID NO: 38367 - DNA, 693 bp, Zea mays
  Peptide Sequence Number=SeqID_81742
atggatgaaggaactcccctcggtggtctagagtctgaggacaacgccgagccgagccacgggcttcacgccgttctttctagtctatggggtcgaggccatcttgcccacagacttagaatacggttccccgaggatgagggcgtacgacgaccaaagcaatcgaaccgaccgagaagactcactagaccagctggaagaggctcgggacatggccttactacactcggcacggtatcagcagtccctgcgacgctaccacgcccgaggggttcggtcccgagacctctagggtcagacatcagtgggggagcggcagcaccctcggcgtcgactccaccttcgacggaatccaacccggcctcgaacggcaacacggttggaggatctccacctcgaaggaacctgttggcaccacgcctgggccatcatcgctggggtctcctccgggaacccggcccgagcagacggctcaaccggccgctccgtagcctcagccagctgtcccccgaggacatcagcccggctcgtggcctcggcaacccgactccggcgtcggtcccgccagtggacggcccggccaggctccggccgacaaagcttcttttcgagccatctctacctctgtccgtgctggcaccgctgcctccggctccagctcatcgtagagcggccgaaggttcctttaactaa

SEQ ID NO: 38368 - DNA, 342 bp, Zea mays
  Peptide Sequence Number=SeqID_81743
atggacttaggtggcaggaagttaccatgggctaaggttattatgagtaggttaaacaaagccctacaacatgtacgccccaggtcatattttccaaaatttggcaacttcgcaattgacttgtccccaaactgtcctaccatggaagcaggatccaatgattgtgggttttatgttatgggatacattatctttgatgactgcgtcgaaggatctctccggtcagacatagaagcaggcgacactagggagatacggtctcttgcgctgcattacatcacattccatcgcaagaacaaagccatctcgctgcttgtagacatccaaagattcaaggtctaa

SEQ ID NO: 38369 - DNA, 356 bp, Zea mays
  Peptide Sequence Number=SeqID_81744
atggcgtgcgatggctacggtgtccgggtccgcgtgaaaggatggaagagaggaggaacgggtcgcggggagggtacttgtagacccgcgatgccgagtccgcagctggccaagtacaccggtcgtccgagatctccgcccgcgccaccgctggacgcggtgtggttgttcgtggggaagccgcatccgacaggtgggcccagaccgcagtgtcccagacatccgcccgcgagagggaaacgtggaatggggactgactcaggggccccagttgtcggcgcatgcgagctggcgaagtgggctgcgatgggtggcttcatctggtgggccaaatgtggattccgaggcccagttag

SEQ ID NO: 38370 - DNA, 1035 bp, Zea mays
  Peptide Sequence Number=SeqID_81745
atgtcagaccttggaatgtcaactacaagtgatgtcactaagtgcaaagaatgtggtgtgttggcaagtcaaaacaacactataaataaaacagctgatgaacagacattcaagacacaaaaggatgcacaaccaaaccaacaaacaagtgaccttggaacatgttgttgttgtgagtactatggaattccttgtcgccagatcagtacaaacgaaagtgaaactacaaaacagaagaaccggattttattttctgggataaacagacaaatgtctccccaagaacaactaatagcagattctctcatacctaatgcactgtcagttgatgaattacaaagtattccaaaaaggaaacatcacaaggatgcccagccccaagaagaaacacaggagtgttacattgatggatggactattacttgctcacaatttcagccttgtcgtcgcatcaggtccaagaaacgaaaagggaaacatggaaaaagtcaagaactaacttcaagaaaagcttgctatcaatgtggacgtgaaggtcattactttcgtaattgtcctgagaagagttcactatcgggcacctccgagattaagctatctcaatctccagacatgggatatgaaccaaaatgcatagaaacttccatcaacatcgtgaagaacaacaaaaggaatagaataatgtttggatacatgagtagttcacctcaaccacaagcaaaagccccgaaatcacatggatacccaacagaagaatcaagtcaggctcagctacatgagatacagacaatcaatgaaccctcaccccctgttggtcaagcaaagttgactcgcaaagaactcaaagcaagaggtgcttgctactactgcaaaaacgaaggacatcttattcgcgaatgccccaagaagcgtctagaccgactagagaagaaagctgccaagcacgacctaatcaatagtttagaagacccaccattttataagtatgatgatgaaggtcgcttgattagtatacattgcggagcaaagaagtaa

SEQ ID NO: 38371 - DNA, 390 bp, Zea mays
  Peptide Sequence Number=SeqID_81746
atggggaggagagcagggagcaccggcgttgagggagcttggcggccatgggaggtgcagagagcttgcagggagaaacggcgactgattggggaagctcggctggcttccagcccacgcgcaggggagaagttggagggggagaagggcgctgtgagggcagagacctggcgccgtgcacccgggacagaggagcaaggagaagcgacggccgatgggaggagcttcggcgtgccggggaagaaaggtgtcatgctgcagccgtggggaggaagggctcacagccatggagcagggaagggcgtaggcttcctgctagccgtggagcaggggacgctgggcagaggagggcggctgggagtgtggaggcgccatgggagaaggagctga

SEQ ID NO: 38372 - DNA, 146 bp, Zea mays
  Peptide Sequence Number=SeqID_81747
atggccgagcagcagccctacgcagcgccctctctcccatggcaagtagccttcttccccatggccatgcctcgaacatcggcgtcgttcacccccggtgagaccgcgacgatccttgttcgattccgcattggcattatgttcct

SEQ ID NO: 38373 - DNA, 426 bp, Zea mays
  Peptide Sequence Number=SeqID_81748
atggcacctcgacgcctaccagagcaagtttgtattgtctcggtctccatctcgctacagggtctcggcctctcgggcgagctcgccacctcctccctctgccgcgtgcggggcctggtcgcgctgagcctcgcgtccaacggcttcgagggccaggtgcccgccggcctcgccgcgctcagcggcatcctccaggtgctcgacctcgaggagaacgtgctctccggtgtgctccacccggcgctgttcgacaacctcaccagccttttgaactggaggaaaagcagggtagccatagtctctgttggcgtcgcctgtttcattgtgttcttgatgatcctttcagtaataggcctttttaggcttacacagacctgttttgacaagagacgagcagcgatgcttccatttcggaccacgacctag

SEQ ID NO: 38374 - DNA, 462 bp, Zea mays
  Peptide Sequence Number=SeqID_81749
atggggaggagagcagggagcaccggcgttgagggagcttggcggccatgggaggtgcaaagagcttgcagggagaaacggcgaccgattggggaagctcggctggcttccagcccacgcgcaggggagaagttggagggggagaagggcgctgtgagggcagagacctggcgccgtgcacccgggacagaggagcaaggagaagcgacggccgatgggaggagcttcggcgtgccggggaagaaaggtgtcatgctgcagccgtggggaggaagggctcacagccatggagcagggaagggcgtaggcttcctgctagccgtggagcaggggacgctgggcagaggagggcggctgggatcggagaaggcaaatcgtgatattttaaaattgttgtcgatacggggttttgagttcggttcggacatgagatatttggccgagtcggataaaattgattag

SEQ ID NO: 38375 - DNA, 558 bp, Zea mays
  Peptide Sequence Number=SeqID_81750
atggatgagcttttcagcaagctcaagtccaccgagattgaccaccagactcgggccaagattgagaaccctgaggagcaagtggagagcctcagagatgaggagctagcgctaatggccagtcagttcacgttgttccacaacaatcgccagaaccaacagcgtggcgcatcgaaggatggatgctttaactgcggcaaccttgaccaccttgtcgccatttttcccaagaagggaaagtctgaggctggcccgtgcgaacaccactctgatcggtgcaagggcaagtgggagtacaccttcgtcaagcacaagtccaacgacctcgaccatgactctgacgacacatcgtcttcctcgagcgacgaggagactaacaggagagtcaaggacaagctgaacggactcttgttccttgtcgacaccgcagacaacctttgcaccatggtgctcggtgatgatgtggataagctacttaggcttgcttctcgtgagaggatagattttaaattcaagtatgagagcatgcttaatgagcttgagcctaatagagcttaa

SEQ ID NO: 38376 - DNA, 327 bp, Zea mays
  Peptide Sequence Number=SeqID_81751
atggcctccaaagatgacattgacctctccgtcaatgcgtgggaagtctccaccactgcccccaccctgctgcaacggctgatcttgcttgacaggcttctcgtgaccgatgaggtcctcgactcgttacctcctagaacagctgttccaaagtggcggttttctcatggtttggaaatgcctcaggaacaagcagagggtctcgtcgctttgacgcttgatgaacttgatgtcccaaggctgcactgctttttcaaaaagggattgaaagttcatgacaaagtggcggctgaagtcgtcctagtcgtcgatgcgatggcgaggtag

SEQ ID NO: 38377 - DNA, 426 bp, Zea mays
  Peptide Sequence Number=SeqID_81752
atggctgcacccagcagctccctgccgcgcccagctcttcgcccttttccctatggcgcgtctcccggccctggctcaacgatctgcgttctccctgctctcccaagcaacgcgtcgtggagctcctccttgcgcgcgcccagtcagcgcctgtgcgctgcgccgctccttgctccctgcacgccggagctcgcccagctcggcctcctccccacgcgcgtccttggtttcttgctcgcccagccgtttctccctgcaagcttcggctccctgcgcctcgcgcaggtctgctgctcatctcccatggtggttggtcactgctgcgcagcttcctggtgccgcgacccccgccgtgatctcctctaccgcgccgaattgcgcagcgccgttgacgcctgccgattgttcgatactttgcgcggctag

SEQ ID NO: 38378 - DNA, 174 bp, Zea mays
  Peptide Sequence Number=SeqID_81753
atggccgtcgcagccaagtccctttcccccagccggcttttctgcgcgcgaagttcctttggctgcgccctccctttctcttccagctcgcgcaggggaaaagttagagctgaaagacatcgtccatttcacgatttcaagccggatttaattatggtgataggagttgattga

SEQ ID NO: 38379 - DNA, 237 bp, Zea mays
  Peptide Sequence Number=SeqID_81754
atgccccgccaggaaacctgccgggtgccggcgaccctgcactgcacccaccacgagtacatcgtttcctcaagtcaggttgcttctgcctcagcaatgcttttgaaggttaatgtgggtgccccgaaggccaagtctgctggcaatactgcctcgaatccatacaccataaagaaaggtgtaattccatgtgctgctgttggtcaaaaattggcatgccaaacatctttggactag

SEQ ID NO: 38380 - DNA, 744 bp, Zea mays
  Peptide Sequence Number=SeqID_81755
ttctctgtccccgccttccccgaacggtcacacctcaaaattcacccaccaccaccaccaccacccggcccggccatcacgagcgcactcgtctcgtctcccatgccgaccggtgagacgctagcggtggagactcaagcaccagcgccgcagacgcagacgccgacaacaacagcctcgtcctccccatcgtcgacccaccgtcgccatcgcactttctcatcatcgtcgtcgtcctcgtcgtccctctccacgctgtcctcggcggcatcctcgccgtcgccgtccccgcgcggccgcgccgtgcccttctcctgggagcaccatccgggcatccccaaggcgcgcttcctcggtggcgccggagctgcctcctccgcgccaacgcccctcccgctcccgccgccgctgcgggtcccggagacttcaagggcgcgccaccagcagcacgcccggcgccgacgcgcctgcggaaagccgatgcccgccgacgacgcggggggggaccccttcgccgcggcgctcgcggagtgcaccagggaacgcggcggcgcgggatcagacgccggcctgatggacgcgctcttccccgcgcggccgacgacgtcgtcgtcggtgcccagcagccggcggtggtccatcgcttccgccggcggggtcgtcgggctcctcgacctgtacggttgcaggagcgtcgtgggcgtcgccgagggcgccttcgtggtgcgccggccggtgaaggtg

SEQ ID NO: 38381 - DNA, 228 bp, Zea mays
  Peptide Sequence Number=SeqID_81756
atggtcgtctgcaacgctacagtgaacagtgaacagtgcaactgcgcgcagaagtcagagcaggtgctagaaggcgcaccggacagtgaacatgacctgtccggtgcaccactggactgtccagtggcccgttgtcagaagctccaacggtcggaacttaacggcctggtgacgtggctggtgcaccggacagtgtccggtgcaccagccacgtcaccaggccgttaa

SEQ ID NO: 38382 - DNA, 411 bp, Zea mays
  Peptide Sequence Number=SeqID_81757
atggtgtggatcatcgagcaccgcgccgaaactttggaggatttcgtgatggagcaagaggttgcatcctctgcgccacgagtgcacgaccgccccgactctgggactgctcccgtgcacgccgtgcagcagcacacaccagcgcaggcatcccggactccgtcaagggtagcgtctatggtgctatctgcggccagagagttgctacgccaccccctagctctacggcatcaccggggccatgaagtagtggcgcgacgacgtcgaccggctgctcggcatggcacattctacttcgaccaggtcgaggcctcggtcatcccggcgccaacacgaagcgacggcgtctgtgcgctcgccctccgtaaagggtgcacagaccgacgacctccgggcggagctcaaccatag

SEQ ID NO: 38383 - DNA, 420 bp, Zea mays
  Peptide Sequence Number=SeqID_81758
atgcaggcggcatgcaaccgtaccaatgggcgcaccctttcgactccgacgtgtccaacacgggggcccaggcccacacgtcatgtaaccggcgcgtcggttactacgtgcgagaagctgcaccgccacttgcgccagtaccgcgccttctcgactgaggaaccaatgccgcgactcaaggcgaccctgcgcatggcccaacagtgccaaccgagcacattgatcacgggtcagtcagccgcgggagaaggcgcgacggacaggcggcacctttggcaggcgaagcaggcgacgcttcaccttcgccataatgaccgcgtcaaaaaaagggaccgggaaaggggatactccgaaagggatccttctccgcgaaggaagcgggccccgagcccccctactgatcagaggttcgaaggctag

SEQ ID NO: 38384 - DNA, 435 bp, Zea mays
  Peptide Sequence Number=SeqID_81759
atgggccggaacgcacgtgggcctctgagctggacgaggccgcaccgtggaatgccttcgtcgccggtcttcgtctggtgccgattgaagcgaagggtgtccctgcctgctttgtctgtcagagcagcggctaagcagcgtagacttcgagcgaagggtggcgtttctgccttcgctccaacaggaccccctcaagcaacggacacaccttcggctcgcccgaggcccagtcttcaccaagaagcaaccttggccaaatcgccacgccaaccgaccaaatcgcaggggcatttaatgcaaagcgccgcctgcgtcgctccgactgctgtgccacttgacagagtgaggctgacagcagccaagtccggcctcaggcgccataggaaactccacttcgcccgaccccagggctcggactcgggctcagccctgtga

SEQ ID NO: 38385 - DNA, 1563 bp, Zea mays
  Peptide Sequence Number=SeqID_81760
atgggaggacttggggtttccgatgggtttgctagagagttgatgaggacatgcgcggcctcgggggaaaggatgtcttcgcccgagctccgggagtcttcggctcggatgctgaaggttaccgggggttgctggcctaggaatgttcctatcccccgcgcggccagcggggatgcttttacatcacgcatggttcgtaaatggagagtttttccttacgggcgaaatattgctgctgttgtgtcggcagtgatggacaaggatcgccagggggctgcccaaaaacggcaggcggctatcaggattgttgacgccaggccaaagaggcaaaagcgggggtcggcgacggctgcggcccccggcggagggaaaccgccgctggcggcgaagtcaggcgtccctgcatctagtaaggcgccagaggcagcggcgggcgccggaggctccaagccggcgaaggctgtgccgccgctcagcagggtggcggaggccgcgaaggcggcccgagcgttgctgccggcaggcaagcatgtcgccgacttcgccaccgacatttgcgtggatgactatcttggcaggtcggacgagggccagcttgctacagttgcgcctgacgcggcggtcgcgacggctgccacagtgccgaaggcaaggggcgaggctcttggctccggaggcgaggcggcggtcctcgcggttgtcagggacgaggcggacgcaacggtccgccggctgaaggaggtgtcggaggcgctgagtcaggtggctgacttcgccagccgtactgcgtcgggggccctcacggcagctgtttctgccgaagtcgagaggcttcggacgcaacatgctgacgctgtctgtgagaaatcagcctccgacagcaagtgccgtaaactggcggacaaggtggccgcgttggagagggagaaggctgacctccggcgccaactggcggcggagaggagggaagccaacgaggccgtcgctaaggagcaggctgcgcaggcggaggccaagctggcgcgggcggagggcaatcttgccaaggagctcgccgaacatctgcaagagcggctcaccgccctggagagccgcgcgaagggggccgaggccgcgatgcatgcggaggccgaacggacgcgcacgcagcttatggatacatatcgtgagctgggtgcgcggaccggtgacttcgaggtgccggaccgagagcccgggcttcgctgtctgcagtgggtgcaggaggagctgctggaactcccagtcgtcgcgggggggttgatgtcgtacgcctccctggtcacctgcgagggggcgatgaacgcgctctcctgcgaagggtgccggcacttcgaggccttcgaccatgcggatgaagattttgagcgagatatctataaggtcgaagaccccgtagtgaaggaatccgccggggccctttatgaccggatgtggggtctgtacggtcgtgaggtggtcagggagcgggcggaggcggcgatggctccttgtttcattttcgtttgcttggcgtttgttggatgtggggcgcgcgtgtggtga

SEQ ID NO: 38386 - DNA, 360 bp, Zea mays
  Peptide Sequence Number=SeqID_81761
atggagagtcatgatctccgggcagaaagggaatcacggcttgtggttatgagattgatggttttggttatgactatggtgctggaaaacagcgccgcctgcgccgctccgactgctgtgccactcgacagagtgaggctgacaacagctaagtccagcctcgggcgccataggaagctccgcctcgcccgaccccagggctcgggctcaaactcgacgtcggaagacggactccgcctcgcccgaccccagggctcggacttagcctcgacctcgaaagacggactccgcctcgcccgaccccagggctcggactcagcctcgacctcggaagacggactccgcctcgcccgaccctag

SEQ ID NO: 38387 - DNA, 405 bp, Zea mays
  Peptide Sequence Number=SeqID_81762
atgccctatttttctgtagtggctctagcacgcgtctttcacccccgggttgcggcgatacctattccggcgcgtatcgaaggtgcccttcatgttcctcaagcgagggcatgtgtcgctctaggagcgcctcttctgggggaacgaggggcactactgcatcacgcactatctgtcaacttcacctttgagtccatcttctatcgacgccaaatcccaatagatatcctctcggctctccaaattatattggatctgggcacctgttccttggactacttggtaagggtgaaggtgtggcggcttgtgtgtttgagagtctcggatctaaccctagcaatatccgtacaaaggaaaaataagatcctattgttggaaagcgacaacaaattgagtgtgtggtaa

SEQ ID NO: 38388 - DNA, 273 bp, Zea mays
  Peptide Sequence Number=SeqID_81763
atggataaggatgaaagtacaaaggagctgaaccgtattgcattggtattggcagcccaaaaggaggatttgttgctgatgtatgaaacccttctcctcgccaatcttgatttcaagatttgcactatggaggcgacggtccatgatgggtcaccggctcacctggcggtgctccctgtcggggcacaaacgtccgcggtggcgttgggtcatcatcttcctcacgggaacctagatcccgccccctggggaagagatcttagggtgctctag

SEQ ID NO: 38389 - DNA, 153 bp, Zea mays
  Peptide Sequence Number=SeqID_81764
atggcggcttgcgaagcggtccagtggttgcggccgaggttgacgaccaacagtgccagagtcgatgacaggcagtcaacactcaagcacacagcgctcgccctcgcctatgaatcagcaaagaaagggaatcaagtggttgaagttgtatag

SEQ ID NO: 38390 - DNA, 282 bp, Zea mays
  Peptide Sequence Number=SeqID_81765
atgcagagcttacagcgaaaagtcaacgctgattccgccaaaagtaaaggcgaagaagctccaaagtcgttcctaagggaatgcagagcttacagcgaaaagtcaacgctgattccgccaaaagtaaaaggcgaagaagctccaaagtcgttcctaagggaatgcagagctaagccagcttttaggaaagctgcagcagtgccccgagaagctacccaggcacagaagtcaccatgcccagctataacttcgtcgagctcgtcaatttcaccctcaatatga

SEQ ID NO: 38391 - DNA, 885 bp, Zea mays
  Peptide Sequence Number=SeqID_81766
atgacttctcacaaatcctcggatggaggtaacgcacattcccacacagatggacttgcacgagagggttttccctgcattttgtgggaggtgctggagggagccggttatacgacacctccccagtatgcggtgcagttgttcgaggagcacagggtaccccgctgtagggtgaggatgaccttggagcctcatcccttgcagccgggctggcgttcgttggactccgagtctttcagattcagggctgaagatactatcgagtccattgctctccacggactgatgaccttttgtggctttcaccccttggagctatccactcatcccattggcttgttccccgctgaaaaggaggacgacccaatgtggaaagaccgagtggagcatgccaaggatgtgtgggctctttacccggggcagactgctcacctgacggtgcggtgcatgaatgccctatatcgtctgcaagtagtgcgagcggaggcaatgtcccagctaatgggcttggtggagtctaccaagatcatcctggataacagggaggaccttgtggtagacctgtccactgagctggtggaaaaggacctccaggtagagcagatggccacccagatccaagagcttgaggagcaagtaggagccagggagaacaccatcgaggttctcgaggatcagctcctgaccactcagcagcaacttgaggaagccaaccagcacctagatatgcaccatcaggaaattcaagacatggaggcagaaggggccgacgaggatgttgacatcgagggaggagaggtgtcggagcctgcatccagcttggacacggctggctcagggataccaccttccctcgagtctagcgttgcctcgttttccaagtag

SEQ ID NO: 38392 - DNA, 423 bp, Zea mays
  Peptide Sequence Number=SeqID_81767
atggacaaccaagtcactccagcaaccatgtcctccagagaacctgtaaaaattatgccacaagcaaggttgagtatactaatactcagccagacttacccgtacaatggatcaagcagtctcattagctgcgagaagcagacgattcgaatcgagtttttatccttgcaagtgaccgcaattgtacccaccataaccggaatgggagactacgtctcaggtcgcgtgaggagtaaggtctgcgggcaggttcactcaggtatccgcacattaatccttattccaatttcatctcgtagaccacacatccccatggatccgtgtccacggaccatcatcattccattatcaaaatggatacgatcaattcctgacctcgcgcgagtgctagaaaaatcactcgacttctaccgagatccctaa

SEQ ID NO: 38393 - DNA, 366 bp, Zea mays
  Peptide Sequence Number=SeqID_81768
gttcagaacttgactgctacgaacatcatgaaatgtgacgatgatacatttgtgagagtagacgtgattctgagacacatcaagttgaacaacggtgacaaaccattatatatggggaatcttaacctcttgcatagaccattgagaactggaaaatgtgcagttacaaacgaggagtggactgaggatatctacccaccatatgcaaatggaccaggctatttgatttctggtgacatagcaaaattcattgtgtcacagcatgctaatcggagcttaagattgtttaagatggaagatgtaagtatgggtctatgggtcgagaaattcaatgcaacaaagcctgtccaatattcccacagctag

SEQ ID NO: 38394 - DNA, 390 bp, Zea mays
  Peptide Sequence Number=SeqID_81769
atggcaccatatgttggttgtgatgtgctccctagaggccttgaagagtacagcagtccagtgattagattttatgaatttagaatttgtgcctttaactctcgtggcaactgttcagcttctatgaatatttgctcaagtgtacatctatggaaatccacagatgccaaaccatcagtcacaactgaagccttcgataactcagcaggaaccgtagatggtgtgaatgcagctaaagttgcagctatgaaagatgctgaattagtgaataggaacattgcagcatttggtgctggaactgggcgcctatccactgatcagaagaaaaagcttctttgggtaaccagtctaccacctcagttgcatcaggagcagctgacctacctctaa

SEQ ID NO: 38395 - DNA, 564 bp, Zea mays
  Peptide Sequence Number=SeqID_81770
atggcttcagggtggtccctacctttcggtgttatcctcttcctctccttatcccttctcggcgtacagaaattaaatcccacttttgccgcctgggagctcgccagctcacccctcctatgtataaaagcctggccccccgtcctcgtctcgtcctccgcgtcgaccgccaccaatggcgctcggctcttcctcgtcggcggatctatatccgcagtctcctctgtgtccgtgcagatcctggtccaccagccacgcctgtcctctacacgggagtttgccgcgaccgtcacgcactccggggcgctgttcgtcgctggtggctgcgtcccctggtcccctttttgggccgaggctctcgacctctccactccgaacgccaagtggagagccgtcgccagtccggcacacctccacgcgaagtggatgcacggctgcgtggcgctcaacgggaggatcgttgtggctggcgaaccacgagcgccgatggcgttgacagggtgccagtggccagccgccagggggccacaagtgttcggccgcctcagtgctccggattggtag

SEQ ID NO: 38396 - DNA, 333 bp, Zea mays
  Peptide Sequence Number=SeqID_81771
atgcagattattgaaagaaagtgtgaggctcaaaagggtgctgggataaggtctaacctacatttttatgtggttttgtggactgtaggagaaaaaacactcgataaactcaccgatcaacctggaaatctgataccacttgatagagctggagtgcccgatctttcgttcaattctcttgcacgggcccgagtcactggcccaggtggaaggggtggcgcttggactggggaagatggtgtctgggctggagaaggtgctgctggtgtagatgtactcgtgttggtgttgatgtcctcatcactccctctgaaagtttgctcaagaatatga

SEQ ID NO: 38397 - DNA, 789 bp, Zea mays
  Peptide Sequence Number=SeqID_81772
atgggtgggagcagcgcgcggcttgctgcgcattttgccgaacagccggcgggcaccacgacgaacagcgaggaagggggctcactgttggttttccatggaagaaaatggggcgcgctggatagagagagctgggcgcagggaacagcaaggggcgtccatggagggggtagatccggccatggcatgctcctgctcgcagctctgcgcagaatcgcgaccacggggaagaagagcagaggagccgagctgctgggcgccgaccatggagagaaaaacaacaggggagtgaagaagggcaaagggcacggagggaggtggaggcgccatgggagggggcgagcagagctgctgctcggccatgggaaagaggggagctcacagggggtcgcttgcagggagatgtggcgtgcgcgaggagcaggaaggaggagggcgccgcgccatggctggccgagggaggaagctgagctgggcgtctgttcttccctgcgcgatggcgaggccgagctgggagagggaagccgctgctccacgctattggggaagaagggtgtcgctgcagggatgccgagcgtcgggagcagagggccggccatgggagagaggccagcgccctgggaggaagggagccgagctccctgcgtgttggggaagaaggccccctgctgcgcgtgggggaagaaaccagggagaaaaatgttgtggcggttgaaggaaatggaggggtgggagtgcaaaacagccaaggacaagggagagggatccatatttatagagaaaccctag

SEQ ID NO: 38398 - DNA, 2102 bp, Zea mays
  Peptide Sequence Number=SeqID_81773
accgcccccgcctccccttccctccgcgtgcaagtgatgtctctcctcttcgcacgtctcggcgtaccccgcatcctccgccgcacgcaccgcaatactcctcaaccatccgacgccatccatgccagcttctctggatccccacgcatgggtgcccgccctcgctctcgctcggctcttccccgcctgtccttcctgcctcggcgccgccctcgacctcgcttgatctgcctgctcccagatgcagcagaggtagtcgccgtggcgccacctgtccactgcactgccccagagcctccaagttgcatatcggaattcggaagtgaagcgccccgtgattcgcaatcctcctctctggatctcgcggtggaagtcgtcggtccactcgatcagcgagcgagtcggtgccgcgcggcggattccccgacccgagcaaaggaaccggacatgcggccgcggctggtgctcttcggcgactccatcaccgagctgtccttcgcgtccggcggatggggcgccgcgctcaccgaccgcttcgctcgccaggctgacatggtgctgcgcgggctcagcggctacaacacgtggtgggcgctcaaggtgctgccgtgggccatggagggcgcggcgggcgcggacccggcggccgtgacagtcttcttcggcgccaacgacgcctctctgccggaccaggtgcaggtgcaccagcacgtgccgctcaaggagtaccagagcaacctccgcgccatctgtgcctacttcaaggagcgatggccctccactgctgtcatactcatcactcctccaccgatttacgagccagcgagaatccggaagccggcccacgccagccccgcaccgattccggaccgccgcgtcaacgacgaggctatccagtcagtagagtccgcgacgcccgcgtgcttcggcctcgccgccgccgccacctactgtggctgcgcttgcacggagtgccgctgtttctgtggttccggctgctcgttggacgatggcgaagccgaggaaaacctgtaccttggctccagatccgcccgtagccgccgttcggcttccgtggcacccaccggcgtcggcggtccccacatccgttctgatctcgctcgctgcgctcctcatccgcgtgctggacgtgctctagcactgccagagggtgacacatacagaaaaattgtcacattctggtgggacatcaaaggttctggaagtgctgatatctgtgatacatttgatatgataaaagaaccgggggagctcattgtttctcctaagaagagtgatgtatctcctggagttgctgagggtaaggcatgtgcagctgctgatcttagctcattgatagcttctaaagaagctaggtctcaaaatgatattaacaatgacaggccgaaaacttctctgtgccatgctgattccatgaaaataaaagttagtgatgaactaccagtgaagcaatggacatactgtgatcatatgtctgatttacacagttctttcacatctgcaaataatgatatagccaaagaaatgaatgaagtgctatttaaatcattgtctgctgatacatctgcccttgatttgttggcatcaagtgatcttcttagccaacggaagattgatttgattggcaaagaaagacttggagtacgtaaaaccaggctgaggttgaaagagcagattcttacaatgaagttcaagacatatcgtcacttgtggaaagaggatgtacgactactttctacaaagaaacagcgattgaaatctaataagcgcattgatcagaataaccgaacatctcaaattggatctcagaggcaacgtttttctaaccattcacgattagccatgcctggacgccagcgaagtgcagctctagatgtcggcgaagtgcaggacaccggtgagtcggtgcttctcgacgtgcgcgagcgtggcgttccgctgcacgtgagcctcggcgtcggcggcgttgaagttgtcctcgggcttgaaggcgaggtgcctgtacatgacgccggtgctgcggggcacctcggcggtggcgggcgcgtcagcggtgggctcgacgacgacccaaacgacgg

SEQ ID NO: 38399 - DNA, 420 bp, Zea mays
  Peptide Sequence Number=SeqID_81774
atgcagtcgtccgaccaagtggttgagttgggagagttcaagacgacattcagagggcatcacatactaatgggcatcatggaccgcaagttcaacgagtttttggcactcactctgggaagtcgtaccgtgttgcagtacgcccaagctttcaatgacctgttcagggccaacagctacaacgagttggtcaacttggccatctcccaggaggattgcatcacagctcgcctggcagagaagaagaggaagacccctatggcagggccatcagcacagcctcagcgcttcaggattgtgtccgacactcagagcagaggacctcaacagcaacatggacgatgggtgatccgaccacaacagcagcaacaggcacccaaccgctctcaacccccagctcagaggaaccacaatcagtag

SEQ ID NO: 38400 - DNA, 285 bp, Zea mays
  Peptide Sequence Number=SeqID_81775
atgtcgccggacatttcggcgtcggttcctctgtcggcgggattcccgctgaggaggttcttctccgggcgtggtcggctcgttgtcgaagacggggggcgactccactctcccgatgaagaggacgtcggggttgttgaaggagacttcttccttggcggatctgcgatgcgatgtagagttccttcttcatctgctacagatgagatagttccaaagcagaacacagatccggggcggagggtgatcttgcggtggaaggtgacggccattgagctagcttag

SEQ ID NO: 38401 - DNA, 221 bp, Zea mays
  Peptide Sequence Number=SeqID_81776
gtgaagagttcagcgtgaagtcccctggtgcaccggacactgtccggtggcacaccggacagtctgtgccactaaacctcgaggtccggatccctgggcgcataatcatcggtaggtatccgctggaccaccgctgcacctgggcggcgccgcctcatgcgaatgggaatcgggacgacgtgtcgacgactgttgatccagagatgaagggctgggaatag

SEQ ID NO: 38402 - DNA, 162 bp, Zea mays
  Peptide Sequence Number=SeqID_81777
atgaatccactaattgctgctgcttccattattgctgctagattggccgtagggcttgcttctattgggcccgtagttggtcaaggtactgctgcaggacaagctgtagaaggtattgcgagacagccagaagcagaagtacattggtatttgcttatgtaa

SEQ ID NO: 38403 - DNA, 324 bp, Zea mays
  Peptide Sequence Number=SeqID_81778
atgggccatccgatctgcccaacggttcagatccaatcaccgaaagggtactcctacatctattcccagcccttcatctctggatcaaaggtcgtcgacacgtcgtcccgattcccagtcgcacgaggcggcgccgcccaggtgcagcagtggtccactgccggaatcacaccaagcgacgccagggagcgacaatccccggtccaagacccaaacacggctcgcaccgatccggccttgtgtcgatctgcttctctggtcgttcttccccaggcccacgaagggatgaccttacgaattattgggcccttgggcctttcgtga

SEQ ID NO: 38404 - DNA, 411 bp, Zea mays
  Peptide Sequence Number=SeqID_81779
atgggcaagagtaacaaacgcaagcgcgagccgactcctccatcggaggacttcggcgactcggaatactccgagtccgaggggtctccggctcccgtctctcccctggcgtcgtctgatgattcagacgactcccaggggattgccgcggaggtctggacttatatccgggccgtcgagcgctccgggctcgagggctcggatgagtcggagtactcctcggacgaggaggactcttcagactcgtccgaggagggcggcggtgatggcggagacgacgacgacgacggaggcgacggtgacgacggcgacgacagcggcggtggcggtgacggcggcagcaagggcggcaacggcggcagcagcaacggcggcggcagcagcaagggcagcaacaaggccagtggctag

SEQ ID NO: 38405 - DNA, 267 bp, Zea mays
  Peptide Sequence Number=SeqID_81780
atgcgggggttcctggcactaggatacaaacccgaccgccgtcgtttctcgctctattctcgtaggatttataccgtgctgggaactgccactattgaatctgtcgacaggagagagggcgtgtggcgtgtggagtggggcgtcggtgttgacctcgcccacgactggcgttcggggatccgtgaagagcccgtgactgaggatcctggtgaccagcagatagaagtagataagcaggagctcattgatggcaagttgtgcccttga

SEQ ID NO: 38406 - DNA, 516 bp, Zea mays
  Peptide Sequence Number=SeqID_81781
atgggttcgaatctaagagaaattttagataatgtttcctaccccgaaattttgttgtctttcccgaatgctaagaagaagaagaggattgagtcaaaagaaaaggctattttggagttttatcaacaattggtgagaaaaataattcatcaagttgatgagaaaattcatggacgttctactaggccctactcacttgttacccaacaacccattagaggaagagccaagcaagggggacaacgaataggagaaatggaagtttgggctttagaaggatttggtgttgctcatattttacaagagatacttacttataaatctcgtcatcttatagctcgccaagaaatacttaatgctacgatatggggcaaaagagtgcctaatcacgaggatctgccagaatcttttcgagtgctcgttcgagaactacgatctttggctctagaaatgaaccatttccttgtatctaagaagaacttcgaggttaatagggaggatgttcgatcggaataa

SEQ ID NO: 38407 - DNA, 390 bp, Zea mays
  Peptide Sequence Number=SeqID_81782
atggcgcgcggtctgcttgacatgggccagatctccgatgaacaagagcaaggagggcaggcgagcgggcgaacggtttcaaaatgctacggtttcgcgacgcgcagaaaggcaagaaagcctgagccgcgctgcctcccccctttttatacacaagacgcgacgcttcgggaagcccgcagtccaacagtacacgtccgtcaacggtcacatcaaaaacccccgcggaaccacttcgagcgagggcagtgtctccaccatctagcgacgtcttcgacaccagatgactcagtcgaactggtccctcggagagcaaatgttggggcgaaggcgaagacgctacccttcgctccaggccttcgtcacctcgccgcaccaatggaagcatga

SEQ ID NO: 38408 - DNA, 369 bp, Zea mays
  Peptide Sequence Number=SeqID_81783
atggctcctgtggccgtggcggggtggatcgaccattgtggccgcaccaattgctcgctgaatcttggactccaccgtgaattcccctcgcccgtgggcaggctcctccgcaatctcttgcaggaccgctgccgctgctgctgggtggtagtcgataggctcggggccattggatccgacttgtacggccaggatcagatcgcgcccttggtatttccctaccgcacagatgtagatcaacggtcacgattgagcgcaggatacctcttcggtctaagtggccatagccgtaaatctagaatccaagggttgagtgttgatctcagtaagtcagaattggagccgttgatctctgatctgaggcactga

SEQ ID NO: 38409 - DNA, 339 bp, Zea mays
  Peptide Sequence Number=SeqID_81784
atggctcctgtggccgtggcggggtggatcgaccattgtggccgcaccaattgctcgctgaatcttggactccaccgtgaattcccctcgcccgtgggcaggctcctccgcaatctcttgcaggatcagatcgcgcccttggtatttccctaccgcacagatgtagatcaacggtcacgattgagcgcaggatacctcttcggtctaagtggccatagccgtaaatctagaatccaagggttgagtgttgatctcaaagagcccgtgaccgaggatcctggtgagcagcaggttgaagtagctgagcaggagctcattgaaggcaagttgtgcccttga

SEQ ID NO: 38410 - DNA, 387 bp, Zea mays
  Peptide Sequence Number=SeqID_81785
atggcgtcgccccggtgggtgagcccggcgaccgaagttggtggacgtggtcgtggccgttggatcctgaggcgacagtggagattagaagttgcacacccgtttggccggactctagagaaagacttagaggaagaatatgggagcctagagaacaaatataggactcgagagggagagggcgaatatgaaatcctagaggaagaatcagaagaagaatatgggagctctgaagatggcttagagaaggaatatgggactttagaagaagactcagaagaagactcagaggatgacttagaagacgaatatgggagcccagaggaagattctatcttaaaaaagagggttttattgagcatcaaggaacaaaagaatttagtctaa

SEQ ID NO: 38411 - DNA, 840 bp, Zea mays
  Peptide Sequence Number=SeqID_81786
atggcgcgatcagatagactaaaccaacataggacagttccagccattcgtccctttcctcctttcgtattatttgatgatattcaagatgtcaataacttaccacaagtaaagagtatctttgcgagggtagttgttaagttccctaggcgtcatgatagtcaacacttcatcctacaggatatcacaggatccaaaatggaagcaatttcaagccgcaataatgttccacggttcgatgccttactcacacaaggatgcacatatacattgtatagagtggggttctgtctaaatagggaggcgtttcaatttcggaatattggacatgggctagagatcggactgataacacatactattgtggagccattcatcaagtcaatccaatttcctccatttccaaagtttcttatgccattccatgaggtttatgaacaaccgcataagtcattcgtagacattattggcatagttcttcatttagagccattaaagcatatcggtggaaggccgtatagagaggctatactaatggattccaggtgggatctaatcgtcgtggggatatggactgacctcttgcaaagaaatgctctacgatggtcgttagctagagttgacaataacataattattggaactatgctgcatcttaaccatacacacggatgcttggaaacctcggattacagtaccgttcatttcaacccagatcatcacactacataccatttgaagactattcgacgttcgttgattcaaaatccaaggagtcgtatcgtcgacagattacttgagaacagacgggcacatctcccaactgtgatatctgattga

SEQ ID NO: 38412 - DNA, 69 bp, Zea mays
  Peptide Sequence Number=SeqID_81787
atggagggaacttctggaatagacaacaaatacacaaccgtgcagtttacacgcaaggtacacaagtag

SEQ ID NO: 38413 - DNA, 261 bp, Zea mays
  Peptide Sequence Number=SeqID_81788
atgtcgtcttcttcctcatctgctgcaaacgcgccgccggtcgattcgtcatccgaagataccttgagcgatttggcggcggtggagttacagccgggccacacggacatgcagcagttggggtattttggggacgatattgggcgcatcccggcggcggaagagattcccgagcctgagggggagttagtggtgtttgaggcgttcttcattgccggcttccccctcctgtgcatcgtttgtagcggaggtcctgcaaag

SEQ ID NO: 38414 - DNA, 2052 bp, Zea mays
  Peptide Sequence Number=SeqID_81789
atgccgtcttcttcctcgtctgctgcaaatacgtcgttggccggcgcatcgtccaaggataccttgagcaacgtggcggcggaggagctacatcctggtgatacggtggagttcggcgtgtcgcggattttctcggtccgtgttcaggatatgcagcagcttggatattttagcagcggagtggggcgtgtcccgggggtggaggaggttcccgagcctgagggcgagttggtcgtgtttgaggcgcttttcaccgttggccttcgtctgcctgcacatcaatttgtggtggaggtcctgcagagatttgaggtccaagtccaccagctgacgctgaatgccgtggtggccctggcgaaccctcgggggaaggatgtcttcgcccgagcttcgggagtcttcggcgcgaatgctggaggatcgcggatccaaatgcgcgaggcgaaaaaggcgcgggggagcgcgaatgctgctgccgctggcggtagcaagccggtgccggctgcaaaaccggccgcccccgggcacggcaaggcgtcagcgagtacgaaggctgtcgcccctggcgggagcaagccacccccgggcggggtcgtgaaagggcaaaggccgcttttgccggcgcgacgcattgccgacttcggcacggacatcagtgtcgacgattatcttgttggttcgggtgaggggcaactggctgttgtcccgcctccggtggtgaccacttcgccaacagcggtggtgggggcgaagggtgccgtgcgggacccgtgggccactttctgcgggagcggcgagattctgcctgccgctgccgctaaggacgtggcgggctccatgtctcagcgactgagggaggcgtcgcaacagctgtcacagcagctgaagcaagcgaccgacttcgccgacctcgtcgcgtcgggtgccttgactgcggacgttgctgccaaggttgagcgtctccgggcacaacatgcggatgttgtgcgggagaagtcggctgcggaaagcaaaaaccacaggctgtcggagaaggtggccgccatggaggccgagaagacggatctccggcgccagctggcggaggagaggagggaggcaaacaaggccatcgctgatgcgcaggctgcgcaggccgaagccaaagtggcgcgggcagagggcagtctcgcccgccaacgcgtcgaggagctggatgcgaggttcaacaccctgcgtagccgcgtggacaaggccgagtcctcgacgcgtgcggaggtcgagcgaacgcacgcgcagtttgtggacgcgtaccgcgagttgggtgcgcggattgctgacttcgaggcgcccggccaagaaacgggccttcgcttccttgaatggttgcaggaggagctgctggtgctcccgaccattgtgacaggtttcatgtccttcgcctccctcgtcacctgcgagggggccatgaatgctttgtcccgcgaggggtgcaggcattacgaggtcttcgaccaagcggacgaaaactttgaacgtgaaatcttcaaggtcgaagaccctgtggtgaagcagtcggcgggggtactctttgataggatgtggggtccgcacggccgagaggcgggcagggatcggcccgaccgggcgatagagcagatggctcatgtcgaagacgtcgaggaccttattggtctggacggcgcgctgcccgaggccacggaggttcttgggtttgggcctgcgcacgcaaccgctactgacaatgctatttttgtggcggcttcgactgtggctgctgatgatgattcgtttggctctgtgtctaagtgctttgagtctgatgattctgggagttcgattgtgtggacggaagagtcttcagatgaggacttggattattttgtggcgttggatatggctgcggcggagccttcgccgcgcgcggagggttccgaggaactcccgggcgcgagtactgggtataggtggcgaagggcggtggcgaagcggagagtgagtgaattgtcgcgaagtggggggaggtcgtcttcgcgtggacgggactggtaa

SEQ ID NO: 38415 - DNA, 363 bp, Zea mays
  Peptide Sequence Number=SeqID_81790
atgggcaagaacaacaagcgcaagcgtgagccaactcctccatcggaggagtttggtgactcggagtactcagaggaggagttctcctctgagtctgaggggtctccggctcccatccccctgcgtgagtcgtctgacgactcagacgactcccaggggctcgcggcggaggtctggacgtacatccgggccgtcgagcgctccaggctcaagggctcggatgagtcggacggcaggggcggcggcagcggcagcaaagacggtgacggtggcggcagcaggggcggcagcggcggtggcggcagcagcagaggcagcaccaggggtggcagcggtggcggcagcaacagggccagtggctag

SEQ ID NO: 38416 - DNA, 876 bp, Zea mays
  Peptide Sequence Number=SeqID_81791
atgtcgttttctgctcgtgttcctcgcagccgctcagtggaaattttctcaatggtcagagagggtcaagttggtggacttgcaccccacggaggcatggatgttgagcctgtactcgaggagtgcctgcatccgggattatcacacacaggtctacctatatggtatataaaaattgggtctttagttaatcctggatccgccactgtagacaaggacaatgatgatgaggagaggggacgccatacatcaaagatgactaaagaagaggaagatgaagaatacctcgaagaggaagaagatgcccttgctggtgcaggggggaacacatttagtttcacaaccttcatgctcttaacccctctgatcctggtgcgtggcagattagactccgatggggaagtcactagcgaggtggatcaagttcgtgctcttcaggaagaagtcgtcatccagaaaggtgtgagtaacaaaggggaaactgctgccaggaaggagcccacgttctctgagagctctccagtgatctcagagcttgtgcttgttagcgcccataacaacgagatcatgcgggaggtggcaaagggtgaaaattctagcgtgcaagaagtgctagtgactgatgtcagtcaagacttggagaagcagctgaaagaagaggctatgctgaataaagtactaaaggagacagtcttgtcaaaggtagttgccattgataaattgcaatctggtctggcatcttcacttcgcatccaagatgttatgagaaatgagatccaaagagtccaggatgaactttcttgcataacccacaaagctaagcagttggagcttcaggataatttttcccaagtgcagattaggtctactatgtga

SEQ ID NO: 38417 - DNA, 609 bp, Zea mays
  Peptide Sequence Number=SeqID_81792
atggggcccgcgccgtcagccgctctcttcgccgcgcgcatcactcacccaggctactctcgctctctcccagaaacgcttacgtgtgggccatcttcgtcagaactctccaacctccctgcgccgaacccgtcgcgcgaaccttgcggggttggccctctccgctcggtttctgttggacctgggtcatgggggtataaatcccaaggcgaggcgcctcagggccatactcatcgggtgcctcgcaagacatacgcgttgtggtgctgggatcaccaggtcgggcaaccgcgctgccatgggggagagaatcgggtagccagcaacgtcgaccgcggatgcgacctcgcccaggctttgggcgccgctcgggatcttctctggggcgtgcgcgaaggaagcttctgggcgcttgggccccttgccatgggcggatggacccgaccaccacctgtcgccttgggcaagcgtgctcaatactcggcgccggtgttccatcctctgtgcataatcgcgtgggtgcaccaacgtcctggggaatccgtccgtgccttcggagcgggcggggcgaccccgaatcgggcggaattcgtcgttggagttcaatga

SEQ ID NO: 38418 - DNA, 264 bp, Zea mays
  Peptide Sequence Number=SeqID_81793
atggctcgccccagcctcgggcaactactctgggccagcaacagcgcccaaccccgccacatggacggctccgaagccgccatgtgtccagagaaggtggcataccggacccgtggaatgggatctggaccccctcgtatggggttcgggccacccacagggggtcccaaggtcccgggacagagaatacccaggccttgctcaggcaggggtccggtgccgacacgtgtccaagcccagcctggtgcggacctgaccgcataa

SEQ ID NO: 38419 - DNA, 456 bp, Zea mays
  Peptide Sequence Number=SeqID_81794
atgtggacggctctgaagccgccatgtgtccaaagaaggtggcatatcagacccctagaatgggatcggaccccctcgtatagggtctgggccacccacaggggggtcccaaggtcccgggacagagaatacgcaggccttgctcaggcggaggtctggtgccgacatgtgtccaagcccaaggacccctctgcgaaagcaggagggtccgacagcctgggggccggttttaaagaacgggagcccgttccatggggtggtccggagctgtgtggccgcttagcctggtttcgtacccaaagcctgcacactccaccactctgtgatgggtaccctagtatttggagctatagtcctgtgggttcgacaacctggggtccagctctaaagaatggacacttgtctcctggggtggtctggagccgtgtagccgctcagcctggaaccgtaccgtga

SEQ ID NO: 38420 - DNA, 1545 bp, Zea mays
  Peptide Sequence Number=SeqID_81795
atggattactcgagggctcaggggctgcatctaacagatgcgcttgtgccacaccagaagaggaaccacacaagaaagcctctatgcaactccaaggacttacaaaggctcatggactgttgttgggtacctgggaacatggtacccaaagaaggccccaagacaccccaagaatggcccgcccgtcaagaatatgatgagcttgttagagacatatattctcgtttgaatctaattatcaatgagctcaattctattggcattaataagctaggtgatgcggacattgtgaggaagattatctccctgctaccacaacaaagatatgggagcatcatcaccatccttcacaacatggaggatttgagcaacatgaccccgaccattgtgattgggaaaatcgcggcctttgagatgtcgcgaaaaatgagtcggggagaggagccaacttcctcaagaccatatgcttttgcatgtgatgaaaggaagggcaaaaataaggctcccactccaagttcctcaagtgaagaagaggaagaagaagaaagtgatgatgatgaagataatcaaccatgcacatcatcctccgaggacgaagaaacaatccgacgcgtcggaaaggaaaaagcaaagaaagagaggatgcttcgcatgtggggaaaagggccacttcagggacagctgtccaactttggccgaacccaaaaaggagaggagcaaaggcaaggcgctaacaatgatgaaagtagtagtgatgatgaaggtgagggaaagccctctctagatgagcttgcggaagccgtagattttttccaggatgtttgcactaaacaaaaagctcaacttaaaactttgaaaaagaagttggttaactctcaaaatgattacaaaggtttgcaagaaaaatttgaaacttttgcaaacttaaatagtgagctatcaactaaaattgagctattagaatctagtgctccatccactgctaccgatgatagccttattaaaaagaatgaaaaacttaaggctaagttagctagctcccaagaagctattgaaaatttgctagagaaaatggaaattcttagcatacacaataatgagctaactactaagctagaaaacattggtagcaccccagcagcatctttagttgaaattcctgaaataattaagaaagatgcttctacttcctgctttgatttaattgatgattctaacccctgcaaccaagtcgttgttgagaatattgttgtagagacatgttcggatgaggttgcaaaggaaaatgaacaattaaagcaagaagtggctcgccttggtaaggccttgtatgacaagaaaggcaaagccaaacaaatccaacctccacaggataacaccactgcgggagtgaacaagcctatggagggagaaactgtgatttgtaggctatgccacaaggaaggccacaagtctttccaatgcaaggcgatgaccggggataaacaaaggcaaaagctcaagcaaaagccatcaagcaaaatctccaacacctacatcaaaaag

SEQ ID NO: 38421 - DNA, 1195 bp, Zea mays
  Peptide Sequence Number=SeqID_81796
gctccgcctgttggcttacgtcacgggcagctggccacgtagcagcatcgggtctccgcctgagcggggagcagaggcgtatgcagaccctgctgtgggtggcccggaccccactcagagaggtctgggacccgccccgaaggtccggtttgtacctacggaggttctagaccctaccctgaggttcggtccatgtatgaaggggtccggcaccttcccatgtgggtctggacccaccgttgatatctcggaggataatgtcttctctggccatgtggtggctctggagctgtccacgtggtcgggtcgggtgttgttcaccaagcgactagagatagccgcacgggcaccgcgtcttcatactgtagcaagggaaccggtgcccaaggaggatgactcgtgggcccgggccaccatattagaggctgggtcgttggtttcggcggaggtgaagaggcgcactaccgcgggcggcgatgaagaggcgcactatagcaggcggtggcccgctcttcacacggcggttctccttcttcgcacccggagactgacgcccaaggagtatgactcatgggcccgggcccccgtgttaaaggctgggccgctgctttcggtggagatgaagaggcatggtggttcgctcctcgcatggcggttcgcctttattgcacatagaggctggcgcccaaggactgccatggccttgctagaccctcccgagtgcttccagtccgaggtggcactcaacttggtgcgcaacctgctcggatggggtgcgccagcgtttgccagaaggatccatgtcggcgcccctccccttggtgatctcgctgccggggagttcgtgctcttcgcctccaacttccccagcgggttagcgctaccgatctcgtccttcttcgtgctgctgctggaggagctcgacctccaatctcagcacttcacgccttgcttcatccttcaggcggtcgtcttcgcctacctttgcgagatgtccgcgggggcaacgcttcttccgccagcattccgacgaaaagggctcgacgtgtcgaggctggccagcatacctaagaaagagttggtgtcccggccccccaggagccatcctttgattcatgcaacaagacctgcaggatttggcctgggaagccaagccgtgtgcccggaccccatgaaccacagttccagatactag

SEQ ID NO: 38422 - DNA, 216 bp, Zea mays
  Peptide Sequence Number=SeqID_81797
atggagcgaccacccgggaaaacagtgctaccacaagggtttaatggggacgcccttggccgattaattaggaaagctagtggaagactaccttacctgaaaggggcaagggcagtaggggagtggcctcgtagtgttaccctgcctcgcctcctcggtagaggtgtatgggaagtcgcgatcccttggcagatgggtaacatgacttgtgggtaa

SEQ ID NO: 38423 - DNA, 609 bp, Zea mays
  Peptide Sequence Number=SeqID_81798
atggggcccgcgccgtcagccgctctcttcgccgcgcgcatcactcacccaggctactctcgctctctcccagaaacgcttacgtgtgggccatcttcgtcagaactctccaacctccctgcgccgaacccatcgcgcgaaccttgcggggttggccctctccgctcggtttctgttggacctgggtcatgggggtataaatcccgaggcgaggcgcctcagggccatactcatcgggtgcctcgcaagacatacgcgttgtggtgctgggatcaccaggtcgggcaaccgcgctgccatgggggagagaatcgggtagccagcaacgtcgaccgcggatgcgacctcgcccaggctttgggcgccgctcgggatcttctctggggcgtgcgcgaaggaagcttctgggcgcttgggccccttgccatgggcggacggacccgaccaccacctgtcgccttgggcaagcgtgctcaatactcggcgccggtgttccatcctctgtgcataatcgcgtgggtgcgccaacgtcctggggaatccgtccgtgccttcggagcgggcggggcgaccccgaatcgggcggaattcgtcgttggagttcaatga

SEQ ID NO: 38424 - DNA, 540 bp, Zea mays
  Peptide Sequence Number=SeqID_81799
atggcgacagtgggtgcactagaaaggggccgtggggcgatggtagtgccaatggaggtggggcacatgtgcatggaggcacgggtgagtggtggggtcgacgaccctgatgtttgtggtatggttccaagaatctttgcctctctatatgacttcaagggtaagcttcctggtatcttcttgggtaagagactgagaggccttcaagaatctggggatcttcagctctcatgggttgaactgggatgtatgaagcgggctcttggatccacacggctctatgttggttgcagttgcacgggcttgagctgtggtgagatccacatgaagctgacggttgctcttctctgcatcttctgctcgggcaatcatctgacggtggtgccgagccaagagatcatactgtgcatcctgggtgagcagattggatccaatgtatacagtcatgacacccttctctgtgccatgctcgatgaattcatgaccatcatactctggctggctcctaattccgaggcgaactgcgcatgctctcagtaa

SEQ ID NO: 38425 - DNA, 303 bp, Zea mays
  Peptide Sequence Number=SeqID_81800
atggtgctggtcgccgaaaggacggcacaacatccccaggggagtaaaaaagttcccctaggacaaggtggtggtctgaccaccaggatggtgatggaaggtcaagagtttgaggactcgaggtcaaccgcaggggtccgaaccatccagaagccagtctactacgtcagcgaagtcctccatgaggcaaaggccagggcaattctccacaactctaacgccacaggaaacatcgccaagtgggccgcggagcttgctgagttccaactggacttccagccttgccatgctgttaagagctag

SEQ ID NO: 38426 - DNA, 834 bp, Zea mays
  Peptide Sequence Number=SeqID_81801
atgccaaccgtcgtgcctaccccgcggctgaccggcccgtggctgtcacctttaactggcactgttgggtcatgcgcagggctacctcgagtcgcggtactggttccgcagtcgaggaggcgcaacattggcgcgagtggcggggagaaggcgcttaccgaccttgcggaggggcgaacttcggcaacgcgggaccggtcggccgcaagcgtcatccgctccagcgtgcctggcttgctggctcagctggctctgtcgcggcctccgacgctgcctcctgccgcttggtccgggcgcgggcgtctgttgcgccgtgcgcactggcggaccgtccaagacgccttacgccgcatgggtgatgttcgtgttcttggattgtcttgtcctcactccggcacgatgcctccgcgcggaggtcggggcctgcccgtccgtgaggacctgagtggggatctgccggtgcaggctgaggcgtccgccattcatcggcgtggcgctggcgcgcaggtggccgctgttgtcagtgctgaggcggtggcagccggagaaggtttctccgccgacgagaccatcggcgccagctgcggccggacccccggctctttggctttgatggcttgtcctcgcccctcgagcagagacgtgggcgagggcctcgtcacagcagcgtcggccctgaggtcatcgctgctgctgtttagccgctcggagcaggggtcgttgtcgctattgtcaggggtcgccggcaagccacctggaattttttatcccgcaagccttccggtgtggaggttgttcgtgcctgcgggaatggaactagagtcccgtttgtaa

SEQ ID NO: 38427 - DNA, 1167 bp, Zea mays
  Peptide Sequence Number=SeqID_81802
atggccaccgtcagtctcgcgctctcgctgcgattcgcgccgtcgtcgcgaccgctgaatctccaccgcaggaggcccgacgccgtgacctgccgcgcaaccaccgccacgttccaccggctcgacgccgtcgtgagagaggaagagtctaaatttcggagggccgcggcggagggctgtaacttggtgccgatcacgagaagcattttctctgatcatcttactccggtgctcgcgtaccgttgcctagtcaaagaagatgatcgtgaggcgcctagcttcctcttcgaatccgtagaacaagggtccgaaggtactaatatgggaaggtatagcgttgtggcggcccagcctgctatggaggtattggcgaaggctaacaaagtcacggtgatggaccatgagttgaagtcgaggagggagcacttggtgcctgatcccatgaagattccaaggaccatcatggaacagtggaacccgccgcaagttactgatggcctccctgatgcgttttgtgttctaagccagcgcttggagagacggacgttcgcggacccctttgagatctaccgtgcgttgcgcatcgtcaatcctagcccatatatggcctatctacaggcacgaggctgtattctcgtggcatcaagccctgaaattcttacgcgggtacaaaaggtctccaaaccaggttcagtaaaggtggagaaattgatgaatattgaacgatattctcatgtcatgcacatcagctcaaccgtcaccggtgagctacgtgatgatcttacgtgctgggatgcgctacgagctgcattgccagttggaacagttagtggagctccaaaggtgagagcaatggagttgatcgacgagctagaagcggacatgcgtgggccgtacagcggtggcttcggagggatttccttcaacggcgacatggacatcgcgctcgcccttcgcaccatcgtcttccccaccgcatcccggttcgacaccatgtactcctacgcgaacgggaagtcacggcaggagtggatcgctcaccttcaggccggagccggcatagtcgccgatagcaagccggatgacgagcaccaggagtgcctgaacaaggctgctggggctgctcgcgccattgacctcgccgaatccacgtttctccaagagtag

SEQ ID NO: 38428 - DNA, 1245 bp, Zea mays
  Peptide Sequence Number=SeqID_81803
atgagcgggttcaagcccgacgccgtcccggtatacgcctccctcgccgacgagttcgccgtcttcgaccgctggttcgcctccgtgcccacctccacgcagcccaaccgcctgttcgtccactcggcgacctcccacggcctcaccttcaacgcccgcaaggacctcatccatggtttcccgcagaagaccatctttgacagtctcgaggagaacggcctgtcgtttggcatatactaccagaacatcccggccacgctcttctaccagagcctccgccgcctcaagcacctcgtcaagttccaccagtacaccctcaagttcaagctgcacgccaagttggggaagctgccaaactatgcggtgattgagcagagatacttcgattgcgagatgttcccagcaaacgatgaccatccgtcgcatgatgtggcgagggggcagaggttcgtgaaagaggtgtatgagacactaagggccagtccgcagtggaacgagactgccctgatcatcacatatgatgagcatggtggattctatgaccatgtacctacgccggtcgttggagtgccccagcctgatggaatagttgggcctgatccatactacttcaagttcgaacggcttggggtgcgcgttcccacctttctcatctcaccttggatcgacaagggcactgaggatgctctaattttcctagaagctgttgatgacttcctccatgtggagatatccttgatccataaaccaaacggtccacaggatacttcacaatatgagcattcgtccattcctgcaacagtaaagaagctattcaatttacattctaactttctgacaaagagagacgcatgggctgggacctttgagaactactttaaaatccggagaacgccaagaacagactgtcctgagaagctcccagaggtgacaaagtcactgcgaccatttggtcccaaggaagattcgtctctctcagagttccaagtggagttgattcaacttgcctcgcagcttaacggcgaccatgtactgaacacgtacccagatattggcaggaccatgactgtcggggaagcgaaccgctacgcagaggatgctgtcgccagattcctggaagctggtcggattgctttgagagctggtgcgaatgaatctgctttggtgacgatgaggcccgctctcacaagcagggcctcaatgtcctctgacattggcattctcatgtctacaagcatggcctga

SEQ ID NO: 38429 - DNA, 714 bp, Zea mays
  Peptide Sequence Number=SeqID_81804
atggtctatttaagcttatttgtggctggctcaattcattttaaaaactcaaaggaggtggctgtcgtgcctctaagtgctagaggctgccaatttccaagcgttccacctagcttgaactatctgatcggctctgctacctcatggattgacctgtttgatgaatcactctgcacactaatcggctcccttgagctgaacgtcctcttttctgagtcacctaaaacagaaaacagaaatctgaaaaaaagggaaaaagaaaaaagggggaagaacctcacgatgggccaacttcctctcggtggcccattctacattactcctctacgcggcccatgtcgtgagccgcggcgtcgccaggcgggcctggcttgtcggcctcccgtgggcacgaaactgcgcgggtttccactggtcggtgaggccgccctgtcagatggtattcttccctgcgctgctcgccgtgattgttgggaggcggtgatgaggttcggatccagggacctagtcaaccttgccttacatgcgctcgctgcttgttggtaccgccacatggggcctgacacaaaattgtacgcttctggcgctgtggactccaccggggggatcttcgtatccgccgcgctgaaatcatggcggctgttgcgccctatgcttgtttccgtgcctatatatgatcttcgagcgccgcccccctatgacctgtcggggtga

SEQ ID NO: 38430 - DNA, 378 bp, Zea mays
  Peptide Sequence Number=SeqID_81805
atggctgttgcggagatgaaggtacaagatgtaccaggaaagactgcgggccgttcttcatcctcctctgtcgatgttttagagatacagaagtcaaaggagaagggtgttgaacaaagcttggaaggaaaggagactacttcggctgccgagggaaatgctgggggtctgaaggagcgacagatgatggacgtgatgcaagccatcgaaaaagaccccgcaatcggctttggcggaaaaaaattgttgcgcctgctaatgccgaagatactgccgaagctgaagctactgaagccagacctaaagctgaacacctcgggaccacaatgtcagagagtgacacgcttatatctgatgtggctcccgagaaagacatag

SEQ ID NO: 38431 - DNA, 147 bp, Zea mays
  Peptide Sequence Number=SeqID_81806
atgacgcagacgaggagcgacatcgaacggcggcccatggcggagcaagagctccggatgcaggaggtgcgaattccgaaaggaccccagcgtgggcagattccacggatgagttcgttggcgcttgatttggttcggttacggtga

SEQ ID NO: 38432 - DNA, 357 bp, Zea mays
  Peptide Sequence Number=SeqID_81807
atggacgacctagggttggccgcccctaggggctgcgccccctctctatttattcaggagctgcgcctcctttattttccgagttttgttttacgccgatctcgcatcagcaaggtcggtaaccacagggagttggttcagcgattgcattggcgcctcgggcttgctcgtcgtagtcggatcgcaagggtcatcttccgccaaatcggaattatctctactcgccgaaagatcgggcacctcagcttcatcaacttcaattctcttgcacgggcccaagtcactggccaggtggaaggggtggcgcctggactggggaagatggtgcctgggctggagaaggtgctgctggtgtag

SEQ ID NO: 38433 - DNA, 363 bp, Zea mays
  Peptide Sequence Number=SeqID_81808
atgacgcagacgataagcgacattgaacgacgacccatggcagagcaagagctccggggagggacccgacaggagggccccaaccaagctgcggcgcggagtacagacaagccgcacgagtgtgatggagatgcggtctgttaccaacgccagcacgaattgcagggaagcaaagaacgcacagcgaagaacacgcggttcagttcaaggagagggatggatctgaccagacagggcccacctggcagtgccagaatgcagaccagcgtgcgggtcctgcatgtcaatgacaagagggagggagcacacacggttgttggttgtgccgggcgagttgatcagcgcaggcaggaattgggctga

SEQ ID NO: 38434 - DNA, 279 bp, Zea mays
  Peptide Sequence Number=SeqID_81809
atggagcaggtgctacgcggcagcgtgtgcgacaagggaagggggcctggtgttgccggcgatgatggcggcggtgggtgcgctgcaaagggggggtgggcgacggtagtgcgctgcaaagggggcatgggcggcagtgctagtgcgcatggaggcgggcacgcgtgcggggggcacagcttgttccaggcttcaagggtaagcttcccggtatcttcttggggcttcaacagcaatgacttcgcgactttccaaggcagctacacgggcttgagctga

SEQ ID NO: 38435 - DNA, 114 bp, Zea mays
  Peptide Sequence Number=SeqID_81810
atggcggcggtgcgtgtctgcaaagggagtgtgggcgaccgtagcgcgccgcaaaggggatatgagtggaagcgccagtgcccatgcatgcgtgcacccgtgcggagagcacag

SEQ ID NO: 38436 - DNA, 236 bp, Zea mays
  Peptide Sequence Number=SeqID_81811
ggttgggaagacggactgggatcgctcctgggcagctgttgcggtgccggtagggcagttgcgtgtttgcggctgctcctgtgcgctggagggtcgctgggtccggcactatgggctcgtcaccatagtccacggattcgtaccggaaagtctcaccgtgcgtggaggtccgggcaggggtattcattctgcgattgccggtaagacacctcccatgatgttcgccgtcctccctt

SEQ ID NO: 38437 - DNA, 1758 bp, Zea mays
  Peptide Sequence Number=SeqID_81812
atggcggcagcgatcatcatgcctccacatacagacccaccacggccagccacagcgagtaatcccaccgctcccgcttcccatccccaacgccagcgagacgccccgacaccgtccctacgcgcgctcttcctccgcgccgtggacccttcccgcccctcgtcatggtccacggccgtcgctgatcttctctcctccggtgaccccgtcgccgcgctggccgtgttcgctgccgccctccgagccaaccccgctgcgctccggccggccctgcccccagcccttcgcgccgccgccgccgccacctccctctccgccggtcgccagctccacctcctcgcgctccgctcgggcctcttcccctccgacgcctactgcgcctccgccctcctccacatgtaccaccattgcttccgtcccctcgatgcccgcagggcgttcgacgaaatccccacccccaaccccgtcattgtcactgccatggcgtccggttgcatgcgcaacaacctcgtatataccacgctctctatcttccgctccatggtggcctctggttctgcgggagtggtcgacgaggcggctgcactggtagcgctctctgcatctgctcgtgtccctgaccgtggcattaccggtggtattcatgcacttgtctccaagattggcttggacgggcagacaggggtagcaaacacgataatagacgcgtatgcaaagggcggtggtcatgacctgggggctgcgaggaagctctttgatatgatggatagggatgtggtgtcctggaacacgatgattgcattatacgcgcagaatggactgtcaactgaggcacttgggttgtatagcaagatgctgattgtgggaggtgatgttagatgcaatgcggtaaccttgtcagccgtgctattggcctgtgcgcatgcaggggcaatacaaactggaaagcgcatccataatcaggtggtaagaatggggttggaggacaatgtctatgttgggacttctgtagttgatatgtacagcaagtgtggaaaagttgaaatggcatggaaagcctttcaaaaaattaagggaaagaatatcctttcatggtctgccatgattgctggctatggcatgcatggatatggccaagaagcccttcatgttttcactgacatgaggaagtcagggctaaagccaaactacataacctttatcacagttttagctgcttgcagtcatgctggtcttttgagtgagggccgttattggtacaataccatgaaaactgagttcggaattgaacctggtgtcgagcactatggatgcatggtcgatcttcttggccgtgctggttgtcttgatgaagcttatggccttattaaagaaatgaaagtcaaacctgatgctgctttgtggggagctcttcttagtgcatgccgaatatacaaaaatgttgagttggcaaaaatttgtgcagaaagattgtttgagttggatgcaactaactctgggtattatgttctcttgtcaaatatatatgcagaagctggaatgtggaaagaagtggaaagaatgagagttctggttaaaaccagaggaatagaaaaacctccagggtatagctcggttgagttgaaagcattaggtggtacaccgggcaagcgtcatcggcttgttactcttggaggttgccgcctcctagatggctcgggtgttgtctccgtcgagctctccaagaagattgtggaggagctgcggtgtcgattgtga

SEQ ID NO: 38438 - DNA, 363 bp, Zea mays
  Peptide Sequence Number=SeqID_81813
atgcggaggagcatgcatttcgtcaacaaattccaagatcttcggccgccaaaccaccgcagaaagttcacctgcccggacctccacgcacgatcgtgcgtggttaaggcttcaggggaaagcggtgtccagccatggcttgctagatggattagagggggggtggcgagggcccgatttatagcctggggggcgagcgcacggaacagccagagtaatcgagcagcagatatctcggcgggttgttgcaacgaccgcaaagattgctgggatcttcaacgaactggaaacaaagagcctgtatatgcgactccacctatcaacgaaaccaggcacgaacaggttcacggaggcactggctag

SEQ ID NO: 38439 - DNA, 198 bp, Zea mays
  Peptide Sequence Number=SeqID_81814
atgacgtattacaaattctacttttcaaacttaaacttgtctcaaagttttgtgtacacagggctttacgcttcctcaatggaccaatcaaggaagaggtctatgttgagcaacctcccggctttgaagatagtttacaaatcctacccccttaacagaaatctcgtcctcgagatttgtaagagaaaaaggatgtag

SEQ ID NO: 38440 - DNA, 549 bp, Zea mays
  Peptide Sequence Number=SeqID_81815
atgggcgcgattaaggccaaggctcagtccactcaagggacacgatctcgcctcgcccgagcccagccttgggcgagggcagccgacccaggaggattcacgtctcgcccgagggaaaacagcgccgcctgccctgctccgactgctgtgccactcgacagagtgaggtcgacagcagctaagtccagcctcgggcgccatagtaagctccgcctcgcccgaccccagggctcggactcaacctcgaggccggacgacggactccacctcgccctaccccagggctcggactcaacctcgacgccgaacgacggactgcgcctcgcccgaccccagagctcggactcaacctcgacctcggacgacggacttcgcctcgcccgaccccagggcttggactcagcctcgaccttggaggagtcaccgcctcgcccgaccccgggctcggaccgaccacgtcacaggagggccatcattaccctacccctagctagctcaggctacggggaacaagaccggcgctcctccgacggccacgacatcacatga

SEQ ID NO: 38441 - DNA, 648 bp, Zea mays
  Peptide Sequence Number=SeqID_81816
atggttgccatccaagggggtcaccctccttttaaaggcgactctccccacttgcgtcctcagccgtcgcggaatgagtcttcaccaacacgctccaaggtcatccccctacgacacggaggctgggtcccacgcgtcgtgcaagccggcccaggacagaaggagccaaaccgccgcgagcggagcgtacaactgtccagcggttacaagcactcctccactttcgcccagaccagcggggaccgggaaaggggatattccgaagggatccttctccacgaaggaagcgggccccgagccctcctactgatcagaggttcgaaggctggcccctcggaagggttcgacagccgcctcagagcactcgggctccgagcccttctactgatcagaggttcgaaggctggcccctcagaagggttcgacagctgcctcagagcactcgggctccgcgcccatcactggctgacccccgaaaggttcgacagccgcctcagagcacgcagagcgagggatgactctgggtacgtccgatacatggccgaggctcgggctacgctcccgaggctcgggggctgctctcgcaaatccggctccggccaaaccgttgacagcgtcaacataccagcccgagaacttggaacctga

SEQ ID NO: 38442 - DNA, 585 bp, Zea mays
  Peptide Sequence Number=SeqID_81817
atgggggcccaggcacacacgtcatgcaaccggcgcgccggttactacgtgcaagaaactgcaccgcccctcgcgccactaccacgcctcctcgactgcggaaccagtaccgcgactcgaggcaaccctgcgtatgacccaacagtgccagccaggcgcatcggtcacgggccagtcagccgcgggagaaggcgcgacggtcgatgcggccaaaaatgggccgacagtaatggcggtggcaggcgagcggaagcagagtcatgtcgtcagccaagctcatgtcccctcatgggacggcgagagaaccctctcctacggcgtgaagacggcgcacccgtgttccgtccctcaaacggctcgcacacgcgcaacggtcgccacgcgaaccactcgtcccgtcgcattaactctgcggcgggacaggcggcacctttgggaccgggaaagggggataccccgaaagggatccttctccgcgaaggaaacgggccccgagcccccctactgatcagaggttcgaaggctggcccctcggaggggttcaacagctgcctcagagcgctcgggctccgcgcccactactga

SEQ ID NO: 38443 - DNA, 903 bp, Zea mays
  Peptide Sequence Number=SeqID_81818
atgaccatcatccgatcccgatcagacggttctcgttactcctatccgaaacgctacgcagtcaccaaatccggccatcaaaaggagatccaacggtcgggcgatcatctcccccaacccaaccctggacacggcggcgccgcccacccgctcggccacaagatcgccggagaatgcaattcgccgcccaaacgagctataatccaaaacgacaagcactacacgttgagtactgaagggcgaactcaatggaaggtggctaaacggtggcggaatccgaagcggggccaaccacatcgcacggttttcaccgacctccgagggggggtttctcaccggaaggaaggcagtggattgattggctgtggcatcgagcgaccgcggcggcgctggcaaggtgtcgccaaggaggattcacgcacttcggagaaccctgcacgcgacgggcccccaacgcacggtcagggcacacttgtggacgttcccaacttctcggtacccgacggcgatgacggcgacgaacttctcttctcccccggccgcctcgagctcaagctttccccactcgcactcaacaaccctcggatgaacgcgaaattggtcagagccgagaacgatgctgcacgtaggccttatacggagatcaccggtccgcaactaactcctagaatcacggcgaactcacgaccatccggagtcgcgctgcacaggagaaatctccgagccatggcgcggtgtggctggtttctgggcctggatggcagcgccccttgtggattcccccgcacgacggaatcggtcagcatgctgcggtcacggcgagatggagctgaccctgcccgtgggcccaggtttccagtggcgcacagcgggtggagatgggctgcgcgcgcgctggattga

SEQ ID NO: 38444 - DNA, 294 bp, Zea mays
  Peptide Sequence Number=SeqID_81819
atggcgagctcgtcggcgctcgccgtcccctccatccctctccctctcccgggcacctataaaaggagccgtccgagccctgttccctccacaccagctctggccatctcctgcgcttctccccgagccaatcgagctagcgccgccgcacttccccgtcgctccatgcttgagcccctccacacgctcacggtcatgaggcactcctccccgccccctattgcacccgactgcctcaccggtgacctcaccgccgtgaacacccgccaccgtgccgtggaccggccgccctag

SEQ ID NO: 38445 - DNA, 501 bp, Zea mays
  Peptide Sequence Number=SeqID_81820
atggcgagctcgtcggcgctcgccgtcccctccatccctctccctctcccgggcgcctataaaaggagccgcccgagccccgttccctccacaccagctccggccatctcctccgcttctccccgagccaatcgagctagcaccgccgcacttccccgtcgctccgtgcttgagccccgccacacgctcacggtcacgaggcactcctccccgccccctattgcacccgactgcctcaccggcaacctcaccgccgtgaacacccgccaccgcgccgcggaccggtcgccctacgtccccgtctgtcaaattggccccacccctgtgatcccctgcccccgcccgtgcctcgccaccacatccccgccgcggaaccggacccacggcagagaaccgccgcagaattccaccgccggtcgaactccggtcgacccccctccctccattgccatccgcgccgttaaaccctcccccctcgctgcggaagaggggagggcctaa

SEQ ID NO: 38446 - DNA, 594 bp, Zea mays
  Peptide Sequence Number=SeqID_81821
atgggtcggcgcgagacggagcacgaaggggggaggaagccggagggagacaggcgtaaaagggggaacccgcggccttcgtgtttgtcccgcgcccaggtcgggcgtaaggaaaggatccagcccgagtctgagccctggggtcgggcgaagcggagttcgtcgtcttctggggctgagcccgagtccgagccctggggtcgggcgatgcggagttcgtcgtcttccggggctgagcccgagttcgagccctggggtcaggcgaagcggagttcgtcgtcttccggggctgagcccgagtccgagccctggggtcgggcgatgcggagttcgtcgtcttccggggctgagcccgagtccgagccctgggtcgggcgaagcggagttcgtcgtcttccggggctgagcccgagtccgagccctgggtcgggcgaggcggagcttcctatggcgctcgaggccagacttggctgctgccagccgcactctgccaagtggcgtagcagtcggagcggcgcaggcggtgctgtccttttgttaggccggccagaggagctgcgaagtgactgcggtcacttcggctctgttgactga

SEQ ID NO: 38447 - DNA, 665 bp, Zea mays
  Peptide Sequence Number=SeqID_81822
atgaacaaaaacacgggcactcaaggtgcgcattacaaacagaactccggtttccacgttcgcgggtacgaacaacccccccacatcggaggggcccgtggggcgacaagctctgagcgactcgccagcgacctctgcggcaacagccatggtcctaggacggacgcggccaccggaaggctctcctgccaccacgtcagcaccgacggcggcgtccgcctctccaccaacgccgcaccggcgagcgcgggccgctccaaagcgcaccggcaggtcctcgctcccgtcgtcgccacgaaagcaaggaggaggacagaatgttgcatcctagctgggcagcaacagttcgccttccccggcattgaggacgcgtcctccacagagctggaggatggtctccaccaccagaagctggaagaggaggtggccagccgatactcccatttcggcccacttggtcaatccagcgcgcgcgcagcccatctccacccgctgtgcgccactggaaacctgggcccacgggcaggcatcgttctcggctctgaccaatttcgcgttcatccgagggttgttgagtgcgagtggggaaagcttgagctcgtggcggccgggggagaagagaagttcgtcgccgtcgggtaccgagaagttgggaacgtccacaa

SEQ ID NO: 38448 - DNA, 414 bp, Zea mays
  Peptide Sequence Number=SeqID_81823
atggttttggaagatagggttcaagagaggtctagggttttcccccttcttgcccaagcggaaaaactcagggagaagctgaggcaggagttcctgcggaaggggacggaactggcgcatggggtggctgacaccctcttcgctgtaccacccaccgaggacctcgacggccctatcgtacacctcccatcgcccgctgtccgactcccgcgcgagaagcatcttgatgctgggacctcactgccaggattagtagctgcaaaggttggggcagatgtaacactaacagacattgcgcagaatgcagaagagataattcagcaccttaagcatagttgtccggcccatctatatgctacttccatgtcgccaccagtagtccaacaagaaaatatcaaaattgctccaaaatga

SEQ ID NO: 38449 - DNA, 468 bp, Zea mays
  Peptide Sequence Number=SeqID_81824
atgagcactaaggaggttgatgagcaaatgattaatgtccagaacaagaactcgtcctactttgtggagtggatccccaacaacgtcaagtccagtgtttgtgatatccctccgcgtggcctctccgtggcctccaccttcattggcaactccacctccatccaggagatgttccgccgtgtgagcgagcagttcactgctatgttcaggcggaaggctttcttgcattggtacactgatgagggcatggatgagatggagtttaccaaatctgagagcaacatgaatgatctggtgtccgagtaccaccagtaccaagatgccactgctgacgaggaggcggaatacgaggacgaggaggccatccaagacgacgttattatgagagtgaaggtggatgtgctgctacttcccacttcccttgacgagcaacaagcacctgcattgagtaatgcaagagtgagatga

SEQ ID NO: 38450 - DNA, 228 bp, Zea mays
  Peptide Sequence Number=SeqID_81825
atgccgaactatgcattctttgattgcttaggaatgaggtcagtttcagaggcagaatcagcaagcacctcgtcttcctgccccagcaaaccagcagaacaatcaggcagcaccagctcaggttctttggaggacatggttgctggagtgacttggccgtccatcttgccaccgggttggactgtcgagtgggaccctacctcggatgaggaggagcatgaggagtga

SEQ ID NO: 38451 - DNA, 702 bp, Zea mays
  Peptide Sequence Number=SeqID_81826
atgtcgtccgacgcggtggccgccagcagcaggaagggccggctgaagcagcgctacgacaacgagttccgcctcgtcgcagggtcgggcgtctgcctttttgattttcctcggtcttggatacattggtgcgtgccgtaccgggtgaacaagaaagacgacgagggcggcaacccgtgcagcagcctcggcgacgacacggcggcggaggtggaggtgctcatgatctccacgcctaaccgggccgacatggtcttccccaagggcgggtgggaggacgacgaggacgtctaccaggcggcgtgccgcgagaccacggaggaggccggcgtcaagggcatcatcaacagagctgcgctggggcactgggtgttcaagagcaagagcagccagaacagcaccaccagcaccagtggagcctgcaagggctacatcttcggcatggaggtcacggaggagctcgagtcatggccggagcaggacacgcacgaccggcgatgggtctctccggccgaagcctaccagctctgccggtacgactggatgcgggaggcgctcaccgcgctgctggagaggctgtcggtgctgcagccggtggcagcggcggcggcggcggccacaccggaactggcggccgaccaatctggcatgtacatgatgctccaggcgtcctcggacggaggagcggtggcgctgtgctag

SEQ ID NO: 38452 - DNA, 690 bp, Zea mays
  Peptide Sequence Number=SeqID_81827
atggccttggaccaacaggccctcccggtcccggtcccggtcccggtccccgtcctgcccaaccctaactcgaccgcaccagccgacctgacctcgccctcggcgtccgccgcgcgcaagctccccatcaagcgccgctccccgcggccgtcgtcctcgcccccgtcctcttcctccccggcctcctctgacccgctccgcgcgcccgcgcctggcggcggcggatccgaccagcagcagccgcccttcaagttccagcgcatctggtccgagtccgacgagctccgcttcctgcagggcctcctcggctgcggcacgcagggcctcgtcttcccgcgcgacctcaatgtcttctacgaccgcttctctgagtccatgccccagccctacacctgcgctcagctctcggagaagctctgccgcctcaagaacaagttctgcagcatatccgcgcgcgtcgcgggaggcatagacccggcccgcctcgcgccgcacgaccgcgacgtgctccacctctactccaggatgtggggccctgaggagcatttcccctcattaaatttcatgaacggctatcccaatgtctctggccacgatgatagcgtggacaacccaaagaacaacatgttcccggtgatttatggcggcccagttcaatcgggtgggtcgacgagcatcacgggttcatga

SEQ ID NO: 38453 - DNA, 840 bp, Zea mays
  Peptide Sequence Number=SeqID_81828
atggaggtgtgtgacctccgcaaggtgcccgacgcggccgccccggccgaccctcgaccgtgtcgccaatcaggcgatggtgggggcggccaggtgacggaagccatactcgctttcggcctcctccagcagcgctgcgaagacgaggtgctcgaggtggcccagcggtaccacgaactggtgacggaacctgctcaacaaccatgcgcgcttgacctagcccccaccgaacaccctcaccgtggcctcctgagccggatcatgcctcaccttgaactgcatcgacgcctcaacctgccggggcaaggtcacgaggttattcctgtggtcagcagcctcaacttgcaataccaacatccaatgaatgttcctggtgtgccacatgctgctaaccgtttcactgaccatggagcttcatcatcgagagctgggagtttggagaacagaattattagtagtgaagaggttcctaggaggtatgtcgtgcctaccaactactctgatttggttcccccacctgcagtagacctgagacgtttggtgccagaaccattaaattggagttctgatgtccgaggcactgcaatatcaggaagtattcctcctgtatcaagaactaataatagttcaacagttaatccaccagcaggattcaatcaccaaaacctcaccagacgccatcctcgaaatttgtcagaggagattggtcgtctatctagagcactctgtggccatcaacccccacgcttaaggtcagggtttctgttggagcgtcagaacgatggtgtttggggcgttccttcatcaacaagggctagagaaggaagaagattaatggag

SEQ ID NO: 38454 - DNA, 1059 bp, Zea mays
  Peptide Sequence Number=SeqID_81829
aggattggggcgcttcaggtggtatcagagctgttaggttggccacaggacatggaggtccgctaccaaaccagcttttgccagaatgaagatggtttccccaagttgctgaaagcatgcacagtccgcctcgaaatcaggagccagccagagtatgatggtcgtgaattcatcgagcatggcacagagaagtgtgtcgtgactgtatacattggatccagtctgcaccatgtggaatggagtgtcactgctgctgggcacagattcaaagacacctgccaagtcgtcgcccgcaaggcattgagggccctgtgtcagatctatgaagaagaagtggccaacacaccgctcagattctttccgccctttcagagagaccgtcccatttggatggccaggatgcgtgcattggaaggacaacagttgcttgaggacgaccccatagtcgtgtacctcactgcatacctgctcaccctagatgcacagtatgatttcttggctcggcaccaccgtcagatgattacccgagcagaagatgcagagaagctcaactgtaagctccatgtggatctcacctcagctcaagcctgtgtagctgccttggaaagtcgtgaagccattgctgttgaagccctgaagcaagccaaggatgagcacgtccagaagttgatggaggcctacttggtaacccataaccaacgtagagccctgcagatccaagagcccgcttcatccaaccctgttcaacccatcagagctgaagacccccagatacttgaaggtcacccggatatggataagcaagagcaccctgaagcctcccaagatcccccgccggagttgtttgagcccctcaccatgaaaaagtttccagcaccatcccttgaagtcaaggaagaagctgcaagcaccccgccagcacagtcgccctctaaggaactacaagagccagtccagcttgaagaagagttcgaccccgtgctaccatctcagtcgccgccagaagaagtcatcaacatcagctctctcttgacccatccaggagatgtctcagattga

SEQ ID NO: 38455 - DNA, 474 bp, Zea mays
  Peptide Sequence Number=SeqID_81830
atggcccaagcgccgccgcgacctaggagcgaggatgaggagctcgaggaggaacaggtgagcccatggtttgttcctccggcccttccctcccctccctgctcccccgactctgcgcggatctggtactatctagcccatagagccgtgctggacaacacagccacgaccacaaggcatcgctgtggagcagtcggagccatttgtgatgccccctcccggttttatgggctaagtgagataaggaagaatgatgaagttacttgtttgtctataataactatattcataattcctcacaagatttcccctgtatcaaatttaagcatgtttgattacaatgactaccacagaaccatagattgtatacttcagatcgccgtcaagaagctcaacccagagagcgtccagggcctgcaggagtggcaggataacatggagaacttcaaccctttcggtgagaatggagagtag

SEQ ID NO: 38456 - DNA, 153 bp, Zea mays
  Peptide Sequence Number=SeqID_81831
atgggaggaggcggtggcgctagccagtaccaattctacggcggcctccaggcacaaccggaggtgggcgccgctagggtggtctttctggttgtatttaagccagaaggtggcaacatggaggaaaaggatcttgaattcatgcaccattag

SEQ ID NO: 38457 - DNA, 621 bp, Zea mays
  Peptide Sequence Number=SeqID_81832
atgggcaagagcaagaagggtggtagttcttcgcatcactccggcgacaagcggaagcgtgagccgactcctccctcggaggacttcggcgactcggagtactcggaggaggagttctcctccgagttcgagggctcaccggtccatgcctctcccccggtgtcgtctgatgactcaaatgactcccaggggctcatcgcagaggtgtggacctacatctgggccgtcgagcgcgccgggctcgagggctcggatgagtcggagtactccttggattcgtccgaggagggcggcggcggcgatggcggtgacggcgacatcgacggaggcgatggtgacggcggcgaaggcgacggcaggggcggtgacggcggcggcaaaggtggcagcggcgacggcggcgatgacagcaagggcagcagcaggggcagcaacaagggcagcagcaagggcagcaacaagcggctaagtcctttggagtcacgttgctgctttgggagcgtcagccgagtgattattggcggtgtcggcgcttttagaagtgatagccaagtgatagcgggccacgtcggcgttttagaaataacgaccgagcggttactggtgatgtcggcgttttag

SEQ ID NO: 38458 - DNA, 627 bp, Zea mays
  Peptide Sequence Number=SeqID_81833
atgaagaggatgactcggcgaactcgctggcggggtcgtggccacgagaccgggattagagagagggaaacagcggggaaaaagctccaggcgggccggggtaactccggcgaggaattccggccgccaggagaggcaatcgaccgcgatagggctcgttctagttccagtggtggtgggggagcactatggaccaataccgaggcactgaacggggtcagaccggccgggcgtcgtgtgggcgcgacgagcaagtgcggccacaagccggtgaggcaaaattggctaaaggcaggcgcgaataggaaaaaccaagcacgggggagggtgtctcacctaggggcggagctcggggtggcctggtgtggcttccgccgacccatcctcgctcagttccgatgtacgtggcccctgcgcgggaaggttcatgcttcagaggtcagcattttgcactgtagaactttgaagttcattgggtgcaccgaatgtgcagccccgagcttcgagtggatttttgcagataatccactcgaaggtcttcatttcaagtcttctcagaaattacttttatcttccacctgtgctttttcagaggtgcacccaatgggtgtagcccccgagctttga

SEQ ID NO: 38459 - DNA, 261 bp, Zea mays
  Peptide Sequence Number=SeqID_81834
atggggattgaacaaagctcggaagggaagaaggctgcttcggaaactgggggaaatgctgggggtcagaagaaatggcgaatgatggccataatgaaggctatccataagaccccgcccccagcctcggtggaaaaaattgttgcgcctgctaatgctgaagctgatgaggctacacctgaagctgaaaacatcggggccataatgttagagattgacagaattatagctgatgtggctcccgagaaggacatagctgaa

SEQ ID NO: 38460 - DNA, 450 bp, Zea mays
  Peptide Sequence Number=SeqID_81835
atgggctccgacgcgatacacggcccaacggcccaacagacgactggtcctggaacccgagatagagtcgtagccgactcggacttgatctccttcctgttgtggacgcccttgctgctcctcctcaacaccttggcctttcccaagtccttgatggtcctctccaagaaaccaacagccgagattagatctgtggccgagggcacgcgcgagggcgagcgagcgctaacaggtgggctagggggcgtcagcggccgggaaggggacgggctgaccgatcgggcccagcgccaggggacacaggcgctgacaggcgggtccggacgcaggtcgctggagttggggcgggtgcgagctacgatggttccagggtcgccggagttggctagaaatgaagaggatgactcagcaaactcgctggcggggtcgtggccacgagaccaggattag

SEQ ID NO: 38461 - DNA, 786 bp, Zea mays
  Peptide Sequence Number=SeqID_81836
atgccccctgcaccaccacagggcatcccggctgctggaggagatcctgacggagatggagacaacgacgatgccggtggcagttcgagccacgacatagagctctcggaggagccagatccggacggatggatcgctagacccatcactcgtgacgccgctcgcgggtgtcacttccacgacgctctcgacaccttactgcgtcaggccttcgaccgacacacttggtccttcgagtacctttgtgtagtctaccagcatcgtcccgggttataccaggatgagtgggaggctacttgcttggtgcgccgtccggacaatgatctccggggtgcagaggccttcttagagcactattctattactaagagggatactgccgaggcagccatgcaagatgcagcacgacgggcactttctcagtattcctcattattcagcggggatatcccatcccaggggccaggatatcacaactaccctcgtcgttcgaccgacagtgctagaggtgtgattgtctcatcagttggtgagggcaatcccaggctgaacaacatggtcaacctggccgccgtgctcaacatagagctggaccacgcccttgacgagttgggcaaggttcgggcggaggttgcgaaattgcgtgctgagtgcgcagcacgccactatctggatggtggttctcccgcccccgtcgggattcaacacccttaccgttcaccgccccgtggtcgcttcgactatggtactccagactgcaagacccggatagatttggatccatag

SEQ ID NO: 38462 - DNA, 267 bp, Zea mays
  Peptide Sequence Number=SeqID_81837
atggccccggatctagcaccagagcctgccctagaggatctacctgccccagttttggaaggcaagccccgtggactttacccctcacgcgacctgagacgtggtctcccattccagttatggtgggtagaagtgcggtcactacacgacgacagtaggggttctctggaggacatggttgctggagtgacttggccgtccatcttgccaccgggttggactgttgagtgggaccctgcctcggctgaggaggagcatgaggagtga

SEQ ID NO: 38463 - DNA, 927 bp, Zea mays
  Peptide Sequence Number=SeqID_81838
atggcctcggcaagtgtcgggggtacgggaggtgggtttggtgttgcctccctcccatgggaggcggcggatgttgcttctcaattcattgatcctgtcgccatccgcgacccatatgccaatcctgcgttggagttctgtttgaagctgattaactttcgcttcaagatcctcgatcggatcattactcccactactgctatcctcgtgtcttggggcaagttgatgacgtggcacaccaattgggccaagaagggcttcgctccgataccagctgtgacggaacctcccaagtcattaggcccacctacagttgtccttgtccaacggacctcagacaaccctgtaggtgcccctgaatcacttgacaagttcggacgaagccaccgccgtctccgctggcacgcccgctcccgccgcacccgcgacgtggggaagctcaaccggctggtgacgcccagcgacgtggggaagatcaaccggatggtgatcccgaagcagctactggctgacccgactcccttctctcccaattctcagcgggcgatgcaggcgaagaagctgaccctgctgcagacgatggcagctacgggagtcttctctgccatctccttttggtaccccctcaatctcccgccccctgaggattctcgctggtatggcttcatgtttggaagggagtccgcgcggcgcgagcttggtggcatcatagatgacctccgcagcaacaagcccaccaatactcctgccggtcccgatgctcattcgaagccatggtggggtatggtattctgttgttcctcctttgccatactaaatctaaatgtggtcaagcttgtcttgtggatcctgctaggctgtagacggaagaacaagccttggagctaccagtttttccccttctttcataatgtgtatacgacttga

SEQ ID NO: 38464 - DNA, 612 bp, Zea mays
  Peptide Sequence Number=SeqID_81839
atggacatggaccccaggttcaacgtcgactggagtgccaatgagatcgagatggtgagatctctcatcgcttgtcacggcgccagcaacagcacaaacgacgacattgtggatgagctccaggcaatgttcccagggaaggataagcgccaagtaactgacttgtacgttgagcttgtggtggagatgataaacagtggggcagagatgagcagcaaccagctcctgctcaactctggtggggtgcacagtaggacgatggatgggtatttagcagacgagatgaaggcgaagaggatgctgctggaggaacagcgccgtaggaaattagttgttgttcctcgacaggataaccaacaacgtgcagggaggaatttcctgcgtggcctgcgtgtgtacatgtgcggcaattggaagaacatctccaaggacttcgtcaccactaagacgccggtgcaggtctccagccatgcacagaagtacttccggaggcaggagagcaccacaaggaagcagcggtacaacatcaacgacgtcggcctctacgatgttgagccatgggaggagcagcagcagcataatagctcaatagtggctagtgttacgagctaa

SEQ ID NO: 38465 - DNA, 366 bp, Zea mays
  Peptide Sequence Number=SeqID_81840
atggcagatcgtaggattataacttgggagttctggaaagatgctattaggtcgaagtctggcgagcatggagtgaaactgaaggaaaagccggaattcacgaacccggatgagttctattttaagatgatcaacagtaggactgttggtggaatccatagacctaagcctgaagataataagtatactgaagaggaacttcttctgttgaaaaataaagatatgggatatatccttcagagcattcaatgtgaaaaaaggtggctcttttatttcagagaagaagcgaaagaaatacaatcaaggataggacaaagcaacaaaatgcgtgatcttgacaacatcccttctcgtacaaagaagtaa

SEQ ID NO: 38466 - DNA, 147 bp, Zea mays
  Peptide Sequence Number=SeqID_81841
atgaggataaattcacaacccctgaaggtattgttgacgcagggaagtgttatagaacctattgtggttgttcgaggaaatgagatggtgcttgttgctcgtcaagggaagtgggaagtagcagcacatccaccttcactctcataa

SEQ ID NO: 38467 - DNA, 225 bp, Zea mays
  Peptide Sequence Number=SeqID_81842
atgggacaccggtcttgttccctatggcccgagtcagctcggggtagggtgatgatggcgcctcctgttgacgtggctggtctgcgccctaggttgggcgatgtggaagctcataggaagccgaggtcgagtctttcttccgtggccgaggtcgagtctgaacccactggttcaggcgagacaagagtccgtcggctgaggccaggggcggagtccgagccctag

SEQ ID NO: 38468 - DNA, 141 bp, Zea mays
  Peptide Sequence Number=SeqID_81843
atggccctagtggacgtccctgacggcggcacgagcgcggggcggggggccgacgatggcccaagcgcgacgatggaagatgaagcggagaggagcccgggtgaggaagatgacgaggagaggagcccggatgaggtctaa

SEQ ID NO: 38469 - DNA, 606 bp, Zea mays
  Peptide Sequence Number=SeqID_81844
atggctactccggcaagaggcaagaaacggctcgtcgtcgacgtcgatctcgagctggacagtgaggtcgaagtggcttccgccttcagccgactgtctgtttcagtcgttgccaagcgtacaggcgacggttgcggcttcgagcactccaccggcaagcagcgcaccaccagcaaggagtggaccagcggcaaggaactcacctgcgcggccacatcagagctcacagccggcgtcaatcactgctcggcacctcgttcagtgtcgattacccgatttgaaacagttcgtagtgacctcgccgaagccattacaaagatgcgtgtagttgggaaggagttgaaagatttggctggagacgagattatggattcgccagatacggccaaagaggtgtcagtgaactttgcaatgtggcgcgtgtatgagcttgctcagtcacttgaggacgaagcacaacgtttagaagatctcgaagctggtccatcgccaccattatctgagtggttcaacaaccaatttgctgaagatgaacatatgggtggtggggaatgggcactagatgatgtcagttctgaagagctttcggatcgtcagatgaagtag

SEQ ID NO: 38470 - DNA, 198 bp, Zea mays
  Peptide Sequence Number=SeqID_81845
atgaaggccaactcacaccatcaaccaaatcaaggaggtacctgcaaaaattatgccataagcactaatactcagctagacttaaccggcctcaccgccttggcatacaatgctccactgaccccggccgccgccgtgcagtggccgcacttgtacccaccatatctagaatgggagacccagtctcaggtcgtgtga

SEQ ID NO: 38471 - DNA, 555 bp, Zea mays
  Peptide Sequence Number=SeqID_81846
atggccacgactgggccgcacacggcgaggtctcgactggggaagtgggggaataaggagggtgggggcgagtttacctcggcgtggatgcgatggggaaggatgcggtcgacggggacgatcgtcgaggggggcggtccagcgaggacagggcaacggctgcgctgggctggctacagagctacgcaaaaccgctgtgctgggcgcctagtcaccggccggccggtcgaggacggaggggagggggagccgtttgggggagaggaaggcccggccgagcgcggatggccttgcgctaaaggaagggacgagcaggtgttttggaagcctctttggaacgaccgagacgtggggagagtgggcgccatgcgttttgcatcgtgggtggagtcctggggaagaagaataggaggtgggcggttgggcgctagtgtgcggtgggcaccaaccattgcatgcgcacgcgtgggctgctggcggggcatggcgcgggatgggctgcgcgtggcttgctggggcgctgggctggcgcgtttgctgctgcctgggccatga

SEQ ID NO: 38472 - DNA, 51 bp, Zea mays
  Peptide Sequence Number=SeqID_81847
atggcgccgccgtgggtgcagccttgccggctccgccgaaaattcatatga

SEQ ID NO: 38473 - DNA, 414 bp, Zea mays
  Peptide Sequence Number=SeqID_81848
atgaggtggtcactacaacagtggggaagaccaaagcccctcactcaagccaccaggcccccaagtcttcagccgagctatacaaagggcgccattcccggctcggttccaggcaccgactaccatcgccaagtactcgagagaaatgaagctagagctatggctcaccgactactgcctggcttgttagttgggagggcccatgtgtgtgccctggaaactcttgagatctccagagctgctggcagaagactgatgaaaccctgcctatgtacatccaatgattttccaagcagcgcacagagttaccctacatcaccgactcagatgtcatcggtgtcacaacccaaccaaattattgggcccacatacaccaatccttgccctcaaggccttagagggatatgtaagtga

SEQ ID NO: 38474 - DNA, 447 bp, Zea mays
  Peptide Sequence Number=SeqID_81849
atggatgggaggggctcggcagggagtgagagagcgcagtggcacctaggagggagaagcagggcgccgtccttgggatggagccgctgcaaggaaaggctggcggccatggaaggagcttggatggggagggagatggtagggaggtgctccacggttggaaaatgggagcggctgagcaggggaggggcgctggccattgaggaatggagctcattcctagggaaaaaggaaggggtagagggaggcggccatagaagcttctgccctgcgcaagggaagctagggagaagggcgccatggatggcagagcgcagagctgctgctcggctgggaagaagacagggagagggtgttgtggcggctagggaaaatagagtggtggggcaaatccacaatcgatcatgtccttcaagtcgcacgttgctttctaccacatcgttttaa

SEQ ID NO: 38475 - DNA, 639 bp, Zea mays
  Peptide Sequence Number=SeqID_81850
atgggatgtccgcaaggctcggcatttcgtcgaacgggcaagttcatcaaacattacaaatgccggaaaaacagcgaggacagcggggttctcaccacgggtttcgacgacggcaggcaggggctgcgtagacctggcgaagcgagacacggagacgtcggggctgcatggattgacgacgaggctgctctcgccgagctggaacaagtcgtggcgttgtggttctcgctgcgcgcgacaagcacggtaagcgcgaggcgaggtgtggttgtgggatttttgatgtggtgcggcgtgcgggagcagcaggggtgtggctgcatggggcgttgcaaggagagcgacgtcgagataacgctgtggatccacagcgctacgacgcgcagcggggcggcacagatggagcagcgcgccggagcaaaagtcgacgatgttgtccccgacatagtgctccacaccgacatttcaacaaacaccgaaaaggagcgagctgggtgctgcacggatggaggagaggggtcggtctgcccttctcttggaggaacaagggcgccgctgggcttctctggctggtgtgctgctggaaatggggtgtcagggaaggggaggaagggctgctgctcttgggtgccgagctaa

SEQ ID NO: 38476 - DNA, 606 bp, Zea mays
  Peptide Sequence Number=SeqID_81851
atgcagtacaatggatcaagcagtctcattagctgcgagaagcagacgattcgaatcgagtttttatccttgcaagtgaccgcacttgtacccaccataaccggaatgggagaccacgtctcaggtcgcgtgaggggtaaagtccactgccaggttcaatcagatcctctgaagcaggctcgggtgctggatctaggactacctcctgagcagctccttgctccggcacgaggactgacgcgggtcctcggttcaagcttaagtaagcttcacggcctcaccaggaagctatctgaaggcttggatcgaacggaggaggacgggaaaggggctggccacggtggttgctctcgggcggctctggcgggtcgcggggaggtcgccggagctaagggcgggctcggggaagtcaggcgtggtacggaggaggcaacggggaaggcagccgagcactgggacgggctttatagccgtggcgtgggcgtggtcacgggtggccgcgggcgcgcgggggtccgcgcacgggcgtgctctaagcgccccgggtgtcagaccgcaccgaacacgtgggagctcgcttctgccatggttcaacggcagatttga

SEQ ID NO: 38477 - DNA, 363 bp, Zea mays
  Peptide Sequence Number=SeqID_81852
atgcgggtcctcagttcaagcttgagtaagcttcacggcctcaccaggaagctatctgaaggcttggatcgaacggaggaggacgagaaaggggctggccacagtggtagctctcgggcgggtcgcggggaggtcgccggagctaagggcgggctcggggaagtcaggcatggtacggaggaggcaacacggaaggcagccgagcactgggacgggctttatagccggggcgtgggcgtggtcacgggcggccgcgggcgcgcgggggtgaacatgtggggtctttgttcaaaggttatgaagtatattacaacttttatatttggcccaagccatgatcatagggtttacatggccttttga

SEQ ID NO: 38478 - DNA, 198 bp, Zea mays
  Peptide Sequence Number=SeqID_81853
atggtctcccattccggttatggtgggtacaagtgcggtcactgcacgacagcagtcggggtcagtgaggcattgtacgccaaggcgataggttctctagaggacacggttgctggagtgacttggccgtccatcctaccaccggattggacagtcgagtgggaccctacctcagctgaggaggagcatgaggagtga

SEQ ID NO: 38479 - DNA, 660 bp, Zea mays
  Peptide Sequence Number=SeqID_81854
atggccgccccgccaaccactcgccccgtcgcattaactccgcggcgggacaggcggcgtttctggcaggagcagcgggcgacgcttcgccttcgccgtaataaccgcgccaaaaaaggttggccccccgaagggttcaacagccgcctcagatcacgtgggccctacacccactactggtcagaggttcgaaggccggccccccgaagggttccacggccgcctcaggctactcgggctccgcgcccattactgatcaggggtccgaaggctggcccccgaagggttcacagccgcctcagacgccgagcgagggatgaccatgggtacgttcgatacataaccaaggctcgggctgcgctcccgagctcactggagacaccatgttcggcgcccatcgagggcaacatggcgctttcccccctcctccttgcggaaaggcgacgcaggggcgtatgtaaaaaagccgagtctgtccctgatcgccctctcgccctgtgcagaggctcgggggctgctctcgcaaacccggctccagccgaaccgttgacagcgtcaacataccagcccgagaacttgggtcccgaccgtacacccgggctacggccagttcgcatgagggaacaaccagaccagacgaagcattgcgcgaggcattaa

SEQ ID NO: 38480 - DNA, 426 bp, Zea mays
  Peptide Sequence Number=SeqID_81855
atgtcaccagtccgttgggttctgaccgttggagcttctgacatcggggccaccggacagtccggtggtgcaccggacaggtcctgttcactgtccggtgcgccttctgacgcctgctctacctctgcacgcgcagtcggcactgttcctattcactgtagccgttgcagacgaccgttggcgcttggagccgttgctccgcttggtgcaccggacaatccggtgaattatagcggagcggcctcccaaattcctgaaggtggcaagttcagagtgaaattccctggtgcactggacactgtccggtggcataccggacagtccgatgcgccagaccagggctgcctttgggttgtcttttgctctttttatttgaacccttttttggacttttattggtttgtgttgaacctttggcacctataa

SEQ ID NO: 38481 - DNA, 318 bp, Zea mays
  Peptide Sequence Number=SeqID_81856
atgcctgtagatgtggtgggggccgccaatcaggccacgccggagctccgatctagcgggaaggagtccgtccaagggccggcggcgcacatcggcatcggccttcatctcggtgcgggcattgacggcgcgggagttcaacaaggcgacggcgcggctgcgagcctccgaccggctgggtgtgtcggcgcagctgtggcctataacagttacattgataattacagatacagggcatattctctcgcacctgttgcgagctacacatgtgcaccatacggagttccgacaagcagctctgcatctcgtttacgataa

SEQ ID NO: 38482 - DNA, 858 bp, Zea mays
  Peptide Sequence Number=SeqID_81857
atgtgcaccgtacctcctatcgttcttccctgctgcctcgccggcggcgatgtgatgaagaagaagacgatggccacgcacgtggaggtcgctgtctttcctcatgtgcccaataacccgatgtatgcttctaacacgtcccctaggacgccagcaggagcggtggtgcttgcagcgccgctcagctacggcgacgatgccacggacgacgtcgacgtggtcgccacgaatacgaagcagcagccaccacaatacgactacgatgccgacatcgacgccacgctccgaaccatggagaaagagaccatagagcggccgtcgccagactacctcagcgatcgacaggcaggggagatgctgatgatggaccgcgccgaccttgtcgagaagatgcatcgcttctgcacaagctacgacctcgcaccgggagcgctgcaccgcgcagtctccttcgtcgaccggttcttgtcggccaagaagatcaaccgtgacgagcgccagatccgcctcctcggcgccgcagccgtgttcgcggtcgccaagtacgaggacaggaataccatgcagaagatcaatgtcgacggtgtcgccatgtacgctgggtgcacgagaagcgaggctgtcgaccaggaacgcgagctgcttgccacgatcggcttctgcctgagcgcacccacggcctacacgttcgtggatcacttcatgaggcacagccaggaggagggcacagcgacggtcaggtccctggcgcaccacctggccaatatggcgctgcaggactaccggtgtgtggcgttcctgccatctgtcgtggccgcgtcggcgatcttgctggcgaggatggtcctgaactgctag

SEQ ID NO: 38483 - DNA, 1032 bp, Zea mays
  Peptide Sequence Number=SeqID_81858
atgtgcaccgtacctcctatcgttcttccctgctgccttgccggcggcgacgtgatgaagaagaagaagacgatggccacgcacgtggaggtcgctgtctttcctcatgtgcccaataacccgatgtatgcttctaacacgtcccctaggacgccagcaggagcggtggtgcttgcagcgccgctcagctacgacgacgatgccacggacgacgtcgacgtggtcgccacgaatacgaagcagcagccaccacaatacgactacgatgccgacatcgacgccacgctccgaaccatggagaaagagaccatagagcggccgtcgccagactacctcagcgatcgacaggcaggggagatgctgatgatggaccgtgccgaccttgtcgagaagatgcatcgcttctgcacaagctacgacctcgcaccgggagcgctgcaccgcgcggtctccttcgtcgaccggttcttgtcggccaagaagatcagccgtgacgagcgccagatccgcctcctcagcgccgcagccgtgttcgcggtcgccaagtacgaggacaggaataccatgcagaagatcaatgtcgacggtgtcgccatgtacgctgggtgcacgagaagcgaggctgtcgaccaggaacgcgagttgcttgccacgatcggcttccgcctgagcggacccacggcctacacgttcgtggatcacttcatgaggcacaaccaggaggagggcacagcgacggtcaggtccctggcgcaccacctggccaatatggcgctgcaggactaccggtgtgtggcgttcctgccatctgccgtggccgcgtcggcgatcttgctggcgaggatggtcctgaactgctggacggagacgccggtggcggcagcaggatatacgctcgaggagctcagcggctgcatagaggctatatgtgacatgcatgagcaccagcgggtatggccagggtgtgcccagatgatgcgacactgggagatcagtgctcaattcagctatctattgcctcccctaacttaa

SEQ ID NO: 38484 - DNA, 576 bp, Zea mays
  Peptide Sequence Number=SeqID_81859
atgtactacctcgctgatgagcccgatgtgcactttgtctggcagtccaaccaagagtcatcgtcacgcgcgcttgataagtactatatcaaggactgtggcgtcatctcggcgcaggaggtgacgcaaaggaggactaatagtaatgaccagttcattatcctagccatcgtcgggactaacgatttcctattccttctgtccttccccgtggacatgcctgtagatgtggtgggggccgccaatcaggccacgccggagctccgatctagcgggaaggagtccgtccaagggccggcggcgcacatcggcatcggccttcatctcggtgcgggcattgacggcgcgggagttcaacaaggcgacggcgcggctgcgagcctccgaccggctgggtgtgtcggcgcagctgtggcctgtgagcgtcgcttcctatcaacgcgatgctccaccccggcgccggtggtgtgcctggaggtccgcggccggctgcttccatggcggcatgtacgcggttgttgggtgtgctaccttcgcttggtcgagaagcaagtcttctgggaagaaattagctaa

SEQ ID NO: 38485 - DNA, 519 bp, Zea mays
  Peptide Sequence Number=SeqID_81860
atgtactacctcgctgatgagcccgatgtgcactttgtctggcagtccaaccaagagtcatcgtcacgcgcgcttgatgactactatatcaaggactgtggcgtcatctcagcgcaggagactaacgatttcctattccttctgtccttccccgtggacatgcctgtagatgtggtgggggccgccaatcaggccacgccggagctccgatctagcgggaaggagtccgtccaagggccggcggcgcacatcggcatcggccttcatctcggtgcgggcattgacggcgcgggagttcaacaaggcgacggcgcggctgcgagcctccgaccggctgggtgtgtcggcgcagctgtggcctgtgagcgtcgcttcctatcaacgcgatgctccaacccggcgccggtggtgtgcctggaggtccgcggccggctgcttccatggcggcatgtacgcggttgttgggtgtgctaccttcgcttggtcgagaagcaagtctgctgggcagaaattagctaa

SEQ ID NO: 38486 - DNA, 261 bp, Zea mays
  Peptide Sequence Number=SeqID_81861
atggatgaatacatccgggctgacaatgacttccgccaaagaagggaggaagcatataggttctctgagatgaccagggccaaactgccgcccacggtgcgcgcaactgcccagcggtcacgagcactcctccactttcgcccaggccagcgggtgaaagggcgggccgccatgcaggcggcgtgcaaccgcacccaggggggcgcaccctatcgacttcgatgcatccagcatggaggcccagacccacacgtcatgtaa

SEQ ID NO: 38487 - DNA, 228 bp, Zea mays
  Peptide Sequence Number=SeqID_81862
atgcaggcggcgtgcaaccgcacccaggggggcgcaccctatcgacttcgatgcatccagcatggaggcccagacccacatgtcatgacaggtggcacctttggcaggcgaagcaggcgacgcttcacctccgccataatgaccgcgtcaaaaaaggggtcggaaaaggggatactccgaaagggatccttctccgcgaaggaagcaggccccaagcccccctactga

SEQ ID NO: 38488 - DNA, 306 bp, Zea mays
  Peptide Sequence Number=SeqID_81863
atgcaggcggcgtgcaaccgcacccagggggcgcaccctatcgacttcgatgcatccagcatggaggcccagacccacacgtcatgtaaccggcgcaccggttactacatgcaagaaactgcaccgccactcacgccagtaccgcgccttctcgactgcgaaactagtaccgcgactcgaggcgaccctgcgcatgacccgacagtgccaaccgagcacatcggtcatgggtcggggtcggaaaaggggataatccgaaagggatccttctccgcgaaggaagcaggccccaagcccccctactga

SEQ ID NO: 38489 - DNA, 147 bp, Zea mays
  Peptide Sequence Number=SeqID_81864
atggcgcactgctacacctcctattgtacacctggaccctctccttacgcctataaaaggaaggtccagggctctcttacgaaaagcatcaatgtcaacatctctacatctagtgcaaatagaaacatgctcaatgggtggatgtag

SEQ ID NO: 38490 - DNA, 606 bp, Zea mays
  Peptide Sequence Number=SeqID_81865
atgtactacctcgctgatgagcccgatgtgcactttgtctggcagtccaaccaagagtcatcgtcacgcgcgcttgataagtactatatcaaggactgtggcgtcatctcggcgcaggaggtgacgcaaaggaggactaatagcaatgaccagttcgttatcctagccatcgtcgggactaacgatttcggattgggatcctctgaatttgtcgatgggtcactgacacgcgggactgagcaggagtgggtcccacatgtggtgggggccgccaatcaggccacgccggagctccgatctagcgggaaggagtccgtccaagggccggcggcgcacatcggcatcggccttcatctcggtgcgggcattgacggcgcgggagttcaacaaggcgacggcgcggctgcgagcctccgaccggctgggtgtgtcggcgcagctgtggcctgtgagcgtcgcttcctatcaacgcgatgctccaacccggcgccggtggtgtgcctggaggtccgcggccggctgcttccatggcggcatgtacgcggttgttgggtgtgctaccttcgcttggtcgagaagcaagtctgctgggcagaaattagctaa

SEQ ID NO: 38491 - DNA, 855 bp, Zea mays
  Peptide Sequence Number=SeqID_81866
atgtgcaccgtacctcctatcgttcttccctgctgcctcgccggcggcgatgtgatgaagaagaagacgatggccacgcacgtggaggtcgctgtctttcctcatgtgcccaataacccgatgtatgcttctaacacgtcccctaggacgccagcaggagcggtggtgcttgcagcgccgctcagctacggcgacgatgccacagacgacgtcgacgtggtcgccacgaatacgaagcagcagccaccacaatacgactacgatgccgacatcgacgccacgctccgaaccatggagaaagagaccatagagcggccgtcgccagactacctcagcgatcgacaggcaggggagatgctgatgatggaccgcgccgaccttgtcgagaagatgcatcgcttctgcataagctacgacctcgcaccgggagcgctgcaccgcgcggtctccttcgtcgaccggttcttgtcggccaagaagatcaaccgtgacgagcgccagatccgcctcctcggcgccgcagccgtgttcgcggtcgccaagtacgaggacaggaataccatgcagaagatcaatgtcgacggtgtcatgtacgctgggtgcacgagaagcgaggctgtcgaccaggaacgcgagctgcttgccacgatcggcttctgcctgagcgcacccacggcctacacgttcgtggatcacttcatgaggcacagccaggaggagggcacagcgacggtcaggtccctggcgcaccacctggccaatatggcgctgcaggactaccggtgtgtggcgttcctgccatctgtcgtggccgcgtcggcgatcttgctggcgaggatggtcctgaactgctag

SEQ ID NO: 38492 - DNA, 300 bp, Zea mays
  Peptide Sequence Number=SeqID_81867
atggagctggcagatgacgatggtgccgtgaagagaataaggttaaactacgtagcatacgcacaacaactagtcctagaccaaagagcagcgtgcgacgaggtcgaggacgaatgtggggcgaccgacgaaccacgcgtgcaccagaaaaaccgagcagggcgcgagctgcgcgcaggcacacgacaaccacaacaagggagctccgggctaggacgatggggaaactccacggcgggagtcgcggtttggacagagcagagggaaaagcggctgggcaccagaggaccgagcagatga

SEQ ID NO: 38493 - DNA, 579 bp, Zea mays
  Peptide Sequence Number=SeqID_81868
atgtcatcccttaagcatagttcatattccaaaaactccaaaaatactcttgtcctatattctgcctataatttccctggtcagactaagacgattcattcatcactattctcaccaacagtgaactctacaatactaaaccacaggtgtgagttttcaaaagaaaatgtttttcaaaatgggtatgatgaagggttgtcacccttatcacctttgagtgggatgatcagggactccctggtttgggagggccttaagtcgcttgatccgaacttgcacggtctatgccctagggttatgatggttagggagcaccgagaggacaaggaggggaatgttttgtcctggtttgggcatggaggtggccttgtgcctttcggtataaccgccaagactaacgattttctattccttctgtccttccccatggacatgcctgtagatgtggcgatagtcaccaatcaggccacgccaggaaggagtccgtccaagggccggcggcgcacatcggcatcggccttcatctcggtgcgggcattgatggcacaggagttcaacaaggcgacgacgtggctgtga

SEQ ID NO: 38494 - DNA, 249 bp, Zea mays
  Peptide Sequence Number=SeqID_81869
atggcgtgcagagttggaagggagagagagagtgatcgtgcgcctgtgtggatcctcaacgagcgcgtgatggttggcctcggttcgttggtcgacggcgagcttcgatgcttgcgttgtcgtcgttgggcggagaaggacctcgtggccactagaatttctcacccgtgccgctgctccgccgcgggaccactagtgccatggtcggagaacatcagcatcctcaccattggttattttctcacgtga

SEQ ID NO: 38495 - DNA, 450 bp, Zea mays
  Peptide Sequence Number=SeqID_81870
atgctgcacaactgcaccatcgagccgcacccggacttcgaggcgaacgccggcgggaagatccccacgtacctggcccgcccctggaaggagtactcccggacgctctacatccagaacgacatcggcggcttcatcgaccctaagggctgcctggagtggaacagcgacttcgcgctcgagacgctcttctacgcggaggcggacaaccgcggcgctggcaccgacatgagcaagcgcgccaaatggggaagcatcaagaccgtcacctacgaggagggccagaaggagttcaccgtcgagacccttcatccagggccagccgttcatctccaagttcggggtgccattcatcccgggattgctgccgcaggagcaacaaggcaggacacactgatcgaccatccttggctgttggcttcgcggatctccaaccacaattgggtttaa

SEQ ID NO: 38496 - DNA, 1476 bp, Zea mays
  Peptide Sequence Number=SeqID_81871
atgctgctctcgcgtccccaaaccctgcccctgccccgggcccggctctcttccccgacccttcgccacctccgcgccctcgccgcgccgctccgcgcgctcgtctcgtccccgccactagggttcacgtccgcggcgcgaggccccgctccgctccgcgcggcggtgtccgagtccgatcgcgagcagcgggaggctggggtggaggcgggggagcaggggaggccgctccgcgtcggcctcgtctgcggcgggccctccggcgagaggggcgtctccctcaactccgcgcgctcggtgctggatcacatccagggagaggatttggtcgtctgctgctactacattgactgtgctatgaaggccttcgcgatatctcctgcgcagctatattccaacacaccttcggattttgacttcaaacttgaaagtttagcccaagaatttgattccctatctgacttcgcggagcatctcgccacaaatgttgacattgtcttcccagtgatccatgggaaatttggtgaagatggaggcattcaggagcttttggagaaagcaaatgttccatttgttgggacaccctctaaggaatgccagcgtgcttttgacaagcataatgcgtcgctcgagctcaacgcacaaggtttcttaacagtgcccaactttcttgtggagaaggacaagttggctaagccggagttagaggcatggttccaaaccgtcaatctgaacaaagaaaatggcaaaacgattgtcaaacctacaagggctgggtcaagcattggcgtagttgttgcttatggtgtgaatgatgctgcccagaaagctgaggaaattatttcagagggaattgatgataaagttatcatagaggttttcattgaagggggcactgagtttacagccatcgtggttgatgttgggattgctaacaacagtgagcctgttgttctgcttccaacagaagttgagcttcagtactccaacaatagtgataccaaggaggacacaatatttaactaccgcaagaagtaccttccaagtcgacagggatccttttccatgacttctgttgcggacgatctccgcacctggcatgaggacctggcttgtgccagggcagatctagagcaggcccgatctgttatcctccagctccgtgatctactcgcggcaaaggtcaagtctgaccaacgatcagcggcggcaacccgactgcaggcggctgcgcgtggcttcctggcgcgacgcctagtgcagaaagttgcggcagcggcgcggctgcaagcagcggcttgccgtcttcaggctacggcacgaggcttcctagcacggcgtgaagcacggcaagcggcagtgcggctacaggctgcggtcaccgtcctgatccatagccatgtggacagcaagaacacatttggttgggtggcgctgtctccactggaactcgcggcagctcaagccgtaggaccg

SEQ ID NO: 38497 - DNA, 438 bp, Zea mays
  Peptide Sequence Number=SeqID_81872
atggctgattcattgaaagagtcattagctgaattgtatgtgatcaatggtcaatacgaaaaggcactttctctttatgctgaagatggcaggtccctgtcgctgtgcttggtggagctcatgaggcgcgacgacgtcggcgctgctgcggctaacaggaacaggaatggcagcgtgatgagggtgaaggagaaatgcagcgaggaggagggcgactcagtgtgctccgtctgcatcgacggcggagagctgctgctctgcgacaagtgcccgtcggcgttccaccacgcctgcgttgggctgcaggccactccggagggcgactggtgctgcccgttgtgcagatgcggcgtgtgcggcggcagcgacttggatgatgataccgctgaggggttcacggacaagacaatcatctactgcgagcaatgcgagcgataa

SEQ ID NO: 38498 - DNA, 1923 bp, Zea mays
  Peptide Sequence Number=SeqID_81873
atggccatgctgcccgtcgtcgtccgcatggccgccatgcccttcatcttccttgtgctcctcgcgcacaccgcctcggcacagcccgacgccggctgcaacgggatcctcctcacctacacgctgcagcgccgggacaagatcaggcctcacgtggcggcgcccaactcccagccctactccttcagcgccagcgccaccgtcgtcaacgccggcacccgcccgctacgctcctgggcgctgctgctcaccttcgtgcacggcgagatcctcgtctccgtcgacggggccgtgctcacctcgggcgccgccctgccctacaacaccacggcgggggacgccgccggcaggcccacgcccacgtccttcaccgggtacccgcagacggacctcctcaccccgatcgccacggccggggaccccgccaagacacaggccacggtcagcctcgtaggcacgctcttcgccgggccggagccctacgtcccgctcccctcgtttctctcgctcgccgacccttcctacacctgcccgccggccaccaacgccacgtcgtcgccgacgaacctcaccacctgctgcagtggcttcctcccgcgccgcaccggcgacctggtcatcacctacgacgtgctccagtcgtacgacaccacctacctagcgctcgtcacgctggagaacgacgcgctgctcggccgcctcgacgcctggcagctgtcgtggaggtgggagcacggggagttcatcagctccatgcgaggcgcctacccgcgggaggtggacacggccgaatgcctctacggtccccagggccagtactacaaggacctcgacttctccaaggcggtgctcaactgcgaccgcaggcccgtcgtccacgacctgccgccgtcgcgggccaacgacacggagatcggccggatcgaccactgctgccggaacggcaccatcctgcccaagtccatggatgtcgcgcgctccaagtcggcgttccagatggtggtgtacaagatgccgcccgacctcaaccggaccaagctctacccgcccacagggttcaacgtcaccggcgccgcgtccgcgctgaacccggagtacgcgtgcgacccacccatctcggtgagcccgtcggagtacccggaccccagcgggctcacgtcgatcacggtggccgtggcgacgtggcaggtggtgtgcaacatcaccacgtcgcccaagaagccgcccaggtgctgcgtctccttctcctccttctacaacgagtcggtggtcccctgccggacgtgcgcgtgcggctgcccctcgtccgcgccgacctgcagcaccacggcgccggcgatgctgctgccgccgcaggcgctgctcatgccgttcgaccggcgggccagcgaggcgctcgagtgggcggaccagaagcacctcggcgtgcccaaacccatgccctgcggcgacttctgcggcgtcagcgtcaactggcacgtcgccaccgacttcaccggaggatggagcgcgcgcctcacgctcttcaactgggacggcacggacatgccggactggttcacggccatcgtcatggacaaggcgtacgacggcttcgaacaggcctactccttcaacgccacgggcgtcgggaacagcaccatcttcgtcaggggcgcccagggcctcaacttcctgctcggggagaggaacatgagcggcgtagattacccggtgcccgggaagcagcagtccgtcttctccttcaccaagaagaagacccccggcatcgacatcatcgccggggacggcttcccgtccaaggtcttcttcaacggcgacgagtgcgccatgccattgaggattccgagccaggggaccagtgtcgtcgtccctatgcagctgtgtttgcttgtttccgctttcatgttattgctgctgtaa

SEQ ID NO: 38499 - DNA, 1046 bp, Zea mays
  Peptide Sequence Number=SeqID_81874
gatccctcgaggagattatcgacgagagccacgccatcgtctcctcctctgtcggacccgagtactatgtcagcatcctctcctttgtcgacaaggaccagctcgagccgggatgctccatcctcatgcacaataaggttctttctgtagttggtatattgcaagatgaagttgatcctatggtatctgtgatgaaagttgagaaagcacctttggaatcttatgctgacattggtggactagattcccagattcaagaaattaaagaggctgttgagcttcccttgactcatcctgagttgtatgaagacattgggatcaggccacccaagggagtcatattatatggcgaacctggaactggaaaaactctactcgccaagttttcaaatagcatgtacttgggcagtgactacttgaaactgtttctgcaggctgttgccaattcaacatctgcgactttcttgcgtgttgtcggtagtgaacttattcaaaagtaccttggggatggtcccaagctagtcagagaattgtttagggtggctgatgaactttctccctcaatagtcttcattgatgagattgacgcagttggaacgaagaggtatgatgctcattcaggaggggagcgtgagattcaaagaactatgttggagctgctgaatcagctagatggttttgactcacgtggagatgttaaagtcattctagcaacaaaccgcattgaaagtcttgatccagccttgcttcggccaggccgtatagaccggaagattgaatttcctctaccagatattaaaactagacgacgcatcttccagatacacacatcgaaaatgacattagctgatgatgtgaacttggaagagtttgttatgaccaaagacgagttttcgggtgctgatattaaggcaatctgcacagaggctggattgcttgccttaagagaacgcagaatgaaggtgacccatgcagatttcaagaaggcaaaggagaaggtgatgtacaagaagaaggaaggtgttccggatggtctctacatgtag

SEQ ID NO: 38500 - DNA, 1158 bp, Zea mays
  Peptide Sequence Number=SeqID_81875
atgtttttttgcagaactaagaaaacgactgagacaatatacaagcgtgttgatgatgtttggagtgaagctgaggagacatctaaaaaggttactgcaaatatcaaagaaaaaatgtttgctgctaaagaagaggtaaaggaaagttttggagttggaaaagaagagagtacaagttgcagggatggtttgcctgaaggttcaaaacatgagaaaactgaggcatcctcacattcagatggcacgactgaagatgccacagacagccatacattgtttactaaattgaagtcaacaatctcatctgcttcaccagtagtatccggtgcgtttgcaaagttgaaggacacaaaagtctcaactttagctaagcagggatatgaaatcgtcaaggatgaattaagctctaactctagcagaaagaaaaaacaccaagctaggcatgcttctgctaaagtagaaaagagtacaagaaccgatttagttcttacgccaacaaaaaagacagtattgggtgaaaaatgggaagaatttaagaataagatccgaggtcacccggtctacagaagagtggatgaatacaccaagcctgttgtaaccaagggacaagagcacattacattaggtcttcaaagcaccaacttgaatgaatctttgcttgaagaaacctcagctgcggtgacattcagggaaattcggcaacgagacccgtccttttctctttctgattttgttgctgatgtccaagaaatgatcaagccagttttaactgcatattcaaagggtgatgcggagactctaaaaaactactgcaccaaggaagtgattgagcgctgcaaaggagagagagaagcttatgcatcacagggaatattttttgatcacaaaatcctgcacatttcagaagctgatgtattggaaacaaagatgtttggatcttcacccataattatcttacgcttccaaacacagcagatatactgtgttcgagatcgagaaggacaagtcacagaaggaggacaggataccatccaaaccgtcttctattcgtgggctatgcaactcatggacagcgacgaggtgccagaagaagaatcctattacccagtctggcggctgcgtgagatgcaacaagctggcatcaaagctctcatatag

SEQ ID NO: 38501 - DNA, 81 bp, Zea mays
  Peptide Sequence Number=SeqID_81876
atgtgggatgtactggaggccaaatatagggtgcctaacatcgatagtcgagagaagttcctctttgttgatagggaataa

SEQ ID NO: 38502 - DNA, 375 bp, Zea mays
  Peptide Sequence Number=SeqID_81877
atgacgaggagtgagagtaggattgatgaacctcaggcgctgaagggtgtctattcccttcagagagaagtcgacaggaggttcatgaggaccgcaggtgacgttcaccggatgcatgtgcagtccggtgacgtagagagcatctggcgccggaaggtcgatgaagtcgtcgaaagccccatcctcctcctggcagggagcatacctgaggaagacgtgctacgacgaggtggagaggcgccaaccttttggcgtctcccgcgagtcggctgcgagggcatggaagaaccctctccgtccatcctaccagagccacgtcctctcttagagagggagcgacgaggcggaggagaggggacgggagattcctcctga

SEQ ID NO: 38503 - DNA, 951 bp, Zea mays
  Peptide Sequence Number=SeqID_81878
ccggggactggaaagcccgagaacaaggatgacatccctacctcttctttcggcgatggcgggcagacagactctaaagatattgtaagatttaaagttcatgttaagagtgtggccatgattccccctatcattgaagttggtgtcaaaccttttctgtatgacatcttctttaaaattgataatattactgacgaagggtggaatgatgaatctataaatctgggcaagagggcttctgttgatagacaaggctttagtgacctctcttttgagaaatctgttaaaaaagccaaaagtggtgatgatgaatctggcatggatgatacgggaaaatctcccttaaaggtttcttcagttcatgttaatgtagctaggtctcagtctgaacattctgatagtatgaagattgggaaaagctctgaaggagccaaaggataccttgacagtcagggtaatgaagatgatgattacaatgaaagtgaggatgatttgttggattcccaagatctggaggaattcatcaaggatgaagaacttattccttttcctcctcaagagaaaagaaaaatgaatacaaatgtttctgtttctgaagatgttggtaagaatgttggagttaagaaaggaggatccatggaaggggagcttgcagaaggagttaggaggagcagcaggttggagtctaatgatgaaatgaagattgcagataaggcagcagcaagagcaatggctaaagatgcattcattaacaaagacattcttgattctgatatggataataatagccataatgaaagtgtggataatgctttgactgatcttgatgatgttatggttctcagaaaaggtcgcgagatcgggctgttctcgtcgtcgtcgccgcaccagggcatcgacggcgagtggagcgacaagagcgggatcattgtgtaccgctggaacgactag

SEQ ID NO: 38504 - DNA, 1302 bp, Zea mays
  Peptide Sequence Number=SeqID_81879
atggggagcacctgtattgccttcgtcttgctgctgttggaggagcgcgaccccgcgggggttggcgctcttcagacatcgctcggcttcaaggattttcatcatgcagcccggctgcagtccctcaccaatgcttcaaggatgttcatcatccgggctggggagggggcgcaccgagttggggcctgcctctgcgtgggctggcgacccgcttcttcctccggcgttcggggagaagggcatcctccagctctgcggaggaggcgtcctccagccatgcgggggaaggcaaactgctgctgccaggacatggtgcagctgtccgtcttccacccgggcgatggtggccggctgcaccggggggtcgcacaacacgtcgtacgccgcgagggcggtactcgtgttctgggacggtcccgttctcgttcttgtggcgagagcgggagtgaggacatgccggtgcactttggggcggctaccgctcgctggtgcgatgttggtgggcaggtggccgctgtcgtcggtgctgaggtggtggtcgccataggtgaggctacctctgccgaagcggttgcttccgccaatgagaccatccgtgccacctgcgctccggacctccggctctttggctttaatggctggttctcgtcccccgtgaggggacctgtcttgccgcccgagacagaggtcgttgtcgcgctgttggtgcggtggtcgccggtgatccacctggagtttgttatcccgcaggccctctgcctttggccgctctacgatgagctaaagccggaggcagcgatgtcggcgtggatagaggtgaagtcggctcgaaaagaggcttcgtcggcccgggagcatgtggcttcccaggccgaggaggtgcagcagcggcggctggagcttggtcaggtcgtccgcgagcgggaccaaccccggagtcacgctgccgaggccatgagccgggctgaggtcctccggggacagctggctgaggctacggagtggccagtcgaggcatccgctcgggccagaactcttgtggagaacctggccgtgagggcccaaacgcggttccggcgtcctccttcgaggtggagatccttccgcccttgttgctgtctgaggccgggccagattccgccgagggtgctgctcctccccctgccgatgtctgaacctgcaggaacagtttgtctgaagcatgcgaccccactatcgaagcagtcgaaaagcacgaaagacgttctggcaaaagacttttctgaggaaaattttgacgcagagggggttccccccttctag

SEQ ID NO: 38505 - DNA, 486 bp, Zea mays
  Peptide Sequence Number=SeqID_81880
atgcaggaggcgtgcaaccgcaccacggttgtgcaccctttcggcttcgtcgtatccggtggaccagcatggaggcccgggcccacacgtcatgcaaccgacgcgacgggcaagcgacacctttggcaggtgaagcgggcatcgcttcacctccgccatgatgaccgcgtcaaaaagggatcgagaaagggggtatttcgagaaaggacccttcttagcgaaggaaacgggcccccgagccctcctactgatcaggggttcgaaggctggcccctcggaagggttcgacagctgccccagagcactcgggctccacgccctttactgatcaggggttcgaaggctggcccctcggaagggttcgacagccgccccagagcacgcagagtgagggatgactctgggtatgtccgttacatgtgtaggaaacgggtgacgcctaagagggggggtgaattaggacttctaaaactttcactaaactag

SEQ ID NO: 38506 - DNA, 1560 bp, Zea mays
  Peptide Sequence Number=SeqID_81881
atggttgcctttcaaggggtcaccctccttttaaaggcacctctccccacttgcgtcctcagccatcgtgggctgagtcttctccaacacgctccaaggtcctccccctacgacacgggggctgggtcccacgcgtcatgcaagctggcccagggcagaagaagccaaaccgccgcgcgcggtgcgcgcaactgcccagcggttacaagcattcctccactttcgcctagaccaacgggtgaaagggcggaccgccatgcaggcggcatgcaaccgcaccaagcgggcggaagcagcggtcacgtcgtcagccaagctcacgtcccctcctgggacagcaagagaaccctctcccacggcgtgaagacggcgcgcccgtgttccgttcctcgaacggctcgcgcacgcgcaacggctgccccgcgaaccactcgtcccgtcgcattaactccgcggcgggacaggcggcacctttggcaggagaagcgggcgacgcttcacctccgccataatgaccgcgtcaaaaaggtgcgccacgttattcgatttcgtatccttttcctcttcctctttctctctcttacaacagggaccgggaaaggggatagcctgaaagggatccttctccgcgaaggaaacgggccccgagcccccctactgatcagaggttcgaaggctggcccctcggaggggttcaacagccgcctcagagcactcgggctccacgcccactactggtcagaggttcgaaggccggcccctcggaagggttcaacggccgcctcaggccactcgggctccgcgcccactactgatcagggcgggaacgatcttgtaacggaatcccatcagagggaggcatcgagccctcggaccccgtcaaaaggggaccgggtccggcagatcacccgcggctcactggagacaccatgttcggcgccctccaagggcaacatggcgcttcccccctccttgcggaaaggcgacgcaggggccgctgcccgcgtcgctctgactgctgtgccactcaacagagtgaggctgacagcggccaagcccggcctcaggcgccataagaaactccgcctcgcccgacccagggctcggactcgggctcggccccgaaagacgacgaactccgcctcgcccgacctagggttcggactcgggctcggccccggaagacgacgaactccgcctcgcccgacccagagctcggactcgggctcggccccggaagacgacgaactccgcctcgcccgacccagggctcggacttggcctcggccccgaaagacgacgaactccgcctcgcccgacccagggctcggactcggcctcggccccggaagacgacgaactccacctcgcccgacccagggctcggactcgacctcggcctcagccgacggtctccgtctcgcccgacccaagggctcggactcgacctcgacctcggaagacagactcgacctcgacctcggaggagcctccgcctcgcccaacccagggctcgaaccgaccacgtcacaggaggggccatcattaccctacccctag

SEQ ID NO: 38507 - DNA, 807 bp, Zea mays
  Peptide Sequence Number=SeqID_81882
atggtggggagaagcgagccgggctgcaatcttggtcccgccctcagcttcaaggatcttcatcatcctggctggggcggaggccgggctgagccggagctctacctcccgcgcgggttcatgggtcaccttctccctcaggattcaagggagagggcgctcaccggcctagcgggagggtcggacttcgacaacgcggggctggtcggcggcgagcatcgtcagcttcagcgcgttgggctcactggctcagctggctctggctcggctcccggtgccccctcccgccgcaagagcggttgtcgcgccgcacgcaccggaggaccgcccaagatgtcgcgcgctgctagggcggcgttcgtgttctggggctgtcctgcctttgccccggtacggcgcctttgcgcggaggtcggtgccccgctcgtccgggaggatccgagtggggatctgctggtgggcagacggctcctgtcgtcggtgctgaggtggcggcggctgaagaagtcctcgtcgccgatgggatcaccgccaccatccgtgctccgggcctccggctctttggctttgatagcttatcctcgcccctcgagcggagacgtgggcgagggcattgttgcagcggcgttcgccctgaggccatcgctgctgcagttcggccacctggagcggaggtcgttgtcgctgctgccggagcgggcggcggtgggcgacctggagccttgtcgccccgcgggccccccaatgtggggggttgttcgtacccgcggaggtggaaccggagttccatttgtaatggcaccttga

SEQ ID NO: 38508 - DNA, 393 bp, Zea mays
  Peptide Sequence Number=SeqID_81883
atgaggagaagatcttttctttctttttctctctctttctctctcctcttttttctctctctcccgcgctgtgggccgaccccggccggcccagccgcccctggcgcccccccttgggcccaattggcccatgccgcccccccacctcccctttttccccaaaccctctccctctccctctcattttctctcattttctctccccccaccctaagccgccgccgcccctacccctgccctaagccgccgccgccccctgccggccgcccctcgccgtcgctcccccgccgggggctcgagcggtttctcgagtgcctctccgtaaggacctgttctatggatgaccgcccgggaaaacagtgcaaccataagggtggaatggggtgcccttag

SEQ ID NO: 38509 - DNA, 264 bp, Zea mays
  Peptide Sequence Number=SeqID_81884
atgacggatgcggagaaggaggtagcaacagaaagacggatggactcaccgcctcgatgcgattgtggagaccgtgctgtcatcgacgaagactatgacaagcagttctgttgtccgaacatagattatccatacgggtggcgtaagtgtcgtttcaaagagtggttgtatggtcctttgtcccattggccagagccagaggagacgaggaaatgcagttgggagagttacgacgacaaaggagagagattggaagcggcgtaa

SEQ ID NO: 38510 - DNA, 684 bp, Zea mays
  Peptide Sequence Number=SeqID_81885
atgaagctcctgcatagtaggaagatgaaagaggccaaagaggcactaggatgcatgggtcaaaaggatacaactacattgtatatgtttgaaataagagttgcaggggcatacactagagctgtgataacaaggttccaggagacagtaaaatatgcaactgcataccgaatagaccgtgatacagagggtgatgaacatgattgggtgcctgatataggtactggtgagagttgtggcacaagtgcttgcgatgacatccaggtcgaagcgtatgaaatagatgaaatggctatagacaacttacgcaaattagatgatgggaacgagaaactagaatttcatatggaaggtgtaaacttagcaagaccagataaggccaagcctaagggaagaacaatcaaaagtagtgagcaacaagttttaaaattgggtgcgaaaggagctaagaagatgagcaggaagtgccagaaatgtggcatagctgatggtcacaacagccgtacgtgtttaactgtcgaggataatagggttcgattggctaacctatctggacgtaagcgaggacggcctcctggttcaaggaacaaaatcatagctgcagccccacaatggaatgagacgtcaacgtcgaaaaaacgaacggtggatgtcggagatgatgattcatctggtagagagtag

SEQ ID NO: 38511 - DNA, 255 bp, Zea mays
  Peptide Sequence Number=SeqID_81886
atgactaacagtgggggcgagaggtaccggggccggagcgggcggtggccggactcccggcggcggagactggtcggcggagctcgggcggagctcgggcggagcgcggcggggcggtcggcggagctcgagggcggagctcgcggcggcagaagaggtcctgggccggggcggccgtgcggcggccagccggagctggggcaggcggcggccgcgacccgcagacagacccgagggcaggcggcggcggcgtga

SEQ ID NO: 38512 - DNA, 1305 bp, Zea mays
  Peptide Sequence Number=SeqID_81887
atggagatcgacctgcacgccgtgcgcgcggtgcgcgtgctgggccgcggcgccatgggcacggtcttcctcgccgtgaacggcgccggcggggaggcctacgcgctcaaggtcttcgacaagcgctcccccgcggtagcgtccaggccgtccgcgggcaccgacgcggcgcggcgcgcgcggtgggaggtgtccgtgctgtccaggctcgcgcacccgcacctgccgtccctgctcggctgcgccgagacgcccgacctgctggcgtgggcactgccctactgccccggcggggacctgaacgagctccgccacgcgcagcccgaccgcgtgttctcccccgcggccatccggttctacgtcgccgaggtggtgtccgcgctcgccgagctccacgccgccgggatcgcgtaccgcgacctcaagcccgagaacgtgctcctccgcgccgacggccacgtcacgctgaccgacttcgacctctcgcggcagctcccgcccaggtccccctccgccgcatccacgtccacctcctcgtcgtgctcggcgacatcgtctccgccgccacaggcccagagccacggccggagccagcaccgccacgtgaagaacatcttcaagagaagcgagtccgcggtgaccgcgtcaacctccggacaggaggaaccgcgcaacctcgcctggtacctgagcaaaagaatcgacggcggcgccgaccagatcaagaaggcgaagtcggccagggtgtcgccgatggaccgcggcaagaagctctcgagcttctgctccgccgcagcagcgggggagcggtcgttctcgttcgtgggcaccgaggagtacgttgcgccggaggtggtgcgcggcgacgggcacgagttcgcggtcgactggtgggcgctcggggtgctcgtctacgagatgtcccacgggcggacgccgttccggggccggggccggaaggagacgttccggaacgtgctgctccgggagccggagttcacggcggacgcgcggcggcggtggccggagctgacggacctcatcgcgaggctgctggagaaggaccctgcgcggaggctgggtttcgccggcggcgccgacgaggtccgggcgcacccgttcttcgccggggtggcgtgggacctgctcggggaggtgtcccggccgccctacattcccgcgccggccgatgacactgtctcctgcgagggattcagcgtggtggagtacttcgataggcttcaccagcctccgctgtcgccagcggagtactcgcccgaggaagagctcttgccggagttctga

SEQ ID NO: 38513 - DNA, 312 bp, Zea mays
  Peptide Sequence Number=SeqID_81888
atggccaaacttggagaacttgtcgacaacaacaaggatgcagtcccacgagctagaacgagactgtccggtgtgccagcagagcaacgactacttcgcgccaacggtcgtctgcagaacgcattgaatgcgctacagtgcgcgccagagtcagagcagagactgatggcgcaccggacagtgaacagtgcctgtccggtgcaccaccggactgtccggtgccccagaagacagaagctccaacggtcagaatccaacagccaggtgacgtggcaggcgcaccggactgtccggtgcgccatgcgacaatag

SEQ ID NO: 38514 - DNA, 966 bp, Zea mays
  Peptide Sequence Number=SeqID_81889
atggcggagggttgcctcgagtcgcggcaccggttccacagtcgagaaggcgcgacattggcgcaagtggcggatgatgaccaccagttcgatggtggggagaagcaagccgggctgcgacctctgccccgccctcagcttcaaggatcttcatcatccttgctggggaggagggcgggacaggtcggggcctgcctccgtgtgggccgcggcccgctccttccctcagtgatcgggggagaggggcgttcgccgtccgtggagctggcaacagccttgtgtctggctccccggtctgagcgactctggcgctgcttccggtgccacctcccaccactggggcggagcgcggctgcccgcctgccacacgggtgtcggttgcgccgtgtgcgggccgaccatgtccaggtcctccctgcgccgtcggctgcacaacacgtcgtacgccgcgagggcggtactcgtgttctgggacggtcccgttctcgttctcgtggcgagaacgggagtgaggacctgccggtgcgctttggggcgaccatcgctcgctggtgcgacattggtgggcaggtggctgccgtcgtcggtgctgaggtggtggcagccagagaaggtttcgccgacgagaccgtcggtgccacctgcggtcggacctccggctcttcggccttgacggcttgtcctcgcccctcgtgtggggatgtgggcgagggccttcctacagcagcatttgccctgaggtcatcgttgctgctgtttagccacccgaggcggaggtcgttgtcgctgctggtgcagcggtcgccgacgagccatctagagtttgttgtcccgcagaccctctggtgtggaggtagttcatacccacaggagtggaaccggagttctgtttgtaatggcaccctgagtgtgggtgtttgttcattgtggctgtcgaggcctgaacatctgggtatttgggcgtga

SEQ ID NO: 38515 - DNA, 408 bp, Zea mays
  Peptide Sequence Number=SeqID_81890
atggcgcttccccccttcctccttgcggaaaggcgacgaaggggcgaaaacaacgtcgctcgctccgctccgactgttgtgccacccgccagggtgaggctgacaacgaccaagtttagcctcaggcgcaacaggaagctccgcctcgcccgaccccagggctcggcctcagcctcgacctcggagggtggtatccgcctcgcccgaccccagggctcagcccccacctcggcctcggaaggtggtctccgcctcgcccgaccccagggctcagcctcaacctcgacctcgggaggaaaagcgtcctcgcccgaccccagcctcggcctcaagaggagcctccgcctcgcccgaccttgggcttggaccgaccgcgccacgggggatgcatcattaccctacccctag

SEQ ID NO: 38516 - DNA, 786 bp, Zea mays
  Peptide Sequence Number=SeqID_81891
atggcttctccacccatcgattcagccctcacgctcgccctcgaacaccaaacccgctccttgttgttcgagttggacaaacagttgtccgccatggatgtcaagtgggaatcctgtgtcagagagcttgaatctcaggtctctgtgtccagccaccgcctggattccatcaccaccgaccttcatgtggatgtggagttccagttctcctcagccgccgatcacctccaccagatcgaagctgacgtcaaaactcgtgtcgccgccctccaatcgactatgcacgtctttgagctgtggcgccctcgcgtggaagcatcggtcgagtccctccactcctccatcgattcgatccgtgccgaggtctccaagatggggatccgctggtccaccaacgcccgtgcggatggatctggacaacccggtctcctcgatgcgcacagatctggatccggaagggtccctgctcctgaagaacctccaaatcgcccacgttttgggtcctgcttcgagaattactaccgagatagtgggcacgtgcaccccggtgccgacgctcactacccggtcacaggtatgtggagctcccctcactcgccctcattttcattcaatgctcatggtggcatagtcagggaagctgcggaatcttctcggcgtccggatcctgttcgtggtgattcatcttatgctggtcgttcgtcgtggaagttggttgttccacagtctgctcgctgggatcagccgcgcagtttggctccagaatcctctaaaactccaacttag

SEQ ID NO: 38517 - DNA, 459 bp, Zea mays
  Peptide Sequence Number=SeqID_81892
atgggcaagatcaagaaaggtgggagttcttcgcatcactccggcgataagcggaaatgtgagccgacttctccctcggaggacttcggcgactcggagtactcggaggaggagttctcctccgagtcagagggctcaccagttcgtgcctctcctccagcgtcgtctgatgactcagacgactcccaagggctcgccgcagaggtgtggacctacatccgggccgtcgaccgtgacgggctcgagggctcggatgagtcagagtactcctcggacgagaagaactgctcggactcgtccgaggatggcggcgctgacggcaatggcgaggacgacgacaacgacagaggcgatggcgacagtggcgaaggtgacggcaagggcggcgacggcggcggcaagggtggcagcggcaacggcggcgatggcagcaaaggcagcaacaaggccagtggctag

SEQ ID NO: 38518 - DNA, 576 bp, Zea mays
  Peptide Sequence Number=SeqID_81893
atggcgcgtacaaggaaaactgttcgcaaatctactggaccttttggcgtgccacaacatgagctagctccccggcacgaaggaagtagtagtggtagcaatgccccaattgaagacctagaagccagggtggaacaacttcagtcagagctacgtcaccggaatagggcacgggagcaggacaaccatcgtatagctgaattgtcagatgacgtcagccgcttgcaatatgagatttcagaacaggattcagccattgattgggccatcaactcgtgtttgatcgcttgggaccgcaaagcaaaagctctagctcatgtggcagagcttagtgcggccctcgaaagcctgcaagtgtattgtaatactttacatgaagaagtaaatgtattgtatgctctactacacccggacgtgccttccgatgttgctgcaatgggagccggaccatcgggaacagcaaatggaggacctgatggggagttggacctttttaggccccctccttccatgaaccttgctgacgaacggtctcctgcagcaggaaatgaagcaacaatgaatgatgaagactag

SEQ ID NO: 38519 - DNA, 420 bp, Zea mays
  Peptide Sequence Number=SeqID_81894
atggagtttgttcagaggtcactatggtcaggttcgctacccagtagcttcgcggacccgcaaggacctggtgggaccattttcttgctatgcagcaagatgaccgagaggtggaatggagagagttcaaggcagctttcagggggcaccatataccggcaggcattatggaccgaaagctcaacgagtttctggcactcactcagggaaaccagacagtgttacaacacagacgagaagaagagggacaggttcaggagggggctaagcactaagctccgtgaccgtctcaacaacgtcagatccaacagctataatgagttagtcaacatggccatttctcaggaggactgtatcacagcttgtcaggcagagaagaagaggaagacccctgtggcaggaccttcagctcagccatag

SEQ ID NO: 38520 - DNA, 402 bp, Zea mays
  Peptide Sequence Number=SeqID_81895
atggcggaatggtcctgcatttgcgatgggatgcgggccgatggtcctgtgcactggatagcgacgaggggattgggttgcgattccttccatggtgacgaggcgtggattgcgtttggggtgcagaggatatgggcggggcatccgcggtgcatgagaagaacgattgggcggggtggtcgtgcgcgcgggtcgtcgacgatgggattcctgcgtgctggattgctgcgaggcgtggatagcagcaaggggatgtgtttccttctgtggcagcgacaagatttttccttccatggccgattgcggctaggaccatgcagatgccggggtagtggggggaggacgcgcatggggaagaagggagacactaacatgtgggtcgtatgcgccgtgaggaggtag

SEQ ID NO: 38521 - DNA, 96 bp, Zea mays
  Peptide Sequence Number=SeqID_81896
atggagaagtgcaaaccaatcaagacacccatgccaactaatggacatctcgacctagatgagggaggttgtggatcatgggaattaaaggattag

SEQ ID NO: 38522 - DNA, 477 bp, Zea mays
  Peptide Sequence Number=SeqID_81897
atgtcgacgaactgcttcctgttgtgtataaaccaacagtgggggaagattgctagaagtatgggtcaatcttcagacgactacaaggtttatacatccacctcaaggagaaggcatgggaattccttgggaaagcttgcactatatactgctattgaaggtgtacaaacatccactgttgaattcacctccttttttggtcctaggattaaggtagaaattggttatcctgattatgtgcttaaagagggtgaaggaggcacaattgtgtttggcatgtcatccctcctcatattttcacctcaagaacttgactatctaatatgtggccaacaagaaatttgggagttggaggagctaagaaatgatattgttgacctaaaagagatgtacagagatcaggtggatcttcttgttacccaggatccagaccgagtcacaattgagaggtctactaggatcttgtttcatacttga

SEQ ID NO: 38523 - DNA, 417 bp, Zea mays
  Peptide Sequence Number=SeqID_81898
atgaccgccgtcatcgcatctctttccactaatcgccagatctctggcaagtggggtagcgtcgacgatgagttgccaatgcacggggcttcgcatgtgcctgggcaggggctcaccggggtagggccgccggccggctatccacgccttgtcgtgggttataggccgacgcgctgggctgtgcagtggttgggggcgagaggactagaaggggcgtgtgtgccatggcgcaggggcgggctggggtgcgatggccgcgcctgggatgggccgcgctggccagcgaggctggggaagggggcgcgatggggaggagagtcaatgattgagggagcgtcggtcacgcgaccggaggtggcacaacgtctctcggggcggtggccgttgaagacgtcgccgacggtgtcgaggggctga

SEQ ID NO: 38524 - DNA, 462 bp, Zea mays
  Peptide Sequence Number=SeqID_81899
atggcgagagtagcgtgtaccctccgtggcaagaggctggacggtggtgtatctgtgctctcggttggcgtgaagaagcagcaaatttttgttgcttctgttccaaggtggtgcctaaagaagaaaatcaagactgaagctacgggaggaaaggcacctgcagggttgtctgaagtccgttggacaaggacaactgtaggtgggcctaatgacttcggaagttctatcacagtccacgcagatgtggtggtcactgcagaagctaatgaatttctttcctgtgaactgtgtgtcgtggtctgtgacgatggagttagggactctaaagcgatggatgatgtctgtgaagaaagccaccacatgctcggacttgatgttgctgagggttcggacctcgacgcacttggaaaatttgttgatggcgaccaacaggtgtgtgaagcccccaggtgccttctgtag

SEQ ID NO: 38525 - DNA, 495 bp, Zea mays
  Peptide Sequence Number=SeqID_81900
atgtggaagttcatgtattgtattcgcgactgcaccctgacgtacctgcagaccctgtcggaatgggagctggaccttctggaacagcggacgccgtccaggactcgtggacaggatggtgcgggaacctcccgtggaagggagactactcctaatccgccaccagtacccccaaccttggctgaggccatcgctgccttagtcaatgcaacagccgataacacccacttccttcgtgaaatggcgggacaacaactgcaacagcaaggcgggagagctcatccgcaaggaccccgtgaagcttcatatttggacttctcagaaatgcgtcccccactattcgtcaaggctgaagatccccttgaagcggacaagtggattcgagttattgagcagatatttgggctcatctgcctgctggtcatcaagttacctgggacgagtttaaactggcattttgggagcactacattccagaaggagtgcttcatatga

SEQ ID NO: 38526 - DNA, 795 bp, Zea mays
  Peptide Sequence Number=SeqID_81901
atgacttcccacggatcctcagacgacgggaatgcactgtcccacactgacgggcttgcacgagagggctttccccgcattttgtgggaggtacttcagggggccggatacacgacgcctcctcagtacgcggtgcagcagttcgagaagcaccgagtgccccactgtagggtgaggatgaccctggagcctcatcccctacagccaggctggcgttcattggactctgagtcctttggataccgggctgaggacacgatcgaggcgatcgctctgcacgggttgaccactttctgcagattccatcctttggagctgtctacccaccccattggcttgttccccgccgaaagggaggacgacccaatgtggaaggatcgggtggagcatgccaaggacatctgggccatctacccaggtcagactgcgcacttgactgtacggtgcatgaatgctctgtaccgtctgcaagtgatgcgcggtgaggcgatgtcccatctgatggcattgttggaggcgacaaagatcaccttggacaacagagaggagctcgtggttgatttgtccactaagatggtggaaaaggacttgcaggtggagcagctatccaatgagatccaagagctggaggaattagtgggtaccagggagaacaccatcgaggagatccaggacatggaggccaacgaggacgtcgacattgagggaggagaggagcctgcctccagcgtggacactgctggctccgggagaccaccttcccccgagtcgagtgttgcctcgttcgctcactag

SEQ ID NO: 38527 - DNA, 366 bp, Zea mays
  Peptide Sequence Number=SeqID_81902
atgtacgactcgacggcagggatggccggaatcgctcggtccacgtgcgcaggcgggtgtcctcgtcggcggcgggtgtgccagccaaatcacggcgatttggttcaatccaagggcacgtggattacccggtccacgcactccggcggggttgtgaactccggcgaccgtggactggcctctccgacgaagcaggcttcgattcctcgctcgaggagcttcactgaggtgtgctcactcgtctccgagggttggacagggtcgggaaaggctgggctggccggtctacggcggcaggggctcgggtggccgcggacacgccgtgcacgagcaatcgacggtgagctgagctccggtgaggtttga

SEQ ID NO: 38528 - DNA, 186 bp, Zea mays
  Peptide Sequence Number=SeqID_81903
atggggaagcctgtcccatcactcctcatgctcctcctcagccgagtgaccgcacttgtacccaccataaccggaatgggagaccacgtctcaggtcgcgtgaggggtaaagtctgtgggcaggttcattcaagtattaggcttactgatttaccatatttctcggatttaataacattatgctaa

SEQ ID NO: 38529 - DNA, 1311 bp, Zea mays
  Peptide Sequence Number=SeqID_81904
atggagagggaccgtcaagacgctgcacagaaacaccggacggtcgtcaggatcgcggatcctatgcacgaggcgaaaaaggcgcaggggagcgcgaaggctgctgactctggcggtagcaaaccggtgtcggctgcgaaaccggccgcccccgggcacggcaaggtgtcggcgggtgcgaagtctgccgccgctggcgggagcaagccacccccgggcgggctcgtgaaaggacgaaggccgctttcgccgacgcgacgtattgccgacttcggcacggatatcaatgtcgacgattatcttgttggttcgggtgaggggcaactgactgttgtcccacctccggtggtgaccacttcgccaacggcggtggtgggggcgaagggtgccgcgcgggatccgtgggccactttctgcgcgagcggcgagattctgtcggccgctgccactaaggacgtggcgggctccatgtctcagcgactgagggaggcatcgcagcagctgtcacagcagctgaagcaagcggccgacttcgccaacctcatcgcgtcgggtgccttgactgcggacgttgctgccgaggtcgagcgtctccgggcacagcatgcggatgctgtgcgagagaagtcggctgtggaaagcaaaaaccgcaggctgtcggagaaggtggccgccatggaggccgagaagacggatctccggcgccagctggcagaggagaggagggaggcgaacaaggccatcgctgatgcgcaggctacgcaggccgaagccaaagagaagctgctggtgctcccggccattgtgacaggtttcatgtccttcgcctccctcgtcacctgcgagggggccatgaatgctttgtcccgcgaggggtgcaggcattacgaggtcttcgaccaggcagacgaaaactttgaacgtgaaatcttcaaggtcgaagaccctatggtgaagcagtcggcgggggcactctttgataggatgtggagtccgcacggccgagaggcggtcagggagcggtccgatcgggcaatagagcagatggcgcatgccgaagacgtcgaggaccttgttggtctagacgacgcattgcccgaggccgcggaggtcgatccggtgccgccctcggatgccggtgaaggcccctcagcgacccctgcgcccgctgcggccggcgaagaccccgcaccagcccctgcgccgactggcgaagacgctctgaaggtggtggccgagtcggccctgagccggcagccgaggaccccacagccgcgaccgggcctttgtaggtggctgaataggtgttga

SEQ ID NO: 38530 - DNA, 651 bp, Zea mays
  Peptide Sequence Number=SeqID_81905
atgcacgcgagcctgactgcaaaaggatatgaagtcgtctccaatgggattgacaaccatttagtttcagtgaatctcaagaataaggaagcgaagggtactagagctggattaatgggaacaaccattttagcaatgttgagtgttcggagagtttgtgagggctgtggaatgtcgaaggtgaagaacaatagtggttatcatggagtcactgagccaatctcgctgagtgggccgactgagaagtaccttatgcagacagctgaggttgaaaagtacctttcagatgcacgactcgatgagaggcaagatgaggctatcttgcgagaagaggttttaggcaagctggaccagactgtgaaagcttggattaagaaggctactaggatcagcgggtatggggagcaatttgtgcatgaagcaaatgcaaagatctttacatttggttcataccgtcttgggtggcttaaaggaactgctctgaatatggagtacttcttcagatggcttcatgacatcctagctgagatgccagaagtttctgagttacatccagtaccagatgctcatgtgcctgttctgggattcaaaattaatggggtctcaattgaccttttgtatgctaatcttgctcatgcagtgattccttag

SEQ ID NO: 38531 - DNA, 1206 bp, Zea mays
  Peptide Sequence Number=SeqID_81906
atggccacgagcagggggcgccaagggatggcgcgccgaaagacgccgggggcgaccagcgctaagaccacatcgtcttcaaggttaagagttttttataggagaaattttgaggacaccgctgcagacaatcctatcctctattttattgatcagacaatgttacacttacgtggactaaaggagccacacgatacagcagctgtaagcacaaagccggcaaagcgatacccactggccttatggataggcatattgggcctgataatgttagtcgctgtgtacatcttctcgttgtctctaaagcaaaatgggatgcttttcgggctgatgcagacaaatttgatagaaaaggaaagggagaagccttgtcatgatcccagtattccagacacagaaatcccttacttgcactacccgatgccaaatacttatgataggaaagaatgtgcgtgcacaggggttaggttctttgctatcttgtcaatgcagaggtccgggagtggatgggttgagacgttgttgaatagccatcctaatattagctccaatggagagatcttctctgtcaaagaaagacgcagcaatatcaccgcgatcacgaaaacactggacagattgtacaatctggattggtatagcagtgctgctaagaacgaatgtacggctgccgtggggctgaaatggatgctcaatcagggtctaatgaagcaccatcaagagatagttgaatacttcaaccgaaggggtgtttccgcaatttttctactaagaagaaatcttcttcggcgttacgtctctatattagcaaatgctcatgatagtgccatgaaacagttgaatggaactcataaagctcatgtgcactccaaacatgaggctgaaatccttgctcaatataagccaaccattgacaaaaaaacattgattactgaactaaaacggtctgataagttggcagctgatgctctggtgaatttcaagaacaccaggcacgttgtcctgtactacgaggatgttgtcagcaatcgcacgatgctcatggatgttctggattttctcagattgccaaagaggaagctgttcagtcgacatgtgaaaatccacacaaaacgattgtgcgatcatatagataactgggcagatgttactgattttttgaagggcacaccgttcgagagctttttgaatggctcaagaagatga

SEQ ID NO: 38532 - DNA, 2082 bp, Zea mays
  Peptide Sequence Number=SeqID_81907
atggacgaggcggacgatgacgcccgcaccttcaaggtcggattcaccgccgccggagagaagcagttccgggagctcgtgagggagaagctgcgcgggttcaggaggggcctggacgacaccctcctggattatgttactatcatgctccagaatggaaaacgtaaggatcaagccagtatggaactccatgtatttctaggggatgatagtgcagtattcgtttcctggttgtgggaacatctttctttaaatatgcacttatatgtgcaagcacaagaacaaactcaggtggttaaggatgatgaggcccccaaagaagtatctggaaaagataaatcatcagatatgttcccaagaagcaaatgtcaaactcattctgagcacccaattgaatcaagtgcagccactactaggaaacgtgataagcgggaatggaagggaattggtcgggcgggtaatgaaaaatttccacttcgaaatgtactaactgatattcttcacggggaagagaaaaaatctcaaaagtccaatgaaatacgatacccttcatcaaaacaacagaatggcagaaagcgtgacagggatgatgaaccacaacaagcaaagagagacacctcatcacgccccatgcttggtggtggtgcttcccgtcgtcttctacagtttgctgttcgagatgcagtaaaagctgtacagccagccagcacctctgctgaaccagcatccaagcgtctgcgctctgtggttgccactacttctgcagagaacatgcgtgataggagatcagaaaaatctcaggactacctgaacgatagaagatcagaaagatctcaagataactcgagtgacagaagatcagaaagaactagaccaatgctacaggtacaaggagctgctttagctcttagagctgcagcggaagctgctgcagattctacaaaggctagatctactggaagtgttttcaagcgattgggtcaagggaatgttgtgaaacaaccatctcgttctcgtgaagagaagagagattatgctgattttgagccagttacgaccgcaaatgaacatggttctgatcgatatgttaataatgaggaatctgaagaggaatatagagagctaaccatggctgatagggtagcaggaatgaatgttgattcgggctctgaagatgatgtggaccgagatgagggggttacaagataccaaacttctatttcacatgaagatactttctcatcatttgcagagaagaaaactgtatcggcacaatgcagtgttgaactagagaccgatgcaataaggccttcaagtgtgaatcacgaggagcaacctgtcccttcattaacaaatacaacaagtaaagctgtgtctatttctgttgatgtaaatatggtggaacctcccagttatgaaacaccaaaagatgttcatgttgtggagaagccttatgttgcacccatgaattcaaatgccacaagtgtggctaccaataccaaagaattaggccatgcagaagttcaaaaggattctcagcggtctgcaccatctggtatgtcacatatctaccgatataagattcacttaagggtggttcactttgctgccaccaaggactcattatctcgccatttcaacaagtttggtgcagtactgaaagtagtcattgtcactaatgctgcaacgggtcagccaacagggtctgcctatgtagagttcttacacaaagaatcagctgaacgagcgttgtcgttgaatggcacatcatttatgactcgtattctcaaggttgttcgacgaagttctcatgaagcagctcatttttatggttggcctggtattggacgatcatcattatatggtaggcatggtaggatggcatacccaagagctgttcaccccggtggttcctttagagggcgtgctccgatgaaagctggcgctagaagtttacagtggaaacgggagccttcaggcactgattcaagtgcaggtcctcccgccggcaacataggggagcatactatagctgatataatgagaactgaatgcgtaaaacaaaagtccgaaaaaacatga

SEQ ID NO: 38533 - DNA, 228 bp, Zea mays
  Peptide Sequence Number=SeqID_81908
atggggaagaagggcattgccaacccacatgctaagaagctagctaagcagcacatggtggaccttgccaaggttactggcaccaggacatatgatcgaattacgctgacaagtattgaggcggctgccggaatccagccaaagtctgagcccgctcctggtggtgttcatgggtattacaatcttgtagaagataaatatgatatactatgtggtccaagattttag

SEQ ID NO: 38534 - DNA, 423 bp, Zea mays
  Peptide Sequence Number=SeqID_81909
atgatgatgatgaagattttcaccagcataggcatcagggcactcgtcggcaatgcagcctctctgggtgggcgtgttcctcgcaatgtcgtggtggtgtggaggactgctatagctcgagtggaagatacagtccatccactcctttccggcgtagggggttggggatgggacagccagggcgcatctatccccaagataaagaacaaaatggtctcttttgcagatcctgtcatcactgctatctggcctccagatgtttctaaagggcacatcactgctatctggcctccagatgtttctaaagggcacatcactactaaaagttccatttcgacgggaggtatggatcttgccactcaagctattataacaccccgggatccacaaacaccccagaatgctactaaactacacatctaa

SEQ ID NO: 38535 - DNA, 477 bp, Zea mays
  Peptide Sequence Number=SeqID_81910
atggaggaaaatgatgtcctagcctgccacgctgcagttgataaccatggcgccgatgtgggggcgctgcgcaaatcgacgtctcgggcgtcgaaggtggtggtgggggaggtacgatttgtacttcctggtggtgttggtatgcgtggtgcggtggatgcggagcgggggcgtggattctttgaccgtggaacaaacagtaaaatcggcgcggcggttgcgcacgtcccccgacccccgtccgcgagttctgtttccgcggccctgggggggatattcctggcggcgaggggcctcaccagcggggtgctggttggcgatgttgtgcacctactgctgattgcggccgtcccgaccggagtctggctgcggagtcctcgtccacgtgcgactggactgtggagcgtctttgggtttcctctgagactcatttttgcactggtggagttcttcggatttggcgtatttttcgaatag

SEQ ID NO: 38536 - DNA, 504 bp, Zea mays
  Peptide Sequence Number=SeqID_81911
atggcaccaagggaagactgcgcagcgcatggggactccctgcccggcgcggtggcggcactaccctgcccgtgccaggcgcctagaccggcggactcccgcgggcggttgtcgcctaggcaacactgtgcgacaagcggcaaccgcgagaaggcacaaccgctatggtttgtcggcacggcgacgctcggtcccactccccgccgagccgattcgccgccgcgcgaccctcgatttggtagcgccggcaacaggagaggtgaactgtgccaggcgcccagaccagtggactcccgcgggcggttgttgcctgggcaacgccgtgcgacaggcagcagccgcgagaaggcacgactgctatggtttgccggcacggcgacgctcggtcccactccccgcctagccgattcgtcgtcgcgcggccctcgatttggtagcgccggcaacaggagaggtgaactggtgaagggtgaagcacacgcgaggaggcccgccgcccgctag

SEQ ID NO: 38537 - DNA, 492 bp, Zea mays
  Peptide Sequence Number=SeqID_81912
atggcatcgcgtaagcttctcgtgggcctcacagccaggaggcagctacaatcccgcactcagcaactattctgggccaccagtctccctgaagctaccacttctcggtccctaatggtggctgctgcaatggcgcggttatcggacaggttagcaatgcaagaggatgagtttcacaaattagcagatgagacgattcatgatttgcttgaaaaacttgaggagtatggtgactccattcagatggatggtttcgacatagagtacgggaatcaggttttgacattaaggcttggggatttggggacatatgttataaacaagcaaactccaaacaaacaaatttggctatcttctcctgtgagtgggccttctaggtttgattgggatgcaacagctaatggttggatatacaagaggactggagtgaaccttgtgcggcttctggagaaggagattggtgagctctgtggtactccagtagaactttag

SEQ ID NO: 38538 - DNA, 333 bp, Zea mays
  Peptide Sequence Number=SeqID_81913
atggctgttgagatcgacgtatcaactgctgcgaatgacagtaacggtccaagcgagattctcgcacctggggtgcggtatataagtcgaccacatctcgaattcctaataagccatagaagggttagatgcttccccactaggagctatgttgtactcgccattgatcctgatatagctgaagtgcccgatctttcggtgagtggagataattctgatttggcgaaagatgacccttgcgatccgactaggacgagcaagcccgaggcgccaatgcaatcgctgaaccaaatccatgtggttaccgaccttgctgatgcgagatcggcctga

SEQ ID NO: 38539 - DNA, 153 bp, Zea mays
  Peptide Sequence Number=SeqID_81914
atgcagattattgaaagaaagtgcgaggctcaaaagggtgctgggataagttcaattctcttgcacgggcccgagtcactggcccaggtggaaggggtggcgcctggactggggaagatggtgcctgggctggagaaggtgctgctggtgtag

SEQ ID NO: 38540 - DNA, 201 bp, Zea mays
  Peptide Sequence Number=SeqID_81915
atgggaggacgaccacaagggtattggggtcgtgctgcaaccctagaatgcgtccctaatggacctaacttgatacacgacccattgggccaaaatagggtgacgcagcaccatgggcagaaaaggcagaaattatctcggaagctcatggaggtggtctcatggggcactttggcgtttacaagacacatgatgtgctag

SEQ ID NO: 38541 - DNA, 267 bp, Zea mays
  Peptide Sequence Number=SeqID_81916
atgccgggaccgaccatcgccctgggcctcgccgacgaagccctgtgtgcgcttaccctcaaccccgccattgctaggtgcagtggccgagttccctcccctttggtcggatcctcgtcggccatcgccctcaggctgcacgccgtggcctcctcgtggtcagggtctatggcaggaacaaccacacttccacagctccttgaacagcaagcaatgttgcagcatgccttcgacgcgtgttttttgtccggagaaatgcccgggtga

SEQ ID NO: 38542 - DNA, 591 bp, Zea mays
  Peptide Sequence Number=SeqID_81917
atgaccatgttaatggctcctgctacaaagacattgaggaacaaaaaagttgattggggaccaagtaatgatatttccaacatttccaacaaagcaagcacatcatcaaatttaaagatatccttgggtgaggagcatacactagagtcgaggacgactcgattacaagaaggggaggatgatgaggacatcactgccatcaatacaccacaccagcgacccccttcaccatttaatcatggaccagtgaaacgagtctgtgcacgtgtttgggaggtgaaccatctagaatttgagaaggcaacaaggcaattaaagctgctccacttgaggggatttcgaaactacaacaagtgcaagtttaagagggcatatctttcagctcccaaggtgcatcaagaatcaatgacagaaaccaaacgaggcgtccagaaactgccgagagagtttcgttctccattagaactcctttctattcctctatttaagcaactagcagccaccaaagaacttggggttttgtttgatgttcaaggttgttcttggcacggcaagagcagcaacaacaggagccggtgtaactatcgctaa

SEQ ID NO: 38543 - DNA, 357 bp, Zea mays
  Peptide Sequence Number=SeqID_81918
atgttcctgctcgcccagagtttcttcgccccaagtcatcttcatgatgaggacatcactgccatcaatacaccacaccagcgacccccttcaccatttaatcatggaccagtgaaacgagtctgtgcacgtgtttgggaggtgaaccatctagaatttgagaaggcaacaaggcaattaaagctgctccacttgaggggatttcgaaactacaacaagtgcaagtttaagagggcatatctttcagctcccaagcaactagcagccaccaaagaacttggggttttgtttgatgttcaaggttgttcttggcacggcaagagcagcaacaacaggagccggtgtaactatcgctaa

SEQ ID NO: 38544 - DNA, 870 bp, Zea mays
  Peptide Sequence Number=SeqID_81919
atgactttccacggatcctctgaggatggagatgcactgacccacactgatggacttgcacgagagggttttccccgcatcttgtgggaggtgcttcagggtgcaggatatttgacaccccctcagtacgcggtgcagctattcgagaagcaccgggtaccccgctgccgggtgaggatgactttggagcctcatcccctgcagccaggctggcgttcactggactccgagtcctacggataccgggctgaggacactattgaggctatcgctctgcatggactgaccaccttctgtggatttcaccccttggagctggctactcaccccattgggttgttccctgcggaaaaggaggacgacccgatgtggaaggaccgggtggagcatgccaaggacatctgggctctctacccaggccacaccgcccacttgtctgtacgatgcatgaatgctctgtatcgtctgcaagtgaagcgtggggaggccatgtcccacctgatggctttactggaggccaccaagatcaccctagataaccgggaggagatcgtggtggacttatcccaggagctggtggagaaagatctacaggtggagcagctgactgacgagattcatgagttggaagagctggtgggtaccagagagaataccattgaggttctcgaggatcagctcctcaacacccagcagcagctcgcagaggctaatgcgcatctggacatgcatcaccaagagatccaggatgcggaggctgacgaggacgttgacattgagggaggagatgagcctgcctccagtgtagacaccgctggctcagggagaccaccttcccccgagtctagcgtcgcctcgtttgctcactag

SEQ ID NO: 38545 - DNA, 242 bp, Zea mays
  Peptide Sequence Number=SeqID_81920
atgcagtacaatggatcaagcagtctcattagctgcgagaagcagacgattcgaatcgagtttttatccttgcaagtgaccgcacttgtacccaccataaccggaatgggagactacgtctcaggtcgcgtgagggggctctggtgctgggtccggggcaacctcctgggtagctccttgctccggcacgaggacgtactctccgtcagcaagattacagtctatcgaaatgcaatgaacat

SEQ ID NO: 38546 - DNA, 162 bp, Zea mays
  Peptide Sequence Number=SeqID_81921
atgctgcggcttgggatctcggtgatcgggattgggagcttcaactccggcgggatctctgggctcgaaatagtcacggtcagggagaatcgacggtgctatcctgctcgccgtggtggtcgtaatcttgttggggagcttcgttgggccacgcaggggtga

SEQ ID NO: 38547 - DNA, 681 bp, Zea mays
  Peptide Sequence Number=SeqID_81922
atggcgaacgggccaaaaacggaatttcaaccacggccgcgaaaacgggcacgtggaagggcacgggaccctcccgtggtccccccgcgtgagacgtggaagttcgggtccacccgtgagggaaaacggaactccccgaagtcctgggagggggtctcctcggccgagccccgcaccccctcgcggcctagccgtggccggtcggcaccctaccgcgcccagctccagctggcgctgttggctgcctggccggccgtgacccgccgcgcccagcgcggagggatgctttggatggctcgaccgtggcggctacgctggcgcatgagttgtcttggacccgtgactgcttggaggatccccgctgccgtgcggccgactcccggcgcccgtgtcccatcgctcgtgcgggcatcctgtgcctgctgcgttgagaagtgcttgcgtgctgctactcgtcccacgggaagccgttctcgatacacgttgccttcgtcgagctcaccccccggggtgcggctcgtcggctcgagagcgcccgcggcgtttgcctcgtgccgccgtcggcctatggccggcggcaccgaggacacctcgctggcgcttttggtctcggatgtggctcacgctgaaggccggagacgcgttggcgtcacgcgcccaagaatcggtccgcccgaatga

SEQ ID NO: 38548 - DNA, 855 bp, Zea mays
  Peptide Sequence Number=SeqID_81923
atggcgcaccggacagtccggtgcacaccggacagtccggtgccccctgccacgtcatcagtgccgttggattcgaccgttgaagcttctgacatgtgggccctcctgggtgtccggtgcacaccggacagctactgttccttgtccggtgtgccagtatgggcacgcctgccatctgtgcgcgcagagcgcgcattaaatgcgcggcagagagccgttggcgcggagaaatccgaggctggcgagttccggagccgcgcctcctttggcgcaccggacactgtccggtgtacaccggacagtccggtgatttttagcgcggcgactcctggaaaaaaaccgaggctgaggagttcagcacagggctccctggtgcaccggacactgtctgccgcggcgaggaaaagggcggaggggcttaccggcggcgagactgttccagtgaagtggccgaggggaggtccacgggatgccagagaagctatgagcgcaaggaattggtcggagactcactggttagtccggtccacgcgcggcgacggaagaccaaagtccggtgaggttgatctcgggcctccggtgaagtccggccgggtccgagggcttggcaagcttcacgggctactggcggagctagccgaagcactagctgggcttgagggtggctggagtgggctggctacggcggccgaagctctggcggcaatggcgggcggaattgagctcgccggagctaagggaaagtggctggccggtgagggtgagtgctgggcgaagagagagatatggagccaggaaatccggtctgtctccctgcccaaacccgaggcaaatccaaggtttggtcatgtctag

SEQ ID NO: 38549 - DNA, 591 bp, Zea mays
  Peptide Sequence Number=SeqID_81924
atgaagaacgtagcaaaatgcgatacctggtgtgaattgcagaatcccgcgaaccatcgagtttttgaacgcaagttgcgcccgaagccttctggcggagggcacgtctgcctgggcgtcacgccaaaagacactcccaacacccccccgcggggcgagggacgtggcgtctggccccccgcgccgcagggcgaggtgggccgaagcaggggctgccggcgaaccgcgccggacgcagcacgtgaggcgtccttagcgacggaccgggcccaagttctctggaaagggacgcctgggagggtgagagccccatccggcccggaccctgtcgcaccacgaggcgccgtcaacgagtcgggttgtttgggaatgcagcccaaattaggcgggttcgagttggagcacgcctgtcgggacccgaaagatggtgaactatgcctgagcggggcgaagccagaggaaactctggtggaggctcgaagcgatactgacgatagctggagcccacacgagttctatcgggtaaagccaatgattagaggcatcgggggcgcaacgccctcgacctattctcaaactttaaataggtag

SEQ ID NO: 38550 - DNA, 402 bp, Zea mays
  Peptide Sequence Number=SeqID_81925
atggcgcgacaacggttcggccacggccgcgaaaacgggctaagtccaagcgcgtggaaagacaccgaggctgctacgtctcctcggccgagccccgcaccccctcgcggcctagccgtggccggtcggcaccctaccgcgcccagctccggctggcgctgttggctgcctggccggccgtggttcggccatgacgcagccacgaccggctatggctggctaccgccggccagacgccctggacgagtggctgcacagtgggatggcccgttgctcgatgcgttttccgtttctcccgcgctcggtggaccttcggtcgccgtcctcgcaagcagacccgccgcgcccagcgcggagggatgctttggatggctcgaccgtagcggctacgctggcgcatga

SEQ ID NO: 38551 - DNA, 975 bp, Zea mays
  Peptide Sequence Number=SeqID_81926
atgagaaagaaaagattggggaaggatgaggaaagaaaagtaacacctgaatttgtgaatatgagcaaagaaattttatacccccaaattcagggtgttacaagtcacctggagaggctgcaccaccgcccgcgtgaggagcaggaacgccggcgtcagcatagagaacagcagggctcttcctccccaccccagcaagaggtggagtccgtgaggccccgttcctctgttgcccagctggaggcgccccttgcaccaccgcgggacgccccggccgttggaggagctactggaggagatcccgacgacgacgactcagaccacagcacggagtcttccgagccgcaggaggcggaaggatgggtcgcccgacccatcacccgtgacgccgctcgcggttgtcacttccacgacgcactcgacaccttgctgcgccaggctttcgaccggcacacctggtcgatcgagtatcgttgtgtagtctaccagcacagtcgcgggaggtacccggaccgctgggaggctacctacctagctgtctcggaacactactccatctccgagagggacactgcggaggcggctatgctggatgcagcacggcgtgcactctctcagtactgttctctgttcggtggcgtggccgacggtcttaaccttcggtactacccccgccgccctactggcagcaccgagagtgtggttgtctcacctgttggtgagggtaaccctaggttgagcagcacagtcaacctagtcgcagtgcttaacaccgagctgaaccactctctggacgagctaagcagggctcgaacggagattgcggagttgcgtgctgagctggcagagcgccatcaccaggagggtggttcccccgctcctgttgggactcagcacccataccgctcgccgccacgtggtcaccacacttatggttcccctgtctgtaagaccaggatagatctggatccttag

SEQ ID NO: 38552 - DNA, 465 bp, Zea mays
  Peptide Sequence Number=SeqID_81927
atggggttttaccggagtttgacaacatcgcgtcgggactgcatagatccgtgtcggcacactcgaagcgaaggggcagcggctgctgttgcacgtgcatggaggagatcgacgaaggcagaacgacaaccgaataggggctgtgtagatcagcgatggagctcgctgcgcgacgatgccgaggcggctgctgcagcccgaaaccagatggagggggctcgacatgggagagcactcgcgcgcagtcaaggggtagcaagggtgcgtggtggctgcgacagccatggagacggaggtgcgaccttgagctccggcgtgagctgggcatctccagcgcccacgggagtttctgcaggacaaaacaaaacaccaggagagctcagatttgaggggaaacagggggggtcggattccaaccattggggtgccgagcacagggggcataagtccggccatggctgctag

SEQ ID NO: 38553 - DNA, 978 bp, Zea mays
  Peptide Sequence Number=SeqID_81928
gaggtggagtctgggaggcagccttcccctgcacctcagccagagatgccccctgcaccaccacaaggcattccggctgctggaggagaccctgacggagacgacgacgacgccagtggaagttcaagccacagcacggagctcctggaggagcaggagcctaagggatggatcgctagacccatcactcgcgacgccactcgcgggtgctacatccacgatgctctcgacaccttactgcatcgggcctttgaccgacacacttggtctatcgagtatcgttgtgtagtctaccagcatcgtcgcgggttatacccggaccagtgggaggctacttgcttggtgcaccgttcgtacaatgatctccggggtgtagatgccttcttagagcactattctatcaccgagagggatactggtgaggcagccatgcaagatgcagcacgacgtgcactttctcagtattgctcgttgtttagcggggtagctgacggtctcaacctgaagtactaccctcgtcattcgattggcagtgctggaggtgtgattgtctcacccgttggtgagggcaatcctaggctgaacaacatggtcaacctggccaccatgctcaacaccgagctggaccacgcccttgacaagttgggcaaggttcgggcggaggttgcggaattgagtgctgagtgcgcagcacaccactatttggatggtggttctcctgcccctgtcgggattcaccgccccgtggtcgcttcgattatggtatcccttatcgcgcttggctaccgatcccgccctgcacccgacgcccgacacgccgccaggaacccatcaccgagccgccgccgcgcccagccccgcgtccgatcccacgctaggacgccacgccgaagccgccgccagccgagccgccccacatccgttcgccatcttgaattaaggagcttcaatcaactgtttctcttccctccccgttaa

SEQ ID NO: 38554 - DNA, 69 bp, Zea mays
  Peptide Sequence Number=SeqID_81929
atggccctgtgcctgcggcctccttgttctgggcgcgggcgcctgtcatgcaatgcaatcaaccaatag

SEQ ID NO: 38555 - DNA, 213 bp, Zea mays
  Peptide Sequence Number=SeqID_81930
atgaggaacaagggggacgcgaaggagaacgagctaaagctccctgtgcttgagggacacccagctgggggaggctgggcgctggggaggggctcggccggcgagttcctcccagtaccgaaggggagagtgggcagactagagaaacagcagaatgataaaatcctgaactctttacttgccacaagctttgatgaaccacttgaattatag

SEQ ID NO: 38556 - DNA, 330 bp, Zea mays
  Peptide Sequence Number=SeqID_81931
atggaggcatcagtcgcccgagatgctcggatgctccccacggatttgctgatggatggaaaggcggatttggctcagattggaaggggctcggatggggcggagccgttcgttgatggtggcatggatggagtcgtgaggtggggcagaggagagggaggcgtccgcgcccgtcgcggagaggttgtaaggggcgcggatgggccggaggagacagaggcatcagtcgcggagaggatcttggagaggaaggtgtcagtcgcagagaggagagggaggcatcagccgttggcagaacgtgcaccactgtcttgtgaacgcctacagtag

SEQ ID NO: 38557 - DNA, 609 bp, Zea mays
  Peptide Sequence Number=SeqID_81932
atggcgtctccggttgtagtggtcgcggcgctgctggcggcggcgctagcggcattctgcggcacggacccgctccggacaggcagcatggtggacttcccggggttcgagccccacctcgtcgacctccccgatcccaccgagatgccgatgcacgcagacgaacgggagcggctccgcggagccgaggtgcggttccacggtgaggtgcaggagcccgagagcgtcaccttcgacccgtacaaggttttcaaaaatccgagcattagtgatgtcatgtgcacaacaacagcagaggctcttgcaatggggaaattcgtgatctgcgcagaacatccatcaaatgagtttttcatgtcatttctgaactgtttggcaaacaagactttagaggagtttgttgcgagagtgaaagaggcaatggatagagaaccccaaccgctaacccctgagcaaagatacaacctttcgtgggaggcagtgaccgagagattcatggagtactcagacctcgaaaaggttctgaacaatgaggctgctcagcctgaacaaggtaggaaaagaaataataaaagaacctcacagcctaatttgtcttcgatcttctga

SEQ ID NO: 38558 - DNA, 456 bp, Zea mays
  Peptide Sequence Number=SeqID_81933
atggcggtcaaggcttgtgcggacgaggaaggagaaggcatgatggcggagctatccaccggcacccatggcagcgcgacgtcgaggtggaagaagaagagagggcgagggcaagcgagagggcgcaaaggagagctgagggagacgagagcgattgagtgctcagcaaaatggagcgggcgcagctactgggcttgcctacgtgtgcggacaaagtgcagggcgcggcgaccacgcgttcgggcatgcgccacctggcagacgagatatgtgctccttgtaggcgcaaaagagacaaaaagagagctccgaagcgtcgcccacttcagccgaattgctgccctctctactggctacaactctgttataggttctagggtgattaggctgctggattttgaattacggacctccaaactttggtttgttagggctttgcaaaacagtggaaactaa

SEQ ID NO: 38559 - DNA, 165 bp, Zea mays
  Peptide Sequence Number=SeqID_81934
atgagtcaaggaatcataagaatcaagcccaaaggaaaagccggccttcagaaatgcagcagcggtaccccgagaagctacccaggcacagaagtcgtcgtgcccggctataacttcgtcaagctcttcgatttcagcttcaatatgatcgaaggcctggggtaa

SEQ ID NO: 38560 - DNA, 1461 bp, Zea mays
  Peptide Sequence Number=SeqID_81935
atgggggcagcggagcgcgatggcgttgcgattaaaaagctctcgagactcttcaagtctgtcctgggctttgaggtggacaatagcaccttcacagaggcccaaatcagggccatgttctaccccaagttcaaaaatgataaatccgatcagaagacaaggaccaaaatgattgatatggtgtcccatgggcttgcaaacttgaaggttacactcaagcattctagttccctcttcatgtatgatggtcaccatggtggtgcatatgtgaagaatagcttcgggaattcagtcatattcttcatccctgctgttgcacgctgtgggggagcttgggaccagcatcagctggcggaagaagaggatgtcgacccgcttccagaggggcaccatcacatcctcctcctgccccgatccgccagccgcgccgctcgccgcaccccgatgtgggccgccgacccctctgcagctccggccgcggccgtggtcgctgacccagatggccctgatgccgtgcggctcacctggaacacctggccacggtcaaaggtcgaggccagccgctgcgtcgtgccgctcgccgccaccatctcgcccggtcgcgtcccggacccctccgcggcgtccccgccgccgctcccttaccctccgctccgttgcaaggctccctgctccgcgctcctcaaccccttcgcgcgcgtcgacttcgccgccaagatctggatctgcccgttctgcttctcccgcaaccacttccccctgcactactctgccatctctgagtccaacgttcctgccgagctcttcccgcagtgctccaccgtcgagtacatcgtcggcggagccggcgtccctggggtgggcagctcgccccctccgcccgtatttctcttcgtcatcgacacctgcgtcatcgaggaggagctggggtacgtcaaaatggccatgcgaaaggccaccgcgcttctgccggagcacgcactcgtgggcctcgtcaccttcggcacgcaggtgcacctgcacgagctcggattctccgatctcagcaagatctacgttttccgggggaccaaggagatctccaaggaccaaatattggatcagcttgagctgtcgggcgctgggcgcccgggcttccccatgatgccacagcaaccgagcgggccgcaggtgaatgggatgcatccgtcggtcacggccggggtcaacaggttcttgctcccggtgtcagagtgcgagtgtacactcagcacgttgctggacgagttacagcctgaccaatggccagtggaggctgggaaccgtgccatccggtgcaccggtgttgctctcagcgtggctgccgggttgcttggtgcttgcatgcctgggactggtgcaatgatcattgcattgctaggtgggccatgtaccgagggccctggaatgattgtttcaaaagatttgtcagaaccagtttag

SEQ ID NO: 38561 - DNA, 1756 bp, Zea mays
  Peptide Sequence Number=SeqID_81936
atgcgcggcccccgggggaaggatgtcttcgcccgagctcagggagtcttcgccggccgccgggatcgtcaggaagctgcgcaaaagcgtcgggcgatcatcaagctgcccgaggctaggccgaagagggcgcgggggaccgcgaaggctgccgcccccggcggtagccagccgacgctggcggcgaagtcggtcgcccctgggtccagcaaggtgccggatgtcgtgaaggcagccggcgccggcggagccaagtttgcctcggccgaagacgcgaaggcccgagaattgccttcgccggggaagcgcgttgccgatttcggcactgatattagtgtggatgattatctcactggatcgggcgaggggcaacttgttgttgttccgcctgcggtggcgaccacggtgtctgccacggtgcctggggcgaagggtagcgctctcagcgctggcggtgagatttcggcgctcaccgccgtcaaggacgaagcgggcactgtgtcccgccggctgagggaggcgtcgcagcggctaagtcagttaagttgggctagacttcgatttttaccgccttcgttgggattgtggtcttatcatgctgacgccgtccgggaaaagtcggccgccgatagcaagtgccgcaagctgacggagaaggtggccgcgctggagggcgagaggactgacctccggcgccagctggcggaggagaggagggaggctaatcaggccctcgccaaggcgcagtcggcgcaggcggaggccaatctggcgcgggtggagggtagtctcgccagccagcgcgccgaggaatgggagacgcggttcaacgctctgcaggcccgcatggagagggccgaggcttcgacgcgctcggaagttgagcggacgcgcaaacagctcatggactcataccgcgagctgggcgcgcggaccgctgacttcgaagtgcccgaccgagagtcaggccttcgctgccttgagtggctgcaagaggagttgttggcgcccccgaccattgtggagggatttatgtcctttgcctccctggtcacctgcgaaggggcgatgaacgcgctgtcccgcgaagggtgcagtcactatgaggtcttcgaccgatctgatgaggatttcgagcgcgagatttacaaggtcgaggaccctgtggtgaaggaatccgcgggagccctctttgaccggatgtggggcccccacggtcgggaggtggtcagggagcggtccgaccgggcgagggatcaggcggcgcgtgacgagaaagtggaggacttcggagctttgaacagcgcgcggcctgaagcggagtcgaacccggtggcggccggggccgaggtcggcccgacgccgcccccggaaaccgtcgaaggctccctcactgcccctgcggctactgtgtccggtggtggctcgtcgccaaccgctgtgccgagggctgaggatcccccaaagacggcgatggagccggcagcggaggatcccacggcggctgagtcttcgcaggttcaagattttgggcctgcgcacgcaaccgctactgctaattttttggcggcttcgaccgtggatgctggaaatgaatcggatgagtctgcttctaagttttctgattttggtgactctgggagttcggttgagtggacggaagagtcgtcggatgaggacttggattactttgcggccttggatgtggcagcggcggaggcttcgccgcttgttttttatgctgaagttgtgcctg

SEQ ID NO: 38562 - DNA, 210 bp, Zea mays
  Peptide Sequence Number=SeqID_81937
atgcagaatgaggaggctcggccacgaacaggatcatcactgccaaggtcatgcctctgtccagatcaacattggccacttggatgcgaatggcatgtacgatgtcacttcaccacgtttgctctctctgggtttgtccgtgctcagggtgatgctgacagctcgttggacaggccgtggcagaagaagaaggctgagatcaagcagtag

SEQ ID NO: 38563 - DNA, 453 bp, Zea mays
  Peptide Sequence Number=SeqID_81938
atggcccgaggaaggagagagcacacggaccttgatctctcgaaggtgccaaaggttcaacacaaaccaatacaaagtctaagaaagggttcaaataaaaagagcaaaagacaaccgaaggctgccctggtctggcgcaccggactgtccggtgtgccaccggacagtgtccggtgcaccagggtggatcaactcaaacttgctagcttcgggaatttgggggagccactccgctataattcaccggactgtccggtgtgccagcggagcaacggctacttcgcaccaacggtcgtctgcaaagaaacagtgaaagtgaacagtgcgcgcctgcgcgcgcagaagtcagagcaggcaccagaaggtgcaccggacagtgaacaagacctgtccggtgcaccaccggactgtccggtggcccagttgtcagaagctccaatggtcgaaccctaa

SEQ ID NO: 38564 - DNA, 756 bp, Zea mays
  Peptide Sequence Number=SeqID_81939
atgacgacgagcatggttcatggtaggtgtagcgcgcaatacatgcacaaggtgttcgtccaaatgtctaaaatgggaggagctgttttgccaaatgatttgtacaaaagatgtggctcctatgaagaagctgcttctgtagaggagccggagtcggaactattttcaaaggagccggagctctaccaaacaggccctatatgtttaagtggtacaattgaaataaactattcgaaagatattaaagtccaaggtattattggaccatgcacatctttggagaagaaaggagccgtgtgtgctgacacaattgttggtcaaggaaatacaacagcatggaaaatgtgtgggctcgatagaaatacttctctgacagtattttttgatgtctcaccgagtgaacggtcgagccaaccaggacaccaaaatccccatttgtatatacaatttgtaacaagttaccaacacccagaaggtcaaatgagggtaagagttactacgatatgcaggaaatgggtagacggttccactaataccgaggaattagttgaaggttttgaccaggaaactgcggctgttgtgttggcaagatacatctcttttaaaatggagatggagcatgtttctttgagttactgttatgactggaaaagtatatcacatacgcccaaagcccttagaggcacaagcgccagagcaagtagccggccaaggggatggcgcaacaactgtttagatagggttcttagggattag

SEQ ID NO: 38565 - DNA, 786 bp, Zea mays
  Peptide Sequence Number=SeqID_81940
atgctgcctcttggaagaccaggaaaggttgtctcccaaaaagacagtgtaaccgggcgtggagcgtcgcgtgtccgggcagcaggtccaatcagcattggtgtagacaacaagctcggccggtgtggaatgctggaccagatgaccgaagtcaagggtgccgtgaaggtagcgaagaatccgcttgacaacggcaaggtggagggcgcgagagtctcagctgccaaggaactgggcctcaagagcgagccaagcctgacgagtcgtacccccacgctcgtggacgatgtcttgcagctcgacggtgagagtcccgaggatccaggagaggacgacattgtccatccacaacttggaaaggccaagcgcggggcagtcagcgagaacatggtcgtcgaaagcttagcgctacagggtgaggaagagcaaatcccgtcaacgggcgtaagaggtggtggcgtagcggacgaccgacaccagggatcagatgttctggacaccggtggcctgggcgtggaggtttgcgaccaccgaagcctcatagtcacggacgaccttagtggtggcgggctcatgcggtggaccaccaaggaggagcttagcctcggcgaattggtaagcgagagcctccaaagaagcacgctcctgctcccaggcgagagccgcagcccgctcccgtgtctagccgatggccatggtcgaacgggcaacaacaacaagggtggaatgcgccgcagacacatatgtctgaggggagggttagaggtggcgaacacatctgtttga

SEQ ID NO: 38566 - DNA, 1008 bp, Zea mays
  Peptide Sequence Number=SeqID_81941
atgagggtgaaatgggatgcccttagccaattaattagaggaactagaggtgtagttgctttgtcgtcgtgccgtcaaaggggtccaggcacagtgcttgctctgccgaggctgagtgccgaggttgtccacattgtaaccactgctcaggggaagacgaagccgtggaaggagacttccaggagttccaagactatgacgagttctagatggctcgtcttagacacactgcacctggaggcgccccctgcaccaccgcgggacgccccggctgctagaggaggtcctggaggagaccccgacgacgacgactcagaccacagcacggagtcctctgagccgcaggaggcggagggatgggtcgcccgacccgtcacccgtgatgccggtcgtggttgtcacttccacgacgcactcgacaccttgttgcaccaggctttcgactggcacacctggtcgatcgagtatcgttgtgtagtctaccagcacagtcgcgggaggtacccggaccgctgggaggctacctgcctagttcgccgtccggaggatgacctccggggtgcagaggccgtttcggagcattactccatctccgagagggacactgcagaggtggctatgcaggatgcagcatggcgtgcagtctcccagtattgttctttgttcggtggggtggccgacggtcttaaccttaggtactacccccaccgtccgactggtaacacagagagtgtggttgtctcacctgttggtgaggataaccctaggttgagcagcacagtcaacctagtcgcagtgcttaacaccgagctggatcactctctggacgagctgagcagggctcgaacggagattgcggagctgcgcgctgagctggcagagcgccgtcaccaggagggtggttcccccgctcccgttgggactcagcacccataccgctcgccgccacgtggtcaccacacttatggttcccctgcctgtaagaccaggatagatctggatccttag

SEQ ID NO: 38567 - DNA, 663 bp, Zea mays
  Peptide Sequence Number=SeqID_81942
atgactctggagcctcatcccctgcagccaggatggtgttccctggactctgaatccttcagtttctgggccgatgacactatagaggccacagccatgcacgtgctgacaactttctatggatttcaccccttggagatgtcgacccaccccatcggcttgttcctcgctgagaaggaggatgacccgatgtggaaggatcaggttgatcacgccaaggacttgtgggctctctaccctggacataccgctcacttgacggttcggtgcatgagtgctctatatcgtctgcaggccttacgaggcatggcgatgtcccagcttatgggcctggtggagtctaccaagatcaccctcgataacagggaggaccttgtagtagaattgtctactgagctagtggagaaggatctccagatggcaggaagagcgcgccgtggacagaatcagcgcatccctccaccaccgccgcagcctcccaccatgcaggagctgatggctcagcagaatgagattctacggcagctcgcgcagcgtcagccaccgcctcagcactatggggtggtgatcaccaccagcgtgcctcggcagcagcaacctaccaggagtttctcatcactcagccgtcgttgttcaccagggcggaagaccgctcgatgctga

SEQ ID NO: 38568 - DNA, 315 bp, Zea mays
  Peptide Sequence Number=SeqID_81943
atggggttgtttcctgttgctgccatggggaaacaggaaagaaggaacaccaaggaagatgaggaagcagagaggggcttcagcttccatggggaagaaggggagccgactgggtggaaaacgagtagggcgctgcagggagggcccggctgctcctcatccaagcaaggcgagcaacagcaggggcgccatgggaggggaggagccgagctccctgctgcagccgcttgccagggggaggaagaagggcgccgctggcctctgcgagaaattctgggcgccatggaggaacgcaggcagggcgtcggggcctag

SEQ ID NO: 38569 - DNA, 462 bp, Zea mays
  Peptide Sequence Number=SeqID_81944
atgcctgaccccgcgcccacgctcacgcctataaagccgctcgaggccatgaccgtactcccccgctcgctcccagtccggtccgagcacgagttcgccggagtaccctctgcgcacagcgtgcccgtggccgcccgagcccgaccaccatggaccagccactccggcccacctccatccaatccaacccctcgtctagcttccctagagctccgcaaagctttccgagccctcagatcgaacaccattttgctggaggtaccggagtgccgtccccagaatccatccgaccgccgccgcgcgtggaccgagctacacgattgcaacctcgctgatggagagtacgtactcatttcagagcaaggagttgctcaggagggagtccaggagacagcaccagagcatgtcgccgaggatctctccgccccagcttttgaaggcaagccccaattttatgcataa

SEQ ID NO: 38570 - DNA, 1512 bp, Zea mays
  Peptide Sequence Number=SeqID_81945
atggtgcaggttcgggcggccgacttcgccgatctcgtcacgtcgggtgcattgactacggacgttgctgccgaggtcgagcgtcttcgggcacagcatgcggatgctgtgcgggagaagtcggctgcggaaagcaaaaaccacaggctatcggagaaggtggccgccatggaggccgagaagacggatctccggtgccagctagcggaggagaggagggaggcgaacaaggccatcgttgatgcgcaggctgcacaggccgaagccaaagtggcgcgggcggagggcagtctcgcccgccaacgcgccgaggagctggaggcgagattcaacgccctgcgtagctgcgtggacaaggccgagtcctcaacgcgcgcggaggtcgagcggacgcacgcgcagtttatggacgcgtaccgtgagctgggtgcgcggactgctgacttcgaagtgcctggccaagaagcgggccttcgcttccttgaatggttgcaggaggagctgctggtgctcccgaccattgtgacaggtttcatgtccttcgcctcccttgtcacctgcgagggggccatgaatgctttgtcccacgaggggtgcaggcattacgaggttttcgaccaagcggacgaaaactttgaacgtgaaatcttcaaggtcgaagaccctgtggtgaagcagtcggctggggcactctttgataggatgtggggtccgcacggccgagaggcggtcagggatcggtccgaccgggcgatagagcagatggcgcatgctgaagacgtcgaggaccttgttggtctggacggcgcgctgcccgaggctgaggaggtcggtccggtgccgccgtcggatgccggtgaaggcacctcggtgatccctgcggctggcgaagaccccgcaccagcccctgcgccgacgggtgaagccgccccgaaggtggtggccgagccggctgccgagcctgcagccgaagaccccacatccgtggccgggccttcgcaggttcttgggtttgggcctgcgcacgcaaccgctactgacaatgctatttttgtggcggcttcgaccgtggctactgatgacgatttgtttggctctgtgtctaagtattttgagtctgatgattatgggagttcgattgtgtggacggaggagtcttcagatgaggacttggattattttgtggcgttggatgtggctgtagcggagccttcgtcgcgcgcggagggttccgaggaactcctgagcgcgagtactaggtataggcggcgaagggcggtggcgaagcggagagtgggtgaattgtcgcgaagtggtaggcattatcgtagcgaggtggggagaggtcgtcttcgcgtggacgggattggtaagcgagaattgttgtcctcgccgattggggtgagtgtaggtgaggaggagctgcgaaatctgtttgagggtgaggaactgaggataatgctattcaactacagggagatgggtatcatcccgaaggttgagccaatgtaa

SEQ ID NO: 38571 - DNA, 393 bp, Zea mays
  Peptide Sequence Number=SeqID_81946
atgtcgtcttcttcctcgtctgctgcaaatacgccgccggccgacgcatcgtccgaggataccttgagcaacgtggcggcggaggagctacatccgggtgatatggtggagttcggcatttcgtggatttcctcgaaaaggaaaattggacataagattgcacagttcggatcgtgcacgtttactccgaggaccggaaagacttcgattgaggtcgtggagttagttccttgtgcccgcaataagtggggcaactggtgggatttctggtttgatgtttccgaaggcgaagtcaaagaccacccagggctccccgtggccgtgatgtgctcccattattatgtggcgtacacgccatttgaggtggcagaggatgatgaagactgttggtga

SEQ ID NO: 38572 - DNA, 582 bp, Zea mays
  Peptide Sequence Number=SeqID_81947
atggagttccagacccgtccagtcacgcatctcgtcattgtgttcgtgtgcggcgccgaggtggacagcctcagccgctacgagctgtggcacaaggccttgggggcagctacaccctcgccaccgtgctcgccgtccgtcccggcctcagcccgtctacctcatgcatcgacttcgcatgctacaatctgtccgacgagctcaagttgccgccctccccctgccgtccgtagcgtcgcattctttcgtgcgccgcgccgccgcctctctcctcaacctctcttaagcattgacgagaccctcctgacacgccacggcgccatcgtcgttgttggcgacctctccactgccggagctacggaggctgggcacgctgccggtgcacttggggaggagcagcggctggcccagtgtggggtgccccggtgcctccgttgtaggaagggtgatgagcacggtgtagatgcgcttggtgatggcgtcacagcgcccactccgtctactcttctctatggcgcgctcactccggcctccggaatgacaggcatcgccgcgcctttaacaccgccgcgctgtcgttga

SEQ ID NO: 38573 - DNA, 261 bp, Zea mays
  Peptide Sequence Number=SeqID_81948
atggccgccgccgggtacaacttgtacctcagtaaaatggcggcgctcgtcgtccttcgcgttgtacctttccccctttcacgagccttcccaggcacacaagaggcggctgacgatgatgacgaccaccatgtggagagggacaccgacgcccggaaggtgacccactgggatgggatgccatcgtcactcacaagtcaggtcttgacaattgggcgacgcctgcccatccatcctctcccagtgcagtcccaacagtaa

SEQ ID NO: 38574 - DNA, 81 bp, Zea mays
  Peptide Sequence Number=SeqID_81949
atgcggcttcatacccttagagatgatgtggttttctactctcagaggtgcttgttgctcatcaagggaagtgggaagtag

SEQ ID NO: 38575 - DNA, 210 bp, Zea mays
  Peptide Sequence Number=SeqID_81950
atggcgccgacgaagagaaagcacacaacaggtgccaacgtggtcgagaccgtggccaagtggaagcactcccaagaatttcatgctagagttcctatcagacccgttctcttcatcggttgttctcaaagggggcttatgcttactgaggactctacaattaaggatttggattatgcttttcaagatgctgacaatattatcaagtaa

SEQ ID NO: 38576 - DNA, 240 bp, Zea mays
  Peptide Sequence Number=SeqID_81951
atgtcgcacgcgttcgacaactactatattgaggactgtggcgtcatcttggcgccagaggtgacacagaggaggaccgacaacaatgaccagttcgtcatactcgccaccgttggggcgatctacagtaccgtccatgttcacgcctcctccgatgtcgcgcacgacttgcacacccacgatggtcgttgctcctctctcccaccactcggctgtggcccaggggcgggcccactttga

SEQ ID NO: 38577 - DNA, 612 bp, Zea mays
  Peptide Sequence Number=SeqID_81952
atggcgtacaacagggcgctgctcgggtacgcggctgggcggctcggtgtcggggcggtcggcgaccggagcgtcggggcctggctgctcggctggtcgggcgtcgcggctcctgtttgcgtgtgtccgtgcgtaagggagagagaagatggggtaggatatgataaggagtattgtatttgtctatctgcttatgatgatggtgcagagttgcatgaaatctcatgtgggcagcatttccactgcacctgcatagataagtacctctacatcattgcaacatggcccgtgcaaatacaacagtcggaaaagcaactatatcaacctatcgttggaatcatgcaatcagccaaaaagggatgggttaaagtaccagactacaaaagctttcaaactggacgattcaaggtgataaacgacgacgggatgtcgatcatgaaggggaagctatacattcatttcacggtggagttctctgactctctggtactggagcagtgcaaggctatcgagtcggtacttccaccaaagctttcatccaatctgatagacatggagatagatgaagtgaggagacaaccatgcattaatgtgaacaacatcgaggaatag

SEQ ID NO: 38578 - DNA, 387 bp, Zea mays
  Peptide Sequence Number=SeqID_81953
atgggcaagagcaagaagggcggaagttcgtcacaccactccggcgacaaacggaagcgcgagccgactcctccctcagaggacttcggcgattccgagtactcgaaggaggagttctcctccaagtctgaggggtcgtcagtccacgcctctcccccggcatcgtctgacgactcagacgattcccaggggatcgcggtggaggtgtggacatacatccgggccgtcgagcgcgctgggctcgagggctcggatgagtcggaggcctcctcggacgagggggactcctctgactcgtccgaggaggggagcgacggcgacgacggcagcaagggcgacgacggcagcggcaagggcggcagtggcagcagcaaggccagtggctag

SEQ ID NO: 38579 - DNA, 336 bp, Zea mays
  Peptide Sequence Number=SeqID_81954
atgccgatgcggaatcgaacaaggattgacgtggcctcaccgggggtgaacaaagacgacgacggggctgcacaaaaacagcaaaccaccgacgggcatcacggcgtgctgcacatttcgtcgagcaccttgcgcacatcagaaaggagcaagggaaggggctatcgtaggaaggcgacaagggtgccgttcttgggagaggggctctgcgcagggctgctgtttttggatcgaagagctgggcgcagggaagaatcggccatggcaagagtagtttgggggagggagatgctgctactgctcgcccatagggaagaagggggaggggcgccatag

SEQ ID NO: 38580 - DNA, 492 bp, Zea mays
  Peptide Sequence Number=SeqID_81955
atggggagaaggaaggagagggaatcgtccatggcagagaagagagaagaggggatcgaccatggcagtctccacacctgggcaggggctcggctggcctggccggggcagaccgccgcgcgcaccacgctggcaggccttcaggccgccgcgatgggcaacgaagcaggggctgggcgggctagccggccggctgccgcgcgcaggagctcctggcgcgggggcagggggtcgcgaccaggagctaccgagcctgggcgtgcctgcaggggcctgaggtcggctgggggcaaggccggccatgggcgctggaaggagagggatggagcaggacgttccgggacggagctgcagcagcgccgctgcggccagggtgcgctcgcgaggaggccaattcagcctgggcctatgctgcgcacgcagggggaggggcgcgacgagcgcacgccggagatcgggatgggcaccagttcaacctgctgcacgcgctag

SEQ ID NO: 38581 - DNA, 676 bp, Zea mays
  Peptide Sequence Number=SeqID_81956
atgaccctggagcctcatcccctacagccaggttggcgttcactggactctgagtcctttggataccgggctgaggacacgatcaaggcgattgctctgcacgggttgaccagtttctgcggattccatcccttggagctgtctacccaccccattggcttgttccccacggaaagggaggacgacccaatgtggaaggatcgggtggagcatgccaaggacatctgggctatatacccaggtcagactgcacacttgaccgtacggtgcatgaatgctctgtaccatctgcaagtgatgcgtgttgaggcaatgtctcatctgatgggactattggaggcaacaaagatcaccttggacaacagagaggagcttgtggttgatttgtccactgagatggtggaaaaggacttgcaggtggagcagctatccaatgagatccaagagctggaggaattagtgggtaccaggagaaggaagtcgccgccgtcggtgttttcggtgctccctactcgccgagaccctgctgtaggctcgggcatttccttgggtcactgggaatcgaagcacggcgacttcgggcgcggtggcgtcctagggcccaggaattcctcgtcggtgcgccttccgcgttgccatgccgtggccggctctccaaccttcacctcggtcttcg

SEQ ID NO: 38582 - DNA, 153 bp, Zea mays
  Peptide Sequence Number=SeqID_81957
atggggaagcctgtcccatcactcctcatgctccgcctcagccgagtgaccgcacttgtacccaccataaccggaatgggagaccacgtctcaggtcgcgtgaggggtaaagtctactgccaggttcaatcaggatttataacattatgctaa

SEQ ID NO: 38583 - DNA, 573 bp, Zea mays
  Peptide Sequence Number=SeqID_81958
atggacatgtggttacctgcgaaaggcaactggctgttggggtcgattggaggaatcaccacagcagacgagctcgcggtattcctcttgggtgccatctcgattctaccagcgagcagagtgggaggcgaatggcagagaggattcggaagcgggaaagcaagaactagggcacgaaaagcaaaggcggctaaaagcgcagctcttatgggatattctcgagccagataccgtttcaaaaagtgcccagtcatcacccggcggttatttccaaaaccccagcatgccatgtggaaacccggcagttatctccagaacaccggtgcgccacctcatcactcggccatcgtccttaaagtggctcgcgcggcctgctatcactcggtgttgcctccaaaacgccgatttcgtgttcagtcgctcgacattacctctaaaatgccgacgtcgccttccagtcggtcggcgttgcctccaaagcgccgatttcgtgttcagttgctcggcattacctctaaaaatgccaacgttgccttccagtcggtcggcgttgcctccaaaacgctgatatag

SEQ ID NO: 38584 - DNA, 1173 bp, Zea mays
  Peptide Sequence Number=SeqID_81959
atggatgaaggaactcccctcggtggtctggagtctgaggacaacgccgagccgagccacgagcttcacaccgttctttctagtctatggggccgaggccatcttgcccacagacttagaatacggttccccaagggcgagggcctacgacgaccaaagcaattgaacaaaccggaaagactcactagaccagctggaagaggctcgttacatggccttactacactcggcgcggtatcagcagtccctgtgacgctaccacgcccgaggggttcggtcccgagacctccaggtgggcgacttggtgcttcggctacgacaagactcccgagggcggcacaagctcacgcctccctaggaagggccgttcgtcatcgccaaggttctgaagcccgggacatacaagctggccaacagtcaaggcgaggtctacagcaacgcttggaacatccgacagctatgtcgcttctacccttaagatgctttcaagttgttcgtacacctggttcacatacaaagtctaaccatcaaggaagggtcagccttgcctcggtaaagcccgaccctccctcgggggctagaaggggcgaaccccctctgcttcaaaattttcctcggaaaaggtctttctgccagaacgtctttcgtgcttttcgactacttcgaaagtgggatcctgaaaacgacggagtacacgccttctcgactatatcgataacagaatcctacggacaagtaagagtacacgctcagacgtcgatggagggggagcagcagcacccttggcgtcaactccaccttcgacgaagttcgaccgagcctcggacggcaacacggtcggaggatctccgctccgaaaaacgacgtcagctctccgaaggacgacgtcagctccgcgcccgggccatcaccgccagggtctcctccaggaacctggcccgagcagacggctcggccggctgccccgaagcctcagccagctgtctcccgaggacatcagcccggctcatggcctcggcaactcgactccggcactggtcccgccagtggacggcccagccaggctccggccgacgaaatcttcttctcgagccaactctgcctctgtccacactgacacagctgcctccggctccggctcatcgaagagcggtcgagggttcctttaactaa

SEQ ID NO: 38585 - DNA, 342 bp, Zea mays
  Peptide Sequence Number=SeqID_81960
atgaggcgcatggaggatgctgtgatgagttccacacctggtgattatgtttacgcccgggtcttggtgcccctgaaatccgggtgtgacaaggacctgccggtgcgctttggagcggcctacgctcgctggtgcggcgttggtggacaggcggatgccaccgtcggtgctgacgtggtggcagttggagaaagcttctccgccgtcgaggccgtcagcgccgcctacggaccgacctccggctctttggctttaatgtctggttcgcgtcccttgagtggggacgcgaacgagagccttccggtggctgcgtccgtcctgggaccgtggctgctgctgtag

SEQ ID NO: 38586 - DNA, 657 bp, Zea mays
  Peptide Sequence Number=SeqID_81961
atggtcagatcaacggtgaccgtgcgtcttcctccccacgccgaagccacggcggcaccgccctgggaacgcacggcgatctccccagaccgaatcccaatcgcacgccatccggggtttggtggatttgcccccacggcggacctcactgccctccatgctccctctggtgatgggcaggggcggcggtttatattccccgcgaggaccccccatcggccgaagaaaacggagtccgaggtggagtttgttgcggagttagttggccgcgagctcggatgtcaacggagttttccgccgcgcgaggtccgcccatgccgcggtgttcgcccggttctgttttgcgccaagcagtcaaccaggaaaggagacgaccccgctgacgagaggggccaccagacagtgctggacaacaacagttcgccttccccggcatggctggaggacgcctcctccgcagagctggaggatggtttccaccaccagaagttgggagaagaggtggccagccgacccgtgcgggaggtagagccccggctcacctcgctcgccgccccagcaaggatgatgaagatccttgaagccgagagcggggtagaggctgcagcccggcttgcttctccccaccctggaactggtggtcaccgtcttgggtga

SEQ ID NO: 38587 - DNA, 729 bp, Zea mays
  Peptide Sequence Number=SeqID_81962
atgcaggcggcatgcaaccgcaccaagggggcgcaccctttcgacttcgacacgtccaccatggaggcccaggctctcacgtcatggaccgggaaaggggatactccgaaagggatccttctccgcgaaggaaacgggccccgagcccccctactgatcagaggttcgaaggctggcccctcggaagggttcaacagccgcctcagagcactctggctccgcgcccactactggtcaaaggttcgaaggctagcccctcggaagggttcaacagccgcctcaggccactcgggctccgcgccaactactgatcaggggttcgtaggctggcccccgaagggttcgacagccacctcagacgcaaagcgagggatgaccctggccaagtccgacctcgggcgccataggaagctccgcctcgcccgaccccagggctcggcccccgtctcggcctcggacgatggactccgcttcgcccgaccccagggcttggcccccgtctcggctccggaagacgacgaactccgcctcgcccgaccccagggctcggactcagcctcggctccggaagacgacgaactctgcctcgcccgaccccagggctcggactcagccttggccttagacgacggtctccgcctcgcccgacctagggctcggactcgacctctacctcggaagacagactcgacctcgacctcgaaggagcctccgcctcgcccgacctag

SEQ ID NO: 38588 - DNA, 471 bp, Zea mays
  Peptide Sequence Number=SeqID_81963
atgatggtcctcgcctcagttgccactacctcgttcgccattctacttcttttctctctcccctcatgcctccacctctgcgccaccccattctcggccgagggcgcaggagcatgcgcctcctacccgtattcgtccgacaccagcctcgacaccgattcgcgcagtggctattgcacgtccacgaggatgtttcacatcatgcgtgcaccatcattttcgccgtcgtcggacatcccgttcgtgttcccggccttcgctctgttcttcctccccaacctactgcccccgcccacggtcacagccgtgagccgaccgacactcgttgacgcgggtatgacgcgagtcggtcatgctcctagcctttctccgtgcgtgccgtcgaggaggacatggtggcgcctgctacgcttaggttatcttggcgatgaggagtccaggtctgagatattggacaaccaaggcccatag

SEQ ID NO: 38589 - DNA, 954 bp, Zea mays
  Peptide Sequence Number=SeqID_81964
atgaatattatttatgtctccaggcaaggaggttttgcaccatacaagatcgtcaaaattgccgaaatgggaggtataattagtggggactcgcctaggcacagctcaccagcatcgaagttagagaaaaagatggttgacgctatgcaacagagggcattaaaaggaacctctgtgaaatcattcaatagtgtcatcatgaaatttcctaaaatcgacgagagtttgagaaactgcaggactatcttccaggaatttgatgaagattccaatggtgaaatagatcaactggaactcaagcgttgtttccaaaatttgggtatcgaatcaactgatgaggagataaaagatctttttgaggcatgtgacatatatgaacatatgggcatgaagttcaacgagtttattgtcttcctgtgccttgtttatcttctaaatgaccctgcagtgtctgaagcagccgccggcggctcctcatctcttctagggaccctcgtcccaagcatcgactgctcatcccttctagtggagccgccgctctcaggttgtcgcctcttctccaggcgcaacaacccatgcgccctactgcaagccccatctagccctaaccctatagtgccaccgctaccccctcctaggccgcagtcgactgcttgtaccttccgaggtgccaccgctcctaacctaggccgcctactcttctctaggcgcaacacctcacccctcctcccctgtggccaatctgttctagatggacgcaacccccacctcctctcatcatctgccaccaacgacatcatctccaacaccaacaatcaaccatcattgatcatggtgcatccatacaccactgtccgtaaaatcctttgttcccatgacattggggatgaaggattccaactacagcaagtggacgtcccacttcaaatccatgtgcagcaagttcggccttaa

SEQ ID NO: 38590 - DNA, 261 bp, Zea mays
  Peptide Sequence Number=SeqID_81965
atgaaggaggttgagaacgatctcagagtccttcaccggatggccaacatcatggagggcgtcggtggtggtcttcatgcactagcaaagatgtttctcaatggcgacccaaacatctcgggtagattgatcgtcatcttccattgcgaggtcgagagcggagtcatcgacagagccgaagatccatcttttgacgcagcagttcgcctgatcccagtttgtgtcggtgggattggtggggagcatcccatagatgtgtga

SEQ ID NO: 38591 - DNA, 318 bp, Zea mays
  Peptide Sequence Number=SeqID_81966
atgggcgagcttggagaggggcttctgctggccgtagatcagggggaggacgagccaagggagagccgagcaagggagggaggcagggaatcctgcctggcagccgacgccgacggccatggagctagggaggagtcgctggggaagggcgccatgggaggagagggagctccctgctgcagccgctcgcaggaggagccgggagggcgccgggccatggctggccgaggggaggagctcctgccgtcaaccctgcacacgcagagaaagcagcggccaaggggagagcaggggggcgctaggcaaaggtccggctag

SEQ ID NO: 38592 - DNA, 459 bp, Zea mays
  Peptide Sequence Number=SeqID_81967
atgccctgttctgagccagactcccgaaggtctggagggtatgccctcagtatagtaggggtagggactcgtgcagccgaaacccgggcgaacgctgctgaaacccatagcgtttccagcatctcctccaggtctcctcggccgagccccgcacccccctcgcgcctagccgtggcccggtcggcaccctacccgcgcccagctccggctggcgctgttggctgcctggccggccatggttcggccgtgacgcagccacgaccggctatggctggctaccgccgcccagacgccctggacgagtggctgcaccgtggggatggcccgttgctcgatgcgttttccgtttctcccgcgctcggtggaccttcggtcgccgtcctcgcaagcagacccgccgcgcccagcgtggagggatgctttggatggctcgaccgtagcggctacgctggcgcatga

SEQ ID NO: 38593 - DNA, 318 bp, Zea mays
  Peptide Sequence Number=SeqID_81968
atgggcgagcttggagaggggcttctgctggccgtagatcagggggaggacgagccaagggagagccgagcaagggagggaggcagggaatcctgcctgacagccgacgccgacgaccatggagctagggaggagtcgctggggaagggcgccatgggaggagagggagctccctgctgcagccgctcgcaggaggagccgggagggcgccgggccatggctggccgaggggaggagctcctgccgtcaaccctgcacacgcagagaaagcagcggccaaggggagagcaggggggcgctaggcaaaggtccggatag

SEQ ID NO: 38594 - DNA, 267 bp, Zea mays
  Peptide Sequence Number=SeqID_81969
atgcagttggtggacgacctgaagggtgatggacataaccagtggatgctcgccaagcgacagattgccctcctcacgcgacctgagacgaggtctcccattccggttatggtgggtacaagtgcggtcactgcacgacagccaatcggggtcagtgaggcattgtacgccaaggcggtttaccttgcaaggtttaaaaactcgattcgaatcgtctgcttctcgcagctaatgagactgcttgatccatgctgctacattgagtaa

SEQ ID NO: 38595 - DNA, 270 bp, Zea mays
  Peptide Sequence Number=SeqID_81970
atgagaagtgcactttttctcaggatgaagagcctcatcagtagaggaagatgcagaaaaataaatgctataggtaatggttatcgtaaggaggaaattcaaatgattttgtgtgaggaaatcaaaagtgcttgtgaatatcgtccatttgaaaaatgtgattacagcgcaaggattgctaatgagatatgttgcaagaagctggagtatgtaattgagaagttggataccatgcaacagaaccttgaacagagcactgatgatgtttag

SEQ ID NO: 38596 - DNA, 285 bp, Zea mays
  Peptide Sequence Number=SeqID_81971
atgggaccactcctcgtggaactttgtcccaaaccgtgctctgccacctttggcaccatagtgggggacgatgccaccacagtatgcaccacaaggcccacctatgacaccggcggctgcctacacaagtgtcgggttctacacttctaccacaccctaggagcgggcccttctttgtctacacgaccaggttccctgtccagcatgttcgtcccggatgacgctagtgtcaccttggacgagatcgagcgcttgggtcagcacgatatcatcgggtcttcatag

SEQ ID NO: 38597 - DNA, 297 bp, Zea mays
  Peptide Sequence Number=SeqID_81972
atggcggcggtggtggccgggtgcggtggcacgggccgggggcgcggcgcggctctgctcggcgtgggggcgcgtgcttgcgcggctctgctcggcttagtgcgagggcacgtgcttggcgtggctcggctcggtttggtgcggcagcggcgcgtctcggctcggctcggtgcggcggcggcgcggctcggtgtggggcacgggcggcggcgcggcgcggcgcggggaggcagcggtggcgtgggcggaaaagacagagacgacgacggggcgggacggtttattgggccacattaa

SEQ ID NO: 38598 - DNA, 585 bp, Zea mays
  Peptide Sequence Number=SeqID_81973
atgaagaacgtagcaaaatgcgatacctggtgtgaattgcagaatcccgcgaaccatcgagtttttgaacgcaagttgcgcccgaagccttctggcggagggcacgtctgcctgggcgtcacgccaaaagacactcccaacacccccccgcggggcgagggacgtggcgtctggccccccgcgccgcagggcgaggtgggccgaagcaggggctgccggcgaaccgcgccgggcgcagcacgtggtgggcgacatcaagttgttctcggtgcagcgtcccggcgcgcggccggccattcggccctaaggacccatcgagcgaccgagcttgccctcggaccgcgaccccagccggaggtagggtccagcggccggaagagcaccgcacatcgcgcggtgtccggtgtgcccccggcggcccttgaaaatccggaggaccgaataccgtccacgcccggttgtactcataaccgcatcaggtctccaagtgctctgaatgtcaaagtgaagaaattcaaccaagcgcgggtaaacggcgggagtaactatgactctcttaaggtagccaaatgcctcgtcatctaa

SEQ ID NO: 38599 - DNA, 543 bp, Zea mays
  Peptide Sequence Number=SeqID_81974
atgaagaacgtagcaaaatgcgatacctggtgtgaattgcagaatctcgcgaaccatcgagtttttgaacgcaagttgcgcccgaagccttctggcggagggcacgtctgcctgggcgtcacgccaaaagacactcccaacacccccccgcggggcgagggacgtggcgtctggccccccgcgccgcagggcgagggaagcggatgggggctggcgacgcgccccggccgtatgcggaacggctcctgctggtccgccgatcggctcggggcgtggaccgttgtcgcccgcgccggcggccaaagcccgggggccctaggcgcccccggcagccgtcgtcggcgcggacggtatccgcgtgcctctggcgcgcccctcggggcgctgcgccgcaacggcctgcgagctccccatccgacccgtcttgaaacacggaccaaggagtctgacatgcgtgcgagtcgacgggttcagaaacctgagatgcgcaaggaagctgacgagcgggaggccctcacgagccgcaccgctggccgaccctga

SEQ ID NO: 38600 - DNA, 246 bp, Zea mays
  Peptide Sequence Number=SeqID_81975
atgaaggattgtccctctcgtataaggaccggtttgtcattcttcactgcctgcactcttatcaagtacaaccactcgagactgtatgggcagtcgcttgatccaaacttgcacgagaaggagatcgctgatcggcctcctagtactagtatttgtatcacttttgagtcccagaggattgggacgcttcaacaatgcacctcacagacagccaacagctgggacaagttctcaagctccggataa

SEQ ID NO: 38601 - DNA, 513 bp, Zea mays
  Peptide Sequence Number=SeqID_81976
atggaggttcgctaccaaaccagctattgccggaatgaagatggtttccccaagttgctgagagcatacacaacacgcctcggaatcaggagccagccagagtacgccggtcgtgagttcttcgagcatggcacagagaagatgcgtgccttagaagggcagcagctgctagaggacgaccctacagtcgtgtacctcacagcatacctgcttaccctggatgcacagtatgatctcttagctcggcatcaccatcaaatgatcacccgggcagaagatgcagagaggcgcaaccgtcagctccatgtggatctcacaacatctcaagcccgtgtagctgccttggaaagtcgtgaagtcattgctgttgaagccctaaagcaagccaaggatgagcacgtccagaagctggttgaggcctacttggtcacccacaaccaacatagagccctgcagatccaagagcccgcctcatccaacccagttcaacccatgagagcggaagagtcctag

SEQ ID NO: 38602 - DNA, 498 bp, Zea mays
  Peptide Sequence Number=SeqID_81977
atggcttgggatggcatgagggagccccttgcccctctatttataggcaaggatggaactgagggagctggtgggggattttataggcgagcagtatgcgaggtggtgttcggggtgcggtgtggtggtgatggaacaggtgccacgcggcagcaggggcgacgaagggaagggagcggtgttgtcggtggtgatggcggtggtgggtgcgctgcaaagggggcatgggcagtggtagtgcgcatggagatgggggcacgcgtgtggggggcacgggggcagggctttgattctcatggtcggtcccatggactaagcgactggacagatagaaaacacacaagctcagcaatgacaagcataaacaaatcaaatgttttgaatgagaggggaatagagttttccaaatcatggactactcggattcaagggctaagcgactactgctgctcggcttctgaacttgacccaaactccggttgctttggatgcctttga

SEQ ID NO: 38603 - DNA, 555 bp, Zea mays
  Peptide Sequence Number=SeqID_81978
atgtcatgccttggaatccctggttacccagaataccgtggaatggaattcatggagcatggtaaaaagaagtacatggttaccgtgtacattggatcaagtaatcgacaacccggatggtgttctatggcaatcgggcataggtccaaggacacttgccatctcgtggctcgtgaagcgctaagtacactatgctcggtctaccgagaagaagtgggaaccacccccatgaggttctttccacctctccacaatacccatcaagagtggaaggcccgagtgcaagctttgagagagcaaaggcacggtggagatctcacaacagcataccttgccctctatctgcttgccttggatgaaaggtgtgacaagataatcactcagttgcggaaaacaaccatgcaagtggagaaagcagaaacccttctactgaaatgccaaaaggatctggccgatgctcgaagtcggaatgcggccacaaggaacatggaaagaatggcattcgctgatgtaacgagaagtttaagaggaaccccagtcatcaccagcatctaa

SEQ ID NO: 38604 - DNA, 276 bp, Zea mays
  Peptide Sequence Number=SeqID_81979
atggataaggaagagcaccccgaaccctcccaagatccaccgccagagttgtttgagcccctcaccatgaagaagattctagcaccctcccctgaagtcaaggaagaagctgcaagcaccccaccagcgccaccgccctctgaggtcaccttggagttacaagagagagtcccgcttgaagaagagttcgaccccatcctgccatctcagtcgccgctagaagaagtcatcaacatcagctccctcttgacccatccaggagacgtctcagaatga

SEQ ID NO: 38605 - DNA, 108 bp, Zea mays
  Peptide Sequence Number=SeqID_81980
atggcgctgccgcgatgcctgctgcgcgccgccgaggagttcggccgaatccaacccgggccgttgatcggctcacggacggagacaaatagggtgtggctgttttaa

SEQ ID NO: 38606 - DNA, 1488 bp, Zea mays
  Peptide Sequence Number=SeqID_81981
atgggtgaaggcgagtatggaaaccggatgtggtggatggggatggaggaggctgcaggcaggggagcagagggcgtgatagcgggttgtgcagatggtgcaatgatgagcggcggagcgctggcgctcctggatgacagagcagataagaagcgtgcaggcttcatcgttctcatttcggatggtctagacggccagttcaaatggggagatgagagtatcacccccacggatcccatccgaggcctcctccgaaagtacccagtccacacctttggtttgggcaaggctcacgacccaagggcactgcactatatcgctaacatatcctacggaatctattcctccatcaccgacaacctcgagaacaagatcatagaggcatttgccgtctgcttagctgggttcaagaccgtagtagccgtcgacgtctgtgttgacatcaggtcaagcagtttgctgataacaaagatcgactctgggggttacatactccgggggagtaccggaggcatcttggttggcacactctatgctggggaggtgaaggacttcattgtctacttttcatatcataccgggagttggtcgagtggttaccatacaactttgaatgggattgctgctagtgtcacgtacaaggaagcgccgggcaggcagtcaactgccactgactcttgctcagtgtcactcccgattcacgtgaccgacaccgtgtatcctcctgaaaacccctgcccaccctaccccatggtcctgcagcagatggtccggttgaaggtgctagacttgcttataagcgtcctgaaagaattcctggtcctgaagggggaggctgctagtgccgtccacgggaaggaaggaggagatgacccggtcttgcaggccatcgcagcgagcttgctgcagaggaagtggaaagagttcaagcagtccgatgaatcctggaaagaagccccgaggaacttcgttaacctgggaggcatcgacgaggacatcagcgccatggtgggtatcctgaagcggggcttgggtgttggatgcatccactcatggctgtcgagctatcagatgcagcgcgcgacaattacaggcttgccaggatctcacatggttgcaaccggccaattccgcacgccagcgatgaacgcaatggtccaggaggcccataggcatttggccaaggaagcatctgcccaagatgcggggacgtcaattgtctgcaagcgcgccgttgagcttctagatggggtcaacaagcgattcgacctctggtgcaagctggaccatgacttgccgcgcactaaccaaccgtcatcgcaccaagaagaaggccatgagtcccgcgacatcaccgacgtcctgcatgggaacatcaaccgagcgaggcagcatgacatatacatggctgccgatcacgcgatcaagcaatggcggagcttcctcacatccgtggagaagacacatggccatgggccggacaagtag

SEQ ID NO: 38607 - DNA, 2568 bp, Zea mays
  Peptide Sequence Number=SeqID_81982
atggcggccgatcacgcgctgccattggcgtcatcagcgccgtcctggccggtctcgacgcacccctccgccgcttccgccgccgccgccgcggtctactacttcggcctttctttcgctctagcgcaggggagagcttccggcgggttcgatcttggtggcgcgaggcggcgggggtgccggtggtcgcgggccatggagctggcgctgcaggagaaggtagccgcgcttgagcgccaggtcgcggagctccgctgtcggcgggccgaggacgccagggccaacgagaaggtggcgggaattttcgcgtcccacgaacagcggtggttcgccgagcgcaagtccctgcgccggcaggtgcacgccgtcgtcgccgctgcgcgcgcgcgcgaggccaagcgcgaggaggagaccgcggagctcaggcgccagctggaggagcagcgggacacagtggcgctcaaggacagggccctggagcaggaggtgcagaggcggcaaggcgcggaggagcgactacgagccgcggagaaggcggaggaggagctgcgggagcgcgccggcaaggaggcgatggagcacgccgcggaggtgcggaagcacaaggcggcgttcgtggagctcgtgtccgcgcagcggcagctggaggcggacctggcccgcgccgcgcgcctcgcggacacggcggaggccgagctccgggccgcgctggagcgccgcgacgaggcggcctccacggccgccgacctctccgccgaggccgcacgcctgcggcgggacgccgaccacaaggacaagatcctctcggcgatgctgcgcaagtccaagatcgacatggaggacagggagatgctggtgcgggaggtcaagatgtgcaaggccagacggaagcaggcggagctggaggccgaccggtggcgcaagatgtgggagtcccgtggccaccgccggggctcctccagatcgtcggcgcggggcgtggccgacctgccggccgggagctcagacaagctgctggccaccgacgccgccgtggcgtgcgccaccaatgaaactaagatattgttcgtggaccacgcggagggcgacgccaagaaggaccaccggaagacgccggcgaaggaactgaacgccattgaatgcgtcgaccgctatgctagccatgtcgtcgacgacaagcccgctgtggaggaataccaaggcctgcaggagtggttccagatggagacggagaagtacacggctctgatacaacaccggcacacggcggagatcgaggcgttcacggagcagctccggctcaaggacgagaagttggaggcgttccggtggcgcgcggtgagcatggacgtcgaggcggcgcgtctccggagccggatccacgagctggagggccgtctagcgcggcacgagaagcacagcgccgcgctggaggccctgctccaggacagggaaagcgagaacagagcactcgaggagcagctggagacgctccaagcgcaggcgcttggtgtggagatctgcacgccggcccgtggcagtggccaagacgacgggctcgacgaccagtgcatcgcgtgttcgcccgtggatgccgtccagagaacaatgtcatccggaagctcgcggcaccaagagggcgccgaggtcagcaagtatgagacgaagctggacgagctagtcaccctctccccagaagatcacaaggaggatgcaacagaggcgcttgtagtctcggtcggggatctcgcgtgcgccgtcgccgcggcagcaacgtccgtggaacacgagcgaagacatgatgccccggcgagccggcagtctttcaggtctgagatcgaggaggaggaggaggtgtacaccgagccgggcaatgcacacacgacaggtagctcccaagaggcgacgtctgagctcgcgctcgtggtcgtgccgcctgggcacaagagctctgcttggaagacggacatccacgccctagccgtgtcgtacaagatcaagaggctgaagcagcagctgcttgtgctggagaggctggccaacgaatgcaaggatgaggaagccgcggcgacgaagccgtcagggagtgaagccagctgcagcggcggcggcggcagcaggcagcagccgaggtcgaggtaccacacgatgatgtcgttcctcagcaagcacgtcaggcggtaccagtccctcgacgacaagatcgacgacctctgcgctagaatggaggagagcaagaggagcgcggggcggggcgcgggagaggagagccagagccagagcgcggcgctgggccagttcctggaggagacgttccagctgcagcgattcatggtggccacggggcagaagctgctggagacgcagtccaggatcgcggctggcctcgcgcgcgatcgctgctgctgtggcgacggagaagacggcgtggatatgaagaggctcatggaggtggctggggcgctgctgagggacgtgcagcgagggctggaggtgcggatcgcgcggatcatcggcgacctcgagggcacgctcaccttccacggcatcctccgaagcacgcgctga

SEQ ID NO: 38608 - DNA, 330 bp, Zea mays
  Peptide Sequence Number=SeqID_81983
atggctacggcggagagtttagtgcggcgagagcaatgggtggctcggtgggcatggtggcgctggcgggatgaatcgggtgatgggggcccggcctccacaagaaaattgagttggcagtggatgattgaaggaaaggctgtcgctggtacggaggcggtcaatgtgggggagctcggattccaaatggagcgcaccggccagcgcacagaggaacgtgagctagcagcgctcgttttcatggctctttctccacctttgcttctttactggataaaatactgtaacggggtgaaggactggaagcgtggtgacaacagtactccctag

SEQ ID NO: 38609 - DNA, 309 bp, Zea mays
  Peptide Sequence Number=SeqID_81984
atgcgcgcctcctcctccgcaccttcttcttccccttcttcccagtacatcgttgagctcttccaccgtggcgctgcggggatgagcggcgcgacggtggaggaggtgcagatccaggaggctctcctcttctctgaaaccatcaagggtctcaagacactgaggtcgcagctgtactccgcggcagagtacttcgagcttgcctacacgcagcaagacgaaaagcaggcggtgacgaacaacctcaaggagtatgccgtgaaggccctcgtcaacaccgtcgaccacctgggctccatatctttcaag

SEQ ID NO: 38610 - DNA, 1290 bp, Zea mays
  Peptide Sequence Number=SeqID_81985
ggtcgtttctttcatgcatcgctcgtgcaacgcaaccgcgcgccttcagccttctggcaacggactggctacagacttcggagcgggattggacgggaccccagctgtaatcgcgagcgcatgccgtcacggcgtatcgcggcttccatttatcagggaggccgaggccggcctggagggtcaccggtcacgatcacgccttcggacacgctcctctcccccgctccctccctccctcccctccgcttcttcggccactcccgtctcctccaccgccactgcatctaccgtgtcgcagacgcagacgcgtacgtctccgtgctccactcaccgcgcccgcctgcgaccgtccgcgagctttattatagccatccaagtccaacacagcgcagagagaagccggcgccccttccgccgccgcccgcgctgctcgccgtgcgtgcgcgctcgcggtcgcgggtggccgacctgggcttcggcgcggcgttcccgggcggcccgccggacacgccgccgcgccgctcgcccgtcaccgtgccgttcctctgggaggaggcgcccgggaagcccaaggcgccgccgccgcccaccgccgcggctccggccgccaccaacgccggccccgttcccgaaggcggcggcggcggcggcgacgacgaacagcacgacgaccaggcgcgccccgtccccgtgccgctgaagctgcccccgcggctgcagcaggtggcgtcgttcgcggcggcggacaccccgctgcttccgtccccgaaggccgtgctccagggcccctactactacggctgcgccggcgacggcagcaggaggccgccgccgaggtggttccgcagcggcggcgccttccggaggacgccgagcgccggcgtgggactcttctctcggacctggagcaagcccgcgccggctccggcgccggcaagcggcaagagcagacacggcgacgaccacgagcgcgacgcggcggggcccgacgccccgtggtgctcgccggcgtcgtcctcctcctcgtcgtctgtgtccacctgcttcggcggcgacgagcacggtcgcgggaagccctgcgccgacgggcgcgaggtctcctcggaggaggacggcggctcgcctccgagggggtcggtgaggatcacgaggcttaggaggaaccggagcctccccagcgtcaccacgtctaacctctgggcaagcatccgtaggagtttcgagcagattactccgtggagctacaagttcggtcggtcacgaccgccaggtgccaacgctactgaataa

SEQ ID NO: 38611 - DNA, 1176 bp, Zea mays
  Peptide Sequence Number=SeqID_81986
atggcgatggtgccatgtggcggtgacgacgcggaatggtgcaatatgatggaggccatcaaccacctgatgatgtcttccatgtcctcgccgcacgtcgccatgggcgccagcagttgcagggaagaggacgacgacagtttgtacttgcccatgtactactcatctgcgccaccgccagccgtcgtcagcgatcagtactgccccgaacaactcccaccgctgcctgctgccggtgcaatgacgggcctcgacgaggcgctcatgctgccgttcaccgacatcgatcttgaggccttcgacaacgccgaagagcaaaagcctcctgtcgaccaaatggttatgatgccgccgacggttgaacaccccgccgccgccgggacgcgagccccaatcatcattgatggtacggcgaccgttggccaaaatgtaggtggtggtgtcgtccacgctcatcagaaggcggccatgacgaccatagaggactccagctgcttccgacgaggagccagctgtgtcgacgacgacatggccgtcgtcattcaccatgtcgagcgtcgtcgtcaagcaggctctaccgccgtggcgctattgccgccgccgcagccgtcactgccgcggccgcgtgcaagggcgagcggcggcgcgggcgagcggtcagctccggcggccgccgggaagacgaggatggaccacatcggcttcgacgagctgcgcaagtacttctacatgcccatcaccagggcggccagggagatgaacgtggggctcaccgtgctcaagaagcgctgccgcgagctcggcgtggcgcggtggcctcaccggaagatgaagagcctcaagtccctcatggccaacgtacaggaaatggggaacggcatgtcgccggtggctgtgcagcatgagcttgcggcgctggagacgtactgcgcgctcatggaggagaacccatggatcgagctcacggaccggacgaagaggctgcggcaggcctgcttcaaggagagctacaagcggaggaaggcggccgcaggcaacgctatcgagacggatcacattgtctacagctttggacagcatcgtcgttacaagcagcagctgctgcctccgccaactgcgggtagtaccagtgctgacgaccgccatggccagagcagccgtttcttttgctactga

SEQ ID NO: 38612 - DNA, 534 bp, Zea mays
  Peptide Sequence Number=SeqID_81987
atgggcaggggcaagaggggcaagggatggcctcgccacgccgacggcaagcgcaagcgtcctccaagtccaccctcggaggattttggtgactcagagtactcggaggaagcttcctccgagtatgatcggtcacctgctcccgcatcccacgtggcatcatccaaggactcggacgactccatggggctgtccaccgtggcccgagcgtactggcgctccatcgagcacgccatgctcgatgggtcggacgactcggaggagacctcctcagaggaggtggaggactcctccgacttcgaggagtggagcggcggcaagggtgatggcagcgaggatgacagcagcaacggcaacgacgacggcaagggcgacggcgaagatggcgacaacgagggcaacagtgacggcaagggcgaaggcgactgcaagggcgatggcgatggcaggggcgatggcgacgacaagggcgatgacagcggcaagggcgacgacgacgatggcaaggccggctgcataatgctgctggtttaa

SEQ ID NO: 38613 - DNA, 444 bp, Zea mays
  Peptide Sequence Number=SeqID_81988
atgccgcccgagccgccatcacctgtgcggtcaccgtcagagttgtgtccgaggatagccgagccttcgctagaccagggcttcaatgctactactaagacgacaactgtgcgagttgagataaagatagggtgtaaaataggaagggagaacatgtctccgagcattagtggcaaaggaggaggcgacatgatgtccaaccgcacacctggtgataccctcgtggtgcttttgggtaggacagtgttgctgatcgtagctcaatggttcgtgataggagcacgagagagagacacagagacgggcgattttctgcaggttcgggctgctttgagaggtgtaataccctacttcctggggtggctctgtatgcgtggtgtgttacaagtggtgtctcccgaacggcgaggtgctaatgagatgaaaatgatggggtccccctag

SEQ ID NO: 38614 - DNA, 642 bp, Zea mays
  Peptide Sequence Number=SeqID_81989
atggacggcgcccgagtcctgatcgccgctagtgccaccgccgtctgctgcctcgcctgcgctgtctggatcttccgctcctcttcctcctcgttccccgcatcctcaaataagcaccaaccccctcccgccaacttctgcggctgcgcttcctgcggctgccgtgacgccaagtccgccaacggcgagatggccgtgggcggggagaacaagaagaaggcgccggagcctgctccgccggaggcgccctccatgatggagcagctcgtgcccgagatcaccacccacgcgctcagctacctcgactacaccagcctctgccgtctctccatgaccaactccgccatgcgccgcgcagccgacgacgatggcgcctggaaggcactgtatcacaaggattttacggtggagcagggtactataaatcctcctaatggatggaaggcatactatgcggctacaaaagccattattaaccttaatgcagagttctacaatattatcagggaagggtccttaccagcaatgagccgtttttggcttaatgcggactatgtcaagtgtattcatgcgactggggagttctgcactggagagatactgataggaagccctgctgagcctggttgtgggaaattttga

SEQ ID NO: 38615 - DNA, 1209 bp, Zea mays
  Peptide Sequence Number=SeqID_81990
atggaaggctacgaccgcgagttctaccagttcagcgaccagctgcgcctgcagacggccgccttctcgggcctctccctcggcgactccatctggtcccccgccggccggcgcaacaacagcaacgacgtcctcttcgccgcctccgcgtcgcccgccgacgccgccgccaagagcaacgccgtcgtcgggctcaagctcaacgacggagggcccggcctcatcggctccgggaagctggccttcggcggcggcgccggaggcggcggcaccaacaaggccgaccgctacaacaacaacaacctccccaacaccgacaacaagaccgtgtacaacaccagcagcagcagcttcatgggcaacggcagcagctacgccaagaacaacaacaacaacgccgacatgctggcgttcgacaagatggggagctacggctacaacggcggcggtaataccaacaacaacagcaacggcgtggaggtgaagagctacttcaacaagtccgccgggagggcggcgagcaacaacaacaacaacaacaacagccacgccggcggcggcaacaagaagggcggcgccggggagtacggcaggaagaagcacgccaagagcgagggcgcggcggcggccacggacaagcagcggttcaagacgctgccggcgtcggaggcgctgccgcggggccaggccatcggcgggtacatcttcgtctgcaacaacgacactatggacgagaacctcaggagggagctgttcggtgagcgatattatattattatcttcggcgggtacgatgatgaacaccaccagcagcagcagcatactgattgtttgatgggtggaatggattggaattcaattgatgcagggctgccgtccaggtacagggactctgtgcgtgctatccgcccgggactgcccctcttcctctacaactactccacgcaccagctccacggcatcttcgaggccgcgagcttcggcgggaccaacatcgacccgacggcgtgggaggacaagaagtgccccggcgagtcgcgctttcctgcgcaggtgcgggtggcaacgcggaagatctacgacccgctggaggaggacgccttccgccccatcctgcaccactacgacgggcccaagttccggctcgagctctccgtcaccgaggccctcgccctcctcgacatcttcgccgacaaggacgacgcctga

SEQ ID NO: 38616 - DNA, 537 bp, Zea mays
  Peptide Sequence Number=SeqID_81991
atggaacaggatgctgatcccacaacctcactcctcggtggtggcccagcgagcaccaacctcgaggacgtcataggaggttgtgacgatgtcagagttggcggtcgtctgcttgatgaggatgaagaggaggaggaagatgggttgacaatgtctgccattgaccatgcattagaagaaattatccctaaggaccgtttatcagagactcctgaggttgaaagttctatcgtccgttcagaggtctcggatgatgtccctttggctagtgatcctgtcgggcaagagataacccggacattttctcacgcttcgtcgaccttggaaggtggtctagttcatgaggacacgctggcgcttgacgttgttggtcagagtcactcggctcctttgggtacgaccgagggtgcttcagcttctgagggtgctgctaaggacgatccagcccccgagggtggtgctaaggacgacccaacccccaagggtggtgccgaggacaacccagcccccaaggatgccgggccaggctcctcttag

SEQ ID NO: 38617 - DNA, 330 bp, Zea mays
  Peptide Sequence Number=SeqID_81992
atggtgacaaatttatctactgctctcgtcggtccggtcaccttagaggccagtgacccagatgctgggaatccatcgcctgctgatggagctgaggcttccccgagtgatgctctcaacgttgtccctgtcaataccccatcaacaggcagtgcatcaacgcttccagctctgggacttcctttatttctctctaatctccagaatgtctttgactctgtatctgcccagctaaaatcttgtggcgctcctgtccccgacaaagttttgtctttgatgcagtggaaccctctactgctccagaggcaaatagatgatctgaaggcctaa

SEQ ID NO: 38618 - DNA, 158 bp, Zea mays
  Peptide Sequence Number=SeqID_81993
atggcgtgcttccggaccgatgacgtcgcacgtgacggtcgcgtggaggctcgtggcagcgcggcgctcgagggcgacgacgcgggtgctcggggcggcggctcatcacgacgctcgaggctggcgtcggagcggggatcggggcgaggcctgcggtg

SEQ ID NO: 38619 - DNA, 120 bp, Zea mays
  Peptide Sequence Number=SeqID_81994
atgcccaactggggctcactgcacgacacccaactcaagatagatcgaaggactcaagggcagattgcaaacccttacaaagtgcacactgcgcaggtgcaggggcactcactgagctag

SEQ ID NO: 38620 - DNA, 525 bp, Zea mays
  Peptide Sequence Number=SeqID_81995
atggtgaaggagcaggctggctggccctcggtctctatcttcatcgaagccgctgccacctccctgctctctgtgcccctcgatcgcgcttctgctgatgcccacctctctcttctccttcccatcactctgtgtcctctcccgcacctctacccatggctaccggttccagatctcctcccgttgcgtccgccgcacccgcactacgtggagtcctccgtactagtgccgcaaggaacgccacacgtgcgtgggagagcgaccgacgccaccatcatctgcgcgagggacggtggatatctcggcctcctctcgctgtgtccgtcgcacctgcactgcgcggtggaggctacacgggcggctatcgaacacgacacaagagtgatacccaacagaattaccgagtatcgctcctacccactctaccacttcatgcacgaggagctcggagtcgtgtacctcatcggcgagaagatgtgctttcccgacgaggagattaacaaggtgctcgttgccatcaactag

SEQ ID NO: 38621 - DNA, 378 bp, Zea mays
  Peptide Sequence Number=SeqID_81996
atggctgaggtgaaggtcatgcgggcttgtgctgatggaccgaaagcggtgaagggcgagtgctgggtcttgactgatggatcagagcagccaggacgtggtggagtggaccgtgttgccggcatggtcgaggactggtggggcacgcgtctgatcgtgaaggacgtgcacgaggtgcggtgctcacgacaggtttggtggtttggatctcaaaaccacccagtactacggatggcggtttttgctgagtttgggcctcaaaactcggcggtggtggttccagaagaaatcggtgacggcacgcggcatgatcgcggagggtgcatcaaggtgaagcaactccgtgtgaaggacgtggtcgtcggatcgaaaacctag

SEQ ID NO: 38622 - DNA, 276 bp, Zea mays
  Peptide Sequence Number=SeqID_81997
atggacccttgtcgatggtgttcgcttgtgcgtgaggaagctgtcgctcgtgtcaccgtgggaaataccgccccattcccgatgaactattcgtcggagttctcggaccaccgccaaaccgcctcccgccatgatcggtggtctccgcgacgtgatctctgcgcttgctatagaaaggtagcatgcactggtactcggttggcggagcgcctgcggtcacgccaccgcatcctgctcactcgccaccgcgcgggcactgccggaggtagaaaatga

SEQ ID NO: 38623 - DNA, 1026 bp, Zea mays
  Peptide Sequence Number=SeqID_81998
atggctcgtatcaggtgcactgcacgtaagtctgtgatcccctttttgccttctcgcctggcggagcgtccactgcgtcgtacggtgccaggtcagtccagtcagctggagagactgcatcgtcgcctgcacaaggagcaggagcgccgacgccaggagcaggagcaggagcagcatgactcttccccctcacctcagcaggaggtggagtctgagaggccgccttcccctgcagctcagccaaagatggcccctgcaccaccacagggcatcccggctgctggaggagaccctgacgaagacggagacgacgatgacgccggtggcagttcgggccacgacacggagctctcggaggagccggagccggagggatggatcgctagacccatcactcgtgacgccactcgcgggtgtcacttccacgacgctctcgataccctattgcgttgggccttcgatcgacacacttggtccatcgagtactgttgtgtagtcttccagcatcgtcgcgggctatgcccggaccagtgggaggctacttgcttggtgcgccatctggacgatgatgtccggggtgcagaggccttctcagagcactattctattactgagagggatactgccgaggcaaccatgcaagatgcagcacgacgagcgctttctcagtattgctcgttgttcagcggggtagctgatggtcttgtcctggagtactaccctcgccgttcaaccagcagtgctggaggtgtgatttcttcgccagttggtgagggcaatcccaggctgaacatcatggtcaacttggctgtcatgctcaacacagagttggaccacgcccttgatgagttgggcaaggttcgggcggaggttgcggaattgtgtgctgagtgcgcagcacgccactatctggatggtggttctcccgcccctgtcgggattcagcacccttaccgttcatcgccccgtggtcgcttcgactatggtaccccagactataggacccggatagatttggatccctag

SEQ ID NO: 38624 - DNA, 291 bp, Zea mays
  Peptide Sequence Number=SeqID_81999
atggagcctggcggagggacagctgtcggagcggttgagtccttgctgacgtcctcttgcttccgcggtgctagccagatgggacgccagtcttgttccctgcggcccgagttagctcggggtagggtgatgatggcgcctcctgttgacgtggctggcctgcgccctaggttgggcgatgtggaagctcctccgaagccgaggtcgagtctgtcttccgtggccgaggtcgagtccgagcccctgggtcgggcgaggtggaggtcgtcggctgaggccagggcggagtga

SEQ ID NO: 38625 - DNA, 489 bp, Zea mays
  Peptide Sequence Number=SeqID_82000
atgcagattattgaaagaaagtgcgaggctcaaaaggggaaaaaaacactcgataaactcaccgatcaacctggaaatctgataccaattgatgtagctgaggtgcccgatctttcggcgagtagagataattccgatttggcggaagatgacccttgcgatccgactacgacgagcaagcccgaggcgccaatgcaatcgctgaaccaactccctatgttcaattctcttgcacgggcccgagtcactggcccaggtggaaggggtggcgcctggactggggaagatggtgcctgggctggagaaggtgctgctggtgtagatgtgctcgtgttggtgttgatgtcctcatcatctgacaggcagtcaggctcggccgaaggcaccataggaagctccgcttcgcccgacccagggctcggactcgggctaagtcccggaagacggcgaactctgctccgcccgacccagggctcggactcgggctaa

SEQ ID NO: 38626 - DNA, 246 bp, Zea mays
  Peptide Sequence Number=SeqID_82001
atgcagattattgaaagaaagtgcgaggctcaaaagggtgctgggataagaaggcgcccgggggctacacgcacctgctggtctgatgaagctgaggtgcccgatctttcggcgagtagagataattccgatttggcggaagatgacccttgcgatccgactacgacgagcaagcccgaggcgccaatgcaatcgctgaaccaactccctgtggttaccgaccttgcggatgcgagatcggcctga

SEQ ID NO: 38627 - DNA, 171 bp, Zea mays
  Peptide Sequence Number=SeqID_82002
atggagaaggcgtggccctgcagctccggcttccgaggggaggagcgatggagaattggcagccaccatgggccgaacttgagggaggcgctagaagtggcccgagagagggaggaaggcagggaagcctgcctaatggccgacaccggagggagcagtggaggagaataa

SEQ ID NO: 38628 - DNA, 444 bp, Zea mays
  Peptide Sequence Number=SeqID_82003
atggtgtggcgccttgagcgacaggtacaccgtctcctgataactacgatttggggtggaggtcgacgttgtgctatccgaatacaacaaccacaagggtgctgcgccttagcgatagttacaccggctcctgttgttgctgctcttgccgtgccaagaacaaccttgaacctgcaagcaatcgagaacaagcaagaacaagataacaagcaaacacgcacggatctgataaagttggggtcctgtttcaaggggtcgctggtgtggtgtattgatggcagtgatgtcctcatcatgaagatgacttggggcgaagaaactctgggcgagcaggaacatggcaaaatggatctcggcctagagctgcacggcgtgggggagaaagagcagagggcaccgagctggagaccagaaggcacaacaggggagttcgataagggctga

SEQ ID NO: 38629 - DNA, 252 bp, Zea mays
  Peptide Sequence Number=SeqID_82004
atggatgatgttggtgaagaacgccaccgcctgctcggacctgatgctgttcagaggtcggacctcgatccacttggagaatttgtcgatggcgaccatgatgcggacatcaacaccaacacaagcacatctacaccagcagcaccttctccagcccaggcgccaccccttccacctgggccagtgactcgggcccgtgcaagagaattgaactacatcatgttgttaaagaacgaaggcccggaagaatag

SEQ ID NO: 38630 - DNA, 321 bp, Zea mays
  Peptide Sequence Number=SeqID_82005
atgccaaaaaggaagttctctgaaaagcgtgcgagaactttgatgaatttttttctttattttcctgaattttttgacaattttgtcgaaccccaaacagaccgtaggaaaaaaacgctcgataaactcaccgatcaacctggaaatctgataccaattgatgtagctgaggtgcccgatctttcggcgagtagagataattccgatttggcggaagatgacccttgcgatccgactacgacgagcatgcccgaggcgccaatgcaatcgttgaaccaactccctgtggttaccgaccttgctgatgcgagatcggcctga

SEQ ID NO: 38631 - DNA, 957 bp, Zea mays
  Peptide Sequence Number=SeqID_82006
gttcaaggttgttcttggcacggcaagagcagcaacaacaggagccggtgagacggtgtacctgtcgctcaaggcgccacaccatcttggttgtgcgcccccaatgctccacgtcactcgacctcaaccaccgatgccgggaccgaccatcgccctgggcctcgccgacgaagccctgtgtgcgcttaccctcaaccccgccattgctaggtgcagtggccgagttccctcccctttggtcggatcctcgtcggccatcgccctcaggctgcacgccgtggcctcctcgtggtcaggcagggagcagccgctcacctccactgctccctccggtgttgttcatcaggcaggcttccctaccttcctccctctcccggccccttctagcgcctccctcaagtccggccatggtggctgccagttcaacatcgctgctcctctcagacgccggagctctagggccgtgccttctccatggccggccagcaacgtcgatggccgagctcccctacgcttccctctcccatggcgtggttgtccccatggagaagctcaagccctcaccagctcagcccccgtcgaactccactgttgtgccttctggtctccaggtcgacgccctctgctctttctcccccacgccgtccagctccaggccgagatccatttcgccctgttcctgcttgcccagagtttctttgccctaagtcatcttcttcccctgctcggccctccctatgcagcgcccccacaatgctccacggcgctcgacctcaaccaccaatgccgggcccgaccatcgcccttggccaggccgacaaagccctattaccctcgaccccgccatggctgggtgcagcggccgagctccctcccctttggctggatcctcatcggccatttccctcaggctgcacgctatggcctccccgtggtcagggtctgcagcaggaagtc

SEQ ID NO: 38632 - DNA, 354 bp, Zea mays
  Peptide Sequence Number=SeqID_82007
atggcgggaggaggaggggggcgcggcgaatcctcgccggcgatcaagccaattagtaaggcggtagtgcaccgcatctgctctggccaggtcatcttcgacctttcctccgccgtcaaggagctcgtcgagaacagcctcgacgctggcgctacctccgtcgaggtcagcctcaaggcctacggcgaggagtggttcaaggtcgccgacaacggatgcggtatatctccctccaacttccgggtgagggcggcagctgctccaatgcgtggatccaccaatttcccccattttgctgttgtagacgttgccaccaaggcccgtttattcgctaaccatgttgctggcacttaa

SEQ ID NO: 38633 - DNA, 252 bp, Zea mays
  Peptide Sequence Number=SeqID_82008
atggcacggtatcctcggattaaagttggcattgcagtagaccagaataatacgaaggttggtacggagccgaagcacttgagaacaagtccccaacattggcgcccacctccggtgaactcacttccatttcttgagcttttcaacaccttcggcaagcatcaccttcgtcatgccgccgaagaaggcttcagctgtaggggctggcacgctgcagccactggaccccaatcaagacgtcctttctcttag

SEQ ID NO: 38634 - DNA, 621 bp, Zea mays
  Peptide Sequence Number=SeqID_82009
atgaccgccatcgcagcaaaatcatcccaagggcctctctacactgaccactcccctactgcccttgcccctttcgggaaagcatctgtagccgcacagatcaagatcaacggcctaggttccatcaacccgaaccgcgcgcagatcaacggccccgaacccatcaccttcaccccgcccacgctgacggcggcgccgcccctaccgcggttgaccacccaccggagccacgtggtccgaccgatctgggctcccactacgtcaatagaaggtcctacgcacaattcggacgacggcgaaacagacaagggactcaccgtaggcagagatggcacctaccacacaccgatcaagctcggcaaccgagcaacaatggcggcagcaagtctcacctggttcgcgacgtgggatgagaggagggatgcgacacggttttataacttgggcaaaagggagccgagcccgggcagttctgcgttcgttgcggaggagaagatattacaggcgttgaggataggagacatggctgaggatctgggtccactgtcattgacacatgcgacaagagcgttcttgtggcgccagttggggccacgcggcttggctggagcggggtggtga

SEQ ID NO: 38635 - DNA, 2493 bp, Zea mays
  Peptide Sequence Number=SeqID_82010
atgccgtcctcttcttcttccgctgccactacgccgccggccgccgcctcgtctgaggagacgttgagtagcttgatggtggaggagttgcgcgctggtgactctgttgattttggtgtgtcgcggatgacgtcagcctgcgttgaagatatgcagcggttgggctactttggcggcggagttgctcgtgctccggggacggaggaagtccccgagccggaggtggcggaggaggatgcagacgaaggggcccttcggtgcgccgccggtcagagcagtgggcgtgatttagttgaagagttcgtggcgtacggggtgtggcccttggcgcatggctgggcgttgggcgaagtgtgccctcgccagatgccctttcacggaggaagggaggtgcgaagtcctgccttcgcactgaatctgcgaaaccgcgacccggtcgcctttgtgcgcgatgcggaggacggggcggtgcggctcgtggggcgttacgtgctgaggacggaaggccagcgcagctttgatattcgcgggtcaaatgaccgtttgaacagggtcttcgaattaaatcaattgccgtacgacggctatcctggtcaagacgaagcggaccgccgtgggaagaaaccggcggtggagactggagacgaccctgcgccggcggccgccccttcctcaaaaaagagaaaattaggtactgcgatgggaggacttggggtgtctgatagttttgctagagagttaatgaggacgtgtgcggtcccgggggaaaggatgtcttcgcccgagctccgggagtcttcggctcggatgctgagggttaccgggggttgctggcctaggaatgttcctatcccctgcgcggctgacgaggactgttttacatctcgtatggttcgtcagtggagagtttttccttacgggcggaatatcggtgctgttgtgtgggcagtgatggacaaggatcgccaaggggcggcgcaaaaacgccaggcaactgtcaggctgcatgaagctaggccgaagcggcagcggggggctgcgaaggctgcggcccccggcagaggcaagccgccgctggcggcgaaggcgggcgcctctgcacctagcaaggcgccggaggcaacggcgggtgccggaggctccaagtcaacgaaggtggtgccgccggccagcggagtggcggaggcttcgaaggcggcccgagcgttgccgttgtcgggcaaacgtgttgccgacttcggcaccgatattactgtggacgactatcttggtgggtcggacgagggccagcttgctatagttgcgcctggcgcggcgatcgcgacggctgccatagtgccgagggcgaggggcgaggctcttggcgccggaggcgaggtgtcagccctcgcggtggtcagggacgaggcgggcgtcgcgacccgccggctgaagggagtgacggaggcgctgagtcaggcgacggaggcgctgagtcaggtggctgacttcaccagccgtactgcgtcgggggcccttacagcagctttgtctgtcgaagtcgagagacttcggacgcaacatgctgacggtgtccgtgaaaaatcggcctccgacagcaagtgtcgtaaactggtggacaaggtggtcgccctggagaaggagaaggccgacctccggcgccagctggcgggggagaggagagaggccaacgaagccatcgccaaagagcaggctgcgcaggcggaggccaagctggcgcgggcggaaggcaatattgccaaggagctcgccggacatctgcaggagcggctcaccgccctggagagccgcgcgaagggggccgaggccgcgatgcgtgcggaggccgaacggacgcgcacacagcttatggatacatatcgtgagctgggaggagctgcaggaactccccgctgtcatggggggtttatgtcgtacgcctccctggtcacctgcgagggggcggtgaacgcactctcccgcgaagggtgccggcatttcgaggtcttcgaccaggcagatgaagattttgagcgagatgtctataaggtcgaagaccccgttgtgaaggaatccgtcggggccctctacgaccggatgtggggtccgcacggtcgtgaggtggtcagggagcgggccgagattgcgagggctcaggcggcgcgcggcgagcgggtggacgacttcggggctctgaacagcgcgctgccagacccggagccgacccttgcggaggctgtgactggggtcgccctggagcaaaccccggagaccgcagcgatcgcgacggctgcccccacatccgctgcggccggcgaagacctgcccccgaaggtggccgaaggcgcccctgatgcccccgcagctgctgtgccgagtgcggaagatcccgcggcggtggcggcggaaacacggcggaggcagcggcggagcccaacggcggagccaacggcggaggctcccgcagcgtcagagctttcgcaggtggcgtag

SEQ ID NO: 38636 - DNA, 171 bp, Zea mays
  Peptide Sequence Number=SeqID_82011
atggcgcggcgcgaccccgccccggccccctgcgcggcggcgctcgcctccgcctcggcccccggcgcggtgctcgcccctgcccctccccttccccctagcgcggtgctcgcccccgcccctgcttcccccgtggcggcgcagtggctcgcccctgcccctcacgcggcg

SEQ ID NO: 38637 - DNA, 213 bp, Zea mays
  Peptide Sequence Number=SeqID_82012
gcttattttcgtgggtttttggcccacgaaaggactccaccgaagaaggccggcgacaagcaaaaggagcacaatgaggaatctgccggctccatcaagtcacataggaagggtgacaagaagaaaaagaagatgaagaaggtggtctactacgagactgattcttcctcaccttccacctccggcgccgagtccacatctttgaagcactaa

SEQ ID NO: 38638 - DNA, 384 bp, Zea mays
  Peptide Sequence Number=SeqID_82013
atgggagaggaaagccaaatcgtgagcacaagcacaaacctcacacccaagagctcctccaacaaggttgaatctcgaggaagatttaagtgcgggtcagacaggtcaggaccggttgaaccgccccctagggcggttgaaccgccccttgacacccctggtgacctgactgccagtctgactggcagactgcagatcagaagtcagaggggtcagagaccagttgagctgcccctccaggaccagttcagctggtctagaccagagagttttggagagaaaaccccagctcagctgcccgggggcaagttcagctgggtatggtcaaagaggtccacagctgaagttgaagttcagctggagttgaaagttcaactcagttga

SEQ ID NO: 38639 - DNA, 312 bp, Zea mays
  Peptide Sequence Number=SeqID_82014
atgtcctactcaacggcaagcacggagaaaggccaggagcacgaccgactcgccccgtacccgcgtcaacgtcgactcacggctgcgaccgtgggcatggggcagcagattggggtggaagaacaaggcgaaggcagggaagacgaatgggacgttcgacgacggcaaaaacgatggtgcgcgcatgatgtgaaacgtcctcgtggacgtgctatagccaccgcacgagtcggtgtcggacgaatatgggtaggaggcgcctgcttctacgccctttgccgagaatggggtggcgcggaggtggaggcatga

SEQ ID NO: 38640 - DNA, 987 bp, Zea mays
  Peptide Sequence Number=SeqID_82015
atgaggaagccgacccgacgacgaggaacctcagcgaaaggcagctccggcggcggtatcagtaaggcggcaacactgccggcgaagcagatggtcttgtccggctaccgtggcaccgtagacgcgtttgactgcctccccgacgacctcgtgctcgccgtgttagccggcatcgcggcgcgcgcccggtgccccgccgacctcgctgcggcggcgctaccgtgcaggaggttccgggacctcgcggcgcaccccgccgtgctgtcgcgtgcgtcggcggcggccgtcgccgtgcccgcgggaaggtggtcggatgcggcgcaccggttcttgcggcggtgcgcggcctccggcaacctccacgcctgctacctactcggcatggtgctgttctactgtatcgggggcagagcgacgggggcggcgctactggcgcgctcggcggcgggcgggcacgcggcggcgctgtacgcgctcgccgtggtgcagttcaacggcagtggcggcgacaaggcggacaaggacccccgcgcgggcgtggcgctgtgcgcgcgggccgcgtggctcggccacgtccctgcgctccgcgagctcggccactgcctccaggacggctacggcgcgcgccgcgccgccgcaaccggacgctacttcctgctccacgccgccgcacgcgagctcgtctcctcgcactgccgaaacggcgaagacgacgctgccagcaggttcatggtggagtggtgggcgctgccctccaagacaggagcacaaggcgacggcaacgacgccgacgccgacgcgcgcctgtgctcgcacccgcggtgcgggcggcgggagacgcggcggcacgagttccgtcagtgctcggcgtgcgggtccgccatctactgctcgcgcgcgtgccaggcgctccattggaagcgcgcgcaccgtagccagtgcgcggccgctgctagccggtggctcgccgccgggaacgcgcagtga

SEQ ID NO: 38641 - DNA, 432 bp, Zea mays
  Peptide Sequence Number=SeqID_82016
atggcgagctcgccggtgctcgccgtctcccccaccccctccctcccccgagcgcctataaaaggacccgcccgagccccgtcttctccacacaactccagccatccccactgccctcctccccgagctgttcaagcaagcgccgccgtgcccctgccttgctccgcggaagagggatccgatcctccggaactcttagctccggaagaagggcaggaacccgacccctccgagattaacctcttgtgccaggaaagcttcgacgaaggcaagtccatccttcccttgatgcattatttacctatttctctctaccactgcctaagcctggattatgggatgggaatcgaattgcatggtaagcatgagagagtcgcattaactattacttcgattaaaagatatgggacaagtaaaaaggggtataagtga

SEQ ID NO: 38642 - DNA, 735 bp, Zea mays
  Peptide Sequence Number=SeqID_82017
atggggagcgcccgcgttgccttcgtcctgtcgtcgttggaggaacgcaacttcgcagaagttggtacctttcggccatcgttcggctttaaggattttcatcaggcggcccggctgcatcccctcaccgatggtcacccaaagacggtgaccaccagtttgatggtggggagaagcaagccgggctgcggcctctgccccgccctcagcttcaaggatgttcatcatcagtgctggggaggggacggcccgctccttccctcagtgatggggggagggcgttcgccgttcgaggcgttggcagctgccgcgtgtctggctctccggcctgagcggctccggcgctgcttccggtcatccggtgccacctcccaccaaggcagccggaagaggtttttctgtcgacgagatagtcggtgccacccgcggactgacctccggctctacggccttggtagcttgtcctcgcccttcgagtggaggtgtgggcgagggccttatcgcagcagcgtctgccctgaggtcatcgctgctgctgtttggccgcccggagcggaggtcgtcgtcgctgctgccggagcgggcgtcggcgagccacctggggttttgtcgtcccgcaggccctccaatgtggggggttgttcgtacctgcgagggcggaactggagttccgtttgtaacggcaccttgagtgccggtgtctgttcattgcggctgtcggggcctgaacatctg

SEQ ID NO: 38643 - DNA, 891 bp, Zea mays
  Peptide Sequence Number=SeqID_82018
atgcaggcggcatgcaactgcaccaagggggcgcaccctttcgacttcgatgcatccagcatgggggcccaggcccacacgtcatgtaaccggcgcgccggttactacgtgcaagaaactgcactgccacttgcgccagtaccgcgccttctcgactgcggaaccggtgccgcgactcgaggcaaccctgcgcacggcccaacagtaccaaccgagcacatcggtcacgggtcagtcagccgcgggagaatatgcgacggtcgatatggccaaaagtgggccggcagtaatggcggcggcaggcgggcggaagcagcagtcaagtcgtctgacatgcgacacctttggcaggcgaagcaggcgacgcttcacctccgccgtaatgaccgcgtcaaaaaagggaccgggaaaggtgatactccgaaagggatccttctccacgaaggaagcgggtcccgagccctcctactgatcagaggttcgaaggctggcccctcggaagggttcgacagccgcctcagagcactcgggctccgcgcccactactggtcagaggttcgaaggctggcccctcgaaggggttcgacagccgcctcagaccactcgggctctgtgcccactactgatcaagggttcgtaggctggcccccgaagggttcgacagccgcctcagagcacgcagagcgagggatgactctgggtacgtccgatacatggccgaggctcgagctacgctcccgaggtaccctaggacatttccgagaccagcaggagcgattctgtaatggagtcccatcagagggaggcatcgagccctcggaccctatcgaacggaaccgggtccggcaaatcacctgcaggtacttttggagcgcgcctctgggatactag

SEQ ID NO: 38644 - DNA, 297 bp, Zea mays
  Peptide Sequence Number=SeqID_82019
atggcttcggctgaatgcctgaatcgggccgggaagcacgaagcagacagacgtgcactttccaatgcagttagacagagaaggcatggctgtgatgttataatgctgaaggaccccaagaagagattatggcttgtcgtttaccacgacagcccattatttgtgggcttcatcgagggctggaaacatttggtggcagcaaacgaccttcgggctggggacgtctgcgagcttgttaatgggccagacgatggtgagccggtgtactctgtccggatgtgtggtcacaaaacttaa

SEQ ID NO: 38645 - DNA, 823 bp, Zea mays
  Peptide Sequence Number=SeqID_82020
ccacttggagagactgcaccaccgcctgcgtgaggagcaggaacgtcgacgacaggagcagcagagctcttccctctcgctccaccaggagatagagtctgtgaggagctgctcccctgtgcttcctctggagccgccccctgcaccaccactgggcgccccagcttctggagtagctgctggaggagacccagacgacggagatggcgacgacagctcgagccacgacaccgacttctctgctaaccctgagccgggaaggatgggttgctcgacccatcactcgcgacgctgctcgcggcatagtcgcggggtctacccggaccgctgggaggcgacttgcttggtgcgctgcccggaggacagtctccagggtgcagaggcctgttcagagcactattctatctctgagcgggactcagctgaggcagccatgcaagatgctgcacggcgtgcgctttcgcactactgctcggttttcggtggggcagctgacggtcttgacctgaagtattacccccgccgttcatctggcagcacaggaggcgtgattgtctcacccgtcggtgagggcaatcctaggttgagcagcacagtcaacctagccgccgtgctaaacacggagctggaccatgcattagacgagctgagtagggctcgtgctgagatcgccctgctgcgggctgagcgcgcggaacgtcgttttctggacggtggttcccccgctcccgttgggactcagcacccgtaccgctcacctcagcgtggacaccagtcttatggcaatcccgcctgcaagaccaagataaacctagaaccatag

SEQ ID NO: 38646 - DNA, 740 bp, Zea mays
  Peptide Sequence Number=SeqID_82021
gttccgacggcgtgccgtcgggatcaacaccacccaccacctccatcgttgccacatctattgatgtgacggctgtcgccactggtccaatctcccaggcgaacttcatggcattccaacagctgttggtgcagcagttcgccgccctcaccgtttccatcaatgacatgtctagcagtacaccgcctccagcttctgccaccaccagtgtagctgctttaacctatggcatgttgggctatggtggcatagccccccttcccaccaccatcgcacactaccaccaccatcgttcccttcccatctaccacaacacctcttccatcgtcgatctccaccttggtgccaccagcgtcaagcatgctcctacaggcgatggcacgctgtctcctagcgtgccagcaaggacagcaccccatcttcaagcagtgacgcccggtcatcccagcaaccttgcagtagctcgcggagaggaaggcgattgcacgagcaagtggctgcaagccttggtggcggttgacatcggcacatgggggcgcgacctcgtcctatcggatggccatcagcaatcgcgtcgacccactgtctccaagtgcaagcatgcgagggcgcactgcctatcaccaccacattctgctaccggctgccacgggggagtctccgctggtcattggtgcgacccattccaggtggccatccacgtgctcccctttcgtccagatggcgttcatgggacctag

SEQ ID NO: 38647 - DNA, 459 bp, Zea mays
  Peptide Sequence Number=SeqID_82022
atgggcaagaacaacaagcgcaagcgtgagccgactcctccatcggaggagtttggtgattcagagtactcggaggaggagttctcctccgagcccgaggggtctccggctcccgtctctcccccggcgtcgtccgatgactcggacgactcccagggggatagccgcggaggctcggatgagtcggagtactcctcggatgaggaggactcggacggcggcgacgagggtgaagacgacgacgacgacgacgacgatgatgacgacgacggcgacggcagcggcagaggcggcggcgacggcagggacagcaccaagggcagcagcaggggcagcaccaagggcagcagcaggggcagcaccaagggcagcagcggcggcagcggggacagcaccaggggcagcagcaggggcagcaccaagggcggcggcggcggcaggggcagggccagtggctag

SEQ ID NO: 38648 - DNA, 951 bp, Zea mays
  Peptide Sequence Number=SeqID_82023
atgtctccacgggagctccgggctcgtacttacaggggtccagtgttcctctgcggaggaggtgtcgtacgggtgcaacgccttcatactgtaggagagggtacccctgattcagggtaccgacagtggcccctgggcccgcctcagaggaggattctgtatgacatgtggggcctggcccccgtgtcaaaaggtgggaaccttggtctcgatcgcaacctccggccggtggtcatccacaaggatgactaccagccttgtggtggagagaagcgagccgggctgcagcctcccctgccctcagcttcaaggatgttcatcatccgcgctggggaggagggaggcaaacttcggctacgcggggtcgaccgtctgaggcgccgtcagctgccgcgtgtctggctcctcggcctgggtggctttggtgccgcctccggcgctgcctcctgccgcttggacggggcgtggctgttcgtccaccgcacgggcgacagtcgtgccgtgcgcagtgaggacgggagcgaggacctcttcgcgcgtgctaggtcggctgccgttcgccggtacggcactggtgcgcaggtagtcgctgtcgtcgatgctgaggtggtcgccgttgctgaggtggccgccaccgtcggtgctgatgtggtcgcccccgctagcgagccgcccggagccagctatcccgcggcccttactggtgtggaggtagttcatacctgcagagtagaaatggaactagacttccacttgaaaacagatgtaatactttcgctttttgtaaggcttgatgtgttgaggttggataccagcgtttctgaaaaggttgtcaacaatcctcgggaggcaaactcgctgggatctggacctggcggtggagcgtgcaggcccacggtacgggaccaggctgagcggctgcatgggctctggaccaccccaggagactaa

SEQ ID NO: 38649 - DNA, 531 bp, Zea mays
  Peptide Sequence Number=SeqID_82024
atggctgttcgattgttggccattaacgagtcacatatgttgaaagatgaaatgataaaggataaaaaacattatatggacatgcacttctggagaatggttggttttggtaaacttccaaagtaccatcaggatcctacattagaagagttagccaaaacacttggctgttggccttcattgaactattatatcactggttgtaaatatgttcttatgccatggaaattcaacggatgctactcacttttcgtaatcgatcatggtaaaaagcacgtaacttttatagactttacacccactcaagattggtgtaaacacatgccatacaagagggttaatactagctacttcgttctacaagctatggtcatgtgggggagtgctagacgaatggaatttgatagggatgcaaagattcttcgaaggaactttgtaattgatctattaagctacgaggataattcatgccgctatgccatccctccaaacatacaacaacgacttatcaatattgctagaaaagattag

SEQ ID NO: 38650 - DNA, 978 bp, Zea mays
  Peptide Sequence Number=SeqID_82025
atggaagagctacagaaagacagtgcgctaccatcaaatagctctgattctgagccagaagctatggaattggatgacaatggagcaggaaaatcccatagcatcgagggaaacagggattctcctatagacactgatgaaggccagccatctatggatgttgatattaagggaaaatcatctctcaacgatgatgttaatggaaagtcttcttctgagccattttccaatcctccaatcaacatgagtgtggaaagcctagagaagttttgcaaagaagcgtcgaggtccttctttgatgaagttggtctgattagccatcagataaattcctacaatgagtttgtctcgcatgggctccaggagctttttgattcgctgggtgaagtgattgttgaacctggctatgatccttcaaagaaaggatcaggtagctggaagcatgcaatcatcaagtttgggagagtgaagcttgaaaagcctgtgttttggactggcaaagatgaggtttctgttgattttaaaccttggcatgctcgtctccagaatatgacatatgcttcaagacttagagtagaagtgactattcaggtttattctttggagaaaagtgacaaatctaaaacagggaatgatggtggatactttttggtcaagggaatggagaagtggggagcaaagaaatcaagcaataatagagtagatcgagaagtgagaacagggaagggaatgaactcaggagttggagggtcgctggatcgacatcgcgggggtgaagactcgtcactggcagtccgtgcgcaggacgaggcgtgcattaccgcacgagtttccgggaggcggcatgagggtgcgagagttccagcatcgggggctatggtgtcatgggcagagggagataccattgcttcttgttgggctaggcttaggctgtatccaactggcatacttatcggcgcacacaatcaaaatttgtga

SEQ ID NO: 38651 - DNA, 1785 bp, Zea mays
  Peptide Sequence Number=SeqID_82026
atgccgctcccgatcccctgcccccgccatcccctacctctcgatcccctgcctcccgcggatcccgcgcgcgcccggccgcccacccccaccccgtcgcgattccccgccctacgcgcgcggatcacgcgcaggtcgcgcacgcccgcccgcccacccccaccacgccttgattcccaccgcgaatccagccgccatgccgctccctacgcgcgcgggtaccgcccgcacatcccgccgcccatgccacgacctctccgcaaacagcccccgcaaacgcccgcacgcccgcgcgctattcgccccgagctatccgccaaccacagacacggatatgcaaacatgatctccattcaagcctcaaacaaccgcccgcatcaatccgccgtcatcttatctgttgttgacaccagtaatggcagtgtgttctttgtggatgggcctggtgggactggaaagacttatctgtataaggcattgcttgcggtgctacgtagtcaggacaagattgcagttgcaacagctacaactggggttgcagctttcataatgcctggtgggagaactgcccattcacgcttcaaggtaccacttactattgatgatggtgctatatgtacctttacgaaacaaagtgggacatcaaagttgctacagaaagcgtcgctcattatttgggacaagacatcaatggctaagagacaatcaattgaagcgttggacaacatcatgcgtgatatcatgggacgccctggtctgccctttggtgggaagactattgtgtttgggggagatttcagacaagtactccctgttgtacgtaaggggtcaagggctcagatagttgctgcctctctacgaagttcgtacctatgggaatcaatgtgccacctaaagcttgttcgcaacatgagagcaaagagcgacccatggtttgtagaatatttgttgtgtgtcggtggtggaactgaggaagtgaacaacgatggtgatgttcgtcttccagatgaggtatgtgtgccatataccggtgatgaccgcgaccttgacagaatgatagatgacatttaccccagtctaaacgaaaacatgtctaatacaagctacatcacttcaagagcaatattgactactcggaacgacggagtgaatatgataaatatgaggatgatcgatcgtttccaacgggagcagatgatgtaccatagctttgacaccgcggtggacgatcctaataactattatccaacggaattcctaaacacgctgactcctaatggactacccccgcacgttctgaagctcaaaattgggtgcccaatcatgttgcttaggaatatagaccctgctaacggactttgcaacggtacacggctggtggtacgtggtttccaaaaaaatagtatcgatgctgaaactgtccttggtcagcatgctggaatgcgggttttcttgcctcgtatacccctgtgcccttctgatgacgagatgttccctttccattttaaaaggaagcagtttccggtaagactaagtttctccatgactgttaacaagtctcagggacagacgattcctaatgttgctgtgtacttggccgaaccagtattctctcatggccagctatatgttgctctctcaagggccacaactcgattgaatgtgaaggtacttgtaattccagtcactgatgataaaatgaagaagggggtggaaaagaagtcaacaataaatggcgtaacatacacaaagaatatcgtctataaggaggtccttacgccgtag

SEQ ID NO: 38652 - DNA, 96 bp, Zea mays
  Peptide Sequence Number=SeqID_82027
atgggcgtgcctgactttctgtgcgcgctggcgtgcattcaatgcgctgcaggcgaagttcctgaaggcgcccgttctttggagacaccggaacag

SEQ ID NO: 38653 - DNA, 264 bp, Zea mays
  Peptide Sequence Number=SeqID_82028
atgctggccttttcatttccgggccaatccaaaggccgaagccgtcctggatcaatcaaccaaaaccctagaaggcccacggccaccgtggcaccgtgccgcctccccaacctcagcgactccggcggtggtcgagtcgagcccgctagaaatctttctgcttcggttctctgcttgcagcggatgcctaggtggctagggcctttctgcatatttttgcatcttgcaatatgcaagatgatggacagctctttgcaagtctag

SEQ ID NO: 38654 - DNA, 423 bp, Zea mays
  Peptide Sequence Number=SeqID_82029
atggcacagttgaacacgttctgcgcacgacacttcgccaccaaatccgtgctccgaggctcaacggagacggaggagtggtctcctcggatgtggctctctctctctcctaacggaggcttgggtttacggctacggcgcaaaaagggtcaacgagtggagagcagggggcgcaacttatgtgggaggggagccgggcaggacccaacaacggatgccgggattctcggcacgctctcgccaggagcggcgaagtcgttggacaacacgactgacgcgtgggtcgtgggggagacacggtcatgtgggggcctgggaccacttctgtcatttgttgtagcacaagcattcgggcggaaaccactggatcggttccaaccggtggaggatctggaggattcatttttgtttgcttttgcttga

SEQ ID NO: 38655 - DNA, 210 bp, Zea mays
  Peptide Sequence Number=SeqID_82030
atgagcaaagagctagaagaagttcgaacacttttggagaagaactcggatcgcttcaatcgcgtgtctgaagcgctgaacgtgagaattaaagcagaagttggaaagaatgtcaagctgagtgaaacaggtatcttcaattctgttggagccgtgtctaaagaagttgtcgaagatattcccagagctcttgaatgtgttgaaaaataa

SEQ ID NO: 38656 - DNA, 453 bp, Zea mays
  Peptide Sequence Number=SeqID_82031
atgctggtagactacacaatggtactcgatggaccaagtgtgtcggtcgaaggtccgacacaacagggtgttgagagcgtcgtggaagtgacacccgcgagcggcgtcatgagtgatgggtctagtgatccatccctccggctctggctcctccgagagctccgtgccatggctcgaactgccaccggcggcgtcgtcgtctccgactccgtcaggggggcatctctagctgaggtgcaggggaaggcggcctctcagactctatctcctgctgaggcaagggggaagagtcctgctgctcctgctcgtggtgttggcgctgctgctcctcgtgtaggcgatgatgcagtctctgcaggtgactggactgacctggcactgtgcgacgcagtggacgcttcgccaggcgagaaggcaaaaatgggatcacaaacttacgtgcagtgcacctga

SEQ ID NO: 38657 - DNA, 447 bp, Zea mays
  Peptide Sequence Number=SeqID_82032
atgggcaagaacaacaagcgcaagcgtgagccaactcctccatcggaggattttggtgactcggagtactcagaggaggagttctcctctaagtctgaggggtcttcggctcccatccccctgcgtgagtcatctaacgactcagacgactcccaggggctcgcggcggaggtctggacgtacatccgggccgtcgagcgctccaggctcgagggctcggatgagtcggagtactcctcggatgaggaggactcggacggcggcggcgaggacgaggacgacgacgacgacgaaggcagtggcgacggtgatggcagcggcaagggcggtggcggcggcagcaaggacggtgatggcggcagcagcaggggcagcaaccggggcggcagcagcaggggcagcaccaggggcggcagcggcggcggcagcaacagggccagtggctag

SEQ ID NO: 38658 - DNA, 690 bp, Zea mays
  Peptide Sequence Number=SeqID_82033
atggccatgatgggttcaacatcggaaaagatgtacctctgccagttatgtaatcgcttccgcatttctttatctccgatgatctgtaatgtctgcaagacgggtgaaacgttcctggaaaggagaacagcgcgcaaacacactggaccgattggtgtgccgagtcaccagctggccccaaggcatgaaaatagtagtagcggaagcaatgatcctataggggatcttgaagctgaagtaagtcggctccaagcggaactccgccgcaggacggctatctgggtcgtagatggcgaccgcataaatgagttgagaagagatgttcgccatctgcgagatcagctcgcggaccgggaattggcacttgactgggttgttcaatcccgttcgcttgcatgggacaaggagcaaaaagctcaagctcgagtagccgagctcaacttggccgttgaagaactgcagacctattgcaatacattacatgaagaggttcatgtattatattcgcaactgcatcccagtgagcctgcgaatcctgatgagtcggaagctggaccctcgcatgttgcgggacacgcgcttggtggtgagttagacctttttcagccccctccttccatgaggctggtcgacgaatggtctcccacacccgacgacgaggccgccaaaagcaatggaaagcaggaataa

SEQ ID NO: 38659 - DNA, 468 bp, Zea mays
  Peptide Sequence Number=SeqID_82034
atggcgcagtggcttacccggtctacgcttgccggtggccggagggagtccggcaaccgtggactggcctctccggcgaagcagactttgattcctcgctcagggagcttcaccgaggtgtgctcagtcttctcggagggtcggacggggttaggaaaggcttggttggccggtctacggcggcaggggctcgggtggccgcggacacgccgtgcacgggcaaacgaagggctgtctctcatctgtgagtcgccatggcagatatgccctaggtatggagatctttggacgccaaatcagtcattagtgcataggtgtgccctagtcatggtaacacctgaggtgttacaagaggcgacaaccctactgcccaggatggtgcagctcaggtggggtctaggatcagcctggtccatagctgtgataggacaacagaccaagaccagagcgctagaagcacccctttga

SEQ ID NO: 38660 - DNA, 225 bp, Zea mays
  Peptide Sequence Number=SeqID_82035
atggaaacaccccgcaaatgttgtgcatcaaccgatcacgcgcatgaatcttccatgcgggagagcgaggcgatgttggcggccgagttcttcatcgccattgaagatgaaggcttcaagcctgccgactcggaggagtggagtgatggcgtcttcgataactgtgacatcatcctttccataatggaagacgaagaagcaatgtctcctctggctcgaggctaa

SEQ ID NO: 38661 - DNA, 312 bp, Zea mays
  Peptide Sequence Number=SeqID_82036
atgttcgtgggttttgttaagaacgtgggtaccgacgttcttaaatcagttaagttcgacggtacccacgttcttaatgttaagttcgacggtacccacgttcttaaagttaagaacgtgggggccgtcgaacttacttctctaagttcgtccaaaaatcgccgtcggctatattcgtcggtacacccacgttcttacgaacaaagctccatgcccgttgcccgtgtcaagtcgcttacaggagaaggccgtgctcaccacgcaaagtactgtaaatctcatcaacaacactggatcgatcgattctcatag

SEQ ID NO: 38662 - DNA, 1344 bp, Zea mays
  Peptide Sequence Number=SeqID_82037
atggactccaacgatttggagaaagagcgtgggattaccatcctcgcgaaaaacaccgctatcaaatggaatgattaccgtatcaacatcgttgataccccggggcacgccgacttcggtggtgaagttgaacgtgtaatgtccatggtattcgatctgttcgttaacctcgacgcgaccgacgagcagctggacttcccgatcgtttacgcttctgcgctgaacggtatcgcgggtctggaccacgaagatatggcggaagacatgaccccgctgtaccaggcgattgttgaccacgttcctgcgccggacgttgaccttgacggtccgttccaaatgcagatttctcagctcgattacaacagctatgttggcgttatcggcattggccgcatcaagcgcggtaaagtgaagccgaaccagcaggtcactatcatcgatagcgaaggcaaaacccgcaacgcgaaagtcggtaaagtgctgggccacctcggtctggaacgtatcgaaaccgatctggcggaagctggcgatatcgttgcgatcacgggccttggcgaactgaacatttctgacaccgtttgcgacacgcaaaacgttgaagcgctgccggcactctccgttgatgagccgaccgtttctatgttcttctgcgttaacacctcgccgttctgcggtaaagaaggtaagttcgtaacgtctcgtcagatcctggatcgtctgaacaaagaactggtacacaacgttgcgctgcgcgtagaagaaaccgaagacgccgatgcgttccgcgtttctggtcgtggcgaactgcacctgtctgttctgatcgaaaacatgcgtcgtgaaggtttcgaactggcggtatcccgtccgaaagttatcttccgtgaaatcgacggtcgtaaacaagagccgtatgaaaacgtgactctggacgttgaagaacagcatcagggttctgtaatgcaggcgctgggcgaacgtaaaggcgacctgaaaaacatgaatccagacggtaaaggccgcgtacgtctcgactacgtgatcccaagccgtggtctgattggcttccgttctgagttcatgaccatgacttccggtactggtctgctgtactccaccttcagccactacgacgacgtacgtccgggtgaagtgggtcagcgtcagaacggcgtactgatctctaacggtcagggtaaagcggtcgcgttcgcgctgttcggtctgcaggatcgcggtaaagctgttcctcggtcacggtgcagaagttttaagaagttcagattatcggtattcatagcccgctctaacgacctggactgtaaactgcctgaccggtaa

SEQ ID NO: 38663 - DNA, 193 bp, Zea mays
  Peptide Sequence Number=SeqID_82038
atggcggagaatcaatccaccgtagaaaatgcaaaagagaaactggatcggtggttgaaagatggcatcaccacgccgggtggaaaactcccttcagaaagagagctgggagaactgctgggcattaaacgtatgacgctgcgccatttcgttttttacctcgaggcagaatccaaaatcttccgtaaggatc

SEQ ID NO: 38664 - DNA, 525 bp, Zea mays
  Peptide Sequence Number=SeqID_82039
atgcaggcggcatgcaaccgcaccaagtgggcgcaccccttcgactccaacgcgcccagcatggaggcccaggcccacacgtcatgcaaccggcgcgccggttgctacgtgcgagcaactgcaccgccactcgcgccactaccgcgcctcctcgactgtggaaccagtatcgtgactcgaggcaaccctgcgtatgacccaacagtgccagccaggcacatcggtcacaggacaggcgacacctttggcaggagaagcgggcgacgcttcgccttcgccataatgaccgcgttaaaaaagggatcgggaaaggggataccccgaaagggatccttccccgcgaaggaaacgggccccgagccccctactgatcagaggttcgaaggctggcccctcggaggggttcaacagccgcctcagagcgttcgggctcctcgcccattactggtcagaggttcgaaggccggcccctcggaagggttaaacggccgcctcaggccattcgggctccgcgcccactactga

SEQ ID NO: 38665 - DNA, 2622 bp, Zea mays
  Peptide Sequence Number=SeqID_82040
atggaggcgccgacggctggtgggattagggtttgggtgggtgccaccattattttcttggttatcctgcgttttaggatgggtgcaaggagcggtatgacggtcacgctcccgctcccgccctctggccttccccctcccgacgcctcgtttccaccccccattggcccctcgccggctcctattccaagaccggcgaccacccctctcccttcgccggcgtcgaaggacccctcccctggtgttcagcgcggcggacgtccggaggagctgcgctacgcgccgtgtcctccttcctctggcctctcgccggctcttactccaagaccggcgaccactcaacttccctccccgacgtcggaggattatccccttggtgttgtgcacggcggaagatcgaaggagcagcgctggatggaggacggtggagcttgtgcctcctctgctgcgtcactagttcagggtgacgtggggaggaaatcctatagggaggctctgttttctcccaagcctgctgcgtccagggacgttggtggttgggtgacggtggttcgtcggcgttcgagcaccttgaagtccctccccagacctgtcccggtggatttgtgcggaagatgcttcaattgtttctcgactgagcaccgtgcggcggtgtgccgtaatcgcgtgcggtgttttttctgtcggttgccggggcaccgtgtgggcgtgtgcccgcgctggcggacggaccctcccatccctggacgcactttggtgtggcggcctatggctatgaaaccttcggagaagactgtctgcggtcgagatatggctgtggctggcgggtctggacctgctacaacgactggtgaaggcgcgaagaagagaactcgccgtggacagaggaagaggaagtcgggcgctggggggcagttgcctcctccgcctgccttcggcctggataagccggtgagctttgtcgggcgttgtggaagaattgatcgggctgaggaggaacttcgtcgtgcactgatcgtcagtgttgtaggcagggaggattctggctgcgccgtggaggtgcgtgacgcgatcgcctcgaggttttgccttgaagcagggtcgctccgcatacgtcgtgttgcgcctaattctttcctcgtcttcttcccctcggttgccgtggctgatcgggtggttggggaggggcaatctcttcatgtccctccgctcaggttgcatattcgaaggtggtctcgtcaggctttcgctattggaggtggacagccgcttgtgcccgttggcgttgaactacgtggaattcctgcgcatctctgggggattgaggctgctgaggctgttcttggtgctttctgtttgattcatggttttttgcctggcttggtcaaggaggaagacatgtctgttctcagactgaaagtatggtgccggtcacctgagctgctgccggcggtggtagatctccttgctgaagagccgatggtctgtggagaggatgggagctgggttcctagcacgttagtgttccctgtttctgtggtggttcttcattctgatggaagttcagcttccggtgtggatcctccagcgccacccccttcgggctttgtcgacgaagatagtgatcatgagcatcatgtggggtggccggggcgccctgcgtcttctgttcgggttccaattcatttgcgtctgggtcagcgcagtcgttctgggcaggtggatgacatgtctgttgaggctgttcatcaggatttggtggaggtgggatcagttgatgctccggctctcccgattgtttcggttgaggagcgggaggcgcctgagctggaggcgcctggtcaccctccagtgttagcgttggatctggcagaggatttgagggtcagttgtcaggaggactggtcttcgcatgttgttatctcgccggctgggccttgcttggacaatcctttggtgggggtccttatgaccgacttggcagaggttgtcactgttgggcagcatggttccgggttctcctatttgctggccgatggtgtttctgctaatgtggaggaggcagtcactgctgggcagcatggttctgggttctcccaattggtggctgttggttctcctgctgttgtctctgccagggttcgaaggtttgagtcttgtcagtcttcccgggatgatagatggagatcaaagccacccgtgtttaaagtttattccagaagaagattatctcaggctcaggtggtccaggaagaccttttactgcaatctgtggtggaaatggttccacctttggaggagttcaagtctgcggttactaagccttctgatggcttgttaccaccccctccccaccgaaggaccaaaagcaggaaaaaggccatgccaagtgattttcggccacggagaagtaggagggtggccaaattccctccagaacttggatccaatgcggctgcacaagtatgtaggcatctgggtttttgtgatgacatggagaatatttctctcaaagatgcctgcaattatgcaaagttatttgattccgggcttttgagtgcacatgtggctgctttggcagctttgtttggttgggaggtccctcaggtgggggcgatctga

SEQ ID NO: 38666 - DNA, 684 bp, Zea mays
  Peptide Sequence Number=SeqID_82041
atgaggacttttcacatcatgtgcgcaccatcgttttcgtcgtcgtcggacgccccgttcgtcttccctgccttcgccctattcttccaccccaacctgctgtccccgcccacggtcgcagctgcgaaccaatcgacgctcgtcgactcggcggtatattacctatgtcgcctccagatgcccaagtcttcatcatgttcttctccgacaatgtacatacatgacccatttggccatatatacgtccgcatgatagtgatggtcctcacctcagttgccaccatctcgttcgccattatactttctctctctctcacctcatgcctccacctccgcgccaccccattctcgtattcattcgacaccagccccgacaccgactcgcgcagtggatattgtacgtccacgaggacgtttcacatcatgcgcgcaccatcgttttcaccatcgtcggatgtcccgttcgtattcccagccttcgccctgttcttcctccccaacctgctgtccctgcccacggtcgcaaccgcgagccgaccgacactcgtcgacgcgggtacggggcgagtcggtcatacccctggcctttctccatgcgtgtcgtcgaggaggacatggtggcgcctgccacacttagattatcctggcaatgaggtgtccaggtctgagatattggacaactaa

SEQ ID NO: 38667 - DNA, 1143 bp, Zea mays
  Peptide Sequence Number=SeqID_82042
atgggtcagagggcacttgccttcaccaagctgctgctcagggacttcttctgcaacttcctcgggaaacacagactgcccgttgtctacgcaaagtccgaggacctaactgcgaaattccagggacggcgggttaatttgcagaaaaccgggggtctctttaagaagtttgcgcgggcgaaggggtatcgggctcctccgccgttggatctcggatcgacgcccgggattagatcggcgggcgggcacccgagcgtgcggaggcgtgagcggctgacaggcggggccgggcgggcaaagcgggcgcgggcgactgacaggcggggccgggcgggcagagcgggcgcgggcagcggacaggcggggccgggcgggcgcgggcggccgacaggcggggccgggcgggcgcaggcggccgacaggcggggcccggtcgccaggaaggcggggtgtgggggcgacactaggccgtcagatttcagactgatgaccaagattaggctcgggctatttaaaaaaaggatcgtccgatctgagatggacgacggggatcgggcggccagcttcggtcctcttctccggccagcagaggtggcggcgcccgcacccgcggcgggggagctcgccggagacaaggggcgcgggggctccgcgggtcttagggcgaccgggatggtctgggagattggggaaggcgcaggaacctactggcgggggctaagtcgcgataggggcaccggagggggcggcccacggcgaactagctcggcggcaacgccaaccgactccgatgaggaattaagtgcagcagggagcaagggaaggaaagggagagggcgggggaggttccttacctcaaggcgaaccccagggacctctcggtggcgtcgaaggcgcgacgacggctcgggtcgacggtggcggacaacggcggctgtgcggaggacggcgggtgagcgcgggcagaggaaatcagggagggagaggggaaattggagcgtgtctcgagttgcggatgtcgaggcaaagctcaccgtggcagagggcacggcggggctccgacgtcgacggggaaacgggctcgggacagcggcgggcaacggcggtggcgctctagcgtgcgcgcagcgtgggggaggttga

SEQ ID NO: 38668 - DNA, 933 bp, Zea mays
  Peptide Sequence Number=SeqID_82043
atggcttgtcttagacacactgctcgtaagtcggtgatccctttcctgccgtctcgccttgcggagcgtcctctgcgtcgcaccgtgtccggtcagtcgagtcacctggagaggctgcaccaccgcctgcgtgaggagcaggagcgccagcgtcagcagagggagcatcagggctcttcctccccacctgagcaggaggtggagtccgtgaggcgccattcctctattcctcagctggaggcaccccctgcaccaccgcgggatgcctcggctgttggaggagctactggaggaggtcctggaggagaccccgacgacgacggcggctcagaccacagcactgagtcctctgagccgcaggaggcggagggatgggtcgcccgacccatcacccgtgacgctgctcacggctgtcacttccacgacgcactcgacaccctgttgcgccaggctttcgaccggcacacctggtcgatcgagtaccgttgtgtagtctacctgcacagtcgcgggaggtacccggaccgctgggaggctacctgcctagttcgtcgtccggaggatgacctccggggtgcagaggccgtttcggagcattacgccatctccgagagggacactgcagaggcggctatgcaggacgcagcacgacagagtgtggttgtctcgcctattggtgaggataaccctaggttgagcagcacagtcaacctagtcgcggtgcttaacaccgagctggaccactctctggacgagctgagcagggctcggacggagattgctgagttgcgtgctgagctggcagagcgccaccaccaggagggtggttcccccgctcctgttgggactcagcacccttaccgctcgccgccacgtggtcaccacacttatggttcccctgcatgtaagaccaggatagatctggatccttag

SEQ ID NO: 38669 - DNA, 576 bp, Zea mays
  Peptide Sequence Number=SeqID_82044
atgggggagagggtgagggcgagtggggctcggggctcaagtggccaggggcgggtcagttccgagctccacgcgcgacgtgggcgcggggaaggcgggcgcgagcagctcggcggcggttacgcggggacgacggggctgacagcccgggcccgcgacgcagagagagagaagaaagcgggtgcgggcgcgagagaagcggggctgacgggttgggcccacgggcagagagagagcgagggagcgggcgcgcgcggggaagcggcagcgccgacaggtggggccgggcgagcagagagagaagggggcgggtacgcgggaggcgaccgcgccgacaggctgggcccgctgcgcagagagaggaggggagagaggcgcgcgcgcgaggtgggccgactgggccgaaaggccgagggggggcgggttctctcgaaccattttgatattctcttcggcttcaagcaagatgtcggggccaaacacctgtctctctccaggctggtcccaatgcagcggagtcctacaactccgtccgtagagtgcctgaaacggtatgaaatgggccacctttgttaa

SEQ ID NO: 38670 - DNA, 449 bp, Zea mays
  Peptide Sequence Number=SeqID_82045
atggaggggggcggccaagagggtaggggaatggggggcggctgcacaaagaatgggggggttagggggagggcggctagggttatggggaaaattgggtatcacaccagccagcctctccagtctccacacgaggcacgccgtcgccgtggcctctccctcactccacgccgcgtcgccaccgcttctgcttcctgcatcctgctcctgccgtcctgcgtcctcactcttcaatccctctcggctcttaggcggtcaagcccttggcctctccctcgacaccagctacgggccgccctcgacgtcagccgcgacgccgccttcgacgatgccctcgacaccggccgccctcaacaccaacacaaaaatttgttcacaagcaaggagagaagaagtagccagattgctattcgagtaaaatccaagccggattcatttgtgtgctggag

SEQ ID NO: 38671 - DNA, 519 bp, Zea mays
  Peptide Sequence Number=SeqID_82046
atggtggtcgccgagctccctgctcccaacttcctcccatggacgcgcccccctcctcgcgtcaagggtggccagctccctgatgttgccgaccatggctgcccagcagcaggagactttctcccctcggctcccccatccgagcacccaaacagtgcccctccctgctccatttttgttgttcctgcgccctcctctgcgcacagcggtgaactcctcctcgctattcgtcgtggtgcccgccggttgttcgtcaaaatgcgcagcaagccgcgcgctgccggctcgctgtttcgtgaagcccagtggacagcacgccgccgacgctcaccgtggtttgctgtttttgcgcagcccctttgtcgtcgtcgttcacccccggagaggaaccctgcgttttgcgagaagaaggccaatcattcaacgctcgtcggatgtgcgaagctatgcacaaatcggaatcaccgtcgttcttgcaaacgccgtttgggtttgtttatgggaagaaaaatgaaatag

SEQ ID NO: 38672 - DNA, 1308 bp, Zea mays
  Peptide Sequence Number=SeqID_82047
atgcagtcggcatgcaaccgcgccaagtgggcgcaccccttcgactccaacgcgcccagcatggaggcccaggcccacacgtcatgcaaccggcgcgccggttgctacgtgcgagcaactgcaccgcccctcgcgccactaccgtgcctcctcgactgtggaaccagtaccgcgactcgaggcaaccctgcgtatggcccaacagtgccagccaggcgcatcggtcatgggccagtcagccgcgggagaaggcgcgacggtcgatgcggccaaaaatgggccgacagtaatggcggtggcaggcgggcggaagcagcggtcatgtcgtcagccaagctcacaggttcgaaggccgacccctcggaggggttcaacagccgcctcagagcgctcgggctccgcgcccactactggtcagaggttcgaaggccggccccccggaagggttcaacggccgcctcaggccactcgggctccgcgcccactactaatcagggcgggaacgatcttgtaacggaatcccatcagagggaggcatcgagccctcgcaccccgtcaaaaggggaccgggtccggcagatcacccgcagctcactggagacaccatgttcggcgccctccaagggcaacatggcgcttttccccccctcctccttgcggaaaggcgacgcaggggctcacttcgccgctccactgaccggcctgacaagaggacagcgccgcctgcgccgctccgactgctatgccactcgacagagcgaggctgacagcagccaaggctcggactcgagctcagccccggaagacgacgaactccgcttcgcccgaccccagggctcggactcgggctcagccccagaagacgacgaactccgcttcgccagaccccaaggctcggactcgggctcagccccggaagacgacgaactctgcatcgcccgaccccagggctgggactcagccctggcctcagtcgacggtctccgcctcgcccgacccaggggctcggactcgacctcggcctcagaagacagactcgacctcgacctcagaggggcctccacctcgcccaacctagggctcagaccgaccacgtcacaggaggcgccatcattaccctaccccaagctaactcaggctacggggaacaagaccggcgtcccatctggctcgtcccggctccagcgctcctccgacggccacgacaccacacgaaccgggtgccaaaacctctccggctgccacgatggcatggccctctcacagaatgttggccgcgcggggaaggacgggacggcgctcgcgtaa

SEQ ID NO: 38673 - DNA, 651 bp, Zea mays
  Peptide Sequence Number=SeqID_82048
atgcgcctcttcggcgtcaccatcgcgccggcgccggaggcggatccaccggtacgggatccgagccccaacccgcccgtggcggccagggaggacgtgatgcgtaagtgcaagagcatgggcaacctcgccgcccttggcgctgtcgtggacggtggaggaggtggtgcggacggcggaggcgccggcgacggctacctctccgatggcgggctgatgcagtcgtccgggaagcggcggagggcgcaggagaggaagaaagaaagcgcaggagaactgcgcatcattttaattagagaagaaaaaggtccaaaatggaccaaggagcgcgtctggagaactccctacccattcggaccagttcccagagcccctgaagggacgccttcaccaactcctgctgctgctgctgctgctgctgctgcggctgccaatgcagctgttccggtctctcaagctaacctgacgactgcctgtactagtaacacattcttgagccagccaaagccaagtgatactccgtcactgcctccgaagggaggtcctccatcagaggaggacggtttggaactgactgttgccccaccctcccaacagaacatgacgaacatgtcttcccagaatgcggtaggcgtgatccaagtcatctaa

SEQ ID NO: 38674 - DNA, 657 bp, Zea mays
  Peptide Sequence Number=SeqID_82049
atgggtcggcgcgagacggagcgcgaaggggggaggaagccggagggagacaggtgcaaaaggggaaacccgcggccttcgtgtttgtcccgcgcccagttcgggcgtaaggaaatgatccagggtaatgatggcgcctcctgtgacgtgatcggtccgagccctgggttgggcgaggtggaggcccctccgaggtcgaggtcgagtctgtcttccgaggccgaggtcgagtccgagcccctgggtcgggcgaggcggagaccgtcggctgaggccagggctgagtctgagccctggggtcaggcgatgcggagttcgtcgtcttccggggctgagcccgagtccgagccctggggtcgggcgaagcggagttcgtcgtcttccggggctgagcccgagtccgagccctggggtcgggcgaagcggagttcgtcgtcttccggggctgagcccgagtccgagccctggggtcgggcgatgcggattttcctatggcgcctgaggccggacttggctgctgtcagcctcgctctgtcgagtggcacagcagtcggagcggcgcaggcggcgttgtcctcttgtcaggccggtcagtggagcgacgaagtgactgccgtcacttcggctctgtcgactgaagggcgcgcgtcaggataa

SEQ ID NO: 38675 - DNA, 744 bp, Zea mays
  Peptide Sequence Number=SeqID_82050
atggtggggagaagcgagccgggctgcgatcttggtcccgcccttagcttcaaggatcttcatcatccatgctggggcggaggctgggctgagccggagctctacctcccgcgcgggttcgtgggtcaccttctccctcagcattcaagggagagggcgctcaccggcctagcgggagggtcggacttcgacaacgcggggctggtcagcggcgagcgtcgtcagcttcagcgtgttgggctcgctggctcagctggctctggctcggctcccggtgccccctcccgccgcaagagcggttgtcgcaccgcgcgcaccgaaggaccgcccaagacgtcgcgcgctgctagggcggcattcgtgttctggggctgtcctgcctttgccccggtacggcgcctctgcgtggaggtcggtgcttcgcccgtccgggaggatccgagtggggacctgccggcggttaaaggaaaccctcggccgctcttcaatgagccaaagccgaaggcagcggtgtcagtgtggatagaggcggagttggctcaaaaagaagacttcgtcggccggagcctggccgggccgtccactggcgggaccgacgccggagttgagttgccgaggccgcaagccgagccgatgccctcgggggacagctggctgaggcttcggggtgaccggcctgagccgtctgctcgagccggattcctggagaaggccctggcagcgatggctcgggcgtggtgctga

SEQ ID NO: 38676 - DNA, 513 bp, Zea mays
  Peptide Sequence Number=SeqID_82051
atgcagtcggcatgcaaccgcgccaagtgggcgcacccctccgactccaacgcgcccagcatggaggcccaggcccacacgtcatacaatcggcgcgccgattgccacgtgcgagcaactgcaccgccactcgcgccactaccgcgcctcctcgactgcggaaccagtaccgcgactcgaggcaaccctgcgtatgacccaacagcgccagccaggcgcatcggtcacaggccagtcagccgcggcagaaggagcgacggtcgatgcggccaaaaatgggccaacaggaccgggaaagggggataccccgaaagggatccttctccgcaaaggaaacgggccccgagcccccctactgatcggaggttcgaaggctggcccctcggaggggttcaacagccacctcagagcgctcgtgctccgcgcccactactggtcagaggttcgagggccggcccctcgaaagggttcaacggccgcctcaggccactcgggctccgcgcccactactga

SEQ ID NO: 38677 - DNA, 942 bp, Zea mays
  Peptide Sequence Number=SeqID_82052
atggcggacgacggccgtcgcaggaatgtctccatggacttctcagtgagcatcccttcagcagcagcagcttccatgctggtggacaaggagaacacgagcgacgacaggatatcaatcatcatcccgcacagcaggtctccttccagcaagatcctgccgctagggttccagcgaaacgaggcaccatcggatcattcacctgctcgtcccgtctcagcaaagagggtggcgcttgcactcaccaagaaggtggcagcagagctcctggggacgttcctgctggtcttcaccgtgctgtcggcgctgatcacgaacgaggcgcacgggcggagcgctgggcgtgctcggcgtggcagtgggcccggggggacggccgtggtggtggtcgtctcctccatcttccacgtgtccggaggccacgtcaacccggcggtcagcgtcgccatggcggtgttcggccacctcccgccagctcacctcgcgctctacgccgccgcccagctcctcgggtccgtggcggcctcgttcgtggccaaggcgctctacgctggtccggcgaacctgctaggccccaccgtcgccaccgtgcctagcgtcggcgcctctcaggcgttttgggtcgagttcatcaccaccttcgtcgtcctcttcgtcgtcaccgctcttgccacagaccccaaagcagtgaaagaaatggtggcagtgggagctggcgcggcggtgatgatgagcgctctcatctccgggtacatggatcgagtaactgataaggtttccactcaaaatggtggcagggagtcgaccggagcgtcgatgaatccggcgagaacgctggggacggcgatcgccacggggacgtacaccaagatctgggtctatatggttgcgcctccgctgggcgccattgctggatgtggagcttaccatgcgctcaagtga

SEQ ID NO: 38678 - DNA, 1161 bp, Zea mays
  Peptide Sequence Number=SeqID_82053
atggactccacgccggcacccgaggcagcccccggcgcgtcctcttcctctcccgccgctgccgcggccgccgagggtcttgcggggggcgtggcggcgatgaccctggatgagcggttcgaaatgctgcggggcatcggggaggagtgcatccaggaggacgagctcaggcgactgcttgagaacaagcccgtacccatctgctacgacggcttcgagccctctggacgcatgcacatcgctcagggcgttgtgaagaccatcaacgtgaacaagatggtcaacgccgggtgcaaggtgaaaatttggatcgccgactggttcgcgcagctcaacaacaagatgggaggcgacctgaagaagatccagacggtagggcgctacatgatcgagatttggaaagcggctgggatgaaccttgacggggtggagttcctgtggtcctccgaggagatcaacaagcgcgcacacgagtactggccaattgtgatggacattgcccggaaaaacaacgtcaaaaggataatgagatgctgccagattatgggcagaagtgatcaggacgacttgactgctgcccagattttttacccttgcatgcaatgtgctgatatatttttcttaaaggcaaatatgctccctggttttaaagaaggccaggagaaaatgtcaaagagtgatccatcctcagctatctttatggaagatgatgagttgattagcttactcgaaaatattaacgaggtcaacgcaaaattgctttatgcatcaatgcttgctcaagagtggttcgagttcaacgctattttgcttgggtcagtggagatggcccaagttaatgtgaagataaagcaagccttttgccctcccaaaattgttgaggggaatccttgtttggagtatattaaatacattgttttcccttggtttggaagatttgaggtcatccgtaaggaaagcaatggtggtaacaagacatttacatgcatgaatgaactaatttctgattacgagactggtgctttgcatcctgccgatgtcaaacctgcactggcaaaagcaataaatgaaattttgcagcctgttcgtgatcatttcaacaacaacaacgaagccaaagttcttcttaacactgtcaagaagtacagagtaaccaattga

SEQ ID NO: 38679 - DNA, 450 bp, Zea mays
  Peptide Sequence Number=SeqID_82054
atggtactctctgtcgccgcccgcggccccgcgcgcgtcgtcgaccttgcccgcgcagccgctgtcgcgtcgtcgaccccagagactgcgtccgcctgcttcagggcctccgcgtctccgtgcgggacgactgctggagggcctccacatctccatgcacgcggcctacagggaggagatccgggcgttgatggcgcgtgggcaggagggcctgccgccgcagcacttcgtggacggcctgtacctcgacggcgtcgaggaggtcgtggcgttgcacgggcgctcacggctctgacccgtgctccgccgcgcggggcccgtgggcagtctacgacggaagacgaggtgcctgctgattctgcctctgaaactgacctcctcctgactgattgttctgacgattctgatactggtgctgaggatactgcctttggaactgctgatgctgag

SEQ ID NO: 38680 - DNA, 363 bp, Zea mays
  Peptide Sequence Number=SeqID_82055
atggacttggaggccctcgacgcgaggcgacgaggggaacgtgacgacggctatggacagtttccaaattccagtgatgagattgagctgttacatctcgtcacgctcgtccgtgacaacaatcgcctcacatggacgcagcctgtgacgaattacaattatgccctttacaaaagtttacaacattatcttagacctctatggataaaaaggtcattctatctttatgtcggtttgcaacgccgaagctctataaaaaggaaccttcggccatttcctggggacgatttcagccgaagctgcttcttcacgcaagaccttcggcgcaacgaagcatgggcccaacaagatgtagatgcatga

SEQ ID NO: 38681 - DNA, 426 bp, Zea mays
  Peptide Sequence Number=SeqID_82056
atggcgaagacgacgcgggagaccggggaggacactgccgcggcaggggtgggggctgaggccgcgggaagcacctccaatctcctcgcccccacggacctgagccgccaccgccgccttgccgtcggggatcgctcaggaggacaaccatggtgcttatgtgcgtgcctcgaccctcgtttggatggacttgtgccgtactcgactcgcatcaagaaggtagagaaggagatcaaggagatggcaaagaaaatcagtgacctttgtgagttattaaaacctgaagccgtttggagctctccccgtgtttcgcggtcgcagttttgcataaagccctacaactcctactccgccttctttgaagccctcgactcgcttcaccgccgcgacgggcccagcttccatcctaccgagacggaagcgtag

SEQ ID NO: 38682 - DNA, 570 bp, Zea mays
  Peptide Sequence Number=SeqID_82057
atgtggaggattgaagaaggcaattctggattttcactgtacgctttctctcagataaaagaagctacaggaaacttctctagtgaaaacaaacttggacaaggtggttttggaccagtttataagctgctgcagctggacccatgcgatggcggagtccaccaggccagtagcagtcggtcgtcaatacaccatcgacggcgcatggtgacaagggcaccccgaggcgagcatcacatagggaggggccacgagtcaccaactgtagacacgacccagtctctccctgcagcggctgtaggtgaacccgcgcggagtcagggaccatcgaggcagtgtcacgcggccaccgaagcgacaccggcgcacgagggcgacgccgggccgatgctgacgttaattgacggagcagacatggccgtcgtgaggcccgaccggcagcccggcacacggaggcagccgcgtccattggagaggctgagaaaggcgacatgcggcggatctggcccgcccgctcccacctacgcttccgtctcggtaggatggaagctgggcccgtcgcggcggtga

SEQ ID NO: 38683 - DNA, 627 bp, Zea mays
  Peptide Sequence Number=SeqID_82058
atgaccaacatcttcaacaccttgatcttcttcaacgctggggaggtttttcgctttggatccctctcttgcatggcggaccaagaaggcatcctacatcgcatcacggatccatccaggaagagcttctctgatggcaccgatcgtggaggtaggctcgccccacctaacctcagcgagaactactccgatgaactaaaaggcacaaagacctcaaccaacctccaccccacgcaggattgcgcgggctgggctgctgcccacctcgtcgagtcactacttcactggctcgggggctgggatgttgcccacctcgccgactcgttgcttctccggctaggggactcactgcttcgtcgactctgggaggccacaccactggctcatcagctcgagggctatgttatcgcgcacctcactgaccacttcgtcagctcgggtgctgctgcccacgtcaccaataccactcggaggaataagttgcttgatcctcaacctgattatcttaatcagcttggggttcgggggctgtatggaggataccatcaaatgtttttcgaagactacaagtctagatatgcgcagagattaataagcctgttcccaacagttacctcacataggtag

SEQ ID NO: 38684 - DNA, 438 bp, Zea mays
  Peptide Sequence Number=SeqID_82059
atggccatccacccaaggatctatgtcacgcgccgcgccaaggttcttccctgttcacaatcatcccccaacctgacggcgcaacaccgccgcagcgccattgccggcacacccagactcccctctccgatcgccattctccgagcgattaagtgctaccctatgcgggatgggtacgtcggcgtccaagacgtggtgacaaaattggcagacgatgctacccaaggagatggggacgtcggttgccaggacgacgtgataaaggtgccatgcggcgtagcccatggagatggggatgccagttgccaggacgacgccgcgaaattggcagcagaagccataggattggatggaaacccaaactatctatcgtggtttcagaaactgggggacaatagatttgtgttcggtggggatgcaagcgcggactcactctaa

SEQ ID NO: 38685 - DNA, 60 bp, Zea mays
  Peptide Sequence Number=SeqID_82060
atggagtctctggctcggctcagctcagcggagatcaacgagatccccgacccgacttaa

SEQ ID NO: 38686 - DNA, 609 bp, Zea mays
  Peptide Sequence Number=SeqID_82061
atgggccgtatctgccccggcgtctcacagttgagtgacagccctaggtgccaggaagaggtctgcgccggacctttgcaaagattcgcacggttgcgacctctggcgacatttgaacactggaagaaacaaaccgccacgtgttcgacgccgtctgccgcgccagagcacgctcgcgcgcgcgcccgcgccgcgcccaagccgagccagtgccctgccactcccagccccgtccagccctcggagaagactgtgcacgtctccgtgaagctccccgagcgaggaatcgggctctgcttcaccggagaggccgacccaaggtcaccggacttcaaccgaccgccggcaaccgtggaccgaggtacaccgtgcacctctcttcgattccttgcacggttagactccttagacctccacgaagcttcctatgcccttggattgaactatgccgccgtggataggccggagcacacgccgccgacgagctcgcccgcctgctcacgtggaccgggcgattccggccatctccgacgacgagccgtacctcgacgtgatcgccagaccctccccgagccaaccctacacttcgccggaactccctcgccgccg

SEQ ID NO: 38687 - DNA, 612 bp, Zea mays
  Peptide Sequence Number=SeqID_82062
atggaggaaccacaagcgatggcagtgacgccaaggtcaattactacggcggatgcgcttgcagtagggggttacaagcgttcgcgagggagagagagactatccgtcagcccgttctcccgcgctgccaccttctcgtacgagggccctggaccttccttttatagttgtaaggagaaggcccaggtggagtccgagccctggggtcgggcgaggcggagcttcctatggcgcctggggctggattcggctgctgtcagcctaaccctggcgggtggcacagcagtcggagcagggcagacggcgctgttttcctatcaggcgatccttgcattgaatgctcctgcgatacggttggttggcgaggcgatctggccaaggttgcttctccgcgaagcctgcccgagctgggcctcgggcgagtcgaaggtgcgcccgttgcttgaggaggccctcggacaaggcgtgaatccgcctgggtctactgttcctgcccgaggctgggctcgggcgaggcaagatcgtgtccctggagtggacagagctttgacctgtattgcgctcatcaggcctttgcagcttgtgctgatggtgattaccagccgagtttag

SEQ ID NO: 38688 - DNA, 492 bp, Zea mays
  Peptide Sequence Number=SeqID_82063
atgtgggatgcaatgggggcaaatatgagaatgactgatggtcaccctatagtagaacaagctcatgagatacatgtactggtgaaagaactcgaaattttttgttacactctaactgagaagtttgtgattactaaagaaggccaagttattgttgctcctcgtgtgatagttaaagcacttgaacaggcatcaaggaggcttgctaaggctgtggcttatgttggtgctactatggaaaatagcaaggggttgcttgtatttcctgctggggaaatgtacaatagattagtgctcatcttgtatagctgtcggcgttttggacccgcgaggaccctcaaccgactagtgaatttgacgctgcgtgtccctgcccagatggatggatgcaagatgaaacacgagagggggatgaggcttatattatcttgcaccggggtgctcgtagtaggggttacaagcttcgcgggagagggtttggccttgaagtga

SEQ ID NO: 38689 - DNA, 213 bp, Zea mays
  Peptide Sequence Number=SeqID_82064
atggccatggatttccaacgtgaggtagagaggagagaggaagaagacgatgacaattttgtaaatttagtccgcgcgaattacaatgatgatgaggatggttatgatcatgcttatggtaatggttgcctttggtgcaatctatgctcatgtaaagaaggcgtcgaggcggatctccaggagttccaggacgtcgacgagttcgaggattag

SEQ ID NO: 38690 - DNA, 429 bp, Zea mays
  Peptide Sequence Number=SeqID_82065
atggagttgcgttcctccaacgaggaggcggaaaggcggcggatatcccccatccgggggcttggaagacgggaagacccggcgcttaaggaggagcgcgcgacgcttcaccttcgccttaataaccgcgtcagaaaagggaccggggaagggggataccccgagagggatccttctccgcgaaggaaccgggctccgcgcccctcgttactgatcaggggttcgaaggctggccccccgagggttcaacagccgcctcagatcgcgtgggcccgacacccactactggtcaggggttcgaaggccagccccccgaagggctccatggccgcctcaggctactcgggctccgcgcccattactgatcaggggttcgaaggctggcccccgaagggttcacagtcgcctcagacaccgagcgagggatga

SEQ ID NO: 38691 - DNA, 1689 bp, Zea mays
  Peptide Sequence Number=SeqID_82066
gtccaagttcttgaaaagcgattgaatgatcaattcgtcatgcgccgtgctcttgagaaagctctaggttacaagccttgtgctatccatgcatcaagtgagaactgcattccaaagccgactgaggagctaataaaggagattgcagttctcgagctagaggtcatatgcttggagcaacatctcctaacactatacagaaaggcatttgagcaacaattttcccctgcaagttctgcttgtgacatggagagcaacaagcagccagcaaggtccttttcaggcatactctctgaagctccagagctgagcttctcgaccccaaggaagcatcatcagctaaaccagtccagtcgaatggtcctggcacgcaagtccacgcctacagcttctacaagcgagactagcaatgagaagatcaatatcggacgcagccattcctcgctcctgcaccgctccgttagggtatctccgtcggcaaacaatctcgctagagctctgaaaccatgccatacttcgcctctatcttttgttgaggaagggaaatgcatggatcctggcgtggtgagtttggcagacatcttggggaccagggtcgcggaccatgttccccaaacgccgaacaagatatccgaggacatgatcaaatgcattacggccgtatacatgaggctgagagacgtccccgccgtgcagcacgccttcttcccctcaccgtgctcatccttttcttcggcgagcgggctgtcttccaaatacaccgcggacatatggagccccaggtgcaggaaagagagcttcgttgaggagtggcaggacaacgggttaggcaacggtgaatctagggagctggccctgccatatgattctgtggtagaggtgtctgctctttgcaaaggtgatcagaggtccgctgacgtgaaggatatgctgcgcaaatacatgtcacttgtgcagcttctcgaaagcgttgatctcagcgggatgaaacatgaagagaagctcgctttctggatcaacgtgcataatgcgatgatgatgcatgcccatatagagtacgggatcccacagagtaacagcaaaaggatactgcttaccaaggtgtcgtacatcattagtggccaaagagtgaacgcggagctgatagagtaccagatcctgtgctgccgagcgcactcttctggacagtggcttcggctgctgctatacccgaaatggaagtccagggacaaggacgagctgcaaggcttcgccgtggaccgccccgagccgctggtgcacttcgcactgtcctccggtagctactcggatccagtggtgcggctgtacagccccaagagcgtgttccagcagctggaggcggcgaaggaggagtacgtccgcgccaacgtgggcgtccgcgggcgggggcagcacaagatcatcctccccaaggccctggagctgtacgcgagggacgccgggctgggcgcgcaggaggtggtggccgcggtcgagtgccacctgcccgagggcctccgggacgccgtgcgccggagccagcagcaggccggccgggcgcgcgccgtggagtggaagccccacaacctggcgttccggtacctgctggccaaggagctggtcggcgggtcccccgcgtgcagccggccgctggagccggtcagtgcgccgctgcgggctggtccgtga

SEQ ID NO: 38692 - DNA, 894 bp, Zea mays
  Peptide Sequence Number=SeqID_82067
atgtcggcgtccatgtttagtgaaaaatgtgcaaaggtcttcacatcatcgacaggtagagatcacacatggtcaactattagtggccacagttgtggcaggttcactgatgatcagactaagaagacagaacaagcaaggcgagacctctatagatatatgcactaccacaatagatacaaggctcacaccgactctcttaagcaggaagcaaagctaaagaatgagatccaggggaagatatccatttcagaaaataaggaatcaaagataaaagattattcttgggtcataaatgggttaaacaggttgttcagatcaaggcgtgttctttcatattcgtatccgtttgcattctacatgtttggtgatgagattttcaaggatgagatgactcctgaggaaagagaactgaagcagaatttatttgaggaccagcaacaacagttagaatttaatgtcgaaagactgtctggtttccttgagaaagattttcaactttttaccgatgatgaggtcatggatacaatgaagcatgttataaatctttccaatgtggttgataggctctgcaaacaaatgtatcaatgcattgagaatgatttgttatatcctctacgcacacctcacaacattgctccatacaaatctaagggcattgacagggcctcggagctcaatattagttgggatcctggtgaacaaagttcacagtcaacaaaacatagccaggatgaacacaggaacaaacaagcatcaaatatttcgggtaaacgaactcatgaattgcatggttcgagttcttctaacaagcgagagagggtagatgttaacggtggtggtggtgcactttttgatctcaacgtgccagctgaagtggtggacaagatctga

SEQ ID NO: 38693 - DNA, 816 bp, Zea mays
  Peptide Sequence Number=SeqID_82068
atggtgcggggctcggcggcggcggcggcactgctgctcctgccgtggctgctgcatgctgcagccgcgggcaacgggagctgcgcgcggagctgcgggggcttgacggtgcagtacccgttcggcttctcccccggctgcgagatacggctcgggtgcgacccggcggacggcaccgcgtggctcgggaagacgcgcgagctgggcctgctcgtgtccaacgtcacggcgcgcgcgctcttcctcaccctgcgcccgaactgctcgcgccggctcaacgcctccgtcgaggcgctcttcaccaaggcgtacgcgcccggcagccagaacgggctcgtcgtgagctcgtgcagctccgcctcccaggccgaccacatccgtaactgcagcgtcccccctagcgcttacctcgacaactcgtcccagtgcggccgcgccgctgcggactccatccgctgccccgtgctgacacggccgaccagcgtccccgaccgtttcctcaacagaaccaggatgcaagcgctcgccgcggaatgcaccgggctggtgtcggcggtgagctacttggacgcgccggcgccggcgctgctgctagccacgatggagctggagtggtggatgctggggccgtgccgatgctcgagccacgctaactgcacccaggtcaccacgccggtcgcagggcaggaggcgttccggtgcgactgccccaagggctcggagggcgacggcttcgccgagggcgtcggttgccgggaaggccttattcgccaaaatcccctacctatgggattggaggggatagaacgagattaa

SEQ ID NO: 38694 - DNA, 1647 bp, Zea mays
  Peptide Sequence Number=SeqID_82069
atggcgacctccgttcgtggtttcagtagcgccctcagggatgtgccgggcagctacggccttccgctggtgggcgccgtccgcgaccgcctcgacttctactacttccagggccaggacaagtacttcgagtcccgcgtcgagcgctacggctccaccgtggtgcgcatgaacgtcccgccgggccccttcatggcgcgcgacccgcgggtggtggcggtcctggacgccaagagcttccccgtcctcttcgacatggacaaggtggagaagagggacctgttcacgggcacctacatgccctccacctccctcaccggcggccaccgcgtctgcgcctacctcgacccctccgagcccacccacgccaaggtgaagcagctgctcttctccctcctgctctcccgcaaggacgacgtcatccccgtcttccgctccaacttctcctcgctgctcgccaccgtcgagtcggacctcgccgagggcggcaaggccgagttcaacaagctcaacgacgtcacctccttcgacttcatcggcgaggcctacttcggcgtgcgcccctcggcgacggacctcggcaagggcgggcccaccaaggcggccaagtggctcatctggcagctccacccgctcctcacgctcggcctccccatggtcctcgaggagccgctgctccacacgttccacctcccgcccttcttcgtcaagggcgactacggggcgctgtacaagtacttctccacggtggcgaagcaggcgctggacaccgccgagggcctgggcctgtcgcgcgaggaggcctgccacaacctcctcttcgccaccaccttcaacagctacggcggcctcaaggtgctgttcccgggcatcctggccaacgtcgccagcgccggcgagaagctccacgagcggctggtggctgagattcgaggcgccgtggccgaggccggcggcaaggtcaccctcgcggcggtggagaagatggagctggccaagtcggtcgtgtgggagtcgctgcgcctggacccgcccgtcaagttccagtacggccacgccaagaaagacctgcaggtccagagccacgacgccgtgttccaggtgaagaagggcgagatgctgttcggctaccagccgtgcgccaccaaggacccccgcgtgttcggcgccacggccaaggagttcgtgcccggccggttcctcggcgaggagggcagcaagctgctgcagtacgtctactggtccaacggccgcgagaccgagaaccccaccgtcgacaacaagcagtgccccggcaagaactttgtggtgctcgttggcaggctcttcctcgtcgagctcttcctccgttacgacaccttcaccgccgacatcggcaaggacctgctcggcagcagtgtcgtcttcaccagcgtcaccaaagctacctccgggagctccgcctcgcccgaccccaggcctcagcctcagcctcggcctcgggagaaggtctccgcctcgcccgaccccaggcctcggcctcagtctcaggagaaggtccccgcctcgctcgacctcagcctcggcctcgagagaagtcaccgcctcgtccgacctcggcctcggaccgactacgctacaggggatacatcactaccctacccctag

SEQ ID NO: 38695 - DNA, 210 bp, Zea mays
  Peptide Sequence Number=SeqID_82070
atggcgacggcgacatgccttggtttcgtccgccgcgatggacgagggcgaatctggccaggtttgtttgagcgcgagaagaaagctgggacaagggaaagggtcgcggcggtctccttatatgggggtagggcatggaggataggccagagcataccagactaccccgaggttcacggcgggtttatgcttggtggagctggtggttag

SEQ ID NO: 38696 - DNA, 189 bp, Zea mays
  Peptide Sequence Number=SeqID_82071
atggcgacgacgacatgccttggtttcgtccgccgcgacggacgagggcgaatccggccgggtttgtttgagcgcgagaagaaagctgggacaagggaaagggtcgcggcggtctccttatatgggggtagggcatggaggataggccggagcataccagactaccccaaggttcacggcgggtttatg

SEQ ID NO: 38697 - DNA, 390 bp, Zea mays
  Peptide Sequence Number=SeqID_82072
atgccgaccctgaagccatcacctaggaggagttcagagacaacttctgtcggtaccacgttcctgaaggcaatccaccccaacagttcaagcagagtcaccctcagggatatcggcactagaaccagcatccgcatcaatagtagtttcagtggaagttccctcaacagcagcagcagtaccaccagaacaaccaacctagaggaaaccagtattacaggcagaacagccaggcacctcgccttcctgccccaacaaccaatcagagcaaccatacagccccaacacaaggaggaggtcgaggatgtttccactttggagaacaagtccactaagcgtcgcattgcccgaagaaagcagcccaacaacagtcagtttccaacaccctag

SEQ ID NO: 38698 - DNA, 363 bp, Zea mays
  Peptide Sequence Number=SeqID_82073
atggctctggctttgatggttcgtactattcaaaccactcggatcaacaccaactatatccgtcagccacggcaagttcgtgtctacccagtggtagttgaggaaatccctgtggacctttcttgcattcgtgtggacaacggagtcattctagaggacaactcggaggcgtttctgcctaggcccaccccgttggcagaatcactagccttcgcagctggatcatcagcttcagcatcgccagcaccagcagtccaagcccctactcctggaggcgacgacccggacaactctggtgacgatgatgaagacgacgaagaagaagaagaaaacatcaacgatgaagccaacgatgaacagtag

SEQ ID NO: 38699 - DNA, 497 bp, Zea mays
  Peptide Sequence Number=SeqID_82074
atggcttggaggattcacgcccacactccccaagtcctggtgaagcaccccgagcagcaatcagggtctaggcgatggtgtagtcaatttgccctcacgactgctcccttctctccctccgagctcggcgatgggattcggggtgttgcgagattgtgcgcaaaggcgggtctagagctgtggactcttgattcatatagcccgaggcctccgatggtggttacgcgaggtttgttagagttagtgcccaggtctcgtgctagaatcgcgggcacgcccaatagagtgcacggcgttcctgagcgaggattccgtgaccgggatgacaagtgggtcccacaagtcaattgcacttcagacggcataggtaatctccgcgcggtgttcgctatgactgctcctagggtcccacaagtcggtgatgttttcagcgtgggtgggtttgcacggaagctacgcttaattgggccggcctcccggattcagcccaagcgccg

SEQ ID NO: 38700 - DNA, 174 bp, Zea mays
  Peptide Sequence Number=SeqID_82075
atggcgagagtagcatgtaccctccgtggcaagaggctggacagtggtgtatctatgctctcagttggcgtgaacccggtgaggaagcagcaaacttttgctgcttttgctctaaggtggtgccaaatgaagaatctcaagagtgaagcctcgggaggatgttgtcctccttaa

SEQ ID NO: 38701 - DNA, 303 bp, Zea mays
  Peptide Sequence Number=SeqID_82076
atgaacaatgcccccgtactgaacaagctgactggtattcgcttttgtgtcacgcttgtacttttaccttctatcaagccgaagatgatcaataccaggaagggaggcagaatcgatctacctgccaacccacacaactggagggtgattagacaacagcaagcagaaatgaatcctatgaatcctccatcgactaggatagatccagtggttgcagctcagatgcagatgctgcaacagatggcaaatactatgatggatatgcaagctcagatgcggcaggaacatcaagagatgcgctag

SEQ ID NO: 38702 - DNA, 684 bp, Zea mays
  Peptide Sequence Number=SeqID_82077
atggccgtcgcgccctgctccagcttggctccaactccgaagcttaccagcaccccagacatcctctccaagctatcgttgagctatgtcccacctcaccacacgctcgatttctcgttcagacgcacgggtccttgggaccctcggacggatcctgttaagttatccggcgaaccagagggggagggggcaaaccgaagggcgtcccgagttgcggatgacaaggcggagctaactgaggcaacaggcgcggcgagcgtccaacgacggcggcagaacgggcgcacggacacagcgaacggtggcggaactccctgggcgtgcgcgcggtgcgaggagagtgctgagggttacgagtgcgcgagtgagggaagaggagggcgagcgggtgctgggcagctagaaaaaggatggggtggggatgggcgtggcctcggcgtgcgtcatgggtgtggagtccacagcgacgcgcgggtcgtgcgcgggcggttcagaggggaagggtccgacagacgggacccaccgattgggtcggtgctgataggtcggccccactgggcaacgggcaagagagaggagagcgtgcgggcgtgggctggcgccgacaggtggggtctgcctgtcatgggtggtgggcgcacgcgcgcgaggcttaagtgggccgagttgggctactcgagctga

SEQ ID NO: 38703 - DNA, 174 bp, Zea mays
  Peptide Sequence Number=SeqID_82078
atggcgggcggaaaggagctcgccggagctaaggaggggtgtttggccgacgatggatttgagttagggatcaaggtgaacatgcttgatctttggctcaaggttgctgacaacaagttcattcttttgatcttcagcttcttgctgaagcttcaaagccttactcaacaataa

SEQ ID NO: 38704 - DNA, 1662 bp, Zea mays
  Peptide Sequence Number=SeqID_82079
atgtcatatggcggccagccttcggtggaggtcttcgccaagcaatattgtctgcactggcagaagagaaaaataggacagaagattgcgcaatttggatcgtgcactttcacaccgaagtccgggaagacttcgatggaagtggtggagctggtcccctatgcccggaacaagtggggcaactggtgggactactggttttatgttttggaggctgaagtcgaagaccacccagggctccctgtcgccattatgtgttcgcattattatgtggtgtacccgtcgtttgaagtggcggaagatgatgaaaatgagatggcccttcggattgctgcccgctcgagtagtgggcgcgatctagttgaggaattcatagggtatggggtgtggcctttggcacatggatgggcgctgggcgaagtatgccctcgcgagatgccctccctgggtggacggaaggtgcgaagtccgcgttttgctttggatttgcgagggcgggatcccgcctcggttgtgcgtgaggcagaggatggggcggtgagaattgttgggcgctatgtgccaaagacggaggcccagcggagttgggatatacgtggatccaacgaccgcctgaatagggtcttcgagttgaattctttgtcgtatggcggttaccctggggaggacgtcgtcaatcgccgcgggaaaaaaccagcggccctgactgaggatgaccccacgccggaagccgccccagccactaaaaagaggaagctaggtactgcggtgggagaactgggggtctccgatagctttgctatggagttgatgggaacatgcgcggcacccgggggaaggatgtcttcgcccgagctccgggagtcttcggcgcggatgctggaggttaacgggggtcgatggcccaaggacgttcctatcccccgcgcggtcggcgaagacttttttacgtctcgcatggctcgtgacttgagagtgtttccttacggacgaaatattgctgctgttgtgtcggcagtgatgaacaaggatcgccaggaagctgcacagaagcgccgggcggtcatcaggctccccgaagctaggccgaagagggcgcgggggactgcgaaggctaccgcctccggcggtagccagccggcgctggcggcgaagctggccgcccctgggtccagcaaggtgccggagagcgtgaaggcggccggcgccggcggaaccaagtctgccccggacggagctgcgaaggcccgggaattgccttcgccggggaatgtggacgattatctcgttggatcgggcgaggggcaacttgttgttgttccgcctgcggtggcgaccacggtgtctgccgcggtgcctggggtgaagggtagcgctctcagcgccggcggcgagatttcggcggtcactgccgtcaaggacgaagcgagcactgtgtcccgccggctgagggaggcgtcgcagcagctgagtcaagcggcagacttcgccgaccgtgtggcgtcgggggcccttactacagatgtgtttgccgaagtcgagagacttcgggcgcagcatgctgacgccgtccgggaaaagtcggctgcggatagcaagtgccgcaagctggcggagaaggtggccgccctggagggcgagaggacggacctccggcactag

SEQ ID NO: 38705 - DNA, 177 bp, Zea mays
  Peptide Sequence Number=SeqID_82080
atggggtgcgcaggcgccgttctccctgccggcagcaccgtggtcgaccccttccaccatctgcatcgtggccacgccgacgagcccgccaccatgcgggggcttgccaccgctgcctgggtcgttgtggggagcagggtgaactgtagacgtgggatcaatagcgagcggctatga

SEQ ID NO: 38706 - DNA, 543 bp, Zea mays
  Peptide Sequence Number=SeqID_82081
atgcgccggcaggcgaagtccggcgatgaaaaacgcctcaaaaacaaccaattcgccctcgggctcggggacctcctccacccccgggacccgaccaaccccgccgccaaaataccccaaccattgcatatcttgaacgcgggccaacgatatccgcgaaacaccgaattccctgtatcacccggtagcaactccgccgccgccgcagtgcccgagagatcttcagaagacgcctcggccgttggtgtggtcgtagcagacaaggaggaagacagcatggctacgtaccatcaacgacggcgtgcggtctccttcacgcgggccagttctccgacgaacaggagcaaggagggcagacgatcaagcgagcagtttgaaagtgaggctagggttttcgcggcgcacagaaagggcgcgacacttcgggaaacccgcaatccaacagtgcggcgtcaaccaacggtcatgtcaaaaacccccgcggaaccacttcgagcgagggcagcgtctccaccatctagcgacgtcttcggcaccaaatga

SEQ ID NO: 38707 - DNA, 498 bp, Zea mays
  Peptide Sequence Number=SeqID_82082
atgggcaagaacaacaagcgcaagcgcgagccgactcctccatctgaggatttcggtgactcggaatactcggaggaggagttctcctccgagtccgaggggtctccggctcccgtctctcccccggtgtcgtccgatgactcggacgactcccaggggatagccgcggaggtctggtcctacatccgggccgtcgagcgctccgggctcgaaggctcggatgagtcggagtactcctcggatgaggaggactcggacggcggcgacgagggtgaagacgacgacgacgacgacgacgacgacgacggcggtgacggcagcggcagtggcggcggcgacggcagcaggggcagcaccaagggcgacagcagtaggggcagcaccaagggcagcagcaggggcagcaccaagggcggcggcggcgggggcagcaccgagggcagcagcaggggcagcaccaagggcggcggcagcggcaggggcagggccagtggctag

SEQ ID NO: 38708 - DNA, 732 bp, Zea mays
  Peptide Sequence Number=SeqID_82083
atggcgcgtgccgaggacgtggaggacttcggacccctgaacatcgtgcagcccaaagcggaggccaacccggttgtggccgaggctgaagtcgacccggcaccacccccggaaaccggtgaaggctcccctgctgcccctgcggctgctgtgtccggtggaggctcgtcgctagccactgcgccgatggtggagaatcccccgaaggcggcgacggagccggcagtggaggatcccatggcggtggctgggtcttcgcaggttcaggattttgggcctgcgcacgcaaccgctactgctaattttgtggcagcttcgactgtggtcgctggaaatgaatcggatgagtctgcgtttaagttttctgattttgatgactccgggagttcggttgagtggacggaagagtcttcggatgaggacttggattactttgcggccttagatgtggctgtagcggaggcttctccgcatgttacggatgctgaagttttgcctggtccgagtgctgggcgtaggcggcgaagggcggtggcgaagcgtagagtgagtgaagtggatggcggtcggcttcgtgtgggcagggctggcaagcgggaattgttgtcctcgccggttggggcgagtgtaggtgagggggagttgcgaagtctttttgagggtgtggagcttatgataatgctatttaactatagggagatgggaatcattccgaaggttgaacctatgtaa

SEQ ID NO: 38709 - DNA, 465 bp, Zea mays
  Peptide Sequence Number=SeqID_82084
atgacaatcaccgtccgctcgattcgaatcggacgacacacgcccccgctggccgaagcgcacaagcctccggtgtcccgattgaggtccaatttgcactataggtggctgttcgcggtggcggcgaggaacacgaaggcggcgatgttctgggagaacaagctcgcgcgtgacggtagcatgggagagaacgggtcacggggactcccatttaacccacggggttttggtttggagggagagggaggtcgcccacacccccggtcgtggcggcagtattcgcgccttccgttgcgcgagttaggtgtaggagatgcttctgaccggccaggcctaccggtcagcgggccacgccgatcgcgcgagtggagcaaaggtgtggctggcagtgggtcccgcggtgcagcgactacagagtacgcgcggcgcggaggtggagtctggtcacggggcccaacacgatag

SEQ ID NO: 38710 - DNA, 567 bp, Zea mays
  Peptide Sequence Number=SeqID_82085
atggccctcgcccgcgcctataaagcccactcaggcgtcgaccacactcttccgcgcacgctcaaacctcaccggagctcagttcaccatcgtttgcccgcgagtgtgcacgccccagtgaagctccccgagcaaggaatcgaagcctgcttcgctggagaggccagtccgcggtcgccggagttcacaacccccgccggagtgcgtggaccggatcgccgtgatttagccgacacacccgccgccgacgagaacacccgcctgcgcacgaggaccgagcaattccggccatccccgtcgtcgagccactgtaaccttgctgacggagagtacgtcctcgtgccggagcaaggagctgctcaggaggtggccccagatccagcaccagagcctgcaccagaggacctgcctgccactgctttggaaggcaagccccggaatccttttgaaatggacactagttctctggaggacatggttgctggagtgacttggccgtccatcttgccaccgggttggactgtcgagtgggaccctacctcggctgaggaggagcatgaggagtga

SEQ ID NO: 38711 - DNA, 210 bp, Zea mays
  Peptide Sequence Number=SeqID_82086
atggggagggtgatcgggtgcgataaggctcggactagctccagcgagggtaggggagtgccatgggccaacaccggggcacaggacggggctgaattggccggacactgcgtgaggcacgacgaaccggtgcggataaactccggcaaggccgaattggttaagcattttgcaaatagaaccctggatagggaacttaaccctaaatag

SEQ ID NO: 38712 - DNA, 276 bp, Zea mays
  Peptide Sequence Number=SeqID_82087
atggctgaggtctggacatacatccgggccgtcgagcgcgccaggctcgaaggctcggatgagtcggagaactcctcggatgaggaggactcggacggcggcgtcgagggtgaagacgacgacgacgacgacgacgacggcgacggcagtggcagaggcggcggcgacggcagcagggatggcaccaagggcggcagcagcagggacagcaccaagggcagcagcaggggcagcaccaagggcggcggcggcggcaggggcagggccagtggctag

SEQ ID NO: 38713 - DNA, 255 bp, Zea mays
  Peptide Sequence Number=SeqID_82088
atgggtttggaaattttttttgcgagcggagctcctggatcagagccaggacacgaagggtctggaaacaaatccaaggcaggcgacattccgacttccgagcgatggtggcgacgcaagcaagaagagagggtgccgcgctcggctggaccgggcgggcggtggctgcggctggagccttggaggcttctaccggagtggagtgcttcacaaaactgggcgctgcccaactccctgcccaagctgctggattaa

SEQ ID NO: 38714 - DNA, 531 bp, Zea mays
  Peptide Sequence Number=SeqID_82089
atggaacagagggggggaaacgccgcttcacagtctcattccatcagcttccatcgaccaaagaaggaggtctctgacaataattgtgtctatccaaacgaggtgcaccacactgctagggagcgaacacagtgcttagatgagaaggtcctaaaggtggagtctcctcagaaaaagactgcaccaaagaagctgtctcccaaaaagaagcagaaaaaacaaaagaaacaatcacgcaagattgagaccaggaggaatcagatagttctgaaatgcaaaaagaaaattggcaaaaagggtaagcgtggccggcccaggaagaacccaacggacctttcgaagaatgaaccatcaaagatccatgaaagtgaaccatcaaatgtttccaaaaataaaccagtgaaacgtatatcaaaacgattacatgataaatacatgaaaagtaactcaaatgtatccgagaatgcagctagctctagcaagaggaagaggactttttcacagtattcatactggttgaatggcctctga

SEQ ID NO: 38715 - DNA, 2123 bp, Zea mays
  Peptide Sequence Number=SeqID_82090
atgagcttcactcctgttccaaggttcaggggggcagcctattcgcagttgtgtcctcagtctagcagttgtgctgaacatttgggatttgcagctcaaggtcttcctgtaaatgctgcagagtttggtctgaataatgattcttctttggtgggaggatatcaacaatttgactaccttctggggcctcctcaaactgaagtgtgtgaaggaatgtggatgaaaaatatcaacacaagtatcatccaccggcgtagaccttctaatgcatcctgccttgatcatacagaagaactaacttcctatgaaaatgatgagggagctatctcatttggaagtagttgtagcacaggaattgcgagttatccatatagtactcctttgcaaagaaatagccacatttcggatacgcgggatggaacttgggatgctctcgtgcaaatgcaagaggctttggaagcatccaacagtgacaatggactcaatgaagagtgcagtgatttgactttcaatcatgcagaactttcaggtgggaatgccgtaaagcataaagttgtttgggacaatggctctttaaacagtccatctttcacctcaaatttattgtctttccctggtgatactgagaccaccctcacaagtgcctccactgtttattgtacctttcagaactttgctgatctccaacataagatgaacaacaatgagcaaaacaaattatctagtgaggttgaactgcctcgtcagaaagtgcccatgacaaaccatgttaatggaagtggaggtgaaatgcattctgctgaatggggaacgaaccctggtctcatagaatcttctggctttatgccaagcaatgaagacagacaaaacgatatatcacatcaaccgtcaagttcatttgtatacagtgcagatggaactgtggatcattgctcaaaaaagtcacccctcatgtatgaatgtgaagagcagatggaaattgattcacttttaaattcattcggtgtatcaactgattcattttcacaaacatatggaatgtttgagcgaagcaacaatttggttgagtttgatatgaagaccgaattagatgaaagtggttctgctgcatgctttaataataatgccccatatatgcaaactggaccacctgagtcagctatatctgatggatcttcttatcctgaacagtatcagtctacttctcaaacatgtggcttagtttatgcttcagcatctcagtggcaaaatatgtcaagttctggattgcctttactggattgtcgcaaaagtattggtgagcccacttcaataattagcctggggggaaatggtaaaggacacttgctgcccacaagtgaagatactttattacagaaaccacagagtgttgctcctgatgctagattggaaatgaccgacaatgttgctgattgctatctggagtctgctgctagcttggatggccattcttgtccactaggagcttccgcatgtcatgatgaagcaatggcagccaaagatttgcagacagcacaacatggcgtagtcacagattgcacctttggaatacatacttcaaaccacgctggacattcagacatgctgctacccattacacagactacttctgttcaagagcctggcttgagtttgtccaaggatctgaactcatcatgtattcgaggaacagaggttaagaaagtagatttaacagcaacatacaattctgaacgccatggcatcctccgcctcaagtcttttgaacaaaaaactcctgagagtatgggtatgaaaacatacatatatcattgtggtgatcatagccagattgttgatcctcagcagagtatcatactcgctgcaagcaaaccttcacactcaagtgttttgccagttgacaaatctgatggcaaggtcgtttcacagcaaaaaaagcggaaaagggctgcagaaaaccttttagcgtggcatgatcacatcatgcccgggcatgggagcatgcatcgtagaaggctaccgaaccagagcagcacttctggtaaggaaggctcaagaatcctatcagaagttctggaaacatatgagtcgaggcttggcaagctggaaatttccttgttaag

SEQ ID NO: 38716 - DNA, 1869 bp, Zea mays
  Peptide Sequence Number=SeqID_82091
atggggaagaatatgcgcatcaagacggcgcccaaggcgaaccgtgtccccctcctcggcgacggggagacgtcaagggcgctctcggacctggaagagggcagcgacgtccagcccaaatatggtggcaagataattgacattgtgtcaagagatgttcggcgcccagaagataaggcgcaagccctggaggatgtgaagggcacaattttgtacattgtgacaatcgtcttagtcggttcagtttgcacggctcttcgggcatggttattcaattctgctagtgagagagtagtcgctcgactaaggaaagacttgttcagccatctcataaaccaggcaagcaagtttgttctattcaaagtttatcatgaaatagcgttttttgatgtgactagaacaggagagctcttaagcaggctttctgaagatacacaaataataaagaatgctgctacaaccaacctatcagaggcactgcgcaatgttactactacagctattggtcttggtttcatgttttcaacttcatggaagttaacattgctggcacttgtaattgtcccggttatatcagttgctgtgcgtagatttggacgttttcttcgtgagctttcacatcaaacacaagctgctgctgctgtagcttcatccatagctgaggaatcttttggtgccatccgcacagtaagatcctttgctcaggaatatcatgagatttcacgctatggtgaaaaagtagaggagacacttaaacttggtctcaaacaagctaaagttgttggcttgttttctggagggcttaacgctgcatcaaccatgtctgtggttattgttgttatttatggcgccaacttaaccatcaatggttacatgacaactggctctcttacatcattcatcttatacagccttacagttggttcgtcagtatctgccttgtcaggactatacacaactgtaatgaaagcctctggtgcaagccgtagggtttttcaacttttggaccgtgtttcgtcaatgacaaactctggggacaaatgtccaataaatgaaaaggatggggaagttgagcttgatgatgtctggtttgcatatccttctcgcccatctcatatgattcttaagggaataactctgaagctagcaccaggttcaaaggttgcacttgttgggccaagtggtggtggtaaaaccacaatagcaaatttgattgagcggttttatgaccctctaaagggaaggatcttgcttaatggagtaccgttggtagaaatttcacatcaatatcttcacagcaaggtaagcattgtcagccaggagcctacgctcttcaactgcaccatcgaagagaatattgcttatggactagagggcacaacgaactttgctgacgttgagagtgcagctaaaatggcgaatgcacacaacttcatatgcggctttcccgaccaatataagactgtcgtcggcgagcgggggatcaggttatccggcgggcagaagcagaggatcgccattgcgagagctttgcttatgaacccacgagtgcttctcctggacgaagccaccagtgccctggatgctgaaagcgaatatcttgtacaggatgcaatggactccttgatgaaagggaggactgtccttgtgatagcccaccggctctcgaccgtcaagagcgccgacaccgtcgccgtcatctccgacggcctaatcgtggagagcggcacgcacgacgaactcctggaccgcgacggcatatacacggccttggtgaagaggcagctgcaggggccgaagtttgaggccaccagcagcatcagcgaggcctccgaaattgaagcggaacccagcagtaatgggcaatag

SEQ ID NO: 38717 - DNA, 1551 bp, Zea mays
  Peptide Sequence Number=SeqID_82092
atggcatcgcgtctgagcgataatgtgctgcaaactatgactgagaagataatgaggtcagataaaacaagcaagagaaattttcagcacggaaatgaggcgctaaaagattctgtggctgaaggtgctgcctgctcttctcttgcccgtcgtgaacattctaccagagaaaatggagcctcaaggagtaagatacttaagagatccaatgtaaaatccccagttgatagttgcactgaacaaggaactgatatggattatcacaagatgaagagtgccgatttgctagggaacctggaagaagtgtaccaggaaagaacgtgtcttggttactgctcttcgcagaagttggaagaatattgggaaaatgaaaatgtatcttctctcaactccagcagtttacaggcgggaaaaaagagaaagaaaagaagaggcaggaaaaagcacaatcgtcgcaagaaagctaatttacaggattctccagcatcaactgctgctgataattctggtttggtgacgttttctgagaactgtacttcagcccttaaactagaggaacagaggaagaagcaagatcagaacaagacatccatgactaacttacttttaatcaacaatgcaaagagatcagaaccatttgatgtgaatttggaaggcgctattgaaaagagctgtgaactggcaaagaatagttttgacaacacattagaaaataggtatgaactggcaaagaatagttttgacaacaccttagaaaataggtatgaactggcaaagagtaattctgactacataaatatggtaagaaatggattacaagagcaagacttagcatgcttgtcaaacagtcacaatgttaactacctgaagccttcccatttggctgaggaatatacagaaaaactcaaacatgtcttttcactgggaaagtccttaaggcctccgaagaaaaagcttctcatcttagatcttaatggtttacttgtggatatcaacgaagactaccacaacgctcacatggctgatgccaagtatgtccaggacatgtctaaatgcacattcaccggacataaaacactggagaataagcacaagccattagtgctgaaggaattgagaaaactatggaacgtggaagaacaagatcttccatgggaagtgggggactattcaccttcgaatacattactagtggatgattccccttacaaagctctgcgcaatcctgtatttgtccaacctcttatgccaagcttttcaaagttcacttatactgaatacgagacaccaactgcttttctctatcttgtgcagccgcatactgccatttttcctcactcctacagttacttaaactggaatgacgattcgctgggtcccaatggagaccttcgtgtgtatctgcagaacctagccgctgcagataatgttcagcattttgttcgtgataatccgtttggtcaacctttcattactgagagcgatccgcattggaacttctatgctcagattgctgatagagggcgtgcacccttgacatgttgcgcttga

SEQ ID NO: 38718 - DNA, 576 bp, Zea mays
  Peptide Sequence Number=SeqID_82093
atgagctcgccggggttctcgggctccgttgctgaccccccctgcgcatatgaaggatcggtcgactccttctcaaccactccgcgccgcacctcctcctctaccccatcacctagcaccaccccgagcctccccgttgatccctggcagcgccgcaacaccgattcgccgtcgcctcacctccgttcgtcgctctgggcggtcggttggtcgtcgtgggagctctggttggcgcaattggtgaatcggagcattgccagtgcgacgccgccaggaatctcgctcgcgccgccgccgcggggtggtctgctcggctaccggctctggggcgtcggcaaccatcgtggatacccccggggacacaccgaaggagtccgtgctgtcgccaagctaactgggtgggcgaagcctcgccaattcctcaccggggcgcgggcgccgtcgcgaatccgcaccgcgccgtggactgggcacctacgcggccgaatccttgacgagcaagccaccgtggaaactgaggttcaacaagtagagatagctgagcaggagctcgtggaaggcaagttgtgcccttga

SEQ ID NO: 38719 - DNA, 444 bp, Zea mays
  Peptide Sequence Number=SeqID_82094
atgaggaacccgtgcctccctacccccatgatggtcaccagctccctgttgagttttttttgtatggggcagccgatgcccaacttccattttcagttcgacctcaacattcctcctgaggatggaatcaatgctgaggaaaatgttgctgctaatgctgatgatggctgggacccttggcctgttgagcaggctcaaccccctgtgccagaggttgtaccaaataatgttaacgatgtgatcaatgaagaagagcagttcagctatcagctttcaggtcttgagaatctcccttctgacgattcggtgggctattttaacgacatcattatccctcagggagtccagctccagcaggaggaaggcccggctgaagcgattcttgccttgcctgctttccctcctgacaacataaatttggagggaaacaatgtcgagggatag

SEQ ID NO: 38720 - DNA, 729 bp, Zea mays
  Peptide Sequence Number=SeqID_82095
atgccgccgatgtgcccatcgcagatgccgtggagcatcgacggcgacgtcgcggggcaggaggtcgcctaccagctggtgacccggaacacccaggcggcccgcgtccacgccgaggtcatcgtatgcaactcgttccgcgacgccgaggccgcggcgctcgagctgttccccagcatactgcccatcggcccgctgttcgccgacgaggagctgatgaggcccgtggcgcagatgctgcccgaggacacggggtgcctgccgtggctcgacgcgcgggccgacggctcggtcgtgtacatcgcgttcggcagcttcgccatcgtcaacccgcgccagttcgaggagctcgcgctggggctggagcgcacgggcaggccgttcctctgggtggtgcgaccgggcttcacggccggcaacgagctgagcaagcaggcgtggttcgacgagttccagtgccgcgttgccggtaggggcatggtggttagctggtgcccccagcagaaggtcctggcgcaccgtgcggtggcgtgcttcgtgtcccattgcgggtggaactcgaccatggaaggggtgaggaacggcgcgcgcttcctgtgctggccatacttcgtcgaccagttcgcgaaccggagttacgtctgcgacatctggaggaccggcttggcggtgtcgcccggagaagatggcgtcgtgaccaaggaggagattattaagaccatgttctaa

SEQ ID NO: 38721 - DNA, 636 bp, Zea mays
  Peptide Sequence Number=SeqID_82096
atggaccaaatgaccaactctcagatgatgaacaactctccaatgatcaactttgctgaccaattctacgagacggaccagatgaccaactctcggatgatgaccaactctgccaaccaactctatgacatggaccagatgaccaactctctaatgatgaccaactctctggtgatgaccaactatccggtgatgaccaactctccgatgatgaccagctctccagtgatgaccaactctccggtgatgaccaactctccggttatgactaactcttggatgacgaccaactctctgatgaccaactctgtcgaccaactctacgagacgaaccagatgaccaactctccgatgatgaccaactcttcggtgatgaccaactataggatgatgaccaactctacaatgaccaacttctctgaccaactctatgagacagacctgatgaccaactctcggatgatgaccaactctccaaggatgaccaattatccgatgatgaccaactctccgatgatgaccaactatgacgaccaactctccgctaatcagcttagaccgaccaattctccattgagcaacccggtgaggcagagatctaagtcccgcgctactgatccacgtcagctacgatag

SEQ ID NO: 38722 - DNA, 222 bp, Zea mays
  Peptide Sequence Number=SeqID_82097
atggatgctggagaccaggtttatgagggtggacctcaccaggtggatcatagatcttggttctacccttgcaaccaccggtgtgccagatgttggagagccaccacatatgctgtcgaagtggacaaggcagggttcaccggtgatggtggcaaggaagttgagatatccaaacatgatgcggcttcctggagcaaaactctcaccaccggtgaatgctaa

SEQ ID NO: 38723 - DNA, 567 bp, Zea mays
  Peptide Sequence Number=SeqID_82098
atgcaccatgcttcggccgccgggtcgtactcctcgaccgcggcgcgtggcgccacggtcgaccaggtacacgtgccgccccaccgccacggcgagcgcgtgcgcaaacgcagtgccgccgcagtgcgtgggcaggggcagcgcggcgacctcgagcgaggacgcggaggcgtggaggtggaggagaagtttgagagcggaggaggaggacacagcgaggaggcatgggcggaggatatccagcaggagctcgtcggggagtcccgcgatggggggttcgggctcgggatcctcgacgtcgggggccgtgaaggggaccgggacggcggtgtggcgggcggggtcggcggggatgcaggaccgcgtgaaccacgagagggcgcgcgggtggcagctctacgtggccatggtttcctggctgatgcaggggcaggcatcgcgaggacaggtgcgagggcaggcggggcacgcgaatcacgggagcggagccacggtgaagctgtggacgcctactttactctcttatggagtagtaaagatatcagattcaacaccaaattaatatag

SEQ ID NO: 38724 - DNA, 75 bp, Zea mays
  Peptide Sequence Number=SeqID_82099
atggtcgtcgtcttctgcgagttcccagcgcagggcgaggccctccagtgtgccttcttccaacaagtgggttag

SEQ ID NO: 38725 - DNA, 1707 bp, Zea mays
  Peptide Sequence Number=SeqID_82100
atggggggctgctactccgccttcgcctgctcgcggaagctgcgcggccgcatctccttcatcctcccagtcaccgagcgcgaccgcgacgaccgctccagcgacggcggcgccagctccgtcgcctcccattcgccgtccccgtccccgtccccgcgcaaggacgacgccgggccgctcgtggtgcggaccaccgcggccgagtttgcgcgccgctacgtgctgggccgggagctggggcgcggcgagttcggggtgacgcgccgctgccgggacgccgccacgggggaggcgctcgcgtgcaagaccatccggaggaaccgccggcctcgcggacccgccgcccgccgcctgggggccggtccgccccaccacggacccggagcgcccccagcagcagccgggcaggacccggcagcggcggcgcacgcggcggacgtccagagggaggtggccatcatgcggcgcatgtcgtcccgcggcggcggcgccgtggtgcggctccgcgaggcctgctgcgaggactccgccggcgccgtgcacctcgtcatggagctctgcgagggcggcgagctcttcgaccgcatcgtcgcgcgcgggcactactcggagcgcgccgcggcggccgtcttcggcaccatcgtcgatgtcgtgcgcctgtgccactccaacggggtcatccacagggacctcaagcccgagaacttcctcttcgccaacaagtcggaggactcgcagctcaaggtcatcgacttcggtctctccgtcttcttcagccccggcgatcggttcacggaggtggtggggagcgcgtactacatggcgccggaggtgctgaagcgcaactacgggccggaggtggacgtctggagcgctggcgtcatcctctacatcctcctctgcggcgtcccgccattctggggagacaacgacgagaagatcgcgcaggcggtactccgcggcaacatcgacttcaaccgggagccatggccgagagtgtccgccaacgccaaggacctcatccggcggatgctcgacccaaacccctccacgcgcctcacggcgaggcaggtgcttgagcacccgtggttgaagaacgcggacacggcgccgaacgtgtcgctgggcgaggccgtgcgcgcccggctgcagcagttctccgccatgaacaagttcaagaagaaggcgctgggcgtggtggcgcggaacctgccggtggaggagctggacaagtacgtgcagatgttccacctcatggacaaggaccacaacggcaacctcacgctggaggagctcatggacggcctccacatcaacggccagcccgtgccggagtcggagatcaggatgctgctcgaggccgccgacacggacggcaacggcaccctggactgcgacgagttcgtgacggtgtccctgcacctcaagaagatgagcaacgacgagtacctggcgtcggcgttcaggtacttcgacaaggacggcagcggcttcatcgagcccgaggagctgcgggatgagctgggccccaacgaccaggccatcctcgacatcatccgcgacgtcgacaccgatcgggacggccgcatcagctaccaggagttcgagctcatgatgaagtccggcaccgactggaggaacggctcccgccagtactccagggccaacttcagcagcctcagccgcaggctctgcaaggacatgtga

SEQ ID NO: 38726 - DNA, 207 bp, Zea mays
  Peptide Sequence Number=SeqID_82101
atggctttggcgccgcttccagtgccgcctgccgccgccaagcggggcgcggctgttcgtccaccgcacgggcgacggtcgcgtcgtgcgcaggtctgccgcatccgtggcgtactgctccgacgccgccccaaggggtcgtacaaggcgttgtacaccgcggaggtggcgaccgcgttcttggatggtcttgtcctcactccataa

SEQ ID NO: 38727 - DNA, 727 bp, Zea mays
  Peptide Sequence Number=SeqID_82102
atggacccccaaggggaccccgtgcccccccggtccgaagcctgccttcccccggaaacccttctggactccccacgggtccagacttccgacaagttcatgcagaaatggccacagccgaagacgagggcttcctcgtcaaacgcagatgggaacccagggtcgggacctagtcctacggcaagtaccaaaccaagaagggctccgcaactctcctccagctgggaaggacccttcaaggacctctctgcgaaagcaggagggcccgacagcctgggagccggctctggagaacggcaccccgttccatggggtggtccagagcctgtgtggccgcttagcctggttccatacccgaaagcctgcacactccaccactctgtgacgggcctaggtcccagtcgatgctacctcctgggggccaccgccaaactctttcttagcctcaccaacggcagcgaccacctcaggaccaacgacagcagccacctccgcaccggcggcttaccggcgacggtggccgcccccgtcgcgcacaaagaggtcctcgctcctgccctcttatggagtgaggacaagaccatccaagaacgcggtcgccacctccgcggcggcactggaagcggcgccaaagccatccaggccaaggagccagacacgtggcagctgacggcgcccacagctggccagccccgcgtagccgaagttcgcctcctccgcaaggctg

SEQ ID NO: 38728 - DNA, 255 bp, Zea mays
  Peptide Sequence Number=SeqID_82103
atgggagaacggtggagggagagcttcgggcgggtcaggggtaactctggcgaggaatcctggccatggggagaggcaatcgagtgcgatagggcttggtctagctctgtggaggtaggggagtgctatgggccaacacaggggcatgggacggggctgagttggctcgacaccgtgcggggcgcgacgagcaagcgcgaccaaactccggtgaggccaaattggctaagggttttgaaattaaattcaaactaa

SEQ ID NO: 38729 - DNA, 333 bp, Zea mays
  Peptide Sequence Number=SeqID_82104
atgtcgcgtgcgttcgacgactactatatcgaggattgtggcgtcatcttggcaccggaggtgacacagaggaggatcgacaacagtgaccagttcgtcatcctcgccaccgtcagggcgtccactgaacacgttcttggttatagagatccacatcgcagaagagatcatcttagcacccagacgttgcaaggaaccggtcgtagggacacagcgctggcagcttacaggaattggggtgccattgttcatcagctgtgcagagaaacgtatctgcttgaggatcctgccgagatgactgctcgacggaagattcaccagcctgaaagttaa

SEQ ID NO: 38730 - DNA, 435 bp, Zea mays
  Peptide Sequence Number=SeqID_82105
atgtgtttgcttgacaattgtacacatcttgcggggaaaacatataaaccaattaacaaatgcaagctaggtcgctcgtaccagcaaaacaagaagcttaggcgtccagactccggcctgcaacgggagcgccacggcagtggcgtccaccacgttgtggcattccctcaccgtaacgccagaaatggaactgcctccaagacgcaccacgtcgtccacatcaccgttgtgggtgatcagatgacgggagatacggcggccgcggtgcgcgtggggccgaaggctggacgagcggagcagccgaggcgtggggccgaagggtggaggagccgaggtgcagggtcggaggggtggaggccatgcagtggaggagcggacggcggagaagcggacgagcggggaaggcggagggggagtcggccgcgggttccgtga

SEQ ID NO: 38731 - DNA, 2025 bp, Zea mays
  Peptide Sequence Number=SeqID_82106
atgggggcggtctcgagggaggtgtcgtcagcatgtgagaggctctgcttcatttgcccatcactgcggacgaggtcccgccatccagtcaagcgctacaagaagttgcttgcagaaatcttccctcggacacaggatgaaggaccaaatgatcgcaagatagggaaactgtgcgaatatatttcaaggaatcctatgcgtgttccaaagattacagtttacttagagcaaaaatgctacaaggaatttagggctgagcgctatggttcagtgaaagttgttatggcaatctatcgaaaggtgatatgttcttgtcaggagcagttgccactttttgccaacagcttgctaacaattgtagagacattattggagcaaaatagacaggatgacttgcggaaattagcatgtcaaacactttttgactttataaatagtcaggttgacagtacttacatgttcaatttagaaaaccagattcctaaactatgtcatctggcccaagagatgggtgaaaaggagaagatatgcattcttcatgcagctgggctacaagctctttcatctatgatttggtttatgggtgagcactcccatatgtctgcagagcttgataatgttgtttctgcagttctggaaaattatgagagcccatatgcaaatgctgataatgatgctgctgttgaggatattcgaactcagtgggtggatgaagtgctcaaagccgaaggtcatgaacctcctgctgttaccattttgaccagggttccttcatggaaagttattagagctgttcatggacagaatgctcatatattgttgtctatgttagtcaagcatcttgaacacaagaatgtattgaaacaaccagatatgaatctagatatcattgaagttacttcacgccttgctgaacactccaaagctcagtcttctatagcactaatgtcttcaataagtgatatggtcaggcatatgggtaaaagcatgcaatccttggccagtgatgcaggtcctggagacaacatggtcaaatggaatagcagatatgggaaagctgtagatgaatgtcttgttcagttgtctagaaaggtcggtgatgctggacctatccttgatacgttagctgtagtactggaaaatatttcgagttctatgattgttgcacggtctactatctctgcagcatatcgcactgctcaaatagttgcatcattgccaaacttgtcacatcagagcaaagcatttcctgaggcgttgtttcatcaacttcttttagcaatgctctatccagattacacttcacagacaaggaagattgatctccgaaggacattatctagaacaacatcagtgttttcatcttctgctgctttgtttgggaaacttaaaagagatatgctttcatttcgtgaaagtgcactccaggataacacaaagctactgcccatcagtgagaatgcaaatgagatcagtgcaaatgatgcaaaattattcaagtcacagactattcaaaggatggttagtacaagagatatttctctcccctcttccacagatacaagtacttcgagtgaaccaacttcatatcaggaaaaggatgctgtcaccctcatgctcagtgttcgtcaggcaaatcttcttctttcctccttatggactcaggcactgtcacctgaaaatgttccacggaattatgaagcaatttctcatacttacagcttgatgctattgttttctagagccaaggagaactgcgtctcattatatattaaaaaggaagaaacaaagctctatagaagacccagatacaagatcctcatggagatttgctacagaagggggttcctcattgaagatcactttgttgcggtgcagccaaacacaccacgcccccaaaatgatgacactgttgagcccccttttcctgccattgggcactctaagaaccagacgtccccaccactccacgaaagagggttcatcaacagcaggagtaagatggcccaagccgaaaggagataa

SEQ ID NO: 38732 - DNA, 990 bp, Zea mays
  Peptide Sequence Number=SeqID_82107
atggtgtacggcggaccgtccggccctagggcgcggacggtgatacaccgagcaaagcgtcgttggcttgttactcttggaggttgccgcctcctagacggctcgggtgattgtctccgtcgagctctccaagaagattgtggagaagccgcggtgttgattgtgaggggttcgcgcctacctcgccggagcggcaaaggtgacattagtggaatcgagtcaaaaccgtctattcaccccccctctagccggtgtcctagatcctacacagggaccggggccgggccgggcgaggtgtcgatccggattgtggcgcccggcgaggcggggacgtcgtctgagagggccgaggaggtgatcgtcgaggaggaggaagaggatggacaggcaacaaggacgcgccccgaggactcatcacctgccgctggcggcggggagggcggcagggaaacctcgtcgtcgtaccagcggtacgacatacaacaggtggccaggtttctttgtgacaatttggattgctacggtgatgttcaagtccaacgatatcctgtatacaatggtgcgccaaactgctatggttgtcaaatgtttacactgttgatgtactataagaacaacataggtcgtagctatcgtaggcagggtcaaatgttgacgattgtggaatattttctacttttgtactgtgcattattgcctacacctgtgtggtaccgttttttcctgaacaaggagtatggaagcctattttcgtctctaaccactggcttgtatctcactttcaagttgacatctgttgtggaaaagacgattgagaatgaacggattctgtatcatgtgtttcctctatacctcactatggttgttacttacatgtttgccttttggggcaatgggtgtaacttccctattggaaaaggatggtgcgtagctgcaaaagagaggacatcttgcttttgtgctcgcaagaaggatgcaaaggatctgtga

SEQ ID NO: 38733 - DNA, 369 bp, Zea mays
  Peptide Sequence Number=SeqID_82108
atgaaagaaagaagcaatccaagcgcaagagctcgaaagaacacaacaaatctctctcacttatcactaaagctttgtgtggaatttggagaggatttgatcacctgggtgtgtctagaattgaatgctagagctctttggagcggattcccgaagctggcgagttcagagtcgctgtcccctggggcaccggacagtgtccgtggtgcacctgacagtccggtgaattatagcggacgctctgagaattcccgaagtgagaagttcagcttgaagtcccctggtgcaccggacactgtccgtggtgcaccggacactgtccgtggttcgaaagccgccctagagcacacagagtcagggatgaccctg

SEQ ID NO: 38734 - DNA, 264 bp, Zea mays
  Peptide Sequence Number=SeqID_82109
atgagcgagggaggaggtctagcgtggttgcacgtgaggcgagaagatcctagggtttcgcgggcggttgacagagagagggaggcacgaggcgagggaggagagtacgatgtagccatggttgcgtcgactgctagttggggcgaggatggctccatcagcgttgaaggcggcctggggaagggcgctgggatttggggcgaggatggctccaccgctccagtggtggcgcgacgcaggcacagttggaggcggccgcgctga

SEQ ID NO: 38735 - DNA, 174 bp, Zea mays
  Peptide Sequence Number=SeqID_82110
atggagagtcatgatctccgggcagaatgggaatcacggcttgtgggtggttatgagactgatggttttggttatgactatggtgctggttgtcagcattgcaaccactgctcaggagaagatgaagctgtggaaggagacttccaggagttccaagactacgacgagttctag

SEQ ID NO: 38736 - DNA, 1239 bp, Zea mays
  Peptide Sequence Number=SeqID_82111
atgaccgttggtggaggctgtctgtcgtatggtgcaccggacagtccggtgcacaccggacatgtccggtgcgccagccacgtcaccaatgccgttggattccgaccgttggagcttctgtcttctgggcccgcctggatgtccggtgaccgttggcgcgaagtagccgttgctctgctgctcttccttggagcaccggacactgtccggtgtacaccggacagtccggtgaattatagcgcgagtgcctctggaaattcccgaaggtggcaagttcgagttggagtcctctggtgcaccggacactgtccggtgtacaccggacagtccggtgcccccagaccagagaaaccgacacccaaggggtatgactcgtgggccctggcccccgtgtcagagactggaccgttgttttcggcggagatgaagaggcgcactaccgtgggcggcggtttgctcctcgcgaggcggttcgccttcttcacactcagagacccgcccgccagctcgttcgctagaaggatccgcgtcggcgcctctcccctcgacgatctcgccgttggggagttcgtgctcttcgtctcctacctctcctgtgggttggcgctgccgatcttgcccttcttcctgctgctgctaggggagttcggcctcaagcttcagcacaaggatggagtggggtggtacttctttcgccagcgcccggacaaaagggtgttgtgcagtgacctttcggagatgaaaagcgagctgagctgcggctccatcttccgcatgaatttcattacctcccacagcggtctcgtggtacgcctccatgaactggtcaagctctggctccatctcagcggccaggccgccgagcgccatgcgctgtcgcgcctccatctctttggctttaatggcctcgatgtcacctccaacgatgagggctcctttgccttgacacacgcatcgaggagaccgtcgccgttggcaatatgcagccctaggttgccgctagcgccgctgttcctagtggccgccaccgtgttcagactgcgctacgacggtgctgagggaggatgcccacgggcggtggtagtgatcgctggtccggttgccgacactgaagacgctgcctgggaggtcgtacaggacgccatggagacggcggctgcacgctttcagcgtgaccctgctgatgtcaagtacttcatacctgtagaaatgaggctagggctccgcttgaaggcggat

SEQ ID NO: 38737 - DNA, 387 bp, Zea mays
  Peptide Sequence Number=SeqID_82112
atggctagtaacaacaatgtgcacattgggaagccaccgcattttgatgggaataattatgactattggaaaataagaatgtcaatgcatcttagagcaatgggtggaaaaatttggccaattgtcagggatggatttgttgtgttgaaagaagatgaaccatctgtcggtgttttgggcccacgaaagaacgacctcacgaattattgggcccttgggcctttcgtgaggccttttacttctttagtggacccaggggatatctatcccccacaagcccccgatctttgggttgatttagagaggtcggcattttggattgtaagattctggacttcattgggtgctccggaggtgcacccaatgggtgtagcccccgacctttga

SEQ ID NO: 38738 - DNA, 513 bp, Zea mays
  Peptide Sequence Number=SeqID_82113
atggtggagggcaagagcgggtgggtgaggatcgacgtgacgctgataccaggttgtcaagcgcctcgacgcccaacgtcgctggaccgcggctacgcagttcgtagtcgcgctccagaccttcaccccactgattgtggcgcctgccttggctgcgcgatccgcagccctcctggcgtcacgacggcgcctattattattgatctaactagtggcagaggactggtgtgcatgctgaagatgcccggagagcctattgttcctggcatgctctcagaactcagcacacaacccttggtgctatactgctatgtctgcatgtgttggcaagctggaagctgcatggatgtctgtcatgatgattccattcagcgtacacgattgcttgcaacatcaacaattagctgcatcattttctctgccgctgcctgcctatctctgaccattgcattttgtgaagcacatgggtactggtctgtcttggtgttggtctgttgggtgcctactttctga

SEQ ID NO: 38739 - DNA, 360 bp, Zea mays
  Peptide Sequence Number=SeqID_82114
atggccggttcaagggatagttctgaagtcttccccaacaatattatagagccgacttggaaaaccttgtcggctgacgaacagctccagttcgaggagcataaggagcagctgattcaagaggcgagagtgaagttcctgaccaacttcaaggttgtcacggccagtcacaacccctttatgggatgccgatggacacatatcctgagcaaccgcaaatcgacagcaaatcagtcgatctgcacgtgcccggaccatccgcacgtgagcgcggaccgtccaagccagctacgatcggacccatttttaatgagttatccagacatgcacccgagccacaacatatggcacataatctaa

SEQ ID NO: 38740 - DNA, 366 bp, Zea mays
  Peptide Sequence Number=SeqID_82115
atgctggagaagttagccacgcatgacgtggagactgttaccacactcttcgctctggccgacaagtgtgccagggctgccgtgggccgtgcatggcacttggcaccacagaccagggttgcccagacgggtggctcgggtaccgtcgctcgagacggcaaaaagaagaagaagaactgcggcctcgagaggccgccgtctgctgcttcggtcgtcgcaaccgtgactaggggccagagcgagcgcaacaagcgcccacggccgcagaggggtaacagtggctcatgccctgtacaccccaacagtcgccacaacgatgtggagtgtcgcgagatcatcgagctcgcgaagcgcgtcagcgaatga

SEQ ID NO: 38741 - DNA, 759 bp, Zea mays
  Peptide Sequence Number=SeqID_82116
atggcgatggcaggcgggcggaagcagcggtcaagttgtcagcaagctcacgtcccctcctgggacagcgaggaaaccctctcccacggcgggaagacgacgcgcccgtgtcccgttcctcgaacggctcgcgcacgcacaacggtcgccccacgagccactcgtcccgtcgcattaactccgcggcaggacaggcagcacctttggcaggcgaagcaggcgacgcttcacctccgccataatgaccgcgtcaaaaaaaaggctggcccctcggaagggttcaacagccgcctcagagcgctcgggctccgcgcccactactggtcagaggttcgaaggccggcccctcggaagggttcaacggccgcctcaggccactcgggctccgcgcctactactgatcaggggttcgtaggctggcccccgaagggttcgacagccgcctcagacgtagagcgagggatgacccaggccaagtccggcctcgggtgccataggaagctccgcctcgcccgaccccagggctcggactcggcctcggccccggaagacgacgaactccgcctcgcccgaccccagggctcggactcggcctcggcaccggaagacaacgaactccgcctcgcccgacccgaggctcggactcgacctcggcctcggaagacagactcgacctcgacctcgaaggagcctccgcctcgcccgacccagggctcggaccgaccacgtcacaggggggcatcattatcctacccctag

SEQ ID NO: 38742 - DNA, 156 bp, Zea mays
  Peptide Sequence Number=SeqID_82117
ggaggcccaaagccagaagaggaaggccaccagtccaacgccttaggagggcgacttggaccaagaaatccaaaacttggagatgctccatttcacaggatgcgaagagaattggaccaaggcaatgaggatgcaacacctcaaaagaagacataa

SEQ ID NO: 38743 - DNA, 174 bp, Zea mays
  Peptide Sequence Number=SeqID_82118
atggagccacctcgagcgcggattattttaatcgtttctcgccaacgagctcagggaaggaaccttcagacatgggatgaagttgtacatgatatgaagagcgtagttcaggagaaggatgaaccaatgccgaagctactcgtggaaaagcttcggctcaacagtggaaaatga

SEQ ID NO: 38744 - DNA, 2175 bp, Zea mays
  Peptide Sequence Number=SeqID_82119
atggcatggatgaggctaatttaccacgagaactatctgaattatgtaaccatcaatgcaagagaggcaatgactcatctgcaggagatgaaggatgagctgcttgcagtagccaatgagcttcttgatgatgatgataatttaagcacaccattaaattctgtatggaagagctataccccaaaggttatcgatattaactacactgaaggatctggtgatagaaagtggagtagtacaaatttcccatggactaaggaacttgaggccaagaacagaaataagtttggaaaccattctttccgccccaaccaacgagaaataatcaatgccacaatgagtgggcatgatgtttttgttttgatgccaactggtggtgggaaaagtttgacatatcaggctaatattcctgcaacttatttgagtggcaacttggactggtctgaacagcaagagataatgaaagatttaatgtcatgccgctacaagttgctatacgtcactccagagaaaatagctaagagtggtgctttatcgagactattggacaatttaaattcacaagggcacctttctagaattgttattgatgaagctcattgtgtaagccagtggggtcatgacttccgtcctgattacaaggtcagttactgtgaaaatgacgtggactgcagacgcctacttcaactgatccactttggagagaagtttgacccttcgctttgtgcaagaacatgtgataattgcttgaaagagtcaggatgggtcgaaaaagatgttaccaacattgccaggcaattggttgagctagtcacaaggacagggcactcacattcatctacttacattcttgaagtttacagagggtctatgagccaaaatgtcaagaagcagcgtcatgatgctttagctcttcatggagctgggaggcatctagctaaaggtgaggcagcaaggataatgcgacatttagtaactgaggaaatacttaatgaggatgtgaaaaagagcgatatgtatggatcaatatcatctgtcctcaaggtaaatcatttgaaagctagtggtcttctctctggcaagcacaacatcgtcctgaatctctttcatggtatcgagctaggttctcatctcctctcccccaccctcccaccctcagccgctggttggctctcccacagtcgtcggcttgtcgacattgcccctacccccacctcccctcgccctgcgtcccgccaggccccctgctccccatgcccggtgcgcgcgacggccaccatggcagacagctcttgggcgactgtggccgccagtgtccaccccgccaccagcgtcgccacctcacctgtctccaccaccgaagcgcacggccaccagtgtcgcgaccactccttgcgcgtacgacgccttctcagttggcacgacctcttctcgcgtgtgcggcgcctggggctcgcccggcttcggccacctggtgctggccgccgccgctacccaatccatctccaacctcgccacaaccgtcgttcccccctccacggcccatgcgccctccaggcttcctatgctcctcacggtgtgccgccgacgccccctacacagctcctcggcgtcccctccactgttgttgtcttcccgcaacacgactccaccttctctagcctcgacagcatgtcctccctcggcgtggtcgtcgatgcggggctggtgcacggcgagccccctactgcccccctttcccctgcctcgacagccctctacaccgcctttgcaggcatgggcgtggacacccatgtccctgcagcccccatgccctccctgccatgccggcggtcctcgctgccccgtctccggcacggtcgttgctctccgggcaccccttcatgtagctgggctcatccatgggggctccttccccatgtccccctcagtcggttattccgacgacacatcctacaatgtcccaccgccctcaacgcctgcggcttcgcccctccaatcgattccggggacccctacctctgccgcagtccctatgagagcctttgtcatgcctgtcaactcgtcttccctttcctacctcctcgtctagggctgctcaagcctttgatcttgttcattgtgatctctggacatctgttttcagtctctgtggttacaaatactatctggtaa

SEQ ID NO: 38745 - DNA, 282 bp, Zea mays
  Peptide Sequence Number=SeqID_82120
atggggagctggggtggcttaagccctcctgatgaagctctctgtgcggaggccttcggttctgctcatcttgagcaagatgacgaacttcttcagaggcttcgtctatcttcctttgcagaatgtaaagagctaagtagagaagcaaactctcgtggaagacgccggtatttttaccgaggtatccggaaccacgcaaggtcccgactaatcctcgttggtgcccctacgcaaagggaagcccacgcgagggccaagcaccacggtcgagtaactccgtag

SEQ ID NO: 38746 - DNA, 1740 bp, Zea mays
  Peptide Sequence Number=SeqID_82121
atggcggcggcccgacgcctcttctccttccacctccaagcgcgtcctctcgccgccggtgttgccgtcgcgaccccgcactgccacggaaagcatgacgcggtctcgtgcaaggccacggggaaaaccaagcccaaggcgaaggcgggcaagggcggcgagcggcagcataggcgggcgctggaggagcatctcaagcggcgcacccgttccgcagctgccttcgatgccgacctgtacggtcggcgcgcccacgagcaccatatccccgtcttgcttggcgaggtcctcgccgccttccgcaggccccgcccgctccgctccttcgtcgactgcaccctcggcgccgcaggacactccctcgccgtgcgtatccactcgctccctctcatgatggaggcgcacccggagttggagttgtacattggcatggacgtcgacccctccgctctggggattggccatgggcacattgaggccttccttgctggtagggaaagggaagcgaatggaggggaagacgatgccttgcttgggacgctgcgtgcctacactcatgtcaagaacttcaagtacatcaagcaagttctcagtagcgtcgatgagagtctagtggttggatcttctggagttgatggtatcctcattgaccttggcatgtcatccatgcaggccctcaggattgcagtcaatgatgagctccgggttctagaagattcactccattcatgctttgactgtctggcgacaggtggtcggcttgctgtaatctcattccacagtctggaggatagaattgtgaagaaaactttcttggagctcatccatgggggtgaagcaaatgaagaagacgacaaagacgaccaggcactcactgatatcgaagacggagatgaaccatggtctggccagagagtgcaaggaaggaatggaaccgtcctcacaaaaagaccaataaccccctcgcaagaggaggaaaaactaaaccagagccagctgcagtctggatcaccagaaattttacatcagccggatgtggtggtgctatttatcctcgacaagaaatctagaggcttaggcaccagccagccattgacccactcacccacccacccgcgcgccgtcggcgtcgccatcaccgtcgcaccgcgcgctgctcccagcctccctttcccttccctggctgcttggctggctactcgcacgcagatccacccacccacccatcgttccttccgttccgtccgtccacttgccgttgccgaccacaacccgctcccggaggacgggcgggatgagggggcaagcccacggagtggaggaccgccggcagcggggggacgaccacgagggcggacaacgacggcgaggaggcggaggaagaggagggtgacgacgagggccgccacccggggccagggcccgccgcagcagcggcggcaccaggcccagaggccgtactccggcccgcagcagcagcagcagccgcgcccgccgccgccgctcgccaggaacgtcggctacgtcggcaagcatcgcctctccgccgccatcgcccgcctcgaccaggagctccagtccctccaggaggagctggacgagcttgagaccatggaatctgcgtccgcggcgtgccaggacaccagtggcccggagaactcgtcttgggacaggtggttccagcgggtgcgctcccgcagcaacaaatggtgggcatcgaaaggccctgacttctcgtag

SEQ ID NO: 38747 - DNA, 867 bp, Zea mays
  Peptide Sequence Number=SeqID_82122
atgaatgaagttcaagatcactggctggatgaaattgtaaagagaaaagagatcacggtcgtggctcgcttctcccctgcttttccgcatcgccgcagcgccgacgacgactgggtgcgcagcgcggcgccgccgttctacgccgggcgcccaagtcctcgacgggaccttctctggcgacgagcgccccaccaggccctaagctcatatgagcacggagcatcaatgcaagctaataaaccaccaaaggtcaattggccgcaccacgaaaacgctgtccaaggctactctagcagagacgactttctgagttcaagctttctcttctccttgccgacacagaggccgaaccctgaagctcgtgagaggatgctttcgctaaggtcttctgcctgtaaaattcaaggcccagagcgtcttcaggctccgttgatcgagaaggcctggcgttccctatgcaacactcaggctgcctgcaagagctatttaagacctggtttatctgcaaaagcgagagactgtgatagaggtcatgctcgtacctatggagaaggctcatacaacaccaacaaaatgtctactgtgccaggaaacaggattctttccatggaaagcacaggccaacccagtgaaagagtttctctgcagaacaacagcagccatcaaacagttggcatctgctcctctatgagaagtcaccagaacaaccatgttgtgcaggaagatatgagagcaacaaatcaatacaattttgcaagaacaaacgctgcattacaccaatctatggctgctgataacatgtgctcttatgataaatttgatgccatggatgatgatattctagcggttggtgctttcatcccctga

SEQ ID NO: 38748 - DNA, 240 bp, Zea mays
  Peptide Sequence Number=SeqID_82123
atgtcgggaactcacgccaagaaggagatggtgaccggtgagaagcccgccacaagctacgggaaggctccatcggggaagtccggcaacaataaagggaggaatcacctccccgcgtcaagtcgcactggagtggcgacaaaaagaagatatgaagaaaggggtctactacgagaccgattcttcgtcgccctcatcttccggttccgacacgtcttccatcactttctaggcgcctga

SEQ ID NO: 38749 - DNA, 2931 bp, Zea mays
  Peptide Sequence Number=SeqID_82124
atgccgcaacatcaggtgcaacctaattcccagtttgttcaaaatcagtatcatataaatcaacagcagccaaattcacagcatcagcaggctatgctaaggaacaattcctttaaacagtctcaaatggcttccacccattcaatgcaactggcagaacaggggtcactgctacacactgaactggtatcttcacaaactagtgatcctgctgatcttccaagcttccagggtcaataccagcaaagaaatgctcttgacaatgttaaaggagggcagatgcttggtcatctatctagctctcaaaattttcatccttctgtctcacatggttctcagcaattgttgccctctaaccagcagcttgatgacggttctaatgctgtaagctatgtgctgaaaggatcgcaggcagagcaaatgctgcgtcctcaatggcagccacaaacaatggaaaaggctcctgttactactaattcaacactcgaaaagcaaatacaagaagatttttgtcaaagagcaatgtcgcaagatggagcacagcaaccattttcatcagattggcgtctttctaattgcactgcagcttctattgatcctgcattgccgaagcctgcagctggagggtttgaacaggtcaatggaaatatacattacctccgtcagataaagtggttgctgctactgtttcatgcaaaaacatgcacataccctgttggaagttgtaagttccatggttgtgttcaggtgcaggagcttttgaagcattttcagaactgccaaagtaaagattgttcatacaggagctgcagtaagtcaaaaatgatgtctcaccattataaaacttgtgtcgatgaacaatgtcctgtgtgcagcgttgtaaggaagtttttgcgccaatcaactgaacaggcatctaagcaaaaagctctcgagtctagaaaacttgctcaacaaaatgtgcctcagagaatcatgaacgggatagaaggtgatagaatggatgttgacccaatgtcagttgaagcatttgatgatcaaccattcgttccaaaacgcttgaagacgcatcctccatcacccagtggcctagagaatgatatctctgtagtctccaattatcatgtaaactcaggctttgcattgcaggaaacacagcctgagcagcttgaccacaataacaggacatcatatctgaaacgagaggtagatgcaaaggctgacatgcgagctcctcaaaagcccataaaaattagttatggtattgatggaaatgtgactgcatcaaggcataatgtgattcctggtgttcccagtgagattaattctcatatcaagcaagaaaacttgttggttgacaaagagacaagtgaaaccgcccttgaggttaagaatgaaacaaatgatccaactgatgcgactgtgtctaaatcaggaaaaccaaaaataaaaggtgtttcaatgacggaattattcactccagaacaaataatggaacatattgacagtctaaggctgtgggttggtcagagcaaggctaaagctgaaaagaatcaagctattggtcattctgagaacgagaactcttgccagctctgtagagtagagaaacttacttttgaacctccaccaatatattgttctccttgtggagctcggataaagcgaaacgcgccatactacactgtgggtactggtgatacacgtcattatttctgtatcccttgttacaatgagtctcgtggtgagactattgaggttgaaggtcaaacatttccgaaggcaaggttagagaaaaaaagaaatgatgaggaaacggaagaatggtgggttcaatgtgacaaatgtgaatgttggcaacatcaaatttgtgctttatttaatggaagaaggaacgatggaggacaagctgaatatacttgccccaattgctatgttgaggaggtcaaatgtgggctacgcaaacctttaccacagagtgctgttcttggggcaaaagatttgccgagaactgttcttagtgatcatatagaagatcggctatttaaacgacttaagcaggagaaacaggaccgtgcagctgctgctggcaaaaatattgatgagattcctggagcggaaggacttgttgtcagagttgtttcatcagtggataagaagctggaggttaaaccacgttttttagaaatttttcaagaagacaactaccctacagagttcccttacaagtccaaggctgttctcttgttccagaaaatagaaggtgtggaagtatgtctatttggaatgtatgttcaagaatttggtgctgaatgctctttcccgaaccagcgtcgtgtttatttgtcatacttggattctgttaagtacttcagacctgagattaaaacagtatctggagaagccttgcgtacatttgtgtatcatgaaattctgataggatatcttgaatactgtaaactgcggggattcacaagttgttacatatgggcttgtccacctttgaagggtgaagattacatcttatattgccatcctgagattcaaaagactccgaaatctgataaactgcgtgagtggtatctatctatgcttcggaaagcttctaaggaggaaattgttgttgagctcacaaatctatatgaccatttcttccttactatgggggaatgcaaggctaaggtgactgcttctcgcttgccatatttcgatggagattattggccaggagctgcagaagatatgatcaatcaactccgacaagaagaagacgaccgcaaactccagaaaaagagtaaaacaaagaagattattacaaaaagagctcttaaagctgctggccacaccgatctcagcgggaatgcttccaaggatgctatgttgatgcaaaagtttttccccctttgctcagatcaatttcttggtgcttag

SEQ ID NO: 38750 - DNA, 198 bp, Zea mays
  Peptide Sequence Number=SeqID_82125
atggatgaaggccttaagccgaagtttctcaagcttcctgagcttcggttagaaagacaaaatttcgtcatttctgaagaaaaaatgtctcaagacaagaaggttgctgctgagacgaagctaactgaagaggagaagctttttgaggagaagaaggctgtgaatccttactgtaggattacggggatgctacactag

SEQ ID NO: 38751 - DNA, 615 bp, Zea mays
  Peptide Sequence Number=SeqID_82126
atggatcttgtcttcgggctcttacatctgtctgaaggccttagcaaatataatatcatctgcactgcctatatcaaccaaaacattatggaccagaaatcctttgatcacacaagagataaccatagcatcattgtgtgggtaatccttgagctgaagatcctcttgagaaaaagatcttcggctacgaagcatacccccaacaagcgcaaacgtgagccgactcctccctcggaggacttcggcaactcggagtactcggaggaggagttctcctccgagtctgagggatctccggctcccgtctctcccctggcgtcgtctgatgattcagacgactcccagggggttgctgcggaggtctggacctacatccgggccgtcgagcgctccgggctcgagggctcggatgagtcggagtactcctcggacgaggaggactcctcggactcgtccgaggagggcagcggcggtgatggtggtgatgacgacaacgacggaggtgatggtgatggcggcggcgacagtggcaggggtggtgacggtgacagcaagggcggcaatggcggtggcagcaagggcagcagcaagggcagcaacaaggccagtggctag

SEQ ID NO: 38752 - DNA, 477 bp, Zea mays
  Peptide Sequence Number=SeqID_82127
atggcctcctccttgcccctggtcaccactgggctgcgccatcctccgcagcagcagtcgccgagggtggtcctgcagagcgaggacccgaccgagtggtgcgcgtgggcgcaccaggggcaccgcctgtgggtggccatgccggactccttctgggtgtacacgtacaaggtggaccggtgcccgttccggggcaaccacgtgtggacgacgtgcccgtacgcgcactggggggagcgcgcgcgccgccgcgaccccagccgctacgcgtacgccgccgcgacgtgcccggactacgccgactacaagcgccggaaccgcctggccgggtccaccgcgccccccacctgcgcccgcggcctccgctgcgctcgcgcacggcgtcttcgagacgtggctgcacccacagtcggcaccgcatgtgcgagcgggcgtgcagcgcgtctgctacgattctctagaattcgctcatactga

SEQ ID NO: 38753 - DNA, 405 bp, Zea mays
  Peptide Sequence Number=SeqID_82128
atggatttcatcgtgccgctccggaatttcagtcttgagcttccattcgctggtgctacggcaggcctcataaggcaaaagttgaggagtttacggggtggtgctcggagaatcgttgagaggacaacaccagtggtcgtgacgccgcaaccgacaacgccaaataatgctttcatccttgtattgtcgaaggagctccgcaagggaggagtgcaccctgttgaagatcacgcaagggaggagtgcaccttgttcaacataaggcaaaatttcgtttatagatcaagccaacaacaaagaagcgaaggtggccaattgggagaacaggagcgtgacggggggcacaagtggtctagtgtcgccatggagatgttgtccagcaccgagacgtggaggaggcgctag

SEQ ID NO: 38754 - DNA, 1020 bp, Zea mays
  Peptide Sequence Number=SeqID_82129
atggagagatggagcctgggtgccaaagtggtagctctcgcactcctgctgtctgctgcttctcatggaagagagttgcctgtcaagagtagtgaccgcagttttatctacaatcatactcttgcaaagacgcttgtggaatatgcatcagcggtgtatatgacagatttaaccgctctgtttacgtggacatgctcaagatgcaatgacttgactcaaggattcgagatgagatctctaattgttgatgtggagaactgcttgcaggggaactcaagagaacagatttggttaaccagtgtacagaattggataaaagacttgatatggaagcagcttgatctaagttatccaaacatgccaaatgcaaaggtgcacagtggatttttctcctcgtataacaatacaattttgcgtctagctatcacaagtgctgtgcacaaggcaagaaagtcatatggagatatcaatgtcatagtgacaggccactcgatgggaggagctatggcttctttttgcgcgctcgatcttgctatgaagcttggaggtggcagtgtgcaactcatgacttttgggcagcctcgtgttggcaatgctgcattcgcctcatacttcgccaaatatgtacccaacacaattcgagtgacacacgggcatgatattgtgccacatttgccaccttatttctcctttcttccccagctgacataccaccatttcccaagagaggtatgggtccaggattctgatggcaacacaactgaacggatttgtgacgacagcggtgaagacccagattgttgcaggtgcatctccatgttcggcttgaggattcaggaccatttcacttacctaggagttgatatggaagcggacgactggagcacctgtagaatcatcacagctcaaagggttcagcagttccgactggagctagcgggcaacatcatgatgaccaagcacgatatcgacgtctccatcgttgaacctagtgtacaaaacagattggagcagttctag

SEQ ID NO: 38755 - DNA, 513 bp, Zea mays
  Peptide Sequence Number=SeqID_82130
atgttcggcgccctccgagggcaacatggcgctttccccccctcctccttgcggaaaggtgacgcagggactcacttcgccgctccactgatcggcctgacagaaggacagcgccgcctgcgccgctccgactgctgtgccactcgacagaccctggaagacggcgaactccgctccgcccgacctagggctcggacttgggctcagtcccggaagacggcgaactccgctccgcccgacccagggctcggacttgggctcagccccggaagacggcgaactccgctccgcccgacccagggctcggacttgggctcagccccggaagacagcgaactccgatccgcccgaccccagggctcggactcgggctcagccccggaagacgacgaactccgcttcgcccgaccccagggctcggactcagccctggcttcagccgacggtctccgcctcgcccgacccaggggctcggactcgacctcggaggagcctccacatcgcccaacctag

SEQ ID NO: 38756 - DNA, 414 bp, Zea mays
  Peptide Sequence Number=SeqID_82131
atggccaacgtacaccggatggcgcagttccacttgctggaccctcactacgacgagcaccacaggggctgtctcaccgcagagggagaggtgttgcccgttctgcgggtccggacccacgaccggtttctggaggagatgaggtacgatgagaggtacactcctctcctacagagggctggcttggacgtcttatcgtaccaggtccgccgtgggctgcccactttcaacccagcggcgttgacggctctggtcgacaggttcgacagacagagacagaagaaggtcacagacttcgagacgcaccatcgtgattacattgatgaatgggaccagcagggggatctgaactatgagaatgaccaggcgcacacaaactacaacttccggaggtgtatcgaaatgataatataa

SEQ ID NO: 38757 - DNA, 598 bp, Zea mays
  Peptide Sequence Number=SeqID_82132
atggccgattctaaagatctcaacagtgcttctccaaacagcgacacaaggctgactaatttatcggccgcagagcatgaaaacttagaagatgacatgaagaagatggatgaggagatccaacgacaacaagatcagatgctcaaggtggcaaaaaagtggtacctctcgcacttcaaggtagatcgccaccagaaggtcataaaggaaagggaaatagacgccgattacatgtcatccgtgctgcaacagctccccacaataggtgatgccaggtcggaccgtccggagcaccagaagtcacctgtgatccgcctagtgcggaaggccggcataaatataaccagccacccaagccccaagaaccaaaaaaggaagacaccgctcctgcgtccaggtcgtggaccgtccggcctaaggtcgtggaccgtccgcgccgccgcagagggcactatcaggcaacccggcgacctgtcgcaggccgccaccgctgttcacctcgcggagccgaacccaagccaagactctgctcagtctggatgcaccggactgtccggtggtgcaccagacagtgtccggtacgccaggctggcgtctg

SEQ ID NO: 38758 - DNA, 240 bp, Zea mays
  Peptide Sequence Number=SeqID_82133
atgaagaggattcctgcgcctgctccttacaatttcagtgagccatcaaaatacatccgccatacttctgcagtctccggtgcgaggccgaaactcgatgttgtgagcccccagctcgcaggcccacttggctattcttccaatggcttctttgttgtggagaatatcccctattggaaatccagtgactactatgactttgtggtcatcaaagtagtgacggagcttgcgcgtagttag

SEQ ID NO: 38759 - DNA, 483 bp, Zea mays
  Peptide Sequence Number=SeqID_82134
atggcggctcgcccgcccgtggtcggcctggccccagccttgcgcgcggcatggcgtggcggcgcagctcgcctgtccccagctcggccgtggcggctggagctcggccacggcgccccgccccgccccgcccgcgcggcgccccgcctgtctgcggctcggcgcggccttgcgcccgccctatccgacgtcgcggcgtggcttgcccagagcgacctggtcgaggaacccgaagagctcgcaggagaagcccctgagcagcagtcgttgtggtcttcaagggggctcgagtggtttctcgagtgcctctccgttgtcagcattgcaaccactgctcaggcgaagatgaagctgtggaaggagacttccaggagttccaagactacgacgagttctaggtgtgggttagcggcaacccccagtcggctgcctatgaaggccgcggttatctacgtttcgttttcgcactttgatttattgtaa

SEQ ID NO: 38760 - DNA, 294 bp, Zea mays
  Peptide Sequence Number=SeqID_82135
atggagcaatcaggacttgggtacctccacaagtcgagtaattggtatctaaagttggggagaatttgtgcattaaagccttacctcgaccctgagaggaaagcttatcctaagtgtgaagaggagataatcgatcaagccaaggatggagacaagaagagcttcgaggtaccgagtgcacgggagaaggtcaaggagaccaggaacccaaagccaggggtgaagaagaagacttgcaaagtcaaggatgatcgagttaagaagagttatggtgcatcaatgatcactacataa

SEQ ID NO: 38761 - DNA, 312 bp, Zea mays
  Peptide Sequence Number=SeqID_82136
atggcgaagacggcggcggaaaacatctttctaagcaagcaatttataccaagtgaaagaaaacggaaaatattgcaaaggcgggaaatagatggagaaaagcgatctataggacataagagagtaaaaatgagcaaaatggcaaaaggaagtagcaagtgtgtgcatacaaatgtgaccatgcaagtaatttctgtaagctgctcaagtgtgggaaagattttagtttgtgtcggccccatatggagttgctatggacatgagagttcatgtggaggaggacaaacgactgatggtcatttagaaaactaa

SEQ ID NO: 38762 - DNA, 537 bp, Zea mays
  Peptide Sequence Number=SeqID_82137
atggatcccacacagatttcgatcccaccaggctacccaagcggaacaacccaatccaacccgacaaatgctacagcctgcggagaggagaggaaaaagaaaaaacgggtacccgaattccgggtacccgtatccgacccgggatttttgggtactgaccgggtattagtgattccgtatcctacccgtatccgaggttcaatatccgggctacagcaagaaccatcagctctccagtcttgccgccatgttcccgttgccgcctcccgtgctcccgaccccggcgatagcctcccattcgtgtctatgggtgcggccaacttcacggccaacggggaccgggctcgccggtggggacgagtagccgggtactgtccacgacgcaccgacggggatcgggctcacgccacagtggcagccgagagcctttgctccttgcacgtgcttgtgctgctcgccggcgcccgcgctcttgtgctcctccccgacggctacggacgctcgtcatcagatagaggatctacaggaaatctgtag

SEQ ID NO: 38763 - DNA, 324 bp, Zea mays
  Peptide Sequence Number=SeqID_82138
atgatgaaccagcacagggaggaggatgcattgagaggtcaagcagtcaaaaaccagaaggcgatatgggacaagaccctggaaatgagattcttgctgcagaaggcattttctacttccaacaagttgccccaggaacccatcagagcaaggttttgcaatcatgataagcagatagaacaagcctatgatgatctgttgaattcatcgaagcagactttgagcagcatgatggagctgcaggaggctatgctcgagagtaatcaggctacaaagggtgccaatggtattgctactctccacattgttcttgttctactgtaa

SEQ ID NO: 38764 - DNA, 1647 bp, Zea mays
  Peptide Sequence Number=SeqID_82139
atgtcgacgagcgtggcagtgggatcgctcggcgagtctccttccccgaggaaggcgctgcttctgctgccgccgctgtgcgcggtcctcgccgtcgtcgcgtggtgcgccgcgcgcgcggtggagtgggcgtggctgaggccgcggcgcctgcaacgggagctgcgggcgcagggcgtccgcggcacggcgtaccgcccgccggccggcgacgctccgctggctgaccggctcggccgcgaggccaggtcccggccgcccctgccgccgggcttccacggcatcgtccccagggccttgccgctcgtccaccacggcatgaaggagcacggcaagaactcggtcacctggttcggacccatgccgacggtgaccctcaccgagccggagctggtgcgccaggtgctgtccaacaagttcggccacttcgagaaggtcaacttcgggcagctcacgcggctcctgcacaacggcctgagcagccacgagggcgacaagtgggccaagcaccggaggatcatcaagcccgccttccacctcgagaagctcaagctcatgctaccggccttcgcagcgtgctgcgccgacatggtgagcagatgggagggcttggtcgctgcggcggccggcgagccatgcgaggtggacgtctggccggagatgcagaggctgaccggggacgtcatctcccgcgccgccttcggcagcagctacctcgaaggcaggaggatcttcgagctccagggggagcaggtgcggctgggcacgctcatcgccaacaagatacacatcccgggttacatgatgcttccgacaaggatcaaccggcggatgaagcggatcgcggcggagatcgaggggatcctgcgagggatgatcgcgaacagagagagcgcgctgagggcaggcaaggcggcgagcgacgacctcctcggcctgctgctggagtccaacatggaacagctcagggccagtaacggcggcgggcgcgggacgagctccggcggcggtggcatgaccagcgacgacgtcatcggggagtgcaagctgttctacttcgccggcatggagacctcggcggtgctgctcacgtggaccacggtgctgctctccatgcaccaggactggcaggaccgcgccagggaagatgtgcgccgcgtcttcggcggcggcgccggagtgccagactacgacggcctcagccggctcaaaatcgtgaccatggtgctgcacgaggtgttgcggctctacacgccgctgccggcgataccccggcggacgtacaagccgacggagctcgggggcgtcaggtacccggcgggcgtgatgctcatgctgccgacgctgtacatccaccacgacaaggacgtgtgggggccggacgccgacgagttcaggccggagaggttcgccgagggggtcgccagggcgtccgccggggacgcgccggcgttcttcccgttcggcgggggacctcggacctgcatcggccagaccttcgcgctgctagaggccaagatgtggctcgccgtgatgctagccaacttcgcgttcgagctctccccgtcctactcgcacacaccgttcccagtcggcctgctcaggccggagcacggcgcgcaggtcaagctcaggaagctcccatga

SEQ ID NO: 38765 - DNA, 417 bp, Zea mays
  Peptide Sequence Number=SeqID_82140
atgaccatgaatgagaatgaacctgtggttggttggttggctggttggctggcatggcatgcaggggagttcgcggcgttcctgacgggggtgaacctgatcatggagtacgtcttctccaacgtcgtcgtggcgcgcagcttcacggcgtacctcggcacggcggtgggcgtggacgcacccagcaagtggaggatccccgtgctgggcctgccccaggtgttcaaccaggtggaccttgtcgccgtcggcgtcatcctcctactctccgtctgcatctgctataggtttgttgctactgttgactgctgcttcttgtatcgtcagaggtatctgtctgctagaactctcggtctgaatggtgcttttagcaaggttgccaagctgggaactcatgatgttggtgcatcctgctga

SEQ ID NO: 38766 - DNA, 357 bp, Zea mays
  Peptide Sequence Number=SeqID_82141
atggcgctgggccgaagaggaaaataccagttaatccctgatgatttatgttgtgatcatcatttgagaataagtgaccaacaacagcatgaggcatcgacctccgtgcactcaccctctgtgaggaacgcacgaactgaggacttgcgggcagagctcgaccgtagacgtgtgggcgaggatgcctgtgtttccatggagagggcgcatgagcgccgacaaaacatcaagggttggaaccttgatgccgacttcggtgcatcagcaccaccgtctccaggaaatgccagggtcggcgtacctatggctggagtaggctacactgcgcttgtggatcatctccgcagtgtggcctag

SEQ ID NO: 38767 - DNA, 483 bp, Zea mays
  Peptide Sequence Number=SeqID_82142
atgggcaagagcaagaagggtggtagttcttcgcatcactccggtgacaagcggaagcgtgagccgactcctccctcggaggacttcggcaactcggagtactcggaggaggagttctcctccgagtctgagggctcaccggtccatgcctctcccccggcgtcgtctgatgactcagacaactcccaggggctcgccgcagaggtgtggacctacatccgggtcgtcgagcgcaccgggctcaagggctcggatgagtcggagtactcctcggacgaggagaactcctcggactcgtccgaggagggcggcggcggtgacggcgacgacgacggaggcgatggtgacggcggcgatgacggcggcgaaggcgagggcaacggcggtgacggtggcggcaaaggtggcagcgacaatggcggcaatggcagcaggggcagcaacaagggcagtagcaagggcagcaacagggccagtggctag

SEQ ID NO: 38768 - DNA, 525 bp, Zea mays
  Peptide Sequence Number=SeqID_82143
atggagcgcaagcgagatgcgcacggtacccgcgagaacgaggacgcgacttccttttttcttttcggattgctcgtctggaaggctcgcgtggagaagcacaaatacagacatctggagaccgttcgtctttctaggcgtcgaggaggaggcgaggggcgaagggagtttgggatgaaggcgaggccgaggtgtggggccacgacggtcgttcgtcttcccgggtgtcgaggaggagacaagaggcgaaggagagggagtccgggatggaggtcgggccgaggtgcaggcttacgtcgagcaacaaggccgcagccgtcgagcgaggaggaggcgagaggcgaaggtgatggaggccaggatggaggcggggccgcggcgagcagcgaggccacaaggcgagggaagcatacatggaagagaggcggagcacacgcaagagagacggagcacaacgagagcgtcggtggagagtcacggaggcagggcgtgaaatttctagaatcttcgggacgcaggatgtga

SEQ ID NO: 38769 - DNA, 705 bp, Zea mays
  Peptide Sequence Number=SeqID_82144
atggggtggggcctgtgtcgtgtcttcatcgggctcggcggttctcccaacaagcaccccagcataaccatcttgttcgccgttgcggtaatcctcgcttcccagttgcggggcttcgactgcccaagaggggctttgcctcggtggcgatttctaggaaggcgggtggagccgaggcaggtcggatgccatggcatacatcgtggcaccagtggggttctcctggggctctccgtgagcgaggagggatcccccatcgagtcgtccatgaggcattcatgtgccaggttgtggctagtcccacttgatgggaaactgagtccgcattttgaccccgataggaggaggtcatggaacgagtcccatatagggtctagcattcccacgatctcgacgaaagtgggttacagcacacatcactgcctgtcatctcctcgtggggggaccgagacggaggctgtcgaggcctttggtaatgccgagcgagtcgctcgtcgggggaaccgggcttttggggccctttccattgttcccttgtcacggatgacgaagtcgagacttccaaaccgattggtcatttcgggggtccaaaccacgccaccgccgttgctggccatccggagcttggaaagttcatcgagaacgcgcaagcccctacctagcatgccaactgtcagtgttttggacctccgctctgacaagtaa

SEQ ID NO: 38770 - DNA, 261 bp, Zea mays
  Peptide Sequence Number=SeqID_82145
atgaagaggcctacactaccttgcattgttactgaagaaaacctggcagcactatttataaattgtggacagtctgatgatgaacaggaaatatgtgcgaggactatttactgcacaaacattgacaagaaggtcactcaggcagatctgaaattgttctttgagtctatatgtggagagaaaatgacaattcaaccagcacagtatcattggctcactgcaatgactgctacaggtctttcggctgaggttgcttggtga

SEQ ID NO: 38771 - DNA, 1290 bp, Zea mays
  Peptide Sequence Number=SeqID_82146
atgtcctcctgggagctccggacccgttcatacaggggtccggcgttccttggagatctggacccatcgatgcaccttgggaaggtaccgactgtggcccccaggcccgccttaggtgaggatgtgagcctgcaggtgggaccagagtctgattggcggttggaccgctgctcctgcgcgcctgttgctacaattactgtcggcccgcctatggccatgccaactgctatgcctattcccacggctaactggcccgtgaccatcgtacttaatgtcactgttgggccatgcgcgggggtgcctcgagtcgctgcactggttctgaaatatttaccttttcagactcccgtgacggtctcgaaaagacgtggcattggcgcaagcagcgatggggtgcgccggtgttctctggagggatccgcgtcaaggtcatccctttccggcgacttcaccgccggagagcgcgcgctcgtgcccggctgcggtcccccgacggtggtcatccagaaggatgactaccagcattgtggtggggagaagcaagccggactgcggcctccctcctcccctcagcttcaatactcgggggagaagggcgtcggctattcatgcggaggaggcgaacttcgggtacgcggggctggccgactgcgggtgtcgccagccaccgcgtgcccgatgccttggcatggatggcttcggcgccgcctccaacgctgcctcctgctgctgggctggggcgtggctgcccgttcaccgtacgggcgacggtcgcaccgtgtgcaggtcggccacacctacggcttctctcgcaccgccgaccgtactggtgggtcatacatggtgtcgtacgtcgcgggagcggcgactgtgttcttggatgtcctcactcccttagcaaagacgggagcgaggaccttcaagcgcgctgaggcggctatcgcccaccggtgcagggaggcggccgtcaccgtcgatgctgatgtggtcgcctctgctggcaagccactcgaggcttgctatcccgtggcccttaccggcccacggtacgggaccaggctgagcggctacatggtttctggaccccccaggagacaagtacctgttcttcagagccagacctccaggcttgatgtgttgaggttggataccagcgtttctgaaaaggttgtcaacaatcctcaggaggcaaactcgccgagatctggaactggcggtggagcgtgcaggcccacggtacgggaccaggctgagcggctgcacgggctctggaccaccccaggagactaa

SEQ ID NO: 38772 - DNA, 267 bp, Zea mays
  Peptide Sequence Number=SeqID_82147
atgaatgacactgagattttctacgaaaagatgatacacgagtctccaaggctcaagggactcgcgtatgaaattactgaggcatatgtggtttcatctctcgtctcgtcctggaagcaaacaaccatgaggattctagagattgttgatgaggccaatacaaagctcatgagggattatgtcgtggagagatctggctcaaacagatatcttggtggtccattgccagctgccattgggaagttgcttaagcttgaatatttgtaa

SEQ ID NO: 38773 - DNA, 261 bp, Zea mays
  Peptide Sequence Number=SeqID_82148
atgtcgcgccctagatcttcgcccaggcagttgagggagagattgggggagatctgggtcgaggccgaggctcagaccccgtccccagcaagttcatctcgccaagcgtgggatctgggcgctggtacatggagcaacctcgaggttggactcgcccatggcgcggaggagctcgtcgtggcgggaggccaggaaggccgcgagcgtggggagcaggtgcaaggagatggcgagcaccagtgcctgcgcggtgggggatag

SEQ ID NO: 38774 - DNA, 915 bp, Zea mays
  Peptide Sequence Number=SeqID_82149
atggagagctccagactcacctaccccgaccgcttctacactgtcgcggcctacgccccgcacaaggacgaggccatcgtcggctcgccatctccctcccttctatgggatgagcccttcccgtcctctgcgacggcgacggccgcggctgcgggcggcatgggccagctcctcctgatgtgcagcttcggaggccggatcatcccgatgttcaaccgccgcacgcgcggtggttctccacggacccatggacgtcgacgcgcacatggacgatccctggaagcacagggggaatacggcgaggtgcacaaggtctgcgaggtagtaccatcgacgaggcttctccatcccctccggcgagctccccttccaaaaaaaagtggtgagctcttgaacaccgaagctcctgacttgtacataaggcagaatcctgttccaaatgcctacaccttagcaatcaacggcaaaaaaccattcattgtcgttcacacaagccttgtggagctgcttactccaagggaattgcaggctgttttggctcatgagctgggtcacctcaagtgtgatcatggtgtttggctcacttttgccaatatactcacaatgggagcatacactgtccctggtttcgacatggttgctggctttttggaagagcagctatatagatggctacgagctgcagagctgacttgtgacagggcagctcttgtggtgcaagacccgaagtgtccaaaatggtttaatgtcagtatgttttgttttgtgcttggtgcagagatggagaaccagagagcgctcaagggcatcatccccgccaagaggatgttgttccgtgccatggccgccacatcggtggcaactgacgagatcgcgacagcaggaaagggtcgatccaatcaggctaatagatga

SEQ ID NO: 38775 - DNA, 882 bp, Zea mays
  Peptide Sequence Number=SeqID_82150
atgcccaatgacacctctgtcgggatcgcgagggatgcgttcaacacgttcttcagtgaaacgggcgcagggaagcacgttccaagggccctgtttgtcgacttggagcccactgtgattgatgaggtgaagaccggggcgtaccgccggcttttccatcctgagcagctcatctcacacaaggaagatgatgcgaacaacttcgcccgtggacattacacaggtgtgacatgttcccctcaccctgagctatttcccggagaacagaaaatgtttttgcaacttaaaatgcaatattggttcaaactgtattcttatcagcttgtcactgttatgcaggctcaaaatgttcttggaaacaaggggactgaaattgcaaaggtagcacatcggcgaactgatgcggaggcgggcgtggaggcgctcgatgccgtccagcaatcagtagttgtcgctgcatcggcgacttctttcccccaccagcgtggccgcgtgaatggttcagcctacccagactgcttttgtgaagcacattgctttctgagaagccatttgcagtgcaaggatgaaacttggtcagagtgtttaccatatggattggcagtgaaaccaaaaaagaaggcgtgctactgttcttccgtattcatgtcaatgcaacaacagctatgcctggtgagtggagataagtggaggtggcactaccaattccttaatgtaccaggaatgtttggattgttgtattctgacattgtttggttcaacatattcaagatcgatctagagaccaacaagatcatggacttcttcaagtttgacgtcgataacgtggtcatggtgaccggcgggaggaacaccgggcgtgtaggagtgatcaagaactag

SEQ ID NO: 38776 - DNA, 384 bp, Zea mays
  Peptide Sequence Number=SeqID_82151
atggaggatgcaagttacccttcagaacaactcttaatttctggagaaaaggaaacacaggaccagatttactttataaaacagatcgaatcattgggaaatgcttgtggaactattgctctactccatgctgttggaaatgcatcttccaaagtcaatttagtggagaattcatgcttggacttgttcttcaaatcaactgctaccatggatgaccctcatgagcgtgctgtgtgtctggagaaggatgatacaatggcaagggctcatttacttgctgccaatgatggtgccactgagggtatgagcccagatgttgcgacagccccaaagagcaaaggatgcctgatgattggagaatataacaaggtcgccaaaaagtga

SEQ ID NO: 38777 - DNA, 174 bp, Zea mays
  Peptide Sequence Number=SeqID_82152
atggggaagcctgtcccatcactcctcatgctcctcctcagccaagacaatcaatccccatggattgttgtccacagatcaacatcattatgctatgaacgtggatacaaccaaatcctgacctcgcgcaagtgctacaaaaatcacttgacttctaccgagaaccctaattag

SEQ ID NO: 38778 - DNA, 414 bp, Zea mays
  Peptide Sequence Number=SeqID_82153
atgggcttctttcctcctctctctctttcttcttgcgtggctaacttggggctgctaatggctggattcaataggaggcgccagggccggctatttatggttccgggcgagggagtcagggaagcgcgacgttggtggaggaaatcccgaactccatgggggtttgttgcgccaaccgagggaagtccgcggcgttcgttagtttggcaacatcgagcgagggaggaagaaactgacggggatggcccactggaagtgattgcttcttaccccatgcgaatactggaccaaggctggaatgcggggatgggagacagacaagtgggacacacctgtcggtgcagggtcatgcagccatctattaggtcagatgaggtacggttatggcaagtagaggttgtggcaagggtataa

SEQ ID NO: 38779 - DNA, 216 bp, Zea mays
  Peptide Sequence Number=SeqID_82154
atgggggttgtgtggccattgatcatcgaccaaagatcacattcttggatttcaagtgcagactatttcttggtcaaaaatctgttggtgttagccttcggtatcattgaaaatggtcgttcatggctattttcgacaaaaatggggggttgtgtggccatttatcatcaaacagaggctcatacacctcaccccacatatgtttccttgccatag

SEQ ID NO: 38780 - DNA, 372 bp, Zea mays
  Peptide Sequence Number=SeqID_82155
atgggcaagaacaggaagggtggaagttcgtcgcaccactccggcgacaagcggaagcacgagccaaatgattcccaggggatcgccgccgaggtgtggacgtacattcgggccgtcgagcgctccgggctcgagggctcggacgagtcggaggtctccttagacgaggggaactcctcggactcgtccgaggaggagagcggcggtgacggcgacgacgagggtgacgacggcgatggtggtggcgacgacgacgtcaagggcgacggaggcaacaacgacaagggcgacggcaacaacgacaagggcaacgacagcggcaagggcggcggcgacagcagcaaggccagtggcaaagcgccactggtttga

SEQ ID NO: 38781 - DNA, 309 bp, Zea mays
  Peptide Sequence Number=SeqID_82156
atgaggtgcatgagcaaaaggagccctgaattggtgataacaagtgctctcataaaggcaaagtctctaggtggaaaagagaagatgtgcaagaaatggagcaatcaggatttgggtacctctcatcatggtttgattcttgacacaatgcattccaaaattgctaaggtgcgtagctcggagacaactgatcaagccaaggacggaggcaagaagagcttcgaggtaccaagtgcacgggagaaggtcaaggtggctgaggaacccaaagccaagggtgaagaagaaggcttgcaaagtcaagggtga

SEQ ID NO: 38782 - DNA, 504 bp, Zea mays
  Peptide Sequence Number=SeqID_82157
atgcaacttaagcttgagaaccttattgtggagaaaaagaaagttgcatatgttaatgatgctattgagatgcttgagagaatggctcaccgtggtgcctgcagctgcgagaagaatacaggagatggtgccggcatcatggtcgctctaccacatgacttcttcaaagaggtcgcaaaggatgctgggtttgagctacccccaccatgcgagtatgatgttggaatgttttttatgccaacagatgaaaagtgtcatgagaaaggcaaagctgagtttaagaaggttgcagaatcactgggacatgtaatactcgggtggcgtctggttccgattgacaactcagacttgggtgaatctgcactcgagactgagccagtcattgagcaggttttcgttaccaagagctcaagatcagaggctgagtttgagcagcagctatatatccttaggagactctcaatcatctctgttcgagcctctctgaacattaagcgtggttga

SEQ ID NO: 38783 - DNA, 2412 bp, Zea mays
  Peptide Sequence Number=SeqID_82158
atgttgcacctgaattctccttcctgctctggacatcaagtcagctttccaattagggagttgatctgcaattctttcaacaaagggctggaactgctgccgagaaagcattcagatggcaaccttcccctgcagatggttaagatgttggacatccttgcagaatatctctcccttcggggatttcagtttcagaggcttgatggtagtacaagagcagatcttcgtcatcaagccatggaacattttaatgctcctggaagtgatgacttctgttttcttttatccacacgtgccggaggacttggtattaatcttgcaactgcagatacagtgataatttttgattcagattggaatccacaaaatgatctgcaggttcttcctctcattctcttcctcctgcaagttcttgatcacttggttattcagaagctaaatgctgagggcaggcttgagaagaaagaatccaaaaagggtggctccatatttgacaagaatgaactttcggctatcttgaggtttggagcagaggaattgttcaaagaagacaagactgatgaagaggccaagagaaaccttgaaagtttggacattgatgaaattcttgagagagcagagaaagtcgagacaaagggtggtgaaggggaggaaggaaatgagcttcttagtgctttcaaggcatgtgatgtcgcaaacttttccagtggcgaggatgatgcaacattctggagtaggctaatacagccagatcctgcagatattattcaggaaactttggcgcctcgtgctgcacgtaataaaaagagttatgttgaagatccccagtttgacaaaaataataacaggaaaagacgtgcagttgaagcacaagaaaagccaaggaggcgttctggcagaacagtggaaacagttaattcagtaccattggttgatggagcagtagctcaagtacgagagtggtcttttggtaatattccaaagaaggatgcttctcgttttgtacgagcggttaaaaaatttgggaatgcaacccagattgacttaattgtggatgatgttggtgctgttaaagagaatacagatatcaagggcacagttttggattttttcggtgtagctgtgaaggcctatgaattgctagctcgtgttgaagagcttcagttgttgtcaaagcgcattgcacgatacaaagatccaatcaagcaataccgcatccaactaccttataaaaagcctcagtggtcagcaagctgtggatggactgaaactgatgatgctagattgatggttggaattcattggtatggctacgggaattgggagaaaatacgtttggatccaaagcttggcctgacaacaaaaattgcaccagcaacacttggtgagagagagacatttttaccacgtgctccaaacttggataaccgtgctagcgctctcctgcaaaaggaatatgctaagtttagcggtaatagctcaaaagtcaaaggaaatgcccgccagacagtcaataacgacagtaatagtggagctcgatcaatgagaggccgacaaaaggatgcaccagataaagaggataataagccgaacaaagatgacattcagaagcgcaaggtaatgatggaagctgaagcaagagaagaaggtgaaatttctgaatcagaggcagagacaaagtatcgtctggacaaagaggagaagtggctcgaatggtgctctgaagttttaaatgaggaacaggaaactttgaagcgcctggacaggctgcagaatacaagtgtaaacctcccaaaggaaaaggtatctgctttgtgtgggacaataatccgcaagtatctcctgataattggggacaaaattggtgaagttgtccggcaacacagtgaatcttataggcaatcccgtaagtgtagccgcacctcccgcatgaccatgaggttatggaattatgttgccaccttttcaaacatgtctggggagcaattgcatgatctctatttgaaacttagtcaagaccaactggaaggtggagttggcccatctcatggtgccaatttcacatccattccttccagcaagggaggtaactcaaatcaacttcatcctacaagaaaccataggccaaccaggtctctccagtacaattctgagtctttgcacaataatgagagctctggaagttctgaagcctggaagcgtcgacggagagcagaccctgataatcagtttgacacccagcctttgtatcaacctccaattatgacaaatggaaataggttgcaggaatctagtagttctgcaggaattcttggttggggtccagttgaaatgagacggtatggtaatgaaaggccaaagcgtggtgttcatcctagtcattttcctactgggcatggacctttgttgtag

SEQ ID NO: 38784 - DNA, 700 bp, Zea mays
  Peptide Sequence Number=SeqID_82159
atgccatcagtggctacaattgtacaaccagagggcgttgtgatggcacggcccagcgcgaaccagcctcggcccccgcacaagggcggtgtgggccatcaacggcaaggccacgcgcagggcagcgcgcctcggccaaccgcagcaccctacgtgatgggactgactgtacaagggtcatggggctcccgcacagggcctgcgacctccctgccaggggcgtggcacgaggcctacagcctcccaggcgcgtgctcggccacgggtgagccccgagcgaccccgtcggcgtgtgcagcggctcccaggcacgggcgcggccggctccggccatctggatcctggttgtcgcctcggtctgcttggacgcggcctgggcgcctgctcggatgcggcgtggctgcccgctcgggcgcggcgcgagagcccgaccagggcgcggctggtcccaatgcgggcgcggtcggcgcaaagacgtggcggctgggcaaaccgccctggtggcggcagcgactgggcatgggtaaccctaaggctgtctccagcaacaaactctatacactcttccggcagacgtcgttgggtggagaggcggcggcgtttgtagcaggaggccgagtgaaggtggcgctggccatggacagagatctgaggagcggcggcggccatgattggaatcgaggagcgacggcttggtctg

SEQ ID NO: 38785 - DNA, 2772 bp, Zea mays
  Peptide Sequence Number=SeqID_82160
atggcattcttcagcaactccgggagcaaggctgattcaggagggtacaacctgaatgaaaaggccgaagatgagggcatctacgagtcagttcaggatgggaatgttgacctgagttctaggcagtggaacttaaatgagaaagcagatgatgcttaccattgtgaagcagagcaatatgaggcgggccagtcaggtttgtactcttctgagaaggcatcagggcagcatatccagaaaggaggcagatcttctggtggtccatggggcacaaattttctgaaggattccaggtccaaacagatggccgaggatgttccatcgaatagtggtagaggaatgaatgctgctagcttgcatgatggcttggatgatagtggagaggatgatgagctgaacagggcaaatggtgaggtgcctgctgaggaaatgctctccgatgactattatgagcaggacggagaggagcagattgaatcgttgcatcgtggcgggacgaagcaatcaagctgttccacttctggtggggcagcaaaatctggctcacgacaaatgaaggcgtcaaagtacaatgcttatgacgacgatgatgacgatgactataatgatgagaatgacgatgacaatgacgctgatgaagacgaccccgctgatgtggattttgagccagacagcgaaacggacaaagctactgataaggataagtttatggatagtgagaattctgatggcgacgatgatgatggccttgaactctcagatgatgatgatgactttgttgagaaccggaggcaacctaaacgacttaagattgtagcaactaaaacttccaagggaaggaagttgcccatgccagctcaacgaaaacgaggggtgtctcacagcgatgaagaatattcttcaggaaaagattcagatcttcccagtgatgctgatttcaaacacagatcgaaaagacctgacaggttgcatcagaaatctgtgggccgcagtgatgttgccccaatcaattctcataatgagcttcgaacttctggaaggaggacagtgaaaaagatctcatatgttgaaagcgaagaaagtgatgatagcgaggagaagtcaactaaacaacaaaagctcatgaaggaggagctggaagaggaagacggagaaacaattgaaaaagttctttggcatcaacccaagggtgtagctgaagaagcaataaagaatcaccaatcagctcaacctactgttgtcagcctaacatcggactttgatcaacagtgggatgaattagagttctatataaaatggaaaggccagtcttacctgcattgtcaatggaagacattatcagagcttcaaagtgttagtggattcaagaaggtaataaattacacgaaaagagttgctgaggaacagaggtacaagagggcactatcacgtgaagaggttgaggtgcatgatgtgggcaaggagatggagctggatcttattaaacaatatagtcaggttgaacggatatttgctgatagggtcagcaaagctgatggagatgatctggttcctgaatatttagtcaaatggcaaggacttccttatgcagaatctacctgggaaaaagatacagatatcgattttgctcaagatgcaattgatgaatataaggctcgtgaagctgccacatctatacttgggaaaacagtagatttccaacgaaagaaaagcaaagctagtttgaggaggcttgatgatcagccagaatggctaaaagctggtaagcttcgtgattatcagctggaaggactaaactttctcgtgaatgggtggagaaatgatactaatgttatacttgctgatgaaatgggtctggggaaaactatccaatctgtttccatgcttggcttccttcataatgctcaagaaatcaatggtccatttcttgtagttgtgccactgtcaacattgtcgaactgggcaaaagaatttcggaagtggctgcccaacatgaatgttgtcatttatgttggcaaccgtgccagcagagagatgtgccagaagcatgagtttttttcagacaagaagggtgggcgtcatgtaaaattccatacgttgataactacatatgaggtgattctcaaggacaaagcggttctttccaagatcaaatggaactatcttatggttgatgaagcccaccggttgaaaaattgtgaagcatcactatatactacccttttggaattcagcactaagaataagctgcttatcactggaacacctttgcagaacagtgtggaagagctttgggcattacttcatttccttgatccagttaaattcaacagcaaggatagttttgttgaaagatacaaaaatttgagttccttcaatgaaaccgagcttgcgaatctgcataaggaattgaggcctcatattctaaggcgggttataaaagatgtcgagaagtctttacctcctaaaattgaacggattctacgtgtcgagatgtcaccccttcagaaacaatactacaagtggattttagagcggaatttccagaatctaaataaaggagtccgtgggaatcaggtatcacttttgaacattgttgttgaattgaagaaatgctgcaaccatccatttttgtttgaaagtgccgatcacggttatggtggagatagcattggcgatcggaataaagttgaacggattgttatgagtagtggtaaacttgtcttgttggacaaactattggtttgtatctaccagaatctcgccacttga

SEQ ID NO: 38786 - DNA, 727 bp, Zea mays
  Peptide Sequence Number=SeqID_82161
gaggcagaggaggggagaagccaccttgcagaagagcctgccggactccacggcgacgagcggcctgacgccaaatggcgacatggtcgaggagacggttgtgggggatggcgaggcgagcacgagcgccgcttcggcccacgccagcatcgcggcgcgggcgggtgacggcgggacgcggagggcttggggcagcgaagagcgaaggcctggggccggcgacggcgagcagagcaggtatgctcctcttgatagttgtcttttcacaactgccattaccacttcagatgaaagatataattggcctgttccatggcctgaaagacttgatagagaatacttcaagcaaggaaagatagagcagttccgtcagattctggaggaaggatctggccctgaaattgacgagtattatgctgatgtgaagtatgaacggatagcaatccttactgctttgggtgctttccatactttcttgggaaaggttgatagagcaccacagaaggaatcacattttaaagatgcaactcaatactataatagagcatcaaggatagatgaaactgaaccttctacatggattggaagaggtcaactctgtattgccaagggtgagttgcaaatggcgtctgactcgttcaagattgtgttggatgaagatgagaacaattttccagctctacttggtcaggatttaattgatggaatgctctgggccagttcttga

SEQ ID NO: 38787 - DNA, 525 bp, Zea mays
  Peptide Sequence Number=SeqID_82162
atgagcgagaggcagaagatgattagctgcccgagtgagcagccgccgatagccctcagcgtctggagtccgggggagtccatcggctatccgagccaacactccaccgacctcgctcggtgtgttcatggctcgggcgaagtcagggctcaggtttcgtctgaagagagggttctctcggcattgtctcgcctcctgcttggcttgctcttgagcctaccgacgatcacgtcggcgggaattcctccttttcctgaagcctcgttcatcaggagtttctcccacctccgagatctcatctcgagatacaggctgcgccgggtctcgttctccggcttcatagtgtcgccgaacattccggcgttagttcctccatcggcgagcttctcgctgaggaggttcttccccagacatggttggctcgtcgtcggagatgggggacgattccactcttcccccgatgaagaggacgtcggggtaaaatggagttgccgtgacgacaagcttctctctgttctcctttga

SEQ ID NO: 38788 - DNA, 2948 bp, Zea mays
  Peptide Sequence Number=SeqID_82163
atgaggcgtgggcccttctcgccatacagagagactccctcacgaaaactcaccgtctcccgctctcgatttcgaaacactcgccactcttcgcctcccgttccccagcccagacccgaagccctgcgcctccccctccgccgctcgccgggcgagatgtccccgccgttcgtgttcccctcgaccctgcgggatctggagctggacaccgacggagacagagacgaggagccctcgctccggccgcagaaccccgtcgccgtcgccacgctccgcgctgccgacctcgaggagttcgtcaagggtgcatcatttgatctttctgataaggagctcttctgcattgaggaacaggaggtgtttgatgccatctactctatcgtgcgtgatttcaattgcctacccccagcccttaagtttaacattgttgagaccttgcgctccaacctcagtgtccttctacccagcatagactcactttcccgggcatccatgtcatccccttctgatgctaccgaaatcactgaccgcattgcctcacaccgcaatgccctcaagatctactccttctttctcatttccattgttctcaccgcggaagctggcgctgaaagctgcacagcggctaaggcaacagcacatggtcgaaagaagaaccatatatattcttggaactgggaagcacaaagaggcaggatcatgagtctagtcgctaattctcttgaagctaacctttcgctactttttggtcctggaggaaccgatgaacgatatctctcttttgtttcgaagtgtacttttgttctctgtgaaaatcaaaatgtgttaaaagatgaggatacaagaaatggcctgtgccggataattggagcaattgccacgaagcatcagaggatttctcaaatcagtgcatctgtttcacatctaatacacaaatttgatttcactgttcctcatcttgcggaagcagttgcttctgcggagaaaaagtttggtgatggaagccttgcaatttccctgattagggaaataggtcgggctgatccaaaagaatacacgagagatagtgttggtgcggataatgttgggagattccttgtagaacttgcagaccgcttgccaaaacttatgtcaaccaacattggtgttctgatacctcactttggtggtgagtcatataagatcagaaatgctcttgttggagttttgggaaagctggctgcaaaggctttcaaggatgttgagggtgatagcaatgctcggcttcgaagtaagcaggctatgctggagattttgattgagcgctgtagggatgtgtcagcatacacaaggagtcgtgtgcttcaggtgtggtctgagctttgtgaagaaaattctatttcaattggcctgtggaatgaagtggcttccgttgcttcagggcgactggaggacaaaagtgctattgtgagaaaatcagcattacagcttcttataacaatgctgcaacacaacccttttgggcctcagttaaggactgcaacctttgaggcaactctagaaaagtacaaggaaaaattacaaggaatggagccttcaaattcagacaaagatgaggccgcaaatgatagttcgcctggtgaagtgatcatggggcaagatgaaagtgtcagtgatagctgtttagcatcaagtcaggatcaaaatgaccgtgatgctacgattgtggatataacaaacttggaacaaataagagctttagttgcttcacttgaagctggtctgcggttttcaaagtgtataacttcgttaatgccaattcttgttcagttgttggcgtcatcctcagctactgatgttgagaacaccatccttttactgatgagatgcagacagtttcagatcgaaggatcagaagcagcactcaggaaaatgttacctctgatcccactcacgtgggagcttttggcaccagtgttcttaaggcgcctaggtgagcaagtggaccagacaatcgccttagcgcctaggcgggtatcagcactgtgggactatttttgctttaacataaatggagtgagaccagtgcaaagccgtggagctctatctattctttgtatggctgcaaagtcgtctcccagcattttgggtaatcacttgcaagatattattgacattgggtttggacgctgggctaaggaagaacctctgcttgctagaactgcatgtcttgctttgcagagattatcagaggaagacaaggacaagctgataagtaataatagtagagtatttgctgcattgcaaggtttggtaacaagcttctcgattcctgagaaaatatggtatggagctgcagataaagctataagcaccatctataccctacaccctgcacctgaactttttgctactgagactgcaaagaagtctctcagttctgtattcagcgttttaggaacaaatgatgtgtcaaatggagatgaagctcagaatggtgcctctctgtcatcagtatcaccttcaaagctgggtagatttctttttgttattagccatatagcactaaatcatttggtgtacattgagaattctgttaggaaaattcagaaacagaaacggaagaatgaaaaatctcagcccaccactgaggatctccaacctgacgtgtctaaaagtttggaggcacaaggcataaatgccgaactgggacttagtgcaaccatagatattgcaatcgagtcccttgctgaaagagcagaaaaggaaattttcccagaccttcaagcttctgcaatgcttgctctttgcaggctaatgatcattgatgcagagttctgcgaagcaaatcttcaaatcctgtttactgttgctgagagtgcgccttctgaaactgtccgatccaattgcactatagcccttggtgatttagcagttcgcttcccaaatctcttagatccttggacaga

SEQ ID NO: 38789 - DNA, 1206 bp, Zea mays
  Peptide Sequence Number=SeqID_82164
atgcaggtggcgtgcaaccgcaccacagagacgcgccccttcgacttcgacgcatccagcatggaggcccagggccacacgtcatgtaaccggcgcgccggttactatgtgcgaaaaactacaccgccacttgcgccaatgccgcgccttctcaactacggaaccggtgtcgcgactcgaggcaaccctgtgcatagcccaacagtgccaaccgagcacatcggtcatgggtcagtcagccgcgggaggaggcgcgacgttcgatatggccaaaagtcggccgacagtaatggcggcagcaggcgagcggaagcagcagtcaaatcgtctgcaggctcacgtcccctcctggagcagcaggggatccctctcccacggcgtgaagacgacgcgcccgtgttccgtccctcgaacggctcgcacaacgaccgccccgcgagccacccgtcccgtcgcattaacttcgcggcagggcaagcgacacctttggcagggaccgggaaagggggtatttcgaaagggatccttctccgcgaaggaagcgggccccgagccctcctactgatcagggccgcctcagagcactcgggctccgcgcccactactgatcaggggttcgaaggctggcccctcgaagggttcaacaatcgccctagagcacgcagagcgagggatgactctgggtacgtccgatacatggccgaggctcgggctacgctcccgaggcgaattcacgcctcgcccgagggcctcctcagcaacgggagcaccctcgactcgcgcgaagcccagctcggacaggcgccacaggaagctccgcctcgcccgaccttgggcctcgacctcaggagaagtctccgactcacccgaccccagggctcggcccccgcctcggcctcggaaggtggtctccgcctcgctcgaccccagggctcagcctcaacttcgacctcggaaggtggtctctgcctcgcccgaccccagggcccggcctcaaccttgaccccgggaggaatcgcgtcctcgcccgacctcggcctcggcctcagaaggagtctccgcctcgcccaaccttgggctcggaccgaccatgccgcaggggaagcaaggagacgtcagcaaggtctcgacagccctgacagctgtgcttctacatggctcaaacacttctccgacggccacgacaccatgtacacagggctctag

SEQ ID NO: 38790 - DNA, 510 bp, Zea mays
  Peptide Sequence Number=SeqID_82165
atggcaaagcgccggcgccacgagttggcgccggtcgtggaggagctgatttcgccgatgaacagcctggacgacggctgcctcatgcacatcttcagcttcctgagcccaatcccagataggtataacaccgccctcgtttgccacagatggcgcttccttgcatgccaccctcggctatggctgcgtgtcgagaggccaatcagagatgcgatggagcctggagtttatccagatctcgaggctgctgtttctgctgctaggccgggtgacaccattcttattgcggctggtggttcccatgttgcatgtaacatccaaataaagaagcctatttgcataattggcgggggcgatcttcctgatgacactgtattgacctgctcacgtggtttcgacaaggcaactagagcttttatattactcgctagtgaggagttgtaccctgtgggaaatagctggagcaagaggtattcttacctcttcgctgtacagccagtagacaactga

SEQ ID NO: 38791 - DNA, 426 bp, Zea mays
  Peptide Sequence Number=SeqID_82166
atggccgtcgtagctgcaaataccttcagaacaccaactgggaggaaaacaaaaggagcagattgggctcctgcctcctggagctctggcccaaggagcctcatggttgtcgccaacgtcgacgactctcgggttgttctggacaccgcatccgacaacgacgccatcacgtcgtccagctcatcgtccaccggaagcccaacctgccacgggtactacctcgttgatgagcccgtggtgcacttcgtttggcagtccaaccaagagtcatcggtactcgtcatgtcgcgcgcgttcgacgactactatatcgaggattgtggtgtcatcttggcgctggaggtgacgcagaggaggatcgacaacagtgaccagttcgtcatcctcaccaccgtcagggtagcttttatgccggcctgcctttaa

SEQ ID NO: 38792 - DNA, 1188 bp, Zea mays
  Peptide Sequence Number=SeqID_82167
atggcatcagttacttatattgatgatagccatgctgaggttattgatcctccaaagaatgaggaaatgctggatgccactgaacttgttggtgatcatattcagaattcaccaaaaccaaatgtggcaagctatggcaactgctccaacggacatactctgtgttctggatgcaagccaagggttcataatcgctgtccaacatgcaggcatgaactgggtaacataagatgccttgctctggaaaaggtggctgcatcactagagcttccatgcaagtaccagaactttgggtgcttgggcatatatccttactattgcaagctgaaacacgaatcgcaatgccaatacagaccatatacttgtccatatgctggatctgaatgcacggttgctggtgatattccgtatctagtaaatcacttgaaagatgaccataaggtcgacatgcacaatggaagcaccttcaatcatcgttatgtcaagtcaaatcctcatgaagtcgagaatgctacctggatgctcacggttttcagctgcttcggccagtacttctgcctgcacttcgaggctttccagctgggcatggcgcccgtgtacatcgccttcctccggttcatgggggacgacgctgaggccaagaactacagctacagcctggaggtcgggggcagcgggcgcaagatgacatggcagggcgtgcctcggagcatcagagacagccaccggaaggtccgggacagctacgacgggctcatcatccagcgcaacatggcgctcttcttctcgggtggcgacaggaaggagctcaagctgcgggtcaccgggaggatctggaaggagcactgcaatacaatttttggtgactccgcggggacttcgcgtgaagatctatcaaatcaacctccaatggccggttcaaagggtaattcctatgtttctcccagcaacgtcatagagccgactatggagactttgtcggctgatgatcagcaggagttcgaggaacacaaggagcagctgatcacagaagcacatgtgaaattcctggccaactttaaggcggacaggaatcacaagatcgtccgacgacggataactgatctggcttcgctccgacctgctgcacctacccccaaaaacacgatcctaattttaattacccatctgtatacccgtctcagctaa

SEQ ID NO: 38793 - DNA, 761 bp, Zea mays
  Peptide Sequence Number=SeqID_82168
ctcgcttcctcttcgtcttccttctcccccttctctcgcctccggttaaccgccacagcctggattcgccttctcccgcggcggcgcggccggccgctgctgctgcgtcggcgcgtgagatggatgattgcggcggcggcggcggcaagaggccgttccagctggcgcggtcgctgacgtaccaccaccacccggggcaccggccggcggctgcgtccaggtggcggcggcagcaccagcagcatcagctcgcggacgagccgcgcgctccccggccgcaggcggtggtgctgtacacgacgtcgctgcgcggggtgcggcgcacgttcgcggactgcgccgcggtgcgcgccatcctgcgcggcttccgcgtggccgttgacgagcgggacgtgtccatggacgcggcgctccggcgggaggtccaggcgctgctggccgcgcgcggccgcgccttcgcgctcccgcagctgctcatcggcggccgcctcgtcggcggcgcggacgaggtgcggcagctgaacgagaccggccagctccggcgcctcctcgacggcgcggccgggcaggacccggccttcgtctgcgacgcctgtggcggcgtccggttcgtcccgtgcgccggatgcggcggcggccgcaaggtgttcgtcgaggaggagggccgcgtcgtccgctgcgtcgagtgcaacgagaacgggctgttcatggacttgcttcatgcctttcttggtaaaattgctagagatctgaagctgtag

SEQ ID NO: 38794 - DNA, 420 bp, Zea mays
  Peptide Sequence Number=SeqID_82169
atggcgcccatgaggtcccggcgaccaaccggtgatagacgacctcagtacatagcaagtcccgacggcgcgatgccaagcttttatggggggaggggcgagtccacgccacagatatcgtttttgcgtggttccgttgcaatgccccgcgagatccgcgatgagccggaggcagtgactgctgcttctgttcgagaccgagcggagaggggaaggcttctgacgagtgggtcccaggtggcggctgaacaaccgagagtgtgggcgcggtttggggcgctgtcgaggaggccccaccagccagcgacccagaaaaaggatgtgggcacgcaacatgttgatctgagcattggggcccaccaggcatccgcagaaagggagagaagtgcgggagttatgtgggccacgcatgcgaaatga

SEQ ID NO: 38795 - DNA, 114 bp, Zea mays
  Peptide Sequence Number=SeqID_82170
atgacaatgcaggtgattagaaaagcatgggtatacatgggtatagccacattattatgtaggataaaagataggaaggttagggcaaggatagcctggggtttaagtgcatga

SEQ ID NO: 38796 - DNA, 348 bp, Zea mays
  Peptide Sequence Number=SeqID_82171
atggggagcgtccgcgttgtcttcgtctcgttgtgggaggagcgcaacctcgtggaggttggtagcccggctgcatcccctcaccaatggtcacccgagacggtgaccaccagttcgatggtggggagaagcaagccgggctgcgacctctgccccgccctcagcttcaaggatcttcatcatccttgctggggcggagggcgagctgagccggagctctacgtcccgtacgagccggcggaccacctcttccttcagcatccagaagagagggctctcactggcctagcggagggggcggacttcgacaacgcggggtcggtcggccgcaagcgtcgtcagctctag

SEQ ID NO: 38797 - DNA, 117 bp, Zea mays
  Peptide Sequence Number=SeqID_82172
atgccgaagcttccttgcgcacagcttcggctctgttccatccttcgttctctttgcgtttcttcatacaacaattttgacttgtccggagggttcgtgtccgaaggccgaaagtga

SEQ ID NO: 38798 - DNA, 464 bp, Zea mays
  Peptide Sequence Number=SeqID_82173
atgaagtctttgcttaaagtacttgtcgactgtgtcgaggatgccacaaaatcccttggtggattagtagatcatgcattagaccacatgcatgatgaagagatattagctagaaccctctttgccatgaaagaaaaacttgatttgcttcaccaagatgccttagaggctaaagtccaagcttttcctgaaattgctaagtacgagggggatgacataagtgttgaaccgacatctccgtcgacccctccaacaattactgaaccatctgtcgatgaagaggagttctactgccccgatgtgagtgatgagtggtacttcagcgactcagatagctcggagacaactgatcaagccaaggacggaggcaagaaaagcttcgaggtaccaagtgcacgggagaaggtcaaggaggccgaggaacccaaagccaagggtgaagaagaaggcttgcaaagtcaagg

SEQ ID NO: 38799 - DNA, 297 bp, Zea mays
  Peptide Sequence Number=SeqID_82174
atgcaggcggcatgcaaccgcgccaagtgggcgcacctctccgacttccagcgcgcccagcatggaggcccaggcccacgcgtcatgcaaacggcgcgccggatgctacgtgcgagcaactgcaccgccactcgcgccactgccacgcctcctcgactgcagaaccagtaccgcgactcgaggcaaccctacgcacgacccagcagcgccagcctggcgcgacgggacccggaaagggggataccccgaaaaggatccttctctgtgaaggaaccaggctccgagcctccctactga

SEQ ID NO: 38800 - DNA, 1333 bp, Zea mays
  Peptide Sequence Number=SeqID_82175
atgtcttcgtgctcccttatgcatcgtgtctttccaccttccgagcccccggatgggggatgtccgcggtccttccgccttgccgttggaggaacgcaactacgtaggagttgtaggagttggtacctttcagccatcgttcggcttcaaggattttcatcatgcagcccgactgcacccctccgccggtggtcacccaagacggtgaccaccagcccctggatggggagaggcaagccgggctgtgatcttggtcccgccctcagcttcaaggatgttcatcatccttgctggggcggagagcgaggcgagccggggctctacctcccgcgcgggccggctggccacctcttcttccagcttctggtggtggcaaccgtcctccagctctgcggaggaggcgtcctccagccatgccggggaaggcgaactgttgctgcccagctaggatgcaacattccgccctcttcctcgctttcgtggcgaggacgggaacgaggacctgccggtgcgctttggagcggcccgctctttggctttgatggctggttcgcgtcccttgagcgggaacgcgaacgagagccttccggcggccgcgtccgtcctgggaccatggctgctgctgcagaggtcgctggcgagtcgcccgaaactcgtcgccccgcaggctccccgcatggacagaggcggagttggctcgagaaagaagacttgatcggctggagcctggccgggtcgtccgttagcgggaccgacgccggaattgatctgccgaggcctcgggtcgggctgatgtccttggaggacagctggccggggcctcggggtgaccagccgagccgcctgctcgagccggattcttggaggagacccgggcggcgatggcccgggcgtgatgatgaagtcgtccttcagagtggagatcctcggaccgcgtcgtcgtcagaggctaggtcggacctcgccgaaggtgttgttgacgccgaggacctcgcctttactgttggccagcttgtacgttccgggattcagaacttcggcgatgacgaacggcccctcccagggggcccgaagcaccaggtcgcccacctggaggtctcgggaccggacccctcgggcgtggtaacgtcgcagggactgctgaggcactcgcgctataattcaccggactgtccggtgtacaccggacagtgtctggtgctccatggaagagtcgcctcaggaactcgccagcctcgggaaaacgaagcaggcgcattcaatgcgcgccagaagcgcgcagaaggcaggcacgcccatactggcgcaccggacattgaacagtacatgtccg

SEQ ID NO: 38801 - DNA, 537 bp, Zea mays
  Peptide Sequence Number=SeqID_82176
atggtgatggtggaatttcctggcctccgtgctccccacgccattgcgcatcttcaccgagtcatgcccatcgaggtcccaagagcaccgaacgccctaatgcagttggcggcctccctcgcgaggacctggggtcttggagcccccccgcggctgcttgagctcgacgttgagcaggaccacgagcagctgccgccactaccgccatgcacccagccaagcaagcaccgagcagtcagagccagggcgacgcgcgcgcaggggcagcgacccaacgatttccccaaggccccacgagcatccaaggttggtcccgagggatcgacgaggacgcacgacgtttgtggcttccggtactctggtggcggcttcacccagcgcacggtcttcatgccccggcttcctctcttccctgtgccgtgcaacgagcaggattggagctgtttgatttggtgggacgcggagggatcaaggtgggcatacatatacaccggcatcggggttagttccgacgatcactgcgagatccgtggatga

SEQ ID NO: 38802 - DNA, 666 bp, Zea mays
  Peptide Sequence Number=SeqID_82177
atggcacccaacgtattccactttgctgactctgtcttaccactgtgggtcactaccgtggcaaagaatgagcttgttgattccaaagagcctggccaggacgagcaaagcaatctgactgcagagggcgaggactcactgttatccagaaagctagcagaaatgatggcgatcctcttgaagaaaggaagccccagaatcctcgattgcgcgagtggagtccttctgtccactttccagttgacgctgcgaagatcagactatgacattgtcctgggcatgactcgtttcatttgtgacaagttgcttgggaacaactccctagcattggaaaagttgcagcttacccacgactttcttcatgagaatttcctcgagattgataggaatcagtttgatggcagcagcaatgggcatcccgaggaggccaaagagaatgctgacgagccattggagatgggtgagaggcatggtgttggcaaaatctcccaggaactggaccaggatgaactggaagataatggtgccaccgaggatgcacatgaaaatggagttctgtggcaaacccttcaaaacattgatctcctccatgtctctcgagcttatctcattgaaaacctacatggcatgcaaagattcagcaccggagagccatttcagaaataa

SEQ ID NO: 38803 - DNA, 375 bp, Zea mays
  Peptide Sequence Number=SeqID_82178
atggcggcggcgctctgcgtgcacgcagcgagggggaaagagggtctactggagcgcaaatgggggaggggcgagggcgagtggggttcggggctcaagtggccaggggcggacacttcttcaattgcgacacatggaacacattgtgcactgcggacaagctctctggttctcccgaaccattttgatattctcttcggcttcaagcaagatgtcggggccaaacacctgtctctctccaggctggtcccaatgcagcggagtcctacaactccgtccatagagtgcctgaaacggcgacatcttcaagctgggcctggtatgaaatgggccacctttgttaagcggtccacaaccacccagatggaatcataa

SEQ ID NO: 38804 - DNA, 894 bp, Zea mays
  Peptide Sequence Number=SeqID_82179
atggctcgtcttagacacactgcacgtaagtcggtgattcctttcctgtcgtctcgacttgcggagcgtcctctgcaccgcaccgtgtccggtcagtcgagtcacctggagaggctgcaccaccgcctgcgtgaggagcaggagcgccggcgccagcacagagagcagcagggctcttcctccccaccccagcgagaggtggagtccgtgaggccccgttcctctgttgcccagctggaggcgccccctgcaccaccgcgggacgccccggctgttggaggagctactggaggaggtcctggaggagaccccgacgatgacgactcagaccacagcatggagtcctctgagccgcaggaggcggaaggatggcacagtcgcgggaggtacccggaccgctgggaggctacctgcctagttcgccgtccggaggatgacctccggggtgcggaggccgtttcggagcactattccatctccgagagggacactgcagaggcggctatgcaggatgcagcacgacgtgcactctcccagtactgttctttgttcggtggcgtggccgacggtcttaaccttcggtactacccccgccgccctactggcagcacagagagtgtggttgtctcacctgttggtgagggtaaccctaggttgagcagcacagtcaacctagtcgcagtgcttaacactgagctggaccactctctggacgagctaagcagggctcgaacggagattgcggagttgcgtgctgagttggcagagcgccatcaccaggagggtggttcccccgctcctgttgagactcagcacccataccgctcgccgccacgtggtcaccacacttatggttcccctgtctgtaagaccaggatagatctggatccttag

SEQ ID NO: 38805 - DNA, 996 bp, Zea mays
  Peptide Sequence Number=SeqID_82180
atggagaggcacgtcaggcgagcgaggggcaatgggaatacccatagtggaagcttgacgacgaagattgtcgtcagtctcccgctgacgccttgccagctcataaaaacgccgcaatcccatggaccaagcgagcacccattcctcggccacgacctcgaccacgaccacgtggcatgggagatccgcggccaggagagggacgcaaggcagcggcagtgcgagaggaagatggatgatgaggaggctggggaggtggctcagcagaggaggcagggcctccagaccctatgggagcccgcttcgtacgagcagctgggttggaggaatcaacacagtagggtacgtagcagagtgtttgacaggtttttcgaagtgagtctgggtgaccacatcgatcatcttcatgataaagggtgcatgaagacaccccttgagaggagaccaggaagcacggatgatctcttcccagatcatgtcaaacacatgaatgcgggcgagactattgggagcaaggaggagaaggaagacccgactctccccaagtacgttcatttgattcccgcccttcgggagaacggtcatcctggacaaagaattaagcctaatgttatgcactcgcatgttgctgccctgaatatcagcatcagagaagcccaaaatatgggcaaaacgacgataactgactttgtgccagttaccctggatgaagaaatacatgacagggtaatcatacccatcggcttcctcatctactttcttgatccagagggtggcataaaactgagctaccacctcatcgttccatgggcgctgaagggtgtctactcccttcagagagaagtcgacaggaggttcatgtggaccgcgggtaacaggaagaagtgctgcgacgaggtcgagtggcgccaaccttttggcgcctcccgcgagccggctgtgagggcatggaagaaccctctccatccatcctaccagagccgcgtcctctcttag

SEQ ID NO: 38806 - DNA, 180 bp, Zea mays
  Peptide Sequence Number=SeqID_82181
atggtcgccgagttccatgagcgcactgtcaaggcgctcgacatttacaacgccacgtgcaacgaattgatcaggtgcatcgctaggacctgggagcgcctcgtcaatattggcgcttccgcattgtgggcgtcagttgccaacctccacaattgtgccaccgtatttcccaacaactaa

SEQ ID NO: 38807 - DNA, 567 bp, Zea mays
  Peptide Sequence Number=SeqID_82182
atgggtgtgggcaagggacggcttgtgaccgtggtaggaggtgagaggttgccttcttcttctataaatagtgcctttgcctcttcggttttttcacatctcttgctgctctttgctgcttgctttcttcttctcccttcatttccaccatgggcaagagtaacaaacacaagcgcgagccgacttctccatcggaggacttcggcgactcagaataatcggaggaggagttctcctccgagtccgaggggtctccggctcccgtctctcccccagcgtcgtctgatgattcagacgactcccaggggattgctgtggaggtctggacttatatccgggccgtcgagcgctccgggctcatatgagtcggagtactcctcggacgaggaggactcttcggactcgtccgaggagggcggcagtgatggcggagacgacgacgacgacggaggcgacggtgacgacggcgacgacagcgacggtgacgacggcgacgacagcggcggtggcggtgatggcggcagcaagggcggcagcagcaggggcagcaacgaggccagtggctag

SEQ ID NO: 38808 - DNA, 735 bp, Zea mays
  Peptide Sequence Number=SeqID_82183
atgactgccaataagaagaaagacttggctctcatgaccaatcatgagaagaagggcaaaatcaaaatcaaggaatactttgatagctcaagtgaagaccagagtgatgatgtgaagatagctccgatggtcatatgggagttgtaccatgaagctgagctggatgtatcgacgttcagtgagctttgcagattggacgaggacttgttggtgtcctcttatttgcttctgtttggaaagaaccaacaatggctggtttcagattttccaaccgatgtggcgttgcacaagtttgatcgtcacaaacaaaagaagattactgactttaggagacaccaccaggcctacattgaagattggcaagacatggatgagaacgtcgacgacaacgacgacccacacgacaacaaagactacatccgtaaggacattgagcgcattagttcgactatgagcgatggcaacatgtgtaccttcctggaggaccgctgggccacaggacgtacatgtcacgtccttggtgtgcctaggaagggtacctctatacacacaattgcaacgcccgtaaactatcaaattggctacgacgttccagacaagattgacccttcacatctccaagatgctccgctgtcacatccttcacagccacaagagcgtaagcgccaccgctcactggaccgttatactggaggcaccgccactctcggcaagggtaacactaggaggcgttga

SEQ ID NO: 38809 - DNA, 252 bp, Zea mays
  Peptide Sequence Number=SeqID_82184
atgacgtcggagctgctcaagatcttcagggtcaacggcaagagaggcgtcgcaggaatgtctaggcgcgttaaatctgctaagcaaaggaagggtcctttgaccagaactgccttcgacctactatctttgctaaggggtgttccagtgcctatttgttttttgtggcgccttgcaagtttaacaagtccgaggatcatgacacctatcgacgaaggtattagatgtgtggtaactgtgaatttaagctaa

SEQ ID NO: 38810 - DNA, 102 bp, Zea mays
  Peptide Sequence Number=SeqID_82185
atggtcggaaaagaatttggtctggtagatgacgaagaagaggaaccagaagcgggacgtgaagaggaggaagatgaggatgagattgaggagtacggctag

SEQ ID NO: 38811 - DNA, 396 bp, Zea mays
  Peptide Sequence Number=SeqID_82186
atgaggaagacactccacgaccttcgggctgagcaacgcaccggggcccagcgcatcgccgcctgggctggcgaggcaagtacggcattggtgccgttgggggtgagtcccatcccggcgttggtgcggccggcgtccatctccgacgcgctcccggtacaggattccgctgctgaccgcctccgacgtctggatcagattcttggcgcccgcttggaggctgagggtagcagactctaccagtcggcaatagagtacgtcttgacatgcttccggagccacgacctggctgtctccttgggacgagtcattgcggatccggtggctgatgctgaagacgctgcccgggatcctactgacgatggtggtcgggcgcttccagcaggatcctactga

SEQ ID NO: 38812 - DNA, 255 bp, Zea mays
  Peptide Sequence Number=SeqID_82187
atggtggagaaggacctccaggtggcgcagatggccacccagatccaagagcttgaggagctagtaggatctagggagaacaccatcgaggagattcaggacatggaggccgacgaggatgttgacattgttgggtctatgcttcgtcgccgaaggtcttcaagggagaagcggcttaaaatgtgtgagcaggtatcttcggactcgtatcagaaagggaaagctacaaaggttgacacagcgccgaagctgtga

SEQ ID NO: 38813 - DNA, 183 bp, Zea mays
  Peptide Sequence Number=SeqID_82188
atgccgagaaatatggtaaatcgttatggtgggtacaagtacggtcactgcacgacggcagtcggggtcagtgaggcattgtacgccaaggcggtttaccttgcaaggtttaaaaactcgattcgaatcgtcttcttctcgcagctaatgagactgcttgatccatgctgctacattgagtaa

SEQ ID NO: 38814 - DNA, 363 bp, Zea mays
  Peptide Sequence Number=SeqID_82189
atggggaggctagaaccccgggcagaatgggaatcacagcttatgggtaaagtgtgcaacctctgcagagtgttagaaactggcatattagccgtgctcgcgatggctcgtctcaagtgcactgcacgtaagtatgtgatcccctttttgccttctcgcctggcggagcgtccactgcgtcgcacggtgtcaggtcagtccagccagatggagagattgcagcgtcgcctgtatgaggagcaggagcgccgacgccaagagcaggagcagcaggactcttccccctcgcctcagcgggaggtggagtctgagaggccgccttcccctacacctcagccagagatgccccctacatcaccatag

SEQ ID NO: 38815 - DNA, 696 bp, Zea mays
  Peptide Sequence Number=SeqID_82190
atgtcatcctcggaccccttccagggcagggtccaggtattccctgccccagaatcccgggacccggcggtgattagtccggactccactcggaagggtccgggacctatctcggaggtccgcccgtcacgtacggggtccggtgccttccacgcagtaggtccagacccactgcgtgtatctggagcacgtcccttcccttggccacgtggcgaccctagggcggctgatgtggcgcggcggagaattgttctccacgcaaccagagacttctctgctggcccagcgcctttaccatttgaactggccctaggggatggcaccgcccaagtgtcagctggcaaacagtatggtagactgcagatgcacgtcggaacacaggatttatacaggttcaggccgcgtgaatgcataacaccctacgtcgtatgcagtgttgagtattggattgcattgagtttgcagattacatgtagatgtggacatgaatggaggagttcctatcaacctaatgggcctattaggcggcccaaggaacatatccatgttacaatgacccatgggatatctgtctcccacaagcccccaaggctcaagccaatttttgagagtaattggctcaagactccaagaatgaactatgctattcgcatttctttgagtgcagttcttcttctcttcttttttatgctctga

SEQ ID NO: 38816 - DNA, 369 bp, Zea mays
  Peptide Sequence Number=SeqID_82191
atgaacggacacgctaaggcgagttactgcgatgtggtagagcacctaggcacgtggcactcgatcggcaggcggccaactccagcgaggttatctggaccggccgtaaggcaagggggtacagcgaccagggcgaaacagtgtcccgagcacatccccaatgcgatatttcttagcttgagcagttatctgcacttcactgagcatgaattgcaacggcagcgacgatcacggcgcgggatcaccagcggcgatacactgaatctggcgatcttcgtcaggtcactgtaccatgggaacttgattcaggcgcctgacatagcaagttccagggcattattctctgattttcatgtgacaacaagctaa

SEQ ID NO: 38817 - DNA, 156 bp, Zea mays
  Peptide Sequence Number=SeqID_82192
atggatattctcatgaaggatcttaaggtgttcgcctccttctacagatgctcatgggaggagggtcctctgctggtggaccaagaaagggaatgcatcctcgattgtatcctaacattacctttgatcctatatctacagatttttgtgtcttga

SEQ ID NO: 38818 - DNA, 291 bp, Zea mays
  Peptide Sequence Number=SeqID_82193
atggcttcaccacgcctccgtctgacatcgcagcaatctccccgccccggctctcctctccctgcgccgaggccgcaatccccgccgccccaactctcctcgcccccagatcttgcacgcagccataatccctgccgccacggccctcctcgtccccagatcgccgcctctactatcccgcaaacgtcggccgccacatcgtctgttgcatccgcctccgcctccgcccccgaggcggtcgctgaggagcctgagtacctcgcctggtacatcatcgtcaagcactcgtga

SEQ ID NO: 38819 - DNA, 213 bp, Zea mays
  Peptide Sequence Number=SeqID_82194
atggcgcttggtcgtcttcctcctcatagtaatcttgatctcgacccctgtaggagagatcttagggtgctccttgttgacagatcttgccccttgctcctggtagaggtaagattctggggtcgtcttagggccggtagaccacttaagacggatctagacaacgtaaagttgaataggggtgtaggtggatatgtggtaaactataactag

SEQ ID NO: 38820 - DNA, 453 bp, Zea mays
  Peptide Sequence Number=SeqID_82195
atgagcggcagcacgccgacccccgccatgttgtcggggcagtcggatggtctgaaggagatggtggtgcccctccaccgctggtgtggagcagttttggggacccctgggaccgccgaaaggacctcccgtctcagagacttgacactcctgcgggagatgagctctcagcttccgccccacggcctcttcgtcagcttccttctagcctggccggcggtggggcggcgagacgtccttggaggactgctcgcgccgctcgctgacgcgcctcgcgagtttgataatctcacagcagtcggcggcacggtggtggatgtttgggtgcactgggcatgtgccaccgcctctgccctgggtgacgacatccgagccacccacctgggtaacctcggcctgtggtaccaagtgccaagcatggccctcggcggctttggcacatttgtcaactag

SEQ ID NO: 38821 - DNA, 186 bp, Zea mays
  Peptide Sequence Number=SeqID_82196
atggatcctaagggaaaggggatagtgatcaacgacaaggagaaggtgttgggggccttcggcttccgaagaaagggagaagctcaaaagatacgaaggttgacacagtgccgaagctgtgaagcaggaaagcttcggcatgttcgcagaaaggggaaccgacttaaagatgaaaaggccatttag

SEQ ID NO: 38822 - DNA, 207 bp, Zea mays
  Peptide Sequence Number=SeqID_82197
atggttgcgaggggtgctaagggtagcgaaaggggcgattttgcggggtcagctattgatgtagcagtctttaccgaagacatggccgctacttgcttggctgacaaccaggctgtgtcattcgtcgagctggagataacatctacgagggcatctaatgcggacatcctccactattacccgttggcaaagacgcaattggcctag

SEQ ID NO: 38823 - DNA, 393 bp, Zea mays
  Peptide Sequence Number=SeqID_82198
atgagaaatcgtatccccgaggtcgcggaggcagcagtgatcgaggacttctacaggggatccaatgactcggccttcgtcccaaccatactacagaaggcgccgaccacctccgagcagctgttctgggaagccgatctctacatcaccgccgacgaacgtgctcagaacctcatcgggggagcgaagtgtaacacccggattttaggggtccaaaacccgggcgctaacataaacaccaggaccgccatcacagcaaaatcctcccgagggcctccccaggaatcccttgcaggaccgccatcacagcaaaatcctcccgagggccttcccaggaatcccttgcaggaccgccatcacagcaaaatcctcccgagggcctccctacactga

SEQ ID NO: 38824 - DNA, 597 bp, Zea mays
  Peptide Sequence Number=SeqID_82199
atggattgcatggagggagagggtgttgtccacggctgggagaggaaaacaggggcgctggtcatgggaaagagcagcgaaggggcgagctcggagaggggcgctgcgcagggctgctgtttttggatcgaagagctgggcgcagggaactcagacaccatggacagggaagggaggaagaagacagggagggcgctcggctactcgccatggacaacagagagagggaggaagggatgggcgcgatgggagcttggagctcggcttcctgcttgctgccgtgtgggaggactgctgcgcgagggagaagaagacagggaggagagaagggcaccatggaagggagcagaggtacccgtgcccatggcgaagcctctacgcgcaagggaacagcaggggaaaaggaagctcggccatggatgctggaggtgctcggctaggaatggagcatggagagggagccggcttccatggggaagaagggaggccgaccatgggagggagatgacgttggttgtgctccctgcttgcttcgtggggaagaagagggtggcgtgggggagatggctgatggcggctaggggtagggagtggtaa

SEQ ID NO: 38825 - DNA, 951 bp, Zea mays
  Peptide Sequence Number=SeqID_82200
atggaagaaacacacctccacgtgttcgacgcttcctgcccgcgccagagcacgctcacgcgcgcccccgcatgcccagcgccgcgcccgagccaagccagcgccatggcccgcgcccgcgcctataaagccctcccaggcttcgactgcactcttccgcgcaccctcaaacctcaccggagtttagctcgccgccgtttgcccgtgcgcagcgtgtccgcggccgcccaatccctctgtcaccgtagaccggccaatagagccattcccaactccgtccagccctcggagaagactgtgcacacctccgtgaagctcctcgagcgaggaatcggagtttgcttcgccggagaggccagtccacgctcgccggagctctcaaccccgccggagtacgtggaccgggtaatccactcaaccatccttcgattccttgtgcacacggtcactacattaccccatgaagctcaccgtgcccttagattgaaccagttcgccgtggtttggccggtacactcgccgccgatgagaacacccgcctgcgcgcgtggaccgggcgatttcggccatccccgaagtcaagccgtacctcgacgtgaccgccagagtctccccgagccaaccccacccttcgccggacctccctcgccgccgacatatcccctcacgcgacctgagacgaggtctcccattccggttatggtgggtacaagtgcggtcactgcacgacggccagtcggggtcagtgaggcattgtacgccaaggcggtgagccctgatctgttgccagggaatcgatggggacagttgatgtgtgtggggacggagtgcccctacatgtcgtgttctctggaggaaatggttgttggattaacttggccgtccaccttgccaccgggttggactgtcgagtgggaccctgcctcggctgaggaggagcatgaggagtga

SEQ ID NO: 38826 - DNA, 387 bp, Zea mays
  Peptide Sequence Number=SeqID_82201
atggcgcatagtggtggcgacgggatgtctcgggcaggcagtggtgacgggatggctcggtcacagggcgcagggacgcaaggcaccaaaccttgctggtggcctcaaccaccaaaaatggtcgttggaagtgtgctgtcgcatggcgcaccggatagtccgacgaccgttgcgcgcgaagtagtcgttgttccgctggcgcaccggacagtccggtgtgcaccggacagtccggtgaattatagcggagcgccctctaaaattcccgaaggtagcgagttcagcttcaagtgccctggtgcaccggacactgtccggtggcacaccggacagtccggtgtgccagaccagggtgcctttgggttgtatatagctcactttgtttga

SEQ ID NO: 38827 - DNA, 537 bp, Zea mays
  Peptide Sequence Number=SeqID_82202
atggggtcctcgtcctcgccaccgccaccaccgccgctgccactgcccatgattgggcgggccgggaacctcaccatcttcatcacgccgccatcccccgctagcacgccccggggcgctgggcgcacgccgccgctcgagtccccgcgctcggatatctccacacccatcccgcagagggcagccccgtcgccctccctttctccctctccgcggaaccacgagagccgggccgtggcgcctgcggtggtgttcaccccgcccccgccgcctgcttctgtgaatgtcgcgctgccgccggtgcaggtgccgccgccgcaagatttggagttctcatgcttggattctctcgttgttctcgtcgcagcgcacgcgagcctcgacgagtacgtgtctacctggttcgggttggatcagtccaagtaccagtgggcgcttaacgactactacgagaccataggcaaggtcagcaaggaagtggattgtataaaaggtggtatgcccaaggagcctactactaaagtgcagaaactctaa

SEQ ID NO: 38828 - DNA, 297 bp, Zea mays
  Peptide Sequence Number=SeqID_82203
atggcgcaatgctttcaaatttcgggggtgaccggtgcggtcgcagttaatgctgccccccatgccgagctggactgcaatgtggttaattcagagtgcagcaacgtatccaggctcggggctccaggcatgtcaggtctaaaggcacaatatctgtccagggctgctgctcgatctgaagcaaaggatacgcctgctcccgtgtcatggaccttcggtccatggggatacaccaaggcagttgcccgaatgaaggagacgaccctctttggccatgcaggggggctgcatacctag

SEQ ID NO: 38829 - DNA, 261 bp, Zea mays
  Peptide Sequence Number=SeqID_82204
atggcggttgcggcaccggacgggatcccgacaagcccgaacaagatgctccggcgagaggcagcggtagcagacagcctttgctgtaatgggtcgtggaggttttggttgctggtgagcggccttagctggggattggagagccttaaggtaagtctatggcagctcaaggacgagctggtcctcaagggaggaggagatgtcatgggcatcatagggagcgagaggcaacaaccaggctgggataaggctagagaataa

SEQ ID NO: 38830 - DNA, 1848 bp, Zea mays
  Peptide Sequence Number=SeqID_82205
atgcctatttcacaaacactctcgcctgccagccaccaccgcaaaacgccgacgatccctgtcccagcttcacggctacctgtccatgctgtcccgttcaactacccggcagccaaggcatcaagctctacaccgccaacaccaccaagctctcccgccacccaaacctacctggatgcatatgcccccaagaacatgctagcctcatctagcagctgccctccagatttcatgctgccaagtgccggtgcttcgaaggcttcgtgcatggaggggccgctgggcctgggaagggcggctttgccaaaggcgcactgttcctccccgccaaggaggatggtcgacatctgcatagattcaaggaacggcaaggctcctgtggagccagtcttcgctccgtcgcgctcaccatctcttggtaggaggtcgccgccgtctggccccgggtctcctgtacctcggtccggttcgccgccatcctggacaggcagtggtacaggcaatgattctggcagcttccctaaacccgacctcgcaataccagttcagagtccaagccttgacttgggggggaccagaaatagtgacggttcaagccttgactgggatggtcgtactcctcacatcgaggcgtgggtcccccagggctgccgtgaaacaaacgacaagctcatctatgcatatctggatcaacacctgcctctctctgcagctgaggagttcatccaaaatatcctgcgtacggctgccccaggaattcagttccagatgctgccatcttcgcggggaatcaagcttcttcatttttactccagagctgatagagatgaggtccgactcatgagtccgctgcttgctgatggtctgcagctaaagttggaatgtccggaagagacagacaacagatttttcaggcagccgcagtggctcgcttttgctatgattgtggacttcccaaccgagcattggtccgaggcttcaattcgtcgctgtttcggtgcctgttgtgaagtggcagaagtggacccgcgatgcctcacaggtgataactttggcccaatccgggtgctgctagaactgaaccactaccttgatctaccgtcggaaatttgggtcacgaccatggatggggtttccaggggcggatgcatcgcccaggtcttgccgctgcgggtttggccccgtgccgaccagcttgggccggatggtcgcctaagacgttttttccagcatatgtctcctccacctgcgcctcctatgctatctgaggtgcctgctgctctacctcatgttccacaacagcaaaatgctagcccggtgcgtaacgcccaacaacaagccaacaccaccacctcccagacgtcctctgcattttcaactgctcagctcctatgcctctccgctatgcttgcccagcttactggcccacgcacaacagaaacacaatcacaactgcctcctcaacaaaacaccactcctcaaagccattgctccagcaaacggcagccgacatcacccactactttcaacgctaccaggcacaaaagagctggtcgcccacctcgaaacaatgttcccaagccgatccagcgcaagagcagtcggctggcggcaaaagctaacggaaatttcgtggatatgactaataaggcggtcaagttgaaggaactgagggataccctacaaggctgctctacagcagtgaaggggggagtccagaaaaaaggtttgctcagtcgttcaatggcgtcgatctcgataccagctcttcgcaagcttgttcgcgcggcaggattggggtgctcagctgcgaatgctgttggggtggtgccgctcgccaaggaatga

SEQ ID NO: 38831 - DNA, 441 bp, Zea mays
  Peptide Sequence Number=SeqID_82206
atggacccctttgtccacgtcaccctcctgggtgtggacccgaatcactcggcgaaaaaggagtggatagcgtcggcaccgcgtggccacaggagcaagaccgacgactgtcccagccgcttcgctcacatgggagactgccggagtgcgagacacaaccccaagctctttcttcccggatgtcctttttatccagggatgagtagaggatgtcccatctctaacgacgagcccactgtactagggaggaacccctacagcgtgaagcacaccaacgttagaataggcgtcgtaacattcgacgtcacctcgaggccgtggaacgagatctcgtctagcccgtatcccgcgatgaggcctctgaagcaggagagactcctaatgatagggtgctcagcgaacaccgcaattcccgacaccgcgagcgtcgccacgccttag

SEQ ID NO: 38832 - DNA, 699 bp, Zea mays
  Peptide Sequence Number=SeqID_82207
atgacgcgcttgaagcggcgaactgcgaacgtgaagcgtgccgaaggcacacgcgctggggttgcgcgccgaggccgtgcgacagcagcgccgaggctgcgccatagcagtgatgaggctgcgcgtagggaccgggccaagcaggggcatgcacggagcaggggatgcgcgctggtagggggccacaccgggcagggcgccggggagctgacgaggggcgtgccgggcgagggaggccgcgtcaccgaggtgggcgcgccgggcaggggaggggtgccatcggggggggtcgaggccgaggccgcacgggggactacgaggaggacgcgttggtgtcaggccgccgccgggaaggggtgccgcgcgaggaccgccgcgtccaagggagggcgcgccggggccaggctgctgctggggaggggcaccgcgcagggcattacaaacctatcccccttaaaagaatctcaccctcgagatttagggttggtcagcaaagagctcgggatacttggccatcagatcatcttcacgctcccacgttgcttcttcctcagagtggtgaccccatctgactttgcacattatgatagtgttcctccaagtgattctatctgcagtctccagaatctgcgttggcttctctatgcaggtcaggtcttcttggacttccaggtcttccactggcaactactcttctag

SEQ ID NO: 38833 - DNA, 168 bp, Zea mays
  Peptide Sequence Number=SeqID_82208
atggaggcgcaggccacattggcgcagccgcaggcccaattccacggcggccacattggagcagccgcaaaccctatccctatccaggaccaactatcccgatgcaagctaataaccgaagcgcacaggcaaggagagacagacgagcaagtacctccctggctttga

SEQ ID NO: 38834 - DNA, 222 bp, Zea mays
  Peptide Sequence Number=SeqID_82209
atggagacgatgaaagtggcgttcccacacacgtcggcttggggacaagcagcgttcaaaggactgaggattgtcagcgtgcagccttcaaaggacaaacagatggatcacgaggaggaacatgcagctgcacaagaaggcgacgacatgggaaggcagagtatagatgtccaaatgggccactcggcacagactcggtccgaacccgtttcggcccattga

SEQ ID NO: 38835 - DNA, 765 bp, Zea mays
  Peptide Sequence Number=SeqID_82210
atgggcgattctgacttctgcgcgcgctgtgcgcgcattaaatgctccgcagggagccgttggcgccgcagggagccgttgctccgctggaggccgagctttcttggagcaccggacatgtccgggggcgggaccgtaccagggctatgccggggggaggccgcaccgggcagggtaggggcgctgtcggggggctcgaggccggggctgcgcggggggactgcggggagggcgcgccggggccaggccgccaccgggaaggggcgccacgcgggggccaccgtggccaggggagggcacgccgggggtcgagccgccaccggggaggggcgccacgcacggagcccggccgagcgtggaagagccgccgcgccgggggctgggccgcgcaggcagggggcgtcgtgcgctgggagccaccacgtccaggggcaccgcgcgcacggagaggaagaggagggagaaagggaggagagggaggtggcttaccacaggctcaacaaacggcagcaaccgctctctgggatccaagcgagggcagggagagcgtgggagagaggaggaagagggagagatcgtcaccatgcctttggaactctcaagcatgccctgttatcggctcctgtgctggccctgccgaattttactctaccattctgcatctacactgacgcttgtcagactggagtggacgtgtggcgttcatacctccagctggccgaattccacgtatacaccgatcaccaaaagcttggctcaacttaa

SEQ ID NO: 38836 - DNA, 2106 bp, Zea mays
  Peptide Sequence Number=SeqID_82211
atggcgccaagcatgcaaagtgaggcacttgagatgcatgtcgagagctccggtactggggagccctcaattgagcagctctacaacaatgtgtgcgagatgaagagctcaagtgagggtggctccctgtcacatgagagctttggctcagatggggaggagtctaggattgattcagagcttcgccatcttgttgctggggagatggaggccatgaaggtgattgaggaggaagaggagaatggtagtgttgccaacgttgtgccaccggttcccgctgagaatggaaccccagtaaaggagcagccttccaaatcgtccaacaagtcgaagaaggactcaaaatcacagcttgagtctgatgcctctgttggtcccaataggaaggcgtccactgaggaaggtgagagggaggtcagcaaacaggcaacccgagttggccgtcggcggaaatcaaatgccaatccacagaatggaacagaagatgctgggcttgataacccagaccttggtccatttcttctcaaacatgcaagagacttgcttgcctcagaaaactcacgtcgggcactgaaatatgctctccgtgccactaagacatttgagaaatgtgctggtggaaaaccaagcttgaacttagtcatgagtttgcatgttgttgcagcaatctactgcaacttgggaaaatatgaagaggctttacctgtgctgcatcgatctcttgagatccctgtaattgaggaaggtcaggaacatgctcttgcaaagttttctggttgcatgcagttaggggacacctatggcatgctaggtcaaactgcactctcactgcaatggtatgcttctgggcttgaaatacaaaagcaaacattgggagagcaagacccaagggttggagagacttgtcggtacttagctgaggcccatgtgcaggcattacaactcgatgaagcacaaagattgtgtcagatagcccttgacatccacagggagcatggcgggacagcctcactagaagaaacagctgataggaggctgatgggtctaatctatgacaccaagggtgatcatgaagctgccttggagcatctagtgatggccggcacggccatgatagccaatggtcaggagacagaggtggcctcagtggattgcagcattggtgatatctacctctccttgggccggtatgatgaggctgtgtttgcttaccagaaagctcttactgtattcaagaccagcaaaggggagaatcatgcaactgtggcttctgtttttgtgcgcatagcggatctgtacaataagtcagggaagctgagggagtcaaaatcttactgtgaaaacgctctcaaaatttaccaaaaacctattccagggacttctctggaagaaattgccactggtttaactgatgtttcagccatatatgagacgatgaatgagcatgagcaagcactcaagttacttcagaaggccttaaaaatgtacaacaattctgctggccaacagagcacaattgctggaattgaggctcagatgggtgtcttgcactatattttgggcaattatggcgagtcatatgattccttcaagagtgcgattgcaaagctccgcacctgtggtgagaaaaagtctgccttcttcggaattgccctgaaccagatgggattggcatgcgttcaaagatattcgataaatgaagcagcagaactgtttgaggaagctagaacagttctggaacaagaatacgggccttatcatccagatactttaggagtgtacagtaatcttgctggaacttatgatgcaatgggcagggatccaaacgccccgttagtgatttgctggaaaaagccacaattatctgttgacatttgcattttgtttcccagacttgatgaggccatcgagatcttggaatatgttgttggaatgcgcgaggagaagctaggtacggcaaacccagatgtcgacgacgagaagcggaggcttggggagctattgaaggaggctggccgggtgcgaagcagaaaggcaaagtccctggagaatctgctcgagaccaacccatatatcgccaccaagagaaatgcagttgctgcatga

SEQ ID NO: 38837 - DNA, 354 bp, Zea mays
  Peptide Sequence Number=SeqID_82212
atggccttgctagatcctcgtgagcgcttccagcccgaggtggcactcaacttggcgcgcaacccgcacggatggggtgtgctagcatttgccgggaggactagtgctggtgtctctcctctcggcgaccttaccgccgaagagtttgtgttctttgtttccaaactacccagcgggttggctctgccgatcccatatttcttcgtgcagctgctggaggggcttggcctccagcctctacccgtggcgttctgcttcatccttcaggcggccatcatcgcctacctccacgggatgtccatggaggcgacactccttcccgcttcttcctccagcattcgcgggaaaggatga

SEQ ID NO: 38838 - DNA, 765 bp, Zea mays
  Peptide Sequence Number=SeqID_82213
atggcgcctcctgttgacgtggtcggtctgtgccctaagttgggcgaggtggaggctcctccaaggtcgaggtcgagtctgtcttccaaggtcaaggtcgagtccgagcccccggttcggacgaggcggagttcatcgtccttcggggctgagcccgagtccgagccctggggtcgggcgaggcggagttcatcgtcctttggggctgagcccgagtctgagccctggggtcgggcgaggcggagttcgtcgtcttccggggctgagcccaagtccgagccctggggtcggtcggagcggagttcgtcgtcttccagggctgagcccaagtccgagccctggggtcgggcggagcggagttcgtcgtcttccggggccgagcccaagtccgagccctggggtcgggcggagcggagttcgccgtcttccggggctgagcccgagtccgagccctggggtcgggcggagcggagttcgtcgtcttccagggctgagcccaagtccgagccctggggtcgggcggagcggagttcgtcgtcttccggggctgagcccgagtccgagccctggggtcgggcgaagcggagtttcccatggcgcctagggccggacttggctgctgtcagcctcactctgtcgagcggctcagcagtcggtgcggcgcaggcggcgctgtcctcttgtcagaccggtcagtggagcggcgaagtgactgcggtcacttcggctctgtcgactggagggcgtgcgcagggccggtcctga

SEQ ID NO: 38839 - DNA, 96 bp, Zea mays
  Peptide Sequence Number=SeqID_82214
atggcacacgcgagaacacgggatgatcaactaacaaacaatgccaccatcagaaaggacacgtcgatgaacagaccaaaattcacctttagctaa

SEQ ID NO: 38840 - DNA, 285 bp, Zea mays
  Peptide Sequence Number=SeqID_82215
atggactggacaggcacgccgcctgcaggatggcctggacgccgcctgccagctgagtggacagagaccgcgcggcccagaggccttacgtcaggctccgcccgctggcttacgtcacgggcaacaagccacgtggcagcatcgggtctccgcctgagcggggagcgcaagttgaaagggaaatccagaaggctgcttcggtctggagcaccggactgtccggtgcgccaggctgcctcggccgaagaggccgctctcgggaatttgctgacggcgtacggctaa

SEQ ID NO: 38841 - DNA, 156 bp, Zea mays
  Peptide Sequence Number=SeqID_82216
atggagaagataacacatggaatccaccaccatcctgaatctcccaaatacttcggatcgaagaagagcaagaaccaaatcaagaaccctaacatgatagaagagacagggaggatgaagattaccaacgagaaagtgtccgccagaggagattga

SEQ ID NO: 38842 - DNA, 378 bp, Zea mays
  Peptide Sequence Number=SeqID_82217
atggaggcactttcgcagccgcactccgcaatcccccacgggcccacaacacacacaacagtaacacgacagagccttcgcaatttcaattccatgtctaatcctcaggcaacgactgaactcgtcgctgccgccgctgtccacataattttgctctgggcctcaccgcagtgcccaagcgaaacggatctgatcgacggccttcaaattctgttgagtgacggcagctgttaccatttgttcaagcaacgcttgcttgcaaagcctactactagtctcttctctcttgtcgtcggttcagtcgatagggtcgtggtggcggtacttgcatcacgtctcaataggatgtatcatgacctgttccacgtccctatgtag

SEQ ID NO: 38843 - DNA, 543 bp, Zea mays
  Peptide Sequence Number=SeqID_82218
atgaccgcgtcaaaaagggaccgggataggggataccccgaaagggatccttctccgcgaaggaaacgggccccgagcccccctattgttcagagagtgaggctgacagcagccaagtccggcctcgggcgccataggaaaactccgcatcgcccgacccagggctcggactcgggctcggccccggaagacgacgaacttccgcttcgcccgacccagggctcggactcgggctcgggcccggaagacgacgaactccgcctcgcccgaccccagggctcggactcgggctcagccccggaagacgacgaactccgcctcgcccgaccccagggctcggactcgggctcagccccggaagaagacgaaatatgcctcgcccgaccccagggctcggactcagccctggcctcagccgacggtctccgcctcgcccgacccaggggctcggactcgacctcggcctcggaagacagactcgacctcgacctcggaggagcctccgcctcgcccaacccagggctcggaccgaccacgtcataa

SEQ ID NO: 38844 - DNA, 335 bp, Zea mays
  Peptide Sequence Number=SeqID_82219
ccatcgactggcccgcggcggcgacggacatgccgtgggggaaggccgcggcgctcgtcaccaagaaggccttctcttcctcggctttgtctccgtcgccggatccagccgcttgcaatgagagagcagggaagcggacgcggttcgtggatgaaaaggattgcaccaggaggaagcggacacgattcgtggatggagagagcagggaatgggcgcagaagcggacgcggtttctcgtggctgggattgcggagactccgtatacgtgctttgtgggggagggcaagagcggagccgtggtgaagccggtggacgccctcggtatcaacatatag

SEQ ID NO: 38845 - DNA, 702 bp, Zea mays
  Peptide Sequence Number=SeqID_82220
atgccccgccgcccccaaacagttccgcgctctgctttctccgccgcacgcacccaagcgctcaggacacgccgcacgccatccgctcctcaaccgctgccccaaacagctcccgcactccgtcttctccgccgcccgcccgcccattgcctcacacgccgcacgcactgcgataagaaggctcgtgctcctcgcctcctcctatttctgtggctccacgacgccatgcgaaggcgacttcttttgctggtggcagtccatcataggaatctgcgccgacgagtttgttcgtgcatccttcgacttttcctctccgtgctcgtcgcactcgcccccttccactacctcgctccgccatgggccgcctcctcacatttccccccttcccatctcacccatcgcgctgggctagaggaagaggacgaggaggacacagctccggcttttcctggggtggaagcagaggcggaggctaatgcgttgcacagattggatttctttgttcttatggtgttttgtcacgttacaattagccaaatgatgcagtacgcgtgcaagcgctacttcgtgctcgaggacaccacgctccgctggttcaagtttgcgccatcctccaagcgtgagcagtggtacatcacccactacagagtggacatcggtaggaagatgcatgttgccaacaaggatgcagctaagggataa

SEQ ID NO: 38846 - DNA, 1349 bp, Zea mays
  Peptide Sequence Number=SeqID_82221
atgagggaggcaccgacagtcacagaggtgctgtacaagtggacaaacatcggcaaggggtggcagtcgcgctgcgccgccacctcccgcatggcagccgcctcccgaccgagatatcctgccgccgcccaccttgctggtgccgggcttctggcccccagctcggacaacggcgaggcaaaggggggaggagggaggacgcccggcggcggcgcggcgagggcaccccgagccgcctacgggaacgacgcgggggaggagctcacgcagtgcgcacctatgagtttcagtttcagactggtcaggaagccaatggatacatttccacagccagcggcggcaagaggccgtagggcacttgtcgacgttggcaatcttatgaatggtcggccttctcttgtgaaccatcagaagcaagcggttgcggcagcggcaaccagtcataaaccactcaacgttggcaacaagaagccacttgttcctcaggcagcagcaagaggcatgcgaccccttgccgacgttacgaatcttatgatcaatgaccgtgctgctcctgcaaatcgtcagaagcctctagatgctgtgtttaacaggaacgggaaggcagtaaagctgaaggaatgcaaggtgaagcctgaagtcattgtgaccattccagattccgagaaggagaagaaaggcaaattgcctggaggtcagagagtctgtaggagggcctctgatgggattaccaccccgaagaagaaggatccatatgacattgatgcacctgattcttgcaatgagctggcagtcgttgaatatgttgaggacatttacagattctacaagagcactgagggcacctgccgtcctctcagcagctacatgagctcacaggctgaaatcagtgagagaatgagagctatccttatcgactggattatcgaggtacagtacaggcttactctaatgccagagacactttacttgaccgtctacatcatcgaccagtacttatctatggagagtgtaccaagaaaggagctacagctcgtcggcataagtgccatgctgatagcaagcaagtacgaagagatatgggctccactggacttgatgtgcctctgtgacaacgcatttaccagagaccaggttctgaccaaggaaaaggccatcctggacaggctccattggaacctaacggttccaacaatgtacatgttcattgttaggtacctgaaagccgcaatgtgtgacacagagcttgagaacatggcattcttctactccgagctggcattggtccattacgcgatgctggtttaccctccatcggtgaccgcagccgctgccgtctatgctgccag

SEQ ID NO: 38847 - DNA, 438 bp, Zea mays
  Peptide Sequence Number=SeqID_82222
atggcagaggagcttttcaaccagccttttgattatgagaactgtttgagagataataggtattgttctcttagcccatttggttttctcccaagtctaaggcatgcccacgaaggaatttattctcattttcgtcacttcacaatcatgcacaggttttgtggtgttttgaattcttttgtcaagcgaacatccaatggaaagcattctaagcctagtgttactccaaaggagcagtttgttactgctcggcggcaagatttgcctgtaagttcaaagcagggagcagacactaagtccgagaaggataattccacaatattagataaggctggcaatggtcctgttgtcaaagaacaatcagttgatgcctatgcaagcaaaagtaaagctcaaaatggaaaggccatgcctagtaatggtgggatcgctggctaa

SEQ ID NO: 38848 - DNA, 885 bp, Zea mays
  Peptide Sequence Number=SeqID_82223
atgccacgtggatatccgacagttatttccaagagagccgacgtgccatctcatcactcggttattttcctcaaaataacttataaagctggctatcattcggcgttacctctaaaacgccaaccacgtgttcaatcgctcggcattacttctaaaatgccgatgccgaccttcaatcactcggcgttacctctaaaacgccgaccacgtgttcaatcgctcggcattacttctaaaatgccgatgccgaccttcaatcactcggcgttgcttctaaaacgccgaccacgtgttcaatcgctcggcattacttctaaaatgccgatgccgaccttcaatcactcggcgttacctctaaaacgccaaccacgtgttcaatcgctcggcattacttctaaaatgccgatgccgaccttcaatcactcggcgttacctctaaaacgccgaccacgtgttcaatcgctcggcattacttctaaaatgccgatgccgaccttcaatcactcggcgttgcttctaaaacgccgaccacgtgttcaatcgctcggcattacttctaaaatgccgatgccgaccttcaatcactcggcgttacctctaaaacgccgaccacgtgttcaatcgctcggcattacttctaaaatgccgatgccgaccttcaatcactcggcgttgcttctaaaacgccgaccacgtgttcaatcgttcggcattacttctaaaatgtcgatgccgaccttcaatcactcggcgtgtcctctaacgcgccgaccacgtgttcaatcgctcggtattacttctaaaaataccgacgccgaccttcaatcactcggcgttgtttctaaaacgccgaccctgtattctttcgctcggcattacttctaa

SEQ ID NO: 38849 - DNA, 212 bp, Zea mays
  Peptide Sequence Number=SeqID_82224
gtagcagccacaatggcttagcagccctgaaggtcacaacccagagtaaagtgggtagccgcaatgttggagggtggaagggtgaacggcgaatgcgcgaaagattgggagggccaaatcgagacgccttggacggtgaaaggcgcacccaggtcggcaccggtgttcaggccacatggggccacgctggcggcagcgaggcctgtgcctag

SEQ ID NO: 38850 - DNA, 213 bp, Zea mays
  Peptide Sequence Number=SeqID_82225
atggcacgagcagtagtactgtgctcagacgatatcctcgggactgctagagatggtgtcgtggaggcacgtgaggacaatgcagtccatgcgtgcccaacccgggatgatgtgggcagcgttggtgtcaagggcatggcgctgaagagcactttccatgaacaagaagcatctgatggcaccactgggtctagttgtttgagtccatgttga

SEQ ID NO: 38851 - DNA, 852 bp, Zea mays
  Peptide Sequence Number=SeqID_82226
atggtcattggcgaggttgtcaccgaccacatgctcatcgccaatgttatccgcaacctcaatgaacgtgttgtcgacatcagcatgcagtttcagcgcacatgttcgtttagatgtgtcaatggggaattccccaccggcatgctcttcaaagacatcagctggtccatccctgatcctgcttttgaagactatatggccagaaagtgttcctcttcttgggctgatttattccctgaaaatgttggccttgtttctgttccaaaagtctgggctgctttcttcatgggcctactgatcaagccggattcttttgactgggccaggaaatttctgttgtcaggagctatctctgccttcgtcgagcccagcatggacaccattccaatcaagattccctccaagtgtctactcccttccagtcaggacacccatgttgagccacagtcaccatccccgacaaaggcagctctcaggaaaaggcagcctatcatggtcgacactgcagttaggaggagtgccaagcttagggcaaaggccaaaggatttaaaacctgctctgggattggtaaaaaggattgttcatgctgtgctcattgcgctccacactccattcagcacgatatcatcaagaagttgggtgctgaattttgtaaggtggacccatccaaacttaagcctgatgacctgagcagatacagggccactggtactgctattcagaggccagatgctcctcccagcagcatggatgatgcgcccaagacatctgaagaccaggcggtggactccctctttgatgatgatgatgatgcgggatctagtgcctctatttcaaccagacccagctaa

SEQ ID NO: 38852 - DNA, 258 bp, Zea mays
  Peptide Sequence Number=SeqID_82227
atggcatcatggacagcactcatctggggaccagctggttcttcagcagggggtcatgtcacaagtggggacgtgacacatggtgatggggtgtccaaacccggtggggaattccccattgacacatctaaacgaacatgtgcgctgaaactgcatgctgatgtcgacaacacgttcattgaggttgcggataacattggcgatgagcatgtggtcggtgacaacctcgccaatgaccatgttctgccatgttcttga

SEQ ID NO: 38853 - DNA, 1011 bp, Zea mays
  Peptide Sequence Number=SeqID_82228
atgcaggcggcatgcaaccgcaccaagggggcgcaccctttcgacttcgacgcgtccagcatggaggcccaggcccacacgtcatgtaaccagcgcgccggttactacgtgcaagaaactgcaccgccactcgcacctgtaccgcgccttctcgactgtggaaccggtgccgcgactcgaggcgaccctgcgcatgacccaacggtgccaaccgagcacatcggtcatgggtcagacagctgcgggagaaggcgcgacggtcgatacggccagaaatgggccggcagtaatggcggtggcaggcgggcagaagcagcagtcaagtcgtcagcaagctcacgcccgctcctaggacagcgagagaaccctctcccacgggaccgggaaaggggatacttcgaaagggatccttctccgcgaaggaagcgggccccgagccccctactgatcagaggttcgaaggctggcccctcggaagggttcaacagccgcctcagagcactcgggctccgcgcccactactggtcagaggttcgaagtctggcccctcggaagggttcaacaaccgcctcaggccactcgggctccgcgcccactactgatcaggggttcgtaggctggcccccaaagggttctgacagtcgcctcagagcacgcagagcgagggatgaccctgggtacgttcgatacataaccaaggctcgggctacgctcctgagagtgaggctgacagcagccaagtccggcctcgggcgccataggaagctccgcctcgcccgaccccagggctcggcccccatctcggcctcggacgatggactccgccccgcccgaccccagggctcgggctcagcctcggctccggaagacgacgaactccgcctcgcccgacctcagggctcggactcagcctcgactccggaagacgacgaactccgcctcgctcgacccgagggctcggactcagcctcggctccggaagacgacgaactccgcctcgcccgaccctag

SEQ ID NO: 38854 - DNA, 528 bp, Zea mays
  Peptide Sequence Number=SeqID_82229
atggtaccgatccggggagggagagccgcgctgcttgtagaggccgcgatctccgtcgactcggtcgtcgccgccgggagcaccgtcggcgtgtctacgcccgtctgggctgccgctgcgtgcgccctcgcccggagcaccgtcggcgcgtcgatgcctatctgggttgccgccacgcgcgccctcatggggatgcgcagctgcccactgtgccgcctgctctcgcgctgcttccctcgccagcctgagctcttcgttggtgttgtcgtcgacagaagcagaattgccggctctactgccgtgcagagcctcgagctctcctgccgccgcacgtgcagcatctgccgcctccgctgcttctacttttactctcgctgctgcagttccgtcgccgccagccgtgatgccctcgccgttgtcgctgcagccgctgttgctgctcgctcacgttcttgtgccacggcgacctcggcctcctgctggcgccgcgcactcgaagtgaccaagcgtagggacatggtgggctag

SEQ ID NO: 38855 - DNA, 465 bp, Zea mays
  Peptide Sequence Number=SeqID_82230
atggccctgttcgcgcgagccgccaccggcttggccacctccggggccacgaacgctgtcgccctggccgcctcactacatcgccggcctcgggcccctccccatgcccctcgtagcgagctcgctgttggaggccccccctacatcgtcggcctcggacccctccccgacgcccctcctacggcagtcgcaacgcagcaccggcgtcgaggctccccgttgggctttcccgccctagctgcacccgcctggaccgacatcgtcaggtcctccacgacgcccgccaccgactcctcgctagtcgccgccatcgccaccatccaggcccgccatggctgcctcacaggagcgtcagcgtgccgcctccctcgccctggagcacgagcgtgccatgggcgctgctctgaccgcccagatgaccacagcgcaacgcctcatcctcggccatcctccggtcgaccatga

SEQ ID NO: 38856 - DNA, 429 bp, Zea mays
  Peptide Sequence Number=SeqID_82231
atggagaaaatcaggcatgtacactcacatattatggaatcaggttcacctgaagatgaggcaggatctgaggacaactttgtgcaaggggagaatgatgttgagactgaatcgaaagttggtgaagacactggacggcaaccccttggtgaagatgtctgcgaactgcaacatggttgggacgctgagaacccgaatgttagcggcgacgacacgctcacagacaaagtgcaggtcaatctccacgtgcttcatgcgctgatgctgcacatgattggtggagaggtagaccgcgctgacgttgtcgccgctgacaacggtggcttgctggagggggttgtgaagctcctggagaagctgacgcagccaggaggcctctaccacaacgttggccacgcggtactcggcttctgccaggaggcagcttga

SEQ ID NO: 38857 - DNA, 201 bp, Zea mays
  Peptide Sequence Number=SeqID_82232
atgccgggcactggctccgccactgtcaccaccagtgcacagttcgacaccgacgacgaaggtcaaggcggcggcgtcacgctctacaagcaacgcgccatggtgcatggtggtgctcgtcgtcgcgtgcgtcgccatggtggtgctcgtccttgcctgcgtccacaccaccatggcatcgttgcgtcgtcccgtaagtag

SEQ ID NO: 38858 - DNA, 417 bp, Zea mays
  Peptide Sequence Number=SeqID_82233
atgacggaacctcccaagtcattaggcccacctacagttgtccttgtccaacagacctcagacaatcctgtaggtgttcctgaatcacttgacaagttcggtatctggttttcttacatttcccaagagcgtttcccccgtcacgcagacattataagcatcggagttacgagaatgcagaagcaattacataaacttacctttattttaaaagatgagaagagcatcacagggaagtttgcagtaagatcccaccatgctcccaatgaaaatatattcttgcagagtaaggtccacgacgaggaacagcccttgccgcgctccggcgagcccattccggtcggacgacgccatggctggagctcacgggagacagggacacaattgaacccctaccgaacacttcccctcacttaa

SEQ ID NO: 38859 - DNA, 588 bp, Zea mays
  Peptide Sequence Number=SeqID_82234
atggggaagcctgtcccatcactcctcatgctcctcctcagccaaggcggggtcccactcgacagtccaacccggtggcaagatggacggacaagtcactccagcaaccatgccctccagagaacctgtaaaaattatgccacaagcaaggctgagtatactaatactcagctagacttacccggttacaatggatcaagcagtctcattagctgcgagaagcagacgattcaaatcgagtttttatccttgcaagtgaccgcacttgtacccaccataaccggaatgggagaccacgtctcaggtcgcgtgaggggatatgtccactgccaggttcactcaggtactaggcttaccgatttaccatatttctcggttatgcataaaaccggggcttgccttccaaagcagtggcaggcagatcctctggtgctggatccggggctacctcctgagcatctccttgctccgtcacgaggacgtactctccgtcagcgaggttacagtctatcgaaatgcaaggaatatgtatgtcctgattatgcagaatttaataacattatgctaaaggaagaaaaactaagttag

SEQ ID NO: 38860 - DNA, 108 bp, Zea mays
  Peptide Sequence Number=SeqID_82235
atggcggttactattttgagacaagacatcatactcacccattgggtgtacaagctggattttctgaaaaacctgatccgtgagatgttcacaaaagctacaaaatga

SEQ ID NO: 38861 - DNA, 456 bp, Zea mays
  Peptide Sequence Number=SeqID_82236
atgggcgaaaagcggaagcgtcctctgatgcccccgttggaggatttcggcaactcggagctctttagtgaggggctcttccaccttcccttggctccccatcgtccgtctgtacagacaactcaatggggttatcccgaggaatctgaggaggaggacgaggaggagtctgaggatgtggaggaggaggagtctaaggaggaggacgatgggtatgaaggcggcacggtcggtaagaatggttgcgacgatggaaaagccagcatcggcggtggcaaaggcagtagcggcgatggcaaatgcggtagtagcggcaacaacagtaggggcaacaatagaggtggtggcaacgacgacaatggtggcaaggcgaagggcagcgacggcgacgatgatgatggtaaaggtagtggcggtaagggtggcaacgccggtggcacggtgccactggcttaa

SEQ ID NO: 38862 - DNA, 840 bp, Zea mays
  Peptide Sequence Number=SeqID_82237
atgcacagtcccacactgacgggcttgcacgagagggttttccccgtatcttatgggaggtacttcagggagctggttacacgacgcctcctcagtacgcggtgcagctgttcgagaagcaccgagtgccctcgctgtaggatgaggatgactctggagcctcatcccctacagccgggatggcgttcattggattcagaatcttttggatacagggctgaggatactatcgaggcgattgctcttcacggactgaccaccttctgtggattccaccccttggtgctgtccactcaccccattggtttgttccccgcgaagaagaaggacgacccaatgtggaaggaccaagtggagcacaccaaggatatatgggctatttacccaggtcagactgctcacttgacggtgcggtgcatgaatgccctgtatcgtctgcaagtgatgcgtggagaggcaatgtcccacctgatggcattgttggaggctaccaagatcactttggacaacagggaggagcttgtggttgacttgtccactgagatggtggaaaaagacctacaagtggaacaattgtcaaatgagatccaagagcttgaggaattagtgggaaccagggagaacacaatcgaggttctcgaggatcagcttatcaacactcagcagcagcttgcggaggctaacaaacatctagatatgcaccaccaggagatccaggatatggaggccaacgaggatgtcgatatcgagggaggagaggagcctgcctctagtttggacactgctagctcagggagaccaccttccccggagtcaagcgttgcctcgtttgctcactag

SEQ ID NO: 38863 - DNA, 636 bp, Zea mays
  Peptide Sequence Number=SeqID_82238
atggagctcaccgtgccgcctaatagaactatatcgccgtggttaggccggagccctcgacgccgacgtactcacccgcctgcgcgcgtggaccgaccaattccggccaccaccgccgtcgagccgtacctcgcggtgaccgccaggacctcccagagccaaccccgcccctcgccggacctctctcgccgccgaaaaatagaaataatatcaaattacaaatgtaccttcggcttgaaagaaggcgaaagtacaagcgtgacgcaaaagcaaatgccaagtcagcgtgagaagtacgggggtactgttcacctatttataggcacgggacacaacccagataaaattacatccatgccctttacatttggtagtaattctatagtaatccaccgaggtctgaatagccttttcatctttaagtcggtttccttttctgctaccacgccgaagctttcctgctcacatcttcggcgctgtatcaaccttcgtattatttgggcttctcctactgtgatatcgactcgagtccgaagatacctgttcacacattatactccagaaacactgttaaatcatgtttgtgaggaccttcggaagccgaaggcccccaacagtagcccctcacaatattaa

SEQ ID NO: 38864 - DNA, 366 bp, Zea mays
  Peptide Sequence Number=SeqID_82239
atggcggaatgcgacctgatggcggtgccggtgagcaattattcgccgccccgattgtcgatcctttccaccgagcccacggtcgacaccaccatccacccgcgacactccccggacaaccgcccgagaggagctcgccgcgatactattgcgtccatccgcaaggttggtgctgaacccgccaggtggggcccgcaaggaagtgaccagaccaattttgggctttacagcggcgcggcttaccggcggcgagagaggtctagcgaggggcggggttggctccaggaggtcctggcgatcaccgcgaggtacgactcgatggcggtggtggccggaatcggtcggtccacgcgcgcaggcgggtga

SEQ ID NO: 38865 - DNA, 213 bp, Zea mays
  Peptide Sequence Number=SeqID_82240
atggattctcgcctatgtggccaattgggcaccggggatagctatggcgcttcaccggccaacagggatcatacccaggccctgtggggtgatgcggggttgtctggagggacgaattcctcgccggggcgagaatctcgccattgggccactgtacaacgtcgccaacagcgctttgttcgctatcaactccataccactgttttgatatga

SEQ ID NO: 38866 - DNA, 483 bp, Zea mays
  Peptide Sequence Number=SeqID_82241
atgactctgggtacatccattacatggccgaggctcgggctacgctcccgaggtaccctaggacatttccgagaccagcaggagcgattttgtaacggaatcccaccagagggaggcatcgagccctcggaccctatcgaatgggtccgggtccggcaaatcacctacaggccgcatgagggaacaaccaggccggccgaggcatcacgaaaagcattaagacctgagaggagtcaaaccactcctccgaggccttgggggctacacccggcgggaaaacagcgtcgctcgccccgctccgactgctgtgccaaccatttgggtaaggctgacagcagccgagttcagcctcggacgcaacaggaagctccgcctcacccgaccttaggcctcagcctcgggaggaggtctccgcctcgcctgacctcaagactcggcctcagcctcggcctcaggaggaatcgcgtcctcgcccgaccctaa

SEQ ID NO: 38867 - DNA, 300 bp, Zea mays
  Peptide Sequence Number=SeqID_82242
atggctatcggagaagtgcttgagccctgtgtacgcgataacgtgaccgtcggagaagcgcctgagccctgtagaagcacaggtggcggtgcgactgggatcctgctgacgtctccttgcttccgtagggggctgagaaccaccgacgtcatggacgcacgcggggagccatcattacctgttaccggggcgagccagatgggacgccgcagtcggagcggggcgagcggcgctgttttcctgtcagatcggtcagtgaaagggcgaagtgacttcggtcacttcgaccttgccgactga

SEQ ID NO: 38868 - DNA, 972 bp, Zea mays
  Peptide Sequence Number=SeqID_82243
atggggagcacccgtgttgccttcgtcttgctgctgtcggaggagcgcgaccccgcgtgggttggcgctcttcagacatcgctcggcttcaaggattttcatcacgtagcccggttgcagtcccccgccggcgctggctctggcgcggcctccgacgctgcctcctgccgcttggtccaggcgtggctgtccgtccaccgcacgggcgactgtcacgccgtgcgcaccgggggatcatacaagacatcgtacgccgcgcgggcggcgttcgtgttcttggattgtcttgtcctcactccagcacgacaccgccgcgcggaggccggcgccgacccatctgggaggacgtggtggcagctagaggaggttgtctccgccgatgagaccgtcggcgccacctgcggtcggacctccggctctttggctttgatggcttgtcctcgcctctcgtgtggggacgtgggcgagggccttttcacagcagcgtctgccctgaggccctctggtgtggaggttgttcatacctgcgggagtggaaccggagtcccgtttgtaatggacttgcctgtgcggaaggtgacgactgaggaccttcagccgctctgcgatgagctggagccggaggcagcagtgtcggtgtggacagaggcggagtcggctcgaaaagaggcttcgtcggcccaggagcatcggcggcggctggagcttggccaggccatccgcgagtgggaccaaccccggagtcacgttgctgaggccatgagccgggctgaggtcctcgggggacagctggctgaggcgacggagcggccagccgaggcgtccgcttgggccggggcccttgcggagagcctggccgtgagggcccaagcgcggtgctggcatcctccttcgaggtggagatccttccgcccgtgtcaccgtctaaggctgggccaggttctgtcgagggtggaaactgagagcacctag

SEQ ID NO: 38869 - DNA, 261 bp, Zea mays
  Peptide Sequence Number=SeqID_82244
atgatgcatttgaaaggttttggggataagtgggaggattgggtcatgagaactgtgagggctgagaagtgtctgagccctgtgtacatgccaacgtggctgtcggagaagtgcttgagccctgtgtacgcgataacgtggccgtcggagaagcgcctgagccctgtagaagcacagctggcgagacttctcccgaggccgaggttagggtcgggcgaggacgcgattcctcctgaggccgaggctgaggccgagtcttga

SEQ ID NO: 38870 - DNA, 1707 bp, Zea mays
  Peptide Sequence Number=SeqID_82245
atggcgcgagcggcggttcgacttctccgcaccaaggaactggtgcccaaggagtatgactcgtgggcccgggcccccgtgctagaggctgggccgttgtttcttgcggagatgaagaggcgcactaccgcaggcagcggttcgctcctcgtggcggtttgccttctcagcactcggagacccgcacaccagttgtatgacttgtgggcccgggcccccgtgttagaggttgggttgctttggtgcgcgctgggcgagatttgcggtgcctcggggcctctccgagcccctttccattggcgctcctctgcttccaccgccgtagtcaccatggcctcgctagtccatcctgagcacttcaagtccgaggtggcactcaacttggtgcgcaacctgctcggatggggtgcgccgtcgtttgctggaaggatccgcgctggcgcctctcccctcggcgatctcaccgccgggttggcactgccgatctcgaccttcttcctgttgctgctggaggagctcggcctccaacttcagcacctcatgccccactccatccttcaggcggccatcttcgcccacctctgcgagatgttcatgggggtgacgcttcttccgccagcgcccggacgaaaggcggccttgtcagctcctcttgaacttcaccagcacctcatggtacgcctccatgaactggtccagctccggctccgtctcagcggccaggccaccgagcgccgtgcgctgccgcgcctccatctctttggctttaatggcctcgacgtcgcctccaacaatgagggctccttcgccttgacgcacgcatcaaggaggccgccatcgaggaggtcgccgccattggcaagctgtagcattgggttgccgctagcgccgctattccccgtggccgccaccgtgctcagggtgagcggcaggcctgcgcccggcagttgtggcggcagcggcgctacgacagtgctaagggaggatgcccaagggcggtggctcgatgtgtcgaggctggataccagcatacctaaggaagagttggtgtcccggcccccaagaggtggcctcgactgggacctggacctgcttagggtacgggaccaggctaagcggctacacggctccggaccaccccaggggacacttagggtgcggaaccaagctaagcggctacacaactccggaccaccccagggaacgagtacccattctctagaactcgcccctaggctcccagacccccctattgagggatcccaaactgcaagcccggctactcaattcggatgtcatgatactagcaaagaccaacaggccgggcttataatggcggacctcaccgggctggcgtacacggcggacacacccgggtcggcatacttccgtcaccttgaagggtccttccctgctgggggagagtttgtggagcccttctcggttcagtacttcgccgcaggactagcgcctgagcgcctggttgtatcgtgcatttcggatcgttgcttgccatctgcgctcgtcgacgaagtccacgtcctcacgccgcagatgttcctgcatagactcaccaacagactggacctgtggggagcccataagggtttctgggggaaggcgagcttcggccccacagaccagggagagcggggtctccccggcagttcggctagctgtcgtcaccagagtcggattctccggtga

SEQ ID NO: 38871 - DNA, 783 bp, Zea mays
  Peptide Sequence Number=SeqID_82246
atgggggccacgggtcagtcagccgcgaggacagatgtggcagttggcgtgaccgaaggcggactggcagcgattacttcggcaagcgcacggaagcggcgcgccaatcaggctttggccccatcggcaggatcgtatcctcccctgaggcgatgtgctgcctcaacatttaatgtgccctgtccactccgctggcaggcggtgaccaggccatcctacaggaggtgcataaagttcacaattaacatgcaacaaattgatttggagaattctacaaagtttggagcatatgtgccaccggactgtctggtgagccaacggaacaacgatcaactatgctcaacggtcgactgcgcagacgacggaacagtgaatagagtagaagtcagaagtcagaactgcaaagtcagaacgcacgggactgtccggtgccgcaagaggacagaagacttcaacggtgccaaaggttcaacacaaaccaataaaaagatcaaagttagggttcaaaagacaggagcaaatgaaaccgaagagaaccctggtctggcgcaccggactgtccggtgcaccaggggcgatcgactccaactcctcaccttcgggtttctgaggccacgctccgctataattcatcggactgtccggaaaagtcaagatggaattaaagatggctttgttcagccgaagtcagctcagtctgggtgcaccggacagtgtccggtgtgccaggctggctctggtgaaaaggccgctctcgggacttcgtcggcggcgtacggctaa

SEQ ID NO: 38872 - DNA, 432 bp, Zea mays
  Peptide Sequence Number=SeqID_82247
atgggcaaaacggagggaatacatatagaagtatccaatgtctatgtcgcccagaagatctccgagcgccataatgttcgtagtccatatagtattaatatctcgcggctgcctcctcgaggccgcgcggcccagaggccttacatcaggctccgcccgctggctaacgtcacaggcagtaggccacatggcagcatcgggtctccgcctgagcggggagcagaatcgtacatggtatggttcggacgcgtgtcggctccggacccccgcctggtcttgatcaaggcctgggtattctttgtcccagaatcccgggatcctactgagagtggcccggaccccacacagaggggtccagaccccatcctaggggtccggcttgcgctcgcggacgtcccggaccttatccgcaggtccggtccgcatatatag

SEQ ID NO: 38873 - DNA, 366 bp, Zea mays
  Peptide Sequence Number=SeqID_82248
atggcctcagctaatgttggagcctcgctgtcgggtgtaggagaccattcgtcgaccagattcatggaaggaggaggcctaaaaaggtccagttccccaacaagggcttcacccgctgctccagatggtctggctcccatcccgacaggatccacagagatgggcttcgctccgataccagctgtgacggaacctcccaagtcattaggcccacctacagttgtccttgtccaacggacctccgataaccctgcagggttcttaagaccagatcaggttcacgccaaccgagagcacagatacaccaccgtccagcctcttgccatggagggtactgtaacacctcgggatccacaaacaccctga

SEQ ID NO: 38874 - DNA, 207 bp, Zea mays
  Peptide Sequence Number=SeqID_82249
atggtggtggccccctgggtgaagtaccttagccaagaatacgaccccatgttaacgtgggctgccagcacctaccgctccccctcttgcccatctttcaggtacaaacagaatatgcagagggagaatccacttgccttgctcaaaagcgtcttgcgggtcgtcctcgaacaagttcgaatcgcctaccgcacaatcggcttctaa

SEQ ID NO: 38875 - DNA, 891 bp, Zea mays
  Peptide Sequence Number=SeqID_82250
atggatcctggcacacatatgatggttcgcactcttcaaactacccacgtcaacaccagctacgcccctcagccccggcagatcccggtctacccagtggtagtcgaggaagctacagtgaatctccctctcgtccgagtggagaacgtgatcaacctggaggacagctcggaggagcaactgccgacccccacctcgttggccgagtccctggccttcgcagctgggtcatcgacgtcagcatcgtcggcaccagccttccaagcacctgcacctggaggcgatgaccccgacgactccggagacggcgatgacgaggatgacgacgacgaagacgatggagaagacggacacatcaacgaggaagctgactacgcccagcaggacaacttcatggggtttggtcctgttgtcgaacattatacatcaatgtttcgagacggggcacttccccaacctgctgcaggaggtgttgcatgcgctaggcacctacgtccgccccctgtacgagacgaggcgggtgacaggggatttaggactctgtctgctcacgagtccctgataccgctgtccacctacgctgcctcggtcagcgatgctgcccgtcggaccctgtggtcgctcagccacacctactggcaacagctgcagaacacgaggttcaggcatcttcctcagcgtctgcgtggagaaagccagaccaacattgtcccaggtgaacctggtgaggatcgcctcaacacccttgctggtgtagtggccggtctcaacaccgacctggatagtgccaccctggatctctacagggtgcacttggagctggagaatgcccacgccaggattgcagccctggaagcccaactgcaaggactagatccgccagaagcttag

SEQ ID NO: 38876 - DNA, 1431 bp, Zea mays
  Peptide Sequence Number=SeqID_82251
atgcacgtggtcggagacttcctgaagcgccggattgtgccactgcagcagagggcacatctatgttgctggttcatcggctcaaacgatatcgaccggatccagcgctggccggggaccgacctgtcctgggaggagctggaggttctggttttaacccatcctttgctcgtcagggcttcatccccctctgctcccaaggtcgtgcctcccccaccctcggctgctgccgccgagacagcgccaccgggcccccaggcccctgctgggggtccgacagcagtggcgccaacgccaagcggtgccgcagcagcagagggggtccccactgctccgacggctgccacagcctctacgacagtgatgtcgtcgagtacaccatcggcagcggcagaggaggccccagctgcgcccacccccgccatcgaggttgatgtggggggcgcgtccagctctgtcccgccgcccactccggaggagacggagttggaggagcgcaccaaggcggtgtcccgccagttcgccttcgagcggtccaagcttgagcgggaccgcaaggactacaagaaggacctccagaaggtgtatgcccgggagctggaggtgacccggaaggagaagaagctggctaagaaggaggagcacctggaccagagggaggaggtcatcccggagctccaggcgaagctgaatgccttcaacaagatgctggaggagcagcggcaggggctcgatgacagggccagaagccttgccctggccgaagagaacctcaaggagaaggatgcttccctgtataagtgggcgacgaacctcgcttggtgggagaaggacctcgtctttagggaggaaatgtttgagaggcgggagaagctgttggccgatcatgagctcgaggcggatgagaaggggcgggcgctggaggagaaggagcggacgctgggggagcgggttcgccagttcaaggcggcgcaggcggcacagatagcaccgggccctcaggtggtggaggtgatgaggaagacacttgaggatctccaggcggagcagcgcgccggggtccagtgcatcaccgcatgggccggcgaggcgagcactgcactggtgctgctaggagtgagtcccatcccggtgtcgcagccgccgacgtccatctccgacgcgctcccggtgctggactccaccgccgaccgcctccgatgcctggaccatatcctgggcgcccgcctggaggccgagggcggcagactctaccaggcggtagtcgagtacatcttgacgtgcttccggagccacgacccggccatatccttggagccagtgatcgctggtccggtggtcgacactgaagacgctgaccaagagggcattaaagacgccgtggagctggtggccgagcgcttccagcgggatcctgctgatgacgagtag

SEQ ID NO: 38877 - DNA, 810 bp, Zea mays
  Peptide Sequence Number=SeqID_82252
atggtcattccaagccagtgccattctcctttggccgtccctgctccagccgtgagagatttcagaagtctgttggacgaagaaaagagaagtgaaatttgtgcagcgcccgtcagatattgtgtctaccgtgtgagggaatcgtgccagcttcctttgggtttgggactgggagctccatcgctctatgatgggtcggcagttttagtgtctcacacgcagtggccacgggatttttcaagtcacttggtcgtggaagggcttcttattgcagtcatagtgttccagctctccaggaagagctacaaaccaccaaagaagccactcactgaaaaggagattgatgagctatgtgatgagtgggagccagagctgctatgccctccaatcaaggagggggccacaatagatgctccaacattggaaagaaacaaggttgtaatggaaggtttcatgactgcaataattcagtttcttgaagcgttagaatcattctatgttgttgaaagagatggtttgcgcgacatggcttttcatagtgctcaattggatctatcccctgagcataggagaaaattcaagctctgcaaggtgaggtctgttcagtttggccagaaagtcatcccctacctgaacacctacgacgaccgcaccatccgctaccccgaccctctcatcaaggccaacgacaccatcaagatcgatctggagaccaacaagatcatggacttcatcaagttgtatttgccctttcatagacttcatcaagttatatacttagttaggctcaatgttagcacaaacagttga

SEQ ID NO: 38878 - DNA, 645 bp, Zea mays
  Peptide Sequence Number=SeqID_82253
atggtgggcggtaattggctgaggaggaggaggggaaggaggagtaggacggcggatgaggcagagcaggcggcgcagcaggacgaccttgtccagcagcaggcggcgcagcaggacgacgacgaccagcaacaggacaacgacgaagctcagcaaaccgcctcagtttgggattcagggaagtttaaatcctcattggcaggtttctcatgggccccaaactacagccctatatacatagcatcacatcatgatccattggttggcccgaagaccgaagtcccgaagtcacagcttggttcacaggctcatgctccactaccggaattcggctcttgccgagtgctcgtcgctttgccgagtgctttttgtcgggcactctacaaagtcctgctctcgataatgacctcgtttaccgagagcagtactctcgacacagaaatacactcggcaaagaaacctgtgccgagtgccaaacactcggcaaacaacggccctcggcaaagggccgtcaatggccgtctaaagctgacgaccgttaactttgccgagcgccggactttgacactcgacaaagaagcctctttgccgagtgtccggcgtctgacactcggcagagcttgctatgttgagtgtcattcctag

SEQ ID NO: 38879 - DNA, 216 bp, Zea mays
  Peptide Sequence Number=SeqID_82254
atggcgggtggaattgagctcgccggagctaagggaaagtggctggtcggtgaggataacggaccgtgggtagagtccgaaggagttgccggtgaagaccctgagcagcagccagtaggtgatgaggaggatgatggttttgattatggttacgataatgtttctggtattcttttcgtttggaaagggtacttctggattaagaacttgggttaa

SEQ ID NO: 38880 - DNA, 681 bp, Zea mays
  Peptide Sequence Number=SeqID_82255
atgtcgtcgcagtgcccctactgccgcgcgtcggggccggcgcggtgcgcgacgacgcagccaccgctctcgcgcgccgtctccgagtgctccgcctgtgcccgaatcgtcctcgagcgccacctccacacgcaccccttcttccccctcctcccctcactccatccgctcccccttgtcacccccgacctcgccacagccatcgatcccgccccatctccttcccctggcgacgaagatgacgaggacccctttctccccgcgggcttcgtctccgccttctcggctttctccctcgagcgccaccccgtcctcgcccgctctgcctccaccttctccggacacctcgccgagctcgagcgcgcgctcgccgtcgactccgccaccgcggcctccaacccggaccccgccggccccaaggtctctgtcgacagcctccgcgcctacctccagatcgtcgacgtcgcctccatactcaggctcgacagggacatagcggaccacgcttttgagctcttcaaggattgctcgtccgcgacttgcctcaggaatcggagcgtcgaggcgctcgcgaccgccgcgctcgtgcaggctatccgcgcgcgtcgagccaacgccgtagagcccccgaggtggcgaacagcagagcaggagatccggacgccggtggccggtgcctag

SEQ ID NO: 38881 - DNA, 1308 bp, Zea mays
  Peptide Sequence Number=SeqID_82256
atggcgtacagggcgttggaggtgactctcctgtcggccaaggacctgaagagggtgaacctgatctcgcgcatggaggtatacgccgtggtgagcatctccggcgaccctctgacgcggcagtgcacccagccggacccctacggcgggcgccacccgtcctggaacacctcgttccggttcaacgtcccgcccaccgccgcgacggccaccggctgcctccacgtgctcctgcgcaccgagcgcgccctgggcgaccgcgacgtcggcgaggtcatcgtgcccctggctgacatcctcgccaccgctggcggcgcgtccgaccctggcccccggcctccgcagctcgcatcgtaccaggtccgcaaggtgcaccgttgcgagcctcgcggcgtgctcaacgtgtcgtaccgcctgggccccatcgtcggccagcaggcggcgcctctggcgagagccgacgaggccgctgccgccttcgtcggctacccagtagtgccgcggcagtactaccccgcgccgtacgcctacctgccctcgccgctgtccctggcgcccgggccctctcctcccgcgcaagctgccggcggacgcgacaccctggccctgcacccgccttcgccgtacagcttgcctgctgctacttacccgccggctgcttctgcttatccgcagcaggcggctgccggtcccgggcgcaatgctctgccggcaccggcgagcgaggagagcaacggaaagctggacttcggggtaggcctcggcgcggggctggtcagcggcgcgatcggcgggatgctggtcgccagcgacgtgatgatgtctgacgcggcggcttacaactccgggtaccgcgctggactggccgacggcggcgcggcagcggtgtacaggagctcttatcgcgttcccgataaggtcgaagcaaaacgggcggcagtgccggcctaccggaactaccattgggtgacagagatcggttccgctccacggcgacaagaccttgctcgtcacgatggccgcgtggacgtgtacggtcccgacggggtcggcggcctgcacgtgctccagcgggtggacatgcggcagcacgccgcgtcggcgtcgcgggacgcgccgctggtgttgccgtgcgccggcgcggatgatggcgaggtgcgcgtggagcggtgggcggcgggcgggttcgcgccgctgtccatggccttctctcccgactccaagtggctcgtcgtaccctccagcgtcaaggggacgatccacgtcttcagcgtcaacgtggatgcaccgtcgccgtcgccggcatag

SEQ ID NO: 38882 - DNA, 651 bp, Zea mays
  Peptide Sequence Number=SeqID_82257
atggcagcaactacgacgacaagcacaaaggtcgttgtcattgggcgtagctgcaccgcccacgctaaggagctcggcgacctgatccccaaggcagtggcggagacctggactcggctgcggcctagcgatagagaagtccaacagtcacgccccttcgaccatcagcaagcagttcgatcgcggcaccgcgacaagcaactggatgtcaacgatgagagctcagttcctcccagctgcaaagggattcgctgtattcgtagatgccggctggagacggcaggtagcacccaccacaccagacctaaaaagctcgagccgacgctgaccgtgaccggaccggccgtcatgcgccgcacgcgtgtgcgggcgctggccagccgccgccaccgccacgccccgaagcggaaagccggtgaccaaccaccattcggtcgcgggcagcaagttgcggcggcaggcggcacgggccacgtgacggccccgacgcgcgcgtccacggctccacgtgacggccatcgtgcgacagcgccgtccagggcccatgtctgtgctgtgccccaagccccgcagcctttgcgccctggatattctgccgtgggccctcggcccgtctggatgattattgttgcggcgacggtttggatctga

SEQ ID NO: 38883 - DNA, 1023 bp, Zea mays
  Peptide Sequence Number=SeqID_82258
atggccaccccagacggtgacaccagcttcgtggtggggagaagcaagccgggctgcggcctttgctccgccctcagcttcaaggatcttcatcatccttgccggggcggtgggcgagctgagccggagctccacatctcgcacgggctcgtgggccaccttctccttcagccttcaggggagggggtgctcaccgtcctagcggaaggggcggacttcgacaacgcggggccgagtggccgcaagcgtcgtcagctccaacatgcctggctcgctggctcagctggctctggcacggcttccggtgccacctcccaccgctgggcggagtatggctaccattcgtccagcgtctgccttgaggtcatcactgctgctgtttggccgcccgaggcggaggtagttgtcgctgctgctggagcgattgtcggtgagccgtttggagttcgtcgtcccgcgggcttcctggtatggagaaaccctcggctgctctacgatgagctgaagccggaggcagcggtgctagcttggacagaggcggagttggctcgaaaagaggaagcttcgtcggccggagcctggccgggtcgtccactggtgggaccaaccctgagtcggattgtcgaggccatgagccgggctgatgtccccgggggtcagctggctgaggcttcggagcggccggccgagccgtctgctcgggccaggttcttgcccgaggctgggctcgggcgcggtgctgacgtgctcccccgaggtggagatcctccgatcatgtcgtcgttcgagactgggtcggattccgccgaaggtggagtcgatgccgagggtgctgctgctcccctcactgattgtctgaacctaatcatttatccgagcgagagttacttctcacggaaggtgatgagtgagaaggtgatgagtgaggtatctgtatcccggaggcgtaggagtccctcggctcggtcagccttgcctgcttacgtgtactccatcgttttcatgatcccaccatcgaagtag

SEQ ID NO: 38884 - DNA, 180 bp, Zea mays
  Peptide Sequence Number=SeqID_82259
atggcatacgagggaggagacaagaagaacaaccggcaaagaatgaaattggagcaaagaaccacttattacaatcttatcgacacaggcggatcagctttgaatatgagtgacgatcgaaaaagggcgatgtacgatggattcgacagtgtcactcatgggcactctgaatatgagtga

SEQ ID NO: 38885 - DNA, 360 bp, Zea mays
  Peptide Sequence Number=SeqID_82260
atgtggtctggagtagttgctaaaaggatcaggaggatgtctgggtcgtccggctccggcgtgtgggtgttcaagaacggcgtgatgcagctggagcagccggccgcggcggcgagccggaaggcgctggtgtacgtgccgacgaacgaggtggtgcggtcggtggaggcgctggagcggcggctgggcacgctgggctgggagcgctactacgagaaccgcagcatcgtgcagctccacaagcgcgacggcggcgccgacctcatcaccatcccgcgcgacttcgccagcctccgctccacccacatgtacgacgtcgtcgtcaagaaccgcgaccacttcaaggtcgtcgacgcttag

SEQ ID NO: 38886 - DNA, 738 bp, Zea mays
  Peptide Sequence Number=SeqID_82261
atgtggagccagacaccattgaaagggaaatgtgcccttgggccatttctaagtattttggtgattgagtgccaacacaagtgcttaaatgtgaatctatacccatggatggacaaagtgcaaatcaagagtaaaggagaaatcgagtcagagaaaagttggctgtgtacagccaaaaggctgttcggtctggagcaccggactgtacggtggtgcaccggacagtgtccggtgcgccagactgactcgggcgaactggccgctctcgggaatttaccggcgacgtacggctataattcatcggactgtccggtgtgcatcggactgtccggtgagccaacggtcggccgggccaacggtcggccgggccaacggtcggccgcgcgatctgcgcgggacacgtggccgagccaacggctagaagggggcatcggactgtccggtgtgcaccggacatgtccggtgcgccaacggctctctggcggccaacggtcggctgcgccgtttaaggaaagaaatcgggcaccggacagtgtccggtgtgcaccggactgtccggtgcaccagtcgacagaaggcaagatcagccttccagatttgctctcaacggctcctagctgccttggggctataaaagggacccctaggcgcatggaggagtacaccaagcattcctacaacattcctaagcaccaagacatcgattccgcgcatttggttcattgtgatagcatctag

SEQ ID NO: 38887 - DNA, 644 bp, Zea mays
  Peptide Sequence Number=SeqID_82262
ggttctgcaacttctgtccaagaccaattgatgccattgggtgtgataggagggcaaatgatgccgtgggcacctcgccagccaggcatttggccaccgatgcaaacacagatgccaccgccgatgccgtggggatttcctcctcgtgggcagtcacaatcaccaggattgccctcacactcaccaggatcatgaactcgcagagcacgaagttgtccatgagcctcgccgcgttcttggcctcgccgaggctgcgccaggcgtcttccacgagctgccgcgccgccgaccaccaccctttcccgcgcggggactcggggaactgccaccggaggaagtcctcggccgccgtggctgccgccgcggcggagctcagcgccagcagctcgtcgtgggcgtggcagacggacgcctcccggaggtccatccaccgctcccacggcgcaaatttcctagtgctcgcccagtctgctcaagttcccagcgtcggccgagagctcacgggcggcgcacttcaatccgaatccctcgcctacgcctccaaatcgtcgaagccacgtctgaggacatccataatggcaaatttctccagttgggttgggtggagggaagatgatgggacccggttgcacgatggcgactag

SEQ ID NO: 38888 - DNA, 519 bp, Zea mays
  Peptide Sequence Number=SeqID_82263
atggcttccttagaaattaaaggagtcataaggcaaagagtaaacggaacggagcgtgactgtgagagcgagatgggaacggagcggctccgtccgatgaagtacgaaaaatcatgtgttgagtgcttaagccaaaagattacacggctttatggctttagaccaactccagcaatactctccatcccactccgcatccgcattatacacgctctgagtcactatttcgctctccagcaacctctgcatccgtctccgcaaaacagacgccgtgtacctgcactccccttttccacggtttctctctcctctccgcacaagactgcatgcgccacctcctgctcgcgggccccagctgtcatagactgcatgcggagtgcaaatacggagtctgctggaaacggggacggatacggagaggagagagaaactgttggtcgtgctaaatacggatacggagagggagtctgctggagttggtcttatgggaccggacctctttctagaaatcacggttga

SEQ ID NO: 38889 - DNA, 357 bp, Zea mays
  Peptide Sequence Number=SeqID_82264
atggcgtggaattgtggcatcgccttgttgaacttcggaaagtttgagccactatcaaactggggctcaaatgatttggataacctgcgtgattcaggatatgcttttaaccaatgcgctgccaagtcgcagagggagtcatggaaccttgctgatcgctcaagttcaggatcttctgaaggagttgctgctgctagcagacccgcagacgctcccactgctcagagtgctctgcccatgacacgtagcgtggatgcggtcccaggtgcgcctattgttatttctggatactggactggccccggtgtagatgatggctgtggtagtgttgaggccgtgctccagaggattgcataa

SEQ ID NO: 38890 - DNA, 543 bp, Zea mays
  Peptide Sequence Number=SeqID_82265
atggcgcccggcggtcctcacctctgctcctctgcgccgccgttctctaggcccggcctcaagctccctcggcaccctctctcctcttctctccctcatcctcaacctccagccgtggagcttccccgccgcagcctagctccctctatccgttcccagccgcggagctcctgtgcgcgcgagttcctttggtggacgcgcgctggccgtgatccacctcaccccatcgcggcgctccagctcgctgcgcgccctgctccactatgtcgatccgcctatctccctgagctcacccctgtgctcggattttccgtctcgtccatggtgctctcctcagccgcaacttgccgagttccgcctttctccgctctccctgctcgcctaggttggatggggatccacctggtggcgtttgtggcagcgggggcttcctgcaggcgtttcatgtgtcggcgctgctggttggaaccgttgctcgtcgatccaaaccccaacgtcgtcgatatccagctcgccaaatgttcgatggaacgtctaatctga

SEQ ID NO: 38891 - DNA, 645 bp, Zea mays
  Peptide Sequence Number=SeqID_82266
atggaaggaaacaattgtctttctgcaaaggaggggtcagttctaaagcagcagcaagaggaaaccgatgaagcggctataagctacaaggggaaagtgattattataattgatttagggggttgtaagaggattttgcacaaggatggagctactgagatggatgagctggtggggtatgaaatgttcatacatgattttgcgtggtctaacaagaggggtggcaccatcgatggagaggttttcaatacaaacatgccatggttgggggatccaagaatggatcgttctcattggaatgatgatggcagaagtaagaagccatatcctacacaggttggtaactctaccagcataccttgggatccaggaggagcaaatgcattacatgacatgatgttgcttgaggacaagcaatacttcgacgggacggcgcgattgatgagccacagggaaggaatttctcagcgacgctacgcagccgccgcgataccgcacctcgccgtggctggggttccttcgtcgccgaatccgctctggattacaaaccggacctccgccggtcatggcagccaccgtcgaggcctgggcgccgtcgtggccgcgtctggatggacgggatcatctgggccgtcagatccttga

SEQ ID NO: 38892 - DNA, 354 bp, Zea mays
  Peptide Sequence Number=SeqID_82267
atggagcacggccagcgcgcgtccaccaaaggaactcgcgcgcacaggagctccgcggctgggaacagacagagggagctgggctgcggcggggaagctccacgactggaggttgaggatgaggggccgaagcgcagtccgatggaggaacaagggctggcaaccggccatggggagcaggcgcgcgcggggaagatgagcaggggcgcggccagccatggaagcaggggcaatgccgacgagctcgcagcagggactgagcagagagattgtctgggcgtggtgagctccagggcgcgcgtgctatggacaccagggggaagggctcgcctgggagttcgggctaggcgctga

SEQ ID NO: 38893 - DNA, 141 bp, Zea mays
  Peptide Sequence Number=SeqID_82268
atggccatgatgggttcaacattggaaaagatgtacctttgccaggtttgtgctgctgtgatggggctaagtgccgatgggctcgaccttcttataagtctaagtacttcttctatacttcttattgaggatggtcactga

SEQ ID NO: 38894 - DNA, 441 bp, Zea mays
  Peptide Sequence Number=SeqID_82269
atggccattatgggttcaacatcggacaagatgtacctctatcaggacagccagcgtatagctgaattgtcagctgacgtcagccgcttgaaatatgagatatcagaacgtgattcggccattgattgggccattaactcgtgttcgatcgcttgggaccgtgaagcaaaagctcgagctcgtgtggcagagctcagtgcagtcctcgaaagcctgcaagtgtactgcaatactttacatgaagaagtacatgtactgtatgctcgactgcacccggatgtgccttccgacgctgctgcaatgggagctggaccatcaggaacaacaaatgaaggacctgatggggagttggacctttttaggccccctcgttccatgaaccttgctgacgaacggtctcttgcaacaggaaatgaagcaacaaaggatgatgaagactag

SEQ ID NO: 38895 - DNA, 546 bp, Zea mays
  Peptide Sequence Number=SeqID_82270
atgaaggacataccttcatcatcgtattatacaatagtaaaaggggaatcatatggactggctgaggacactatcgaggccattgctctccacgggttgacgaccttttgtggctttcacaccttggagctgtccactcaccccattggtttgttccccgctgaaaaggaggatgacccgatgtggaaggatcgagtggagcatgccaaggatgtgtgggctctctacccagggcagactgctcacttgatggtgcgatgcatgaatgccctgtaccgcctgcaagcggtgcgaggagaggcaatgtctcagctaatgggcttgttggaggctaccaagatcaccctagataacagggaggaacttgtggtagacctatccactgagatggtggataaggacctccaggagattcaggacatggaggccgacgaggacgttgacatcgagggaggagtggagccggagcctgcatccagcctggacactgctgactcagggagacccccttccactgagtcaagcgttgcctcgtttgctcattag

SEQ ID NO: 38896 - DNA, 333 bp, Zea mays
  Peptide Sequence Number=SeqID_82271
atgtgcgggtcgccgtcggggatggtcgaagtcgactggtccacgtgcgcaggcgggggagctcgtcggcggcgagcagtccggcctaaccagggcacgattggtcaatcaaatgggtcatctacgcgcggtggcgggcgaccgaagtccggcgaggacgatctcaggtctccggtgaagttctaccgggtccaagcgcttggaaagcttcacgggccactggtgaagctaaccgaggggcaggcgcagcttggacgcgactggagcgggctggccacggtggccgaggctcgggcagtggtggcgggcggaggaaaggctcgccggagctaa

SEQ ID NO: 38897 - DNA, 249 bp, Zea mays
  Peptide Sequence Number=SeqID_82272
atggattcgctcatcggcgcgggcaggagcttctacggcttcaggatgctgtccaactggagaatagtcgtcgtaggttcgggcgcgccgatcaccaacgtggtgcgctgcctgcgggcgcggtgccgccgcgcgaagtctggctgggggaagaacgacgacctcgcgccgtccgagtatgattgtgcgactgggattaaatctccccaggaacgtctctggcggttggatctgttttatgcggcctag

SEQ ID NO: 38898 - DNA, 537 bp, Zea mays
  Peptide Sequence Number=SeqID_82273
atgatgcccgagaagaagctaggcgagctgaagaagctgctgaacgcgaaaggcgtggtagtggtggtggtaatgggagctgggcccaggaagcttgagaatgacctgccgaagcagctgaagtcgcaggttgttgattacctatgtattctgcaccgcgccgcccacccgcgccgcccagggcgccacccccacgcccgcctccagcgcgcagcaccccagccgctagcaccccactgcgcccgcctccagacaaccgccagcagcacccgtaccgcccaccgcgtccccccaccgcgccagccagccgccgccagcagcccatcgcgccctcccccaccgcgccagccagccgccgccagcagcccgtcgcgcccccaccgcgccagcggcacatcgcgccagcagcacaccgcgccagcagcacatcacgccagcagcccatcgcgctgcagacgcgctgctggtaccctctccctctccacccggaagttcttgggtaaccatcgcgctacaggtaaccatctccctctctga

SEQ ID NO: 38899 - DNA, 216 bp, Zea mays
  Peptide Sequence Number=SeqID_82274
atggacgagtctgagtatggtatggcaattaatgttttgttttcgaaaaagggtgcgtttgaagataaatgggttttaaaagaaaaaggtgatcggcctcctgggactagtaattgtatcacatttgagtcccagaggattgggacgcttcaggtggtatcagagctgttaggttggccgcaggacgtaacccttagcctgatcaatagtttttga

SEQ ID NO: 38900 - DNA, 906 bp, Zea mays
  Peptide Sequence Number=SeqID_82275
atgaagatggttttctccaagttgctgagagcatgcacagttcgcctcggaatcaggagccagccagagtatgatggtcgtgaattcgtcgagcatggcacagagaaatgtgtcatgacagtgtacattggatccagtccgcaccatgtggaatggagtgtcactgatgctgggcacagattcagagacacctgccaagtcatcgctcgcaaggcattgagggccctgtgtcagatctatgaagaagaagtggccgacacatcgctcagattctttccgccctttcagagaaatcgtccagtttggatggccaggatgcgtgcattggaagagcagcagctgcttgaggacgaccccacagtcgcgtacctcactgcatacctgctcaccctggatgcacaatatgatttcttggatcggcaccaccgtcagatgattgctcgagcagaagatgcagagaagctcaaccagccctgcggatccaagagcccgctttcatccaaccatgttcaacccatcagagctgaagaccccccgattcttgaaggtcacccggtctctatcagaggagagaagaaggcttgggaactaccggaaggagccatagtcttggaaggaattccagtctttcctcaggctatgaataagcaagagcaccccgaatccgcccaagatcccccgccagagttgtttgagcccctcaccatgaagaagattccagcactgtcccgtgagatcaaagaagaagctgcaagcaccccgccagcaccgccgccctctgaggagctacaagagccagtccagcttgaagaagagttcgaccccgtgctgccatctcagtcgccgccagaagaagtcatcaacatcagctccctcttgacccatccaggagatgtctcagattga

SEQ ID NO: 38901 - DNA, 1170 bp, Zea mays
  Peptide Sequence Number=SeqID_82276
atggggcagagtcatgccgcccgcgcgtcttctaccgccacgtgtcttccacctttactctgcttgcgagtccgccgccgtctctcctacccagtctccctgcccggcggcacgccatcggactcgccaagctgcgcgtcgggcagcctcgccgagccaagcgccgggcggcctcgccgaggtaggcggcctcacctagccggacgccgagcggacatcgcggagccgggcggcctcgccgagctccaagctccgggcgcggcgcagtgcctcaccgagccaagcggcctcgccaagccagacgtcgggcggctatctgcacagactgagccacccacccaacaaccttcttccacatgcgctaacgcgaccggtagcgaaacctcggtgtcctcgtccagccgtgttgccgttcgggtgccactgctggaatacagttcttccttctccagctgtcgggtgacagcaaaacttgtcatcacttctgctataaacagtgcatcttctagtaacgagaaggaactatctgcttctagcagcaatgatgacttcaaaagctttgagagcactacttcatacaccactgctgctagtcgttcatcgactattatactggtggcaatgcatggaacagcaccatgggtgattatgctggcagcttgtcagatgcgagaagatgttgtctccaggaaagcagcacagaagatgaaaaggatgcaacgatcaactcctgctacgactagttcatctaccatggctgcttcaggacctattgtagcacgtgcacacttcccaagagctccattccgtgaggtcattacaataggacattacataaatgatgatacattttatgctagaaaaccaaaccagaaaaagggtaagtaccagaaggcccgcagtttcagtaacatgtcgtcaaagaccggttatactactgatcatggagataatgtttcagctgggtctgataggagggcaaatgatgccatcgggtctgataggagggcaaatgatgtcgtggacaccttgccagccaggcatttggccatcgatgcaaacacagatgccaccgccgatgccgtggggatttcctcctcgtgggcagttacactcaccaggattgccctcacactcaccaggatcagttttgggctcacatcatgctag

SEQ ID NO: 38902 - DNA, 576 bp, Zea mays
  Peptide Sequence Number=SeqID_82277
atggccagccagctgcacgccatcacccacttgtccccatcgtcgtcgtctggcatggcttcagcaacgtccccgtcgtttcgccgggcgttgagcacgggtgacctcatcgtccaggaggaccgggaccgggacgaggagcagagggcggtggtggcggcggcaacaaggtacagcgcggaagagcggcgggagcgcattgacaagtaccggagcaagcgcaaccaacgcaacttccaaaagaagatcacgtatgcctgccggaagacgctcgcagacagtcgtccccgggtgaagggccgcttcgcgcgcaacggcggcgactacacggaggcggatgcagttgcagaccaccatgtcctaggagcagcacatcagtcggagtcagagtcagagtcgccagcaacagcagccacgccggagtggtggccggcagtgcaggaggagttgcctgccgttgccgctgccggcatcaacctagcagagttctgtgccgacgacgacgagatgctggcagcctaccttggagtctcctccattagtatagctgatcatcactacagctgtcagccgtag

SEQ ID NO: 38903 - DNA, 480 bp, Zea mays
  Peptide Sequence Number=SeqID_82278
atgggttcgaaggctggcccctcggaagggttcgacagccgccctagagcacgcagagtgagggatgaccctggtcggcaaggtcgaagtgaccgcaatcacttcaccctttcactgaccgatctaacaggaaaacaccgccgctcgccctgctccgattgctgtgccaaccacccgggcaaggctgacaacaaccaagttcagcctcgggcgcaacaggaagctccgcctcgcccgtccttaggcctcgacctcggggggaggtctccgcctcgcctgaccccaggactcggcctcagcctcggcctcgggaggaatcgcgtcctcgcccgaccccaggactcggcctcagcctcagccttgggaggaatcgcgtcctcgcccgaccccggcctcggcctcgggagaagtctccgcctcgcccgcccttgggctcggaccgaccgcgccacaggggatacatcattaccctacccctag

SEQ ID NO: 38904 - DNA, 516 bp, Zea mays
  Peptide Sequence Number=SeqID_82279
atgcttggagctttacctcaagatgaggaccctgtcccaccctaccctgtggatggccagcaacttctagtggattacttgggtatgagtaaaccggtggtccacactcactttgatcttaacatgccaccatcagaaggggctccagtgcaagctcatgatgaaaatgctgctgaaaacaacaaagaacaatttagctatcaactgtctagccttgaagatctcctctcctctgatgactccattgggttccttactgggctcattaattcaccccaacctcaaatgcaaccagatgaaatgcaggagcatatgggagcagtgctagctttgcctactgcacctctagagaacatggtggagggaaaccaagaacaagatgctgtgaatatgcagattgatgataacattcaagtgcgcctgagagacagatcgatctacacaatgtcgatccagcctatgaaggatacctggctagaaagcgtcacaacatatcggccaaagcaatgcccatga

SEQ ID NO: 38905 - DNA, 666 bp, Zea mays
  Peptide Sequence Number=SeqID_82280
atgacgtgtgggactgggacccagcccccgcgccggagggtgagaaccctggagcatgtcggtggagactttgcctgcgatgcttggggatgcgagtggggagagccgcctttaaaaagggagcgatcccccgggcagcagacatgcctccgcactcccctcatgcattgcgcccttccaccttccgagcccctagatggggtgcgcctgcgttgcctttttttgctgctgtttgaggagtgcgaccccgtgggggcctcgtggtggggagaagcaagccgggctgcagcctctgccccgcctttagcttcaaggatgttcatcatccttgctgtggcggagggggagagggcgctcaccggccttacggagggggcgaacttcgacaacgcgggacaggtcggccgcaagcgtcgtcagctgcagcgtgtctggctcgctggctcagcttgctctggcgcggcctccgatgctgcctcctgccgcttggtctgggcgtggtcgtccgtccaccgcacgggcgactgttgcgccgtgcgcaccaggggatcgtccaagacgtcgtacgccgtgcgggcggcgttcgtgtccttggattgtcttgtcctcactccgacacgacgcctccgtgcggaggctggcgccggcccgtctgcgaggacttga

SEQ ID NO: 38906 - DNA, 612 bp, Zea mays
  Peptide Sequence Number=SeqID_82281
atgacgttggtggttctcagccccctacggaagcaaggagacgtcagtaggatcccagccgcacctccagctgtgcttctacagggctcaggcacttctccgacggccacgttatcgcgtacgcagggctcaagcacttctccgacaaccatgttggcatgtacacagggctcagacacttctctgccagacacgttagcgcctagctacaccccccattgtgcatctggaccatctccttgcatctataaaagggaggtccagggccttcctgcggaaggcgtcgagctccggtttcaggagaagctggtgggcggctcggcgctggacaccaccggcgtgccactccttgacgagacgctcgacgaggccaagggttcggacgctgttctcctcggcaccattggaggctataagtgggataccaatgagaagcacctcaagcctgagaccgggctgctgcagctacgtgccggactcggggtctttgccaatctgcgaccagctgtagttttgccgcagttggtagacgcatccactctgaagagagaggtagctgaaggtgttgacatcatggttgtcagggagcttactggaggtgactctaactga

SEQ ID NO: 38907 - DNA, 855 bp, Zea mays
  Peptide Sequence Number=SeqID_82282
atgtctttcgtgcttttcgactgcttcgatgacagggtcctaaaaacgacgagagtacacgttcagacatcggcagggggaggagcagcaccctcgacgtcatttccaccctcggcggaatctggcccggcatcagacggcgacatgggcggaaggatctccacctcgaaggaggacgccgacaccgcgcttgggccctcacggccagagcagccgaaggttctaaaactgagcaagagaagccttgagcggcaaggccgaccgagccgagggactcctacgcctccgggatacgaatacctcactcgtcaccttccgcgcaaggcaactcacgctcggttaagtggttcagctaaccgacaggcgagtcctagtgctcgaaatgaggaagaaacacgacatcacgctcaaatgcccgaatgttcaggcctcagcagccgcaaagaacaaacacccatactcagggtaccattacaaacgggactccggttccactcccgcgggtatgaacaacctccacaccagagggcctgcgggataacaaactccaggtggctcgccggcgaccgctccaccggcagcgacaacgatctccgcctcgggcggctaaacagcagcagcgatgacctcagggcaaacgctgctgtgaaaaggccctcgcccacgtccccacacgaggggcgaggacaagccatcaaagccaaagagccagaggtccgaccgcaggtggcggcgacggtctcttcggcggatacaacctcctctggctgccaccacctcagcactgacgatagtggccacctgcgcgctagcgccacgccgacgcatggcggccgccccagcctgcaccggtag

SEQ ID NO: 38908 - DNA, 201 bp, Zea mays
  Peptide Sequence Number=SeqID_82283
atggccctgcgcttctcttcatcaaagcggcgcaggtgctgcttcacgggtcaggcgtcggctcggatatctagtgagtgctcgacgacatccctcggcgtcattgctggggtcgagggcgacggacttaaccgcctcagccggttcgaagttgctggcgtggcgcttcgcatcaagcacctccttgaagaggcattctag

SEQ ID NO: 38909 - DNA, 429 bp, Zea mays
  Peptide Sequence Number=SeqID_82284
atggccggagtcggtcggtccacgcgcgcaggcggggatgctcgtcggcggcgaggagaccggcctggtcgcggcgagatagttcaattagatgggtcagggaggtccacgggatgccagagaagacatgagcgcaaggaattgggcggagactcactggatagctcggtccacacgcggcggcagaagaccgaagtccggacgtgttcaagggaatttggcacgactttgatatttggatctcctggctttgagtttcgaaaggcagagaacgcagatgatctttgggaagaggtttggcatttgagagaaaccctaggtgacactggggcgtcacagccttccccccttaaaggaatctcgtcccgagattcgggccagagtcctcccagggtgaagcgaagggtgagacttataggaaatgggtga

SEQ ID NO: 38910 - DNA, 301 bp, Zea mays
  Peptide Sequence Number=SeqID_82285
atgggggagggtgccgccgaggcgggcgcgaggccacgtcatggctggccgcgctgcgacgggacgggggtcgagggagggggagccgcaccgcgacggggggccgagggagggagagccgcgtcggaacggggggccgagccgcgcgccatggccgggcgaggcagctgtgccacgcctgggccgccgaggctgggccacgccatggccgcgccggggaagggaagaaggggggagcgaggagaagaggagggggcttaccgcggccaagggcagggcggcgacggcggttcggcgacgg

SEQ ID NO: 38911 - DNA, 399 bp, Zea mays
  Peptide Sequence Number=SeqID_82286
atggctctggagcgcttgagcgacggtgagaacacagcggggccccaggtcgacggcggcggtgacatggctgcatggcgaagagtacgatctagtctgatagagccacttaaccaggatcaaattccacaatctcactcgaaggtcatggaattaccactagacgcgcagagcagcggaagacgtctcgatgtagacgaacgcgtcgagcagtgccgtgcagttgccggcgtccttcacgtcctcgcacggttcgtccaagtgctccagatgcagcacctccgaggtatccacacgtacagggaggaagcgccgcgtaccgaactgctaggttcgcgacggcggcttggcgagggcgagaggcgagcggcggctgctggtttgcagggggcgaattag

SEQ ID NO: 38912 - DNA, 234 bp, Zea mays
  Peptide Sequence Number=SeqID_82287
atggcgggcggaattgagctcaccggagctaagggaaagtggctggccggtgagggtgagtgcggggcgaagtggggcgcgcctggaaggctttataggcgcggcgcggtgcacgggcggtcatggaccggcgagacgtgttcaagggaatttggcacgactttgatatttggatctcctggctttgagtttcgaaaggcagagaacgcagatgatctttgggaagaggtctga

SEQ ID NO: 38913 - DNA, 228 bp, Zea mays
  Peptide Sequence Number=SeqID_82288
atgcagctgaaggccgccaccgtcgacccaaggcttcgccgtgtccctaccaccgttcaagcaaaacagagtcctcgctcgtcagagttgatgtgcgctattgttaggaccctccgccacagatcgtgcccctgcgctggtgttgtgcccacggctgagttcgccgtgtcaccacgtgctgatatgtaccgagttatattcggtactggggtggcccgatcttcatga

SEQ ID NO: 38914 - DNA, 315 bp, Zea mays
  Peptide Sequence Number=SeqID_82289
atggcgcagtggcttacctggtctatgttcgccggcggtcggagggatttccggcgaccgtggactggcctctccgacgaagcagacttcgattccacgctcggggagcttcaccgaggtgtgctcagtcgtctccgagggtcggacggggttgggaaaggcttggctggccggtctatggcggcaggggctcgggtggccgcggacacgccgtgcacgggcaaacgacgctcgcccaagtcgcaaacgtgtgaatcttggcaaaaatccggcgcgagtcttttcctagcacctagggcagtctctcatccgtga

SEQ ID NO: 38915 - DNA, 315 bp, Zea mays
  Peptide Sequence Number=SeqID_82290
atgagccccatcccagtgtcggagctaccaacgtcgatctccgacgtgcttccggtgctggactccgtcgccgatcgtctccagcgcctggaccagattctcggtgcccgcctggaggcagagggcagcaagctctgccgggcgatggtcgagtacgtcttgacgtgcttccagagtcacgacccagccatatccttggcgctggtgatcgctggtccggtagccgctactgaagatgccgctcgggagagcggacaagacgtcgtggagctggtggccgagcgcttccagcgcgatcctgccgacgacctgtag

SEQ ID NO: 38916 - DNA, 558 bp, Zea mays
  Peptide Sequence Number=SeqID_82291
atgcagcctgcgtcgcctctcctcctccgaccccctggagctacctggggcgggggcaccggcggaggtaccgcttgcagcccctttgcccttattcaaggggctgggggccacggcagcagtggcgctatgagccacaccggcaggctagggacctccagccggcgcatcggagatccagatcccgcggtgggggtcccggtcgccggtctggcgaacctccacgccgctctcgtcgagggtcggcagcgtggccaagatcgccatcctcagccctgggtcgtcacagagtgcagggatgctctgggggaggatcagggactcagtgacgaaggtttccccagtaatccctcccacgaggactgccagctcgtcccaggacaggtcggtgtccggcccgcgctggatcctgccgatgtcgttcgcgccggtgaaccaacagcacagacgcagtctcctctgcagcggcgcgatccggtgcttcaggaggtcgccgaccacgtgcatcgatgtcaagccgcctgttgccaagcccttgatcttgtccaatatgggtag

SEQ ID NO: 38917 - DNA, 168 bp, Zea mays
  Peptide Sequence Number=SeqID_82292
atggcgcagtggcttacccggtctactctcgccggcggtcggagggagtccgacgaccgtggactggcctctccggtgaagcagacttcgattcctcgctcggggagcatcaccgagaacttaggtggttttggtgccatcttcaaggtgaagacggtggatctttag

SEQ ID NO: 38918 - DNA, 648 bp, Zea mays
  Peptide Sequence Number=SeqID_82293
atgacttctcacggatcctcggaaggagggaacgcacagtcccacacggacggacttgcacgagagggttttccccgtatcttgtgggaggtgcttcagggagctagttacacgacgcctccccagtatgcggtgcaactatttgagaagcaccgagtgccccgctgtagggtgaggatgaccctggagcctcatcccctacagctaggctggcgttcattggacttcgagtctttcggataccgggctaaggatactatcgaggcgattgctctccacgggctgaccaccttctgtggttttcaccccttggagctgtatactcatcccattggcttgttccctgccgaaaaggaggacgacccaatgtggaaagaccgagtggagcatgccaaggatatatgggctctttacccagggcagactgcgcacttgacggtgaggcgaggagaggcaatgtctcatctgatggcattattggaggcaatgtccccatcgattccctggcaacagatcagggctcaccgccttggcgtacaatgcctcactgaccccgactgcggtcatgcagtgaccgcacttgtacccaccataaccggaatgggagaccacgtctcaggtcgtgtgaggggtaaagtctgcgggtag

SEQ ID NO: 38919 - DNA, 264 bp, Zea mays
  Peptide Sequence Number=SeqID_82294
atggctagaggacgcctcttccgcagagctggaggatgcctttctcccccgagcgccggaggaagaagagggtcgccagcccacgcgaaggtggcgtgcaaccgcaacgcggggccgcaccccttcggcttcatcgcatctagcatggaggcccaggcccacacgtcatgtaaccggcgcgccggttactacgtgcaagaaactgcaccgccacttgcgccaatgccgcgccttctcgactgcggaaccagtgccgcgacttga

SEQ ID NO: 38920 - DNA, 927 bp, Zea mays
  Peptide Sequence Number=SeqID_82295
atgcaggcggcatgcaaccgcgccaagtggacacgcttctccgactcccagcggcgccagcctggcgcgacggtcaatgcggccgaaagtgggccggcagtaatgacggtggcaggcgggcgggagcagcggtcacgtcgtcagccaggctcacgtcccatccaggggcagcaagagagcctcctctcacggcgtgaagacggcgcgcccgtgatccgtccctcgaacggctcgcgcacgcgcagcggccgccccgccaaccactcgccccgtcgcattaactccgcggcaggacagggaccgggaaagggggataccccgaaaaggatccttccctgtgaaggaaccgggctccgagccccccttactgatcagaggttcgaaggctggccctccgaggggttcaacagccgcctcagatcgcgtgggccctacacccactactggtcagaggttcgaaggccggccccccgaagggctccacggccgcctcaggctacttgggctccacgcccattactgatcaggggttcgaaggctggcccccgaagggttcatagtcgcctcagacgccgagcgagggatgaccaggggtacgttcgatacataaccaaggctcgggctgcgctcccgagctcaccggagacaccatgttcggtgcccaccgagggtaacatggcgcactcccccctcctccttgcgaaaaggcgacgtaggggcgtatgtaaaaaagccgagtctgtccctgatcgtcctctcaccctgtgcggaggctcgggggctgctctcgcaaacccggctccggccaaaccgttgacagcgtcaacataccagcccgagagcttgggccccgaccgcgcacccgggcttcggccagttcgcatgagggaacaaccagaccagccgaagcattacgcaaggcattaa

SEQ ID NO: 38921 - DNA, 738 bp, Zea mays
  Peptide Sequence Number=SeqID_82296
atgtcttcttcctcccttatgcgtcgcgtctttccaccttccaagcccccggatgggggcccggccgcacccctccaccggcggtcacccaagatggtgaccttcggcttgatggtgggggaaagcgagccgggctgcggcctctgcccctccctcagcctcaaggattttcatcaccagggctggggaggggaggaagggcggttgtcgtccgtggcgctggcagctgcaccgtgcctggctctcggacgcgagtggcttcggagccgctcgcggcgctggcgtccgccacggcagcttgaagaggttcttctgccggcaagattgccaaggccggccacggaccgaccttcaactctacggccttctgcccgtccttgcctcacaagttttggcttgggcgggggcctcctggcggcggcatccgccctgaggtcagtgctgccgctgttcgtccccccggagcagaagtcgtcgtcgccgccgctgctggagcagcacgaacagaggcggagttggctcgaaaatgggaacctggttggccggagcctagccgggttgtccgccagcgggaccgacgccggagttgaccagccgaggcctcgggtcgggctggcgcccttggaagatggtcggccgaggctcctgaggcaaccggccgagccgcctgctcgggccggattcccggagaagtccctggaccgcgtcgccgtccgaggctgggtcggatctcgctga

SEQ ID NO: 38922 - DNA, 369 bp, Zea mays
  Peptide Sequence Number=SeqID_82297
atgcctccctgcgccggctcggtgtcgagcgcctcaacatcggcgtcttcaccagcgagcaccgcctctgcttccatattcgtcgcctcagcgcccaccacgcacgacaccccatttgccaaggccatcaatggcaccacactgcagctctttggcttcaccgaggccgtcagcatcattgccgccacccttgagaagcttttcaagatcatagaccttcacgacatgctctcagacctcctacccgacgtgtccgactttaccagcctcaacattaggataacgagtcaaggactccaggtcaaagtgtctccagcgctgtcccgtcaagagcaggccgacccgtctccgtcctctgctagccgataa

SEQ ID NO: 38923 - DNA, 117 bp, Zea mays
  Peptide Sequence Number=SeqID_82298
atggcgcgcgccggaatcagcagggtcgacgacgtcgaagcagcgaagtcagcagagtcgacgagatgcacgtctgcggtcgggatgaagggaactggaagggcggctcagctatga

SEQ ID NO: 38924 - DNA, 807 bp, Zea mays
  Peptide Sequence Number=SeqID_82299
atggggctgctgtcgaaccgggtggagcggtcggagatcaggcccggcgaccacatctacacctggcgggccgtttacgcctactcccaccacggcatctatgttggaggaagcaaggtggtccattttacgcgaaagaaagaaaccgaaagttcagattcatcagacttcacctccagcttaatctcaggggttccgtcagagtgcccaacattccctgactgtggatttcagctgcccagcagtggcgtcgtcctcacttgcttggactgtttcgtccgcagtggctccctctactgcttcgagtatggggtgccatctgcggttttccttgcaaagcttcgtggggggacctgcaccactgccgaatcagacccaccagaggttgtcgtccatcgagccatgtgcttgctccagaagggctttggaaattacgatatcttcgagaagaactgtgaagactttgcactctactgcaagactgggcttctaccggtcgaggatcctggcattgggactagtgggcaagcttcttctgccatcggtgtgccgttggcagctcttctgtccaccccgttcaagcttctggctgctggcccgcttggaatggccaccgtcacagctgggatgtactgtgctggcagatacattaccgacataggagtaaggaaggacgtagcaaaagttgaggtggagaaattgtcatcacaccccggtttccaccttgtcgaagacgaaggatcagttaacaagcggtcagaaaagccgaagtccttgctccctatgaagaggaaacgaggaaggtga

SEQ ID NO: 38925 - DNA, 351 bp, Zea mays
  Peptide Sequence Number=SeqID_82300
atgggcaagagcaagaaagggggaagctcgtctcaccattccggaggagttctcctccgagtccgaggggtcactagtccacgcctctccccggcgtcgtccgatgactcggacgattcccaggggatcgccgctgaggtgtggacatacattcggtccgtcgagcgctccgggctcgagggctcggatgagtcagaggtctcctcggacgaggagaactcctctgacttgtccgaggaggggagcggcggtgacgatgacgacgagggcgatggcgacgacggaggcgacgacgatggtgatggcggcggcggcaaggccgacagtggcagcaccaaggccagtggctaa

SEQ ID NO: 38926 - DNA, 615 bp, Zea mays
  Peptide Sequence Number=SeqID_82301
atgagcctcagtcggcaaggtcaaagtgaccgcagtcactttgcccttccactgaccaacctgacaggaaaactgcgatgcccgccccgctccgactgctgtgccacccacaagggtgaggctgacaacagccaagttcagcctcatgcgcaacaggaagctccgcctcgcccgaccttaggcctcggcctcgggaggaggtctccgcctcgcccgaccccagggctcggcctcaacctcggccttggaaggtggtctctgcctcgcccgaccctagggctcagcctcaacctcggcctcgaaaggtggtctccgcctcgcccgaccccatggctcggcctcaacctcggcctcgggaaggtggtctccacctcgcccgaccctagggctcagcctcaacctcggcctcgggaggaatcgcgtcctcgcccgaccccggccacggcctcaggagaagtctccgcctcgcccgaccttgggctcagaccgaccgcgccacggggatacatcattaccctacccctagctagctcaggctacgggggaacaagactggcgtcccgtctggctcgccccggtaaacaagtaatgatggctccccgcgtgcgtccatga

SEQ ID NO: 38927 - DNA, 801 bp, Zea mays
  Peptide Sequence Number=SeqID_82302
atggcgagcgacggcgacgggaagggccgggtcgcgacggcgccgggggcaggagggtacggctacggctacggctacgccggcttcgagggggaggaggaccggaagtggtggccgtggctggtgcccaccgtgatcgtcgcatgcatcgccgtcttcgtcgtcgagatgtacgagaacaactgccccaagaaccggagccagctcggcggcgactgcgtcgccggcttcctccgccggttctccttccagccgctccgcgagaacccgctgctcgggccgtcctcctccacgtacgttgtcgctgcgcaagctttggttttgttgatggaatcatgggactactttgacttgtacaagcgcctttgtttaatttttggcctttgcagaacatgtgctaagattagacattgccaaatgggcggcccggcacggccagacacgacacgtttggagaaaatgggagctcttgactggaataaaattgttcatcaaaaccaagggtggcgccttattagctgcatctggctccatgctggcctaattcatttggttgtgaacatgctaagtttgctgtttattggaatccgtcttgagcagcaatttggatttgttcgcattggtgccatatacctactgtctggttttggtggcagcgttctgtctgcactcttcctacggaataactacatctctgttggtgcttctggagctttatttggcctgcttggatccatgctttctgagctactcatgaactggactatatactccaacaaggccagtacaattaacagataa

SEQ ID NO: 38928 - DNA, 726 bp, Zea mays
  Peptide Sequence Number=SeqID_82303
atgcaagccacgctccagaaggttgagcaagggctgctgcaaatcaaggcagcagtgcaacatgagcaacaccagctggcgttgtccgcacggctccggacgtcggtggctgtgggcatacaagctgctgctcgtggcttccttgcacgacagagagtgcaggagatgcgccgacagatgctcgaggcagccttggtgacggttgacctcgacaaacgtgggcgcgacctcaccctgtcggatggccatcagcagtggcaccaggccgctatctccaagtgcgagcatgatacgtgtcccacgggcgacgaacttcaactctacgacagcggcggtagggaaggcactcacctcgtcatcaacaagggcgcactatttagtgccaccacattccgctaccggccgccacgagggtgcctccgctggttattgttgcgacctattccagcaactgacgtccccatctccatgggttgcgccgtatgccaccttcgtcacgccatcctggcaaccggcgtccccatctccatggacagcatcgcctgccaattttgtcaccacatcctggacgtcggcgtgcccatctccagggacaacgccaaattttgtcacatcatcttcgttgacggcatctccatccccatgggcgacgccactaggggcagccacggctcagcaatcaccagctccatcgatggggaacttgtggaccaacgtaagggctga

SEQ ID NO: 38929 - DNA, 276 bp, Zea mays
  Peptide Sequence Number=SeqID_82304
atgggggctacgagctccaggggtgtggcgctcggcaacatcaagaacacggatgggagagaggaaggaagagagagcagctctttaccgggctcggactcgggcaaagccccggaagacggcgaactccgctccgcccgacccagggctcggactcgggcaaagccccggaagacggcgaactctgctccgcccgacccagggctcggactcgggctaagccccggaagacggcgaactccgctccgcccgacccaggactcggactcgggctaa

SEQ ID NO: 38930 - DNA, 1248 bp, Zea mays
  Peptide Sequence Number=SeqID_82305
atgcagaccggctctgagcagaagaaaccaaaccgccgcgtgtggggcacgcaaccgcccagcggttacaagcgatcctccacctttgcccagaccaacgggcgagagaggcgggcagccatgcaggcggcatgcaaccgcgccaagtggacgcgcttctccgactcccagcgcgcccagcctggaggcccaggcccacgcgtcacgcaaccggcgcgccggatgctgcatgcaagcaactgcaccgccacttgcgccaccaccgcgcctctttggttgcggaaccaataccgcgactcgaggcgaccaggcacaagacccagtagcgccagcctgacgcgacgcagcaacgggcgacgcttcgccctcgccgaaacaaccgcaccaaaaaagggaccgggaaagggggatcccccaaaagggatccttccccgtgaaggaaccaggctccgagcctccttactgatcaggggttcgaaggctggcccccgaagggttcaacagccgcctcagatcgcgtgggccctacacccactactggtcagaggttcgaaggtcggccccccgaagggttccacggccgcctcaggctactcgggctccgtgcccattactgatcaggggttcgaaggctggcccccgaaggctcaccggagacaccatgttcggtgcccatcgaggaggctcgggggctgctctcgcaaacccggctctggccgaaccgttgacagcgtcaacataccagcccgagaacttgggcctcgaccgtacacccgggctacggccagctcgcatgagggaacaaccagaccagccgaagcattacgcaaggcattaagacctcgaaggagtgaaatcactcctccgaggcctcgggggctacacccggcgggtgcgctcgcgcgcacccaccgaaaccaaatgcaaccgagaaaggctggtccccttgcaaaaaagtgcgacgaaagcctccaagcgagtgctaacactcccttcgaggctcgggggctactgtcggggaccataattaggggtaccctcaagacgcctaattctcagctgggctcggactcgggcaaagccccggaagacggcgaactccgctccgcccgacccagggctcggactcgggcaaagccccggaagacggcgaactccgctccgcccgacccagggctcggactcgggctaagccccggaagacgacgaactccgctccgcccgacccagggctcggactcgggctaa

SEQ ID NO: 38931 - DNA, 1638 bp, Zea mays
  Peptide Sequence Number=SeqID_82306
atggcaaggccgctgcaggaagcgatcgataccttcatcagcatcacgggggcggacgaggccgtcgccgtacgcaagctcgaggtttgtagcggatggggttggggttttggtgtgatgcgacgagatgtcatcgggatgaggaatgggatcagtcaaaacaccatgcccactagtcatgatgatatgatggacctggatggaccccttgataatacatttcaaagatctttgttcccagagaattttcgtgacccttttgctctaatggatccaaattttcagcaccaattttttgacagggttggctccactgatggtgtcactcgtggaccgctagtttcacaccctagagaggtgagggagattcctatagaagttaaggatagtgatcctcaaacaagtccatctggccaggcccctgttattgaggatgttactggacatgagtcttcaaatggccttgaagttcatgaaactatcataattgatgatgaggacagcggattgttatctgcgccatctgctccacatgctagtgttcctagcaatacatcttctgagcccactgctcctccactggttcatgttaatgactatgatgatgacatagaagaggaaatgattagggcagcaattgaagcttcaaagaaggattctgaaggactggcaaatatagcagagcaaggagaccagcatcaagagggagtgaatttgggggaacattcttctgataaagcagtcatgagaaccacagatggaatagttgagaggcaagtactagcttcaggaaaggctggaacatctaggcaaccaatagatgaagagagcttccaagaggagactgaagatgtagaagaacaaccgctagttagacgtcgttctcggcgtgccccctctgagaacaccgagctagcacaaatgccgcacccaggagctagccctgttctgaacaatcaccagtctagtggaggtgatttcccatctgaggaacatgatgaagctgttatgcttgaggctgcaatgttcggcggagtttttggaagaccaatgcatcctttctccatgccttctcacagaagctctacttattatccccaaataactcattcttcatcaccagcattagctgaacagcggttattaagagagcagcaggacgatgagtaccttgcgtcactacaagctgatcaagaaaaagagttgaaggccttacaggatgctgagctccatcgcctagaagaaacaactacaagagaagttgctcttaagaaacagaagcaagagcaggaggaaaggcgtaaaaagcaacttgaggaagaggagctagagtccagtctcgcttccaagcaagcatcattaccatcagaaccgcctccagacgcagagggtgccgtgacagttgtagtccgcatgcctgatggcagtcgacaggggcgttgctttctcaaaactgataaacttaagttcctatttgatttcttagacattgggaggatttgcaagccagggacctacagattggtgaggacatacccgaggcgcacgtttacgagcagtgagggggacgtatcgttcagtgatcttggcttaacaagcaagcaggaagccctatttctagaacagatcacagagtag

SEQ ID NO: 38932 - DNA, 1896 bp, Zea mays
  Peptide Sequence Number=SeqID_82307
atggcgccgagcttcgggtctaaattaggaattaagtcatccaaaggtctaaatgcgggcgtggagatcctcgccaagtcccttttggagagctgcgttgccgactcgggcgcgggggggcgcctctcctgcgacagaaaggtagtggtcgacatggccgtccccagcggatccaacggcggtgaggcgtggctggtcgcgcaggtcgcgcacgttaacgacacaaagcaatcgaagaccataagaaatccccctgtcatcaccgtcaacaagggcgccgtgtttgcgctctacgccctcaactacatcagggataagtggaatgggtcttatataatggttatggcatttgagcagagcataccaatggatgttgcttacaaaccagaggaacagtatgttgagacacgcaaatgtgaaccagatgctggttctgatgttgttagagcttgtgaaaggttacggtatgagaatggttctataattgagcactcagaggtgactggtgccccggagttagctgatggcttgctcgcggcggcggtgtggctcacgcgcctgctcttccgtcgagtagtggcatccccggcaatcgctcttgaggctggctcgcggcgccgctcgcgtgttcgctgcgtgcgcggcaacacacgcggggaggagtgggctatgtgggctttggtcggcggcggatctggcattgtcggcggatctaggccccatcggcctagatatggcccaccctcaactgatctacgccttggcgatggttgtcattgcggggtgcatgttggtgcgcaacggaggcggtgcgcccggcgacagctggtttcgatgtcgcgggtgccagggccagtggcggtagctcaagctggtttcagctctggcgagtgggcagtgtggcgcacaaggcaaggtgttccctggttccatgtgcccaaccggaagggatggcagccggcgcagctttgcggctgctgcggcagccggcacggtgcccctctggaggggttccatgtttttggaattggaacaaggtcacttgggttcaacatcagggtacaagttaagaaagagaatagaactgttgtttctaaagacaactttctgagagtgaatctcattggtgattttggtggttataccagcatcccagcatttgaggacttctatcttgtgacccctaggaagattatcggttcaaatggctacaaattgggtttctttgacaccatcaaaggctatttggttagcttctgggattttctgattgatttaatcagtggcaaatcctgcaggctgaacaaatgtcggagcttttttgacttcagctgccatgcgcagtacagatgcataacctggctcgtcatgttggtgctgctactttttatgttacccgcaggcgcaattgtcctgtatcttcttcatcagaaaggcttcttcgacccagtatacgactggtgggatgacctgctgggggcggactaccgcgcgcaccggaggcacaagaaaggccgccgccaccaccatcaccaccacgaccaccatcaccaccggcaccaccaccaccacgggcactcgcacggccatgaccaccacccccacagtcaccaccacgcgcaccagaggagaaagatcgagcccagccaccaccacgtcctacacaggcagcagcccgggacagcggcagaaggccaccggcacaagcacgacccggcgctcggcgtgcagcacagggaggccgggcacttggggcacaagcgtcggcatggcaaagcggtggtcgcggaggacgccctggacctggagttcagggaacgaaggccatacgaggtcaggcatgccgggcacctgcaccgcgaccaccaccaccaccaccactcctgggaagtgtag

SEQ ID NO: 38933 - DNA, 978 bp, Zea mays
  Peptide Sequence Number=SeqID_82308
atgaatgcgctctcccgggaagggtgccggcacttcgaggtcttcgaccaagtcgaagaagattttgagcgagatatctttaaggttgaggaccccgtagtgaaggaatccgccggagctatcttcgaccggctatggggcgaacacggtcgcgaggtggtcagagagcgggctgaaacggcgagggttcaggcggcgcgtggcgagagggtcgacgacttcggggcgctgaacaacatgctatctgacccggagccagccccggcggaggccgtgcctgggcccgtcctggggccgaccccggagactgcgggagacgcgccgggtgcctccgtagccgctgcggccggcgaaggcctgcccccagaggtcgccgaagccgcacctgatgcctccgcggcggctgcgccgagcgccgtagatcccgcagcggtggcggcggagataacagcggaagcaacggcggagccaacggcggaggctcccgcagcgtcagggccgtcgcaggttcaagattttgggcctgcgcacacaaccgctactactaaaattttggcggcttcgaccgcggaagatggtaatgaatgtggtgggtctgcatctgagtttttggattgtgctgactctgggagctcggttgagtggactgaggagtcgtcggaggaggacttggactactttgcggccttggatgtggctgcggcggaggcttcgccgcacgtcgcggacgcagaagatgtgccaggtcctagcaccgggcgacgacgacgaagggcggttgcgaagcgtagagttagtgggacggagggggctcggcttcgtgtgagtgggactggtcggcaggaactgttgtctttgccggccgccgtgaatacgggtgaaggggaactgcgaagtctttttgcgggtgaggagcttaggataatgttatttaattatagggagatgggaattattcctaaggttgagccgatgtag

SEQ ID NO: 38934 - DNA, 624 bp, Zea mays
  Peptide Sequence Number=SeqID_82309
atggcgcctcctgttgacgtggtcggtccgtgccctaggttgggcgatgtggaggctcctccgaggtcgaggtcgagtctgtcttccgaggccaaggtcgagtccgagcccctgggtcgggcgaggcggagaccgtcggcggaggccagggctgagtccaagccctggggtcgggcgaagcggagttcgccgtcttccggtgaaagggaaatgtgcccttgggccatttctaagtattttggtgattgcgtgccaacacaagtacttaaatgtgaatctatgcccatgaatggacaaagtgcaaatcaagagcaaagaaacaggaagaagaagaaaagaggagagttggctgtgtacagccaagaggctgtttcggtctggggcaccggactgtccggtggtgcaccggacagtgtctggtgcgccaggctgcctcgagcgaagtggccgctctcgggaattcaccggcggtgtacggctaaaattcaccggactgtccggtgtgcaccggactgtccgtcttgtgtgcgttgctcattccccctttgctctgtgttctttgtgaacttcaattgtaagggcgagaggctccaagttgtggagattcctcgcaaacgggattga

SEQ ID NO: 38935 - DNA, 735 bp, Zea mays
  Peptide Sequence Number=SeqID_82310
atgtcgacgagttggagacttgcaaggtcgagcacgacaaggagttccgagggtcgacataagcagcacaaaattggaaatcaaatcatcagagtcgacgagcacgtcgtgggcacaacgtgggtcgacgacgaggtccatgacgagcatcgcaaggcacgacaaatgggaaggaggcgacgcacgaatttcaaagcatggagctcacggcggcttgagggagacggtcgtgggagggacttcggcgagctggagcgggatacggcctgggcgcgacgaagggagctgcgcgttcagagcggtagggagagcgctgaacggaacagggagctccgggcagagagccaaggcgcgaaggccagggaatccagggcacggcgagccaaaaacttcgcgcgcggctatggaaaagaaggcacggcagggaggagacctcggctggtggagagctcagcaaactccatggcgagcagggaaatacgcaggcagagggagcagggattatgggcgcgagctgaagacgagctcgactggaaacaggaacgccgtgcagagggagctttgcgagctgggatccggcgctggggggaaggagagatggaaggagagggaagcaaggggagggcgcaggaaagagccacggcttggagaggagcgctcggcgtcaagataactatccaggagcagagcgacggccaggccttggttcattacccgatcgctgttcagcaatga

SEQ ID NO: 38936 - DNA, 591 bp, Zea mays
  Peptide Sequence Number=SeqID_82311
atggtggtggtaatgggagctgggccaaggaagcttgtgaatgacttgccgaagcaacagaagctgcaggttgattacccacgtattctgatgacacatttcctcagcagcctcatcgatcttcttctgaagattggaaagatgaagcatcttctccttcttcctctggacctgttgatggatggcttcgagacgcgcctttcatatcgtgtacaccttcatcccaaggccgaaggtccctgtgagtatattatacttggaaaacatgttagtcgtgtttttgaggaccttcgaaagatgaaggcccccaacaatgacaacgtgggaaaacagtgcaaccatgagggtgctcctatattctcgttcacggattttggtacgggcatcgtcccacggctttccctgagggcggagagtcacgacctctgggtagaacgagaatcacggctcatgggtgatgatgaggataatgctggttttgattatgattatggagaagatgaagtcgtggaggaggactttcaggagttccaagagtacgatgagttcaaggcgtgggttagcggcaaacccctagtcgactgcctgtga

SEQ ID NO: 38937 - DNA, 282 bp, Zea mays
  Peptide Sequence Number=SeqID_82312
atggggaagcctatcccatcactcctcatgctcctcctcagccgaggcaggtacaatggatcaagcagtctcattagctgcgagaagaagacgattcgaatcgagtttttaaaccttgcaagatcagggctcaccgccttggcgtacaatgcctcactgaccccgactggccgtcgtgcagtgaccgcacttgtacccaccataaccggaatgggagacctcgtctcaggtcgcgtgaggggcaaagtctgcggacaggttcactcagggtttctagtgtag

SEQ ID NO: 38938 - DNA, 240 bp, Zea mays
  Peptide Sequence Number=SeqID_82313
atgaagctgtggaaggagacttccaggagttccaagattacgacgagttctaggtgtgggttagcggcaacccccagtcggctgcctgtgaaggccgcgttatctacgtttcttttccgcactttgatttattgttctctggaggacatggttgctggagtgacttggccgtccatcttgccaccgggttggacagtcgagtgggatcctgcctcggctgaggaggagcatgaggagtga

SEQ ID NO: 38939 - DNA, 726 bp, Zea mays
  Peptide Sequence Number=SeqID_82314
atggcggcaatcactcccgcagcgggtcccgtggcgccaagcgtcggtggcggtggtgactactcgctgggagaacggcggaagcaactcgccgtcattccggaggtagaaccaccggcgctgccaccccctgttcgaggacgcgaggatggcaggaatatactgcgaggcccacgactgcctcagcaggagggtgcagccgccggcccgcaccgccgcgcggaccttcctctcccccgtcggcgaggcaaaaagctccgcgaaaaagagatgggtccacaaatcccaatggggggcgatccccaaatacccctcgcacaccgctacgaagatagcggcctgcgagatggagttgggggtgaggttgtgcaactccaccccatagtggtacaggatcgcccgcataaagcggcccgccggcacaccgaatccctgcttgtggaaggagacgaagctcacgacgtaccccggcggagaagatggagcggctccgcccacgggaggaatccattccggtcgctgctcatcggtgagagggcgaagcaaaccctcgccgaccagatcctccagatcgctcgccatcaccgtggaaaagggccatggatcgcgcggcgagatgatggtcacccggtcagccatcaccaaacggaagggatggcggcgcaaggggctaggagggcggttttctcttctctggctaaagtctctcgggttgcgagaacctaa

SEQ ID NO: 38940 - DNA, 1332 bp, Zea mays
  Peptide Sequence Number=SeqID_82315
atggcgcttcctgttgacgtggctggcctgcgccctaggttgggcgacgtggaggctcctccgaagccgaggtcgaggcggagtccgagccctggggtcgggcaaagcggagttcgtcgtcttctggggctgagcccgagtccgagccctggggtcgggcggagcggagttcgccgtcttccaggacttagcccgagtccgagccctgggttcgggcggagcggagttcgccgtcttccgggacttagcccgagtccgagccctggggtcgggcggagcggagttcgccgtcttccgggacttagcccgagtccgagccctgggtcgggcggagcggagttcgccgtcttccgggacctagcccgagtccgagccctgggtcgggcggagcggagcttcctatggtgcctttggcagggcctgactgcctgtcagtctcattctgtcaagtggcactgcagtcggagtggcgcaggcggcgctgtccttttgtcaggacagtcactggagcggcgaagtgacggcgggttgcttcttagcgaaggcaaggcctcgggcgagccggagatgtgtccgccgttggaggcgggcctcgggcctttgcagctttatgctgatgggggttaccagctgagaattaggagtcttgaggcctcccagggaagctacctatgggcttggattgagcagaggagaacagggaatggttcggccacggtggttgtcctcgggcggctctggcgggtcgcggagaggtcgccggagctatgggcgagctccagggagttttgcgcgagccaaaggatgcaacggggaagacagtcgggccctgggacgggctttatagccgtggcgcgggtgtggtcacgggtgaccgcgggcgcgcgggggttcgcgcacgggcgtgctctgagcgcgcccccgagtgtcagcccgcgtcgaacacgtgggagcttgcttctgccatggttcaacggcggatttgagcaccttagcgcaggggagctcggcggcagcgaggagtccggcctatccagggcaaaattgaccaatcaaacgggtcagagagcttcaccagggatcaaggaaggtgggcggccgaagtccggtgagggtgatcttcgccttccggtgaagttttgccaggtccgagggcttggaaagcttcacgggcctatggcggagctaaccgaagcgctggcgcgacttaggggtgactggagttggctggccacggtggtcgaagctctggcggcaatggcgggcggaaaggagctcgccggagctaaggaggggtgtctggccggcggtggtgagtgcggggtgaagtga

SEQ ID NO: 38941 - DNA, 328 bp, Zea mays
  Peptide Sequence Number=SeqID_82316
tgacgaaatttcaaagggagtggcgttgtcataccaagacgatgagtgtggcgactttgaaattcaacgtgaaaattttagtttggacgatgagagaccagctgttgaaaattcttacactgttgctgccaccgtagttgaagagcttcgtcgacaaagggaagatgaagaggaagaaaattattttgaagatgaagtcgatgaaactgcgatgcaatatttcttcatcaagctgttcggcatgccagacacggacatggctgaagcacacaacgccgctgccaaggagaaggcggtggaaatgcgagcagtgctcggcaatgattga

SEQ ID NO: 38942 - DNA, 282 bp, Zea mays
  Peptide Sequence Number=SeqID_82317
gccgaggacgggtcgggcgagacgcgattcatcccgaagtcgaggttgatgccgagcctggggtcgggcgagcggagaaccacttccaagcccgaggttgaggccgagccctggggtcgggcgaggcggagaccaccttccgaggccgaggttgaggccgagccctggggtcgggcgaggcggagaccaccttctgaggccaaggtgggggccgtgcccctggggtcgggcgaggcggagacctcctgtaacacccctggtgttactataactaaaacatga

SEQ ID NO: 38943 - DNA, 351 bp, Zea mays
  Peptide Sequence Number=SeqID_82318
atggcagatggggatcgcagcgcctcgtgcccaactctggtggtgggcccccagtcctcgggcatcgcgcacgtcgtctcccacgtcgccaaccagctgcgcgtcccgctgttgtccttcgccgccaccgaccaggcgctcgcctcctcgcagtacccctacttcgtccgcgccacgcacgatgaccgcttccagatggccgctgtcgccgacgtcgtcgcgcaccacggctggcgggaggtcacggcggtctacgtcgacaacgactacggccgcggcggcgtcgtcgcgctcggatgtcgtggagcaagagagatgacggcggcgagggagcacggcgactgcgagtga

SEQ ID NO: 38944 - DNA, 201 bp, Zea mays
  Peptide Sequence Number=SeqID_82319
atgggcctggccacactatcgcgtagggctcatctcagccaggctctcaagctgggccaggcaaccaaatatggcgacattgtttcaaatgggcctggccgtgcactggaccaggcaaccaaacatatcctatctggcccaataatcatggctggcgcgctcgagtcgatagctatacgctgcgaagtgggggccgggtga

SEQ ID NO: 38945 - DNA, 384 bp, Zea mays
  Peptide Sequence Number=SeqID_82320
atggctgcctgtgcccacccctccacctgggccacgccgcctcgcgccaccctgcatggcctccgctgccagccgcggccggggagagcacctcgccctggagctgatggagaggcatgtggtggccgtgcactacagcacagggggccttctatgaccatattattacgtcacaaagaggaggttttatgtcatatgttagtttgttgtgacggtgttgtgacaaaaagtccattgtcacagaagattttaatgacgaataatgtattcgtcactacatctatgacactcgtaaatgtcacaaatagggttgtaaacgtcagaaaatgtgccaccacatcttgccacgtggatgatgatgtggcacaaagctatgacgaatag

SEQ ID NO: 38946 - DNA, 252 bp, Zea mays
  Peptide Sequence Number=SeqID_82321
atggacggctgggtcgcgggggcccgctccttctggacttctccacgtggccacggcgctctggtgctaccgcttgttcttggtcagcgcactcggattaaccgcccaacaaagctgggtgagctggtgaggaaacgacctggtgacatgttgtacctagtgtggaagtggaagcatggagagaagattgagattgttttaagtgcaagtattgtcgtgaagcgaagagtacaggtggtgctacacttttga

SEQ ID NO: 38947 - DNA, 209 bp, Zea mays
  Peptide Sequence Number=SeqID_82322
atgtcgtggtcgtcggaggagcgcttgagccctatagaagcacagctgtcggggctgtcggggctgtcggccgaggtcaccatcgccgggtgcatcgaggatcaggactggccgccaccgtcgtctggaggaagcaccgcgacactgtacttcgtcattggcaggactacgcagtactcgaaccactggtatgtttatgcccccgtcag

SEQ ID NO: 38948 - DNA, 447 bp, Zea mays
  Peptide Sequence Number=SeqID_82323
atgcaggcggcatgcaactgcaccacagagatgcaccctttcgacttcgacgcatccagcgtgaaggcccaggcccacacgtcatgtaactggcgcgccagttcctacatgcgaaaaactgcaccgccacttacgccaatgccgcgcctcctcgactacggaaccggtgccgcgactcgaggcaaccttgcgcatggcccaacagtgccaaccaagcacgtcggtcataggtcagtcagtcgcgggaaaaggcgcgacggtcgatatggccaaaagtgggccggcaggaatggcggcgggaccgggaaaggggatactccgaaaaggatccttccccacgaaggaagcgggccccgagccctcctactgatcaggggttcgaagactggcccctcggaagggttcgacagccaccccagagtactcgggctccgcgcccactactga

SEQ ID NO: 38949 - DNA, 159 bp, Zea mays
  Peptide Sequence Number=SeqID_82324
atggcgcccaagaggaagaccgcgaactcgtctgccgcagtgatccccgccatcgaccccaacagtcagttacccttcgcagaacattcagccgctaaaagacagggcctatccggcatatctttaccgagggctggccgactcaacccgagttactaa

SEQ ID NO: 38950 - DNA, 456 bp, Zea mays
  Peptide Sequence Number=SeqID_82325
atgggcaagaacaacaagcgcaagcgtgagccgactcctccatcggaggagtttggtgactcggaatactcggaggaggagttctcctccgagtccgaggggtctccggctcccgtctctcccccggcgtcgtccgatgactcgaacgactcccaggggataaccgcggaggtctggacgtacatccgggccgtcgagcgcgccgggctcgaaggctcggatgagtcggagtactcctcggatgaggaggactcggacggcggcgacgagggcgaagacgacgacgacgacgacgacgacgacgacggcgacggtggcggcagtggcagtggcaggggcggcggcgacggcagcagggacagcaccaagggcgacagcagcaggggcagcaccaagggcagcagcaggggcagcaccaagggcggcggcggcggcaggggccgggccagtggctag

SEQ ID NO: 38951 - DNA, 639 bp, Zea mays
  Peptide Sequence Number=SeqID_82326
atgggcaggcaacttgagtcattaagcagaggattaggcattaagattccaatccagattcgtgaagggaaaagaagaccagaggcacctatccaagctgccaaatttgcatcagagggtgggatcgcacttaggcagcacatgccgatattttcacattggaaggagtacaagaagaaagagaacgctggtaaaatagaaaactacattggaaagattgctggacaattcaccatggatgctgataatacagcaatgaggtataacctaaaaaagaaatacttcaatgaggttcctgcaaatctagtgaggactacatcgcctgtttcgtgcatgactgatgaccaatggaaacttctagtagaaatgtggtctacctcaaagcacaaggacacatgtatgaagaacaaaattagtcgtgaacaagtaaagtttccacaaggcacaggctctcaatcctacattgcaaaggcatactcattgaagcaagaaaaatttaaagataccgaacctagtgcaattgatcttttcaaggagatgcattgcagcaagaagaaagggtttagtgaaactgtccagaaagctattgtaagaaccttttgccctttcacttctacctcccaatatgcaatgcactag

SEQ ID NO: 38952 - DNA, 558 bp, Zea mays
  Peptide Sequence Number=SeqID_82327
atgcccccggggaagaaggggccgcgagtcccacgacatcacgcagaagatacagaacctactcctacagactatgagaaacagagggcaattacaatcatgaagaataatcaaatgatgcaacggttagggattcgtcaattacagtcaatgatggctagtattccaagtggaaggatgaacgataatgctcctcaggaatctggatcgttgtatgatggtgatgatattgaagactctgaggatgagatggaatccctagttgataagtcggtagccagccacatccccaacaatggtgctgaaatctcttcgaaaaatacaagagcctctaaaagggttgttgcacctggagtgcaagaacaaccaattagagttactaggcgaaggagtgctaccataaaccaagagtccaaccaaaatataatggctggtatattatctgattcttgtgatgccacaaaccaagattgcatccaacgcatatctactgttgtacaacctagttcaccaatagagaccgagagcgaagatcccaccggagaccaaggcgagtga

SEQ ID NO: 38953 - DNA, 1035 bp, Zea mays
  Peptide Sequence Number=SeqID_82328
atggcctggctgagcagtggtcgtgatttggtggaagagtttattaactgtggagtatggtcgctggcgcacgggtggggtttgggcgaaattagaccttgccggatgccgacactaggggataagatggtgcgaagcccagccttcgttgttgacttgcgagggcgtgatgcggccgccttcgtgcaggaggtggagtcagaggccattaagattgttggaaacttgccatacggtccctacccggagggggactccactgatgctggcgacgaccgaggaaaacaggtgaagacccggcctaaagagggcacctcgaaggggaaggttgtggttgcagctacccaaaaaaggaaaatagatttgcaaggtatgggggatgacaagatggggccgagggcctctgggatttttgttgaggagttaatggggatgtgcgtgggtcctggggaggtgttgtctttgcccgagctccgggaaacatctttgcgcatgctgaagacggtgattttggggaccggggggacacgccaggagttgtcggtggacgactacctggtgggcggagtcaccatgggcggaggctgggtagctggcggtggtaccgtctacggtgcccgccgacctggtgacggccttcgccgaccaggttgcttcggggcactaacctcgcagctaatttccaagaggaaacgacttgagggtagggttgagtgccttcagacgcagcataccgaagcaatcagggacaagtcggtggccgaaaataagagccgaaaccttctcaacaaggtgacagtgcttgagaaggagaaagaggacctcggccgccgacttaatgatgaaaagaaggatgcagagtacgcccacgcgaaggcccaggctgcccgcaagtatgttgccgacttggagctagaattgaagaatatgcacgaccaccacaagaagacggagtctaccacccgtgctggggtggatcgggtgcacacgctttttgtggatgcatatcatgacctcggcgcacagactgcctga

SEQ ID NO: 38954 - DNA, 471 bp, Zea mays
  Peptide Sequence Number=SeqID_82329
atggctcaccaaagttactccggcacgcccgaggctttctcaccgtcgttctcccctctctaccctcggactcgtggcctcttctctgccattgagttcgccatggtgttctctccccctctgcccagctccggcgaccttggagccactctagctcgcgccagcctcaactctggcgacctcactgctgcggagaggaaaaatgccacccgtagccgtccgttcccctggtctgaacccctccatccgattcagatcgaacagctcagatcacggataccacttcgcgcatgtgcgcctgaagccctggcccggctgtcagcgcccaagtccctggcgctgggcccgctcgacaacgagcagtccgaggttcctgagtgtattgttggagacctccttgagcagcaacctggagatgatgctggcaacatggatgacttcgaggagttccaggaatatgatgagttctag

SEQ ID NO: 38955 - DNA, 366 bp, Zea mays
  Peptide Sequence Number=SeqID_82330
atgggtctagcgatccatccctccggctccagctccttcgagagctccgtgccgtggttcgaactgccactggcgttgtcatcgtctttgtctctgtcgggtctcctccagcagccgggatgccctaaggtggtgcaaggggcatctctgtctgaggtgcaggggaaggcggcctctcagactccacctcctgctgaggcgagggggaagagtcctgctgctcctggtcctgttcctgctcctggcgtcggcgctcctgctcctcgtgcaggtgacgatgcagtctcttcaggtgactggactgacctggcaccgtgcgacgcagtggacgctccgccaggcgagaaagcagaaaggcgatcatag

SEQ ID NO: 38956 - DNA, 528 bp, Zea mays
  Peptide Sequence Number=SeqID_82331
atggacgacaccactaaagtggcagagatgaagactctgacgactttctgtggctgccatcccctggagatggtgatgcaccccttgggactcttccctgctgagaagaagaatgaccccatgtggtgcaaccgtgtgagccatgtgaaggacgtatgggcgatgtatcctgacttggttgggagggtcactgttcagtgcatgaatgcgttgtactgccttcagaccctacagagcgacgctatggcacatcttgctaacatcgctcaaaccaccaagctcaccctcgacggccgagaagactttgtggtcgacttgtcctccgagttggtggagaaggacctacaggaacttgaagaagctaatgaccacctggacatgcaccacttagagatggaagccaatgaggccggaagcgagggagaagaggctcctgaggagttaggaccagcccctggtgccaatgggacaacctccgcgatgcccccttcactcgcatctagtgtcgcttccactactcagggttga

SEQ ID NO: 38957 - DNA, 492 bp, Zea mays
  Peptide Sequence Number=SeqID_82332
atggtgtgtttgggcctcggctgccgcagaagacacacgctacaagacaatccgatcctgcaggctcggatctcgatagttgaagggagcagcagcaccctcggcgtcgactacaccttcggcgagcgtctcctccaagaatctggctcgagcaggcggctcggctggtcaccccgaggtctcggccagcggtcccccgaagacatcagcccggcccgaggcctcggcagatcaactccggcatcggtcccgctaacggacgacccggccaggctccggccgaccaagtcttcttttcgagccaactctgcctctgtccatgctaacaccgctacccctggcttcggctcatcgaagagcggccgaggggttcctttaactaagcaagagaagcctcggacagcaaggccgaccgagccgagggactcctacgcctctgggatacggatacctcactcgtcacctttgtacggggcgactcacgcttggtga

SEQ ID NO: 38958 - DNA, 888 bp, Zea mays
  Peptide Sequence Number=SeqID_82333
atggctgaaaggtaccaactcccacggagttgcgttcctccaacgacaaggcggaagggctacgggtgtcccccatccgggggctcggaaggtggaaagacacgatgcataagggagcgcgaagacatggtcgcctttcaagggggtcaccctccttttacaggcgactctccctacttgcgtccccagccgccgtgggctgagtcttctccaacacgctccaaggtcctccccctacggcgtgggggctgggtcccacgcgtcgtgcaagctggcccagagcagaagaagccaaaccgccgcgcgcggtgcatgcaaccgcacagcggttacgagcattcctccactttcgcccagaccagcgggcgaaaggcggcgggcagccatgcaggcggcatgcaaccgcgccaagtgggtgcgcccctccgacttccagcgcacccagcatgggggcccacgcccacgcgtcacgcaaccgacgcgccgatcgctacgtgcaagcaaccgcaccgccactcgcaccactgccacgcctcctcgactgcagaaccagtaccgcgactcgaggcaaccctgcgtacgacccagcagtgccagccaggcgcgatgggaccggaaaagggggataccccgaaaaggatccttctccgtgaaggaaacaggcttcgagcctccctactgatcagaggttcgaaggctggcccctcggaggggttcaacagccgcctcagagtgcgtgggttctgcgcccactactggtcagaggttcgaaggctagcccctcgaaagggttcaacggccgcctcaggctacttgggctccacgcccactactgatcaggggttcgtaggctggccctcgaagggttcacagccgcctcagacatag

SEQ ID NO: 38959 - DNA, 273 bp, Zea mays
  Peptide Sequence Number=SeqID_82334
atgatggttgaggtggtccacagtggcggcggcgcgcggtattcctcacggctggggatcgtgggtgcagcaggtagtggctttgacgaaggggatcatgggtgcgtcagctggcttatagtcacgaccagtctatgctcacataaagaagaagaaaaaggtgtcgaggcggatctccaggagttccaggtcttcgacgagttcgaggattgggctagcgacctcccccagtcagctgtctgtgcgttgtgctatgatgagtcatttatgtaa

SEQ ID NO: 38960 - DNA, 147 bp, Zea mays
  Peptide Sequence Number=SeqID_82335
atggcgaacgagtggggcatggagttctgtaacactgacacaaggggcccatttgccagcgccagagggagcagtgccaactgcgtgggtcgcgctcaagcgatgcagggggaaatgagctggaaaatatcatttgtgaaggagtga

SEQ ID NO: 38961 - DNA, 225 bp, Zea mays
  Peptide Sequence Number=SeqID_82336
atgctggcgtcctccttcgaggtggagatccttccgcttgtgtcgccgttcgaggccgggccagattccgccgaaggtggaaacgacaccgagggcgctgctgctccctctgtcgataatcacttatcgagcgagagttgcttttcgcggaaggtgatgagtgaggattctgttatcgatttagttgagaaggcacaaaaatcgttctggcagaaaagtttttga

SEQ ID NO: 38962 - DNA, 444 bp, Zea mays
  Peptide Sequence Number=SeqID_82337
atggcaggggcgagatccgcgggcgtggccggcgggggcatggtgcctgcgcagtggtgggggcgagatacgtgggcggggggggggggggggtggcaggctaggcgaacgatcggggtggagggaggcatcgtgggcagcgagggcgggggcaagcgagcacacaaggttggacatggggtgaacactagtacaccagacataggggatgtctcaagccgctcgcagggtcaagttcaaaatcctgtaccaaggagagattcatcagatgatgatttggtgttccctccacacctttttaggtgctctggaaggaacaaggcaccaaaatgccaatcgactaggcaaatatgcgaagaccagccaccaaggaaacaccaagctgtggggaagaagataaaggctgctacaggaaaacatcatgtttttcctgtccatacatag

SEQ ID NO: 38963 - DNA, 900 bp, Zea mays
  Peptide Sequence Number=SeqID_82338
atggagacacaagctcacgcccccctgggaggggccattcatcatcaccaaagttctgaagcccggaacgtacaagctggccaacaaccaaggcgaggtctacgacaacgcttggaacatccaacagctacatcgcttttacccttaagatgttttcaagttgtgcatatacctcgcacccacgcaaagtttagtcaacaaggaagggtcggcctcgcctcggcaaagcccgaccctccctcgggggctaaaaggggggaaacccctctgcgtcgaaattttcctcgaaaaaagatctctttcaccagaatatcttccatgctttttgactacttcgaaaagtgggtcctggaaacgacggagtgcgctggctccgcggatcgaacaagtctttacgttcggaagcccttctgccgaagcgatccttcgagccttctcgaccgagtcggtgacagggcctcatggacgggtgaaaatacgcgtaagcggcaaggccgaccgagccaagggactcccacgcctccgggatacggatacctcactcatcgccttccgcgagaagcgactttcgctcgcacaaacatccctgttaccgacaaaaagtccggacactcgaaacaagaggaaaagagacgcagctttacaacgcagcgagggctcgggtcttcacgctggaagggagctgtagcaccctcggcatcgacgacaccttcagcgaggtccgaccccgcctcggacggtgacgcggtccagggacttctccgggaatccggcccgagcaggcggctcggccggttacccctggggcctcggccaaccatcttccaagggcgccagcccgatccgaggcctcggctggtcaactccggcgtcggtcccactgacggacaacccggctag

SEQ ID NO: 38964 - DNA, 660 bp, Zea mays
  Peptide Sequence Number=SeqID_82339
atgcaaccgcgccaagtggacgcgcttctccgactcccagcgcgcccagcctggaggcccaggcccacgcgtcacgcaaccggcgcgccggatgctgcatgcaagcaagtgcaccgccacttgcgccaccaccgcgcctctttggttgcggaaccaataccgcggctcgaggcgatcaggcacaagacccagcagcgccagcctgacgcgacggtcaatgcggccgaaagtgggccggcagtaatgacggtggcagacgcgcgggagcagcgggcacgtcgacaaccaagctcacgtcccatccgggggcagcgaaagagctccctctcacggtgtgaagacaacgcgcccgtgatccgttcctcgaacggctcgcacacgcgcaacggctgccccgccaaccactcgccccgttgcattaactccgcggctggacaggtggcgtttctggcagcagcaacgggcgacgcttcgccctcgccgaaacaaccgcaccaaaaaagaggctcgggggctgctctcgcaaacccggcttcggccgaaccgttgacagcgtcaacataccagcccgagaacttgggcctcgaccgtacacccgggctacggccagctcgcatgagggaacaaccagaccagccgaagcattacgcaaggcattaa

SEQ ID NO: 38965 - DNA, 345 bp, Zea mays
  Peptide Sequence Number=SeqID_82340
atgtgctgctatgtacaacaagctccggcgcagccgccgcttggacgcggtgcagagcggttgctccgcgctgtccatcgtcaagcaggggacctcatggtcgtcggcgactctcgggttgttctgggtatcgcattcgacgacgacgccaacaacgtcggtgactcacgtcgtccagctcatcgtccacctgaagtccaacctgccacgagtagcgcatctggtggtgcaacggccaggggtactaccttgctaatgagcccagagtgcacttcgttttacagcccaaccaagagtcatcagtactcggaggtgacgcagagcaggaccgacaacaatgactag

SEQ ID NO: 38966 - DNA, 90 bp, Zea mays
  Peptide Sequence Number=SeqID_82341
atggcggtggcctcactccttccgcctcctgggactagtaattgtatcacatttaagtcccagaggatctggggtgcttcagccatctag

SEQ ID NO: 38967 - DNA, 234 bp, Zea mays
  Peptide Sequence Number=SeqID_82342
atgggcttcgccgggagctttgaagggtgtccgtggtgtcctcgtacgggttcagggaccggtgaaccggcgatttctcgccgttgccagtgctccgccgcggagccgcatcccgtcgtggaccgctcgttggtcgcaatccatgcccacgacaagctagccactgtggatcctggtgaccagcagatagaagtagctgagcaggagctcattgaatgcaagttgtgcccttga

SEQ ID NO: 38968 - DNA, 198 bp, Zea mays
  Peptide Sequence Number=SeqID_82343
atggccagagccaacaggccagaatcctcgccatcgatgagtttcttcgcccgtgcacgtggccaggacgcctcctccaccaccgacgacaagtcgaccaacgacgtgtccgttggagtcgaccattgcactggagccgttgctccgttggcacaccgaacagtccggtggcccaccggacagtccggtgaattatag

SEQ ID NO: 38969 - DNA, 915 bp, Zea mays
  Peptide Sequence Number=SeqID_82344
atggcttctgctgccaatttcgcggcgtcatcctggcaaccgacgtccccatctccatggacagcgccgcatgtcaccttcgtcacgccgtcctggcaaccgacgtccccatctccatgggttgcgccgcatgccaccttcgtcgccccatcctggcaaccggcgtccctatctccatgggcagcatcgcctgccaattttgtcaccacatcctggacgccggcgtgcccatccccagggacaacgccaaatttcatcacatcatcttcgttgaaggcgtctccgtccccatgggcgacgccactaggggcagccacggctcagcaatcaccagctccatcgatgggggatttgtggaccaacataagggctgatctcgcaaagatgcaagccacgctccagaaggttgagcaagggctgctgcaaatcaaggcagcagtgcaacatgagcagcaccagctggcgttgtccgcatggctccggacgtcggcggctgtgggcatacaagctgctgctcgtggcttccttgcacgatggagagtgcgggagatgcgccggcagatgctcgaggcagccttggtgacggttgacctcggcacacaggggcgcgacctcgccctgtcggacggccatcagcagtggcaccgggccactatctccaagtgcgagcatggtacgtgtcccgcgggtgacgaacttcaactctacgacagcggcagtagggaagttactcacctcgtcatcaacaagggcgcactatttagcgccaccacattccgctaccggccgccacgagggcgcctccggtggttattgttgcgacctattccaggtgcctgtccatatgctcccctttcgtgcagatggcgtccatgggatccaggtggctgcacacgtgcaagtccaatgcgctga

SEQ ID NO: 38970 - DNA, 1167 bp, Zea mays
  Peptide Sequence Number=SeqID_82345
atggcgcctcctgttgacgtggctggcctgcgccctaggttgggcgatgcggaggctcccccgcagccgaggtcgagtctgtcttccgtggccgaggccgagtccgagcccctgggtcggcccgagtccgagccctgggtcgggcggagcggagttcgccgtcttccggggctgagcccgagtccgagccctgggtcgggcgaagcggagcttcctatggcggcgctgtccttctgtcaggccggtcagtggagcggcgatgtgacggcgctttatgctgatgggggttaccagctgagaattaggagtcttgagggtacccctaattatggtccccgacaggtctccttcggactgctcctctgtggcaaccacgcctaccgcgggcagggccgccaccgcgccgccacggttgtggacgcgccgggcagggcagccaccgcggctgtggacgcgacggacagggtcgccaccgcgccgagcatggccgtcaccgcgccgcgccgggcagggcagccaccgcgccgggcagggagtccccatgctactgtatgtgtcgagctgttcgcgtgcaggaaagctctcgttcctagcaaccaagctagcgaatccaacccaacccgtccatttctccacatccccaccctccctccgtctccgcctccgcctgcgccaccctccaatccgcgccggcgcgtcgccaccctacccgattgctacctcctcgtggtgggcgccgctccgatccgcccgatccgcgccggcgcctcgccaccctacccgattgctacctcctcgtggtgggcgcctgctcctggagttccggcgcgcggcgggggcggcgtagtaatggaatccgaggacgacatgcacgacgcgaacgactccgctgaagacgatttctacagcggcggggaggccggtctcgccgccagcgacgacggagacgccgactacgactttgcggaccacgactccgacgactccgcggagctcatctcccacagacagcaggtgatctccggctcccggccgtgggtggtgcgtggcgtgtgtgagagtggatctgcttctgtacgggcccgctatgctggaactaccgctcccaaggctccatgcttcgaggacctcccttggctctggtcagaggaggaacttgacgcctga

SEQ ID NO: 38971 - DNA, 384 bp, Zea mays
  Peptide Sequence Number=SeqID_82346
atggcggcgcaaggggcaggaagggcggtttcctcttctctggctaagtctctcgggttacgaaaacctaagaaggaggcaggaagcggagcaaagaaccgtcaccagaccctctcccggggaccgggaaagggggataccccgaaaagggtccttccccgtgaaggaaccaggctccgagcctcccaactgattagaggttcgaaggctggccccccgaagggttcgacagccgcctcagatcgcgtgggccctacacccactactggtcagagattcagtcaggtaaatgaagtattatttgaggttggtattgtatctgaagatgatgtggttttatactctcagaggtgcttgttgctcatcaagggaagtgggaagtag

SEQ ID NO: 38972 - DNA, 1377 bp, Zea mays
  Peptide Sequence Number=SeqID_82347
atgacttgccggcactccgaacccccgctcgtgaaaagagacaaagctcagcacataccccggcggcggggacggggcggctccgctcggaggggccatccactccggctgcgggtcaccggagagaggacgaagcaaaccatcgacaacaagggcctccagattgtccgccgtgacggtggagaaaggccatgggtcgcgtggcgaaacaacggtcacccggtcggccatcaccaagcagaagaggtggcggcggagcggacaaggacaggcggcacctttggcaggcgaagcaggcgacgcttcaccttcgccataatgactgcgtcaaaaaaggctggcccctcggaagggttcgacagccgcctcagagcactcgggctccgctcccaccactggtcagaggttcgaaggctggcccctcggatgggttcgacagccgcctcaggccactcgggctccgcgcccactactgatgaggggttcgtaggctgccccccgaagggttcgacagccgcctcagaacacgcagagcgagggatgactctgggtacgttcgatacatggccgaggctcgggctacactctcgaggtaccctaggacatttccgagaccagcaggagcgattctgtaacggaatcccatcagacggaggcaccgagccctcggaccctatcaaacgggaccgggcgacgcaggggcgtatgaaaaaagccgagtctgtccttgaccgtcctcttgctctgtgcggaggctcgggggctgctctcgcaaacccggctccggccaaaccgttgacagcgtcaacataccagcccgagaacttggaacctaactatgcacccgggctacggccagttcgcatgagggaacaaccagaccggccgaagcatcacgaaacgcgcttagacctcgaaggagtcaaaccactcctccgaggccttaggggctacacccggcgggaaaacagcgccgcctgccccgctccgactgctgcgccacttgacagagtgaggctgacagcagctaagtccagcctcgggcgccatgggaagctccgcctcgcccgacccagggctcggactcagcctcgacgtcggaagacggactccgcctcgccagaccccagggctcggactcagcctcaacctcggaagacggactccgcctcgcccgaccccagggctcggactcagcctcaacctcggaagatggactccgcctcgcccgacccagggcttggacccagcctcgaccccggaagacagactctgcctcgcccgaccccagggctcggactcagcctcgaccccagaagacggactccgcctcgcccgaccccagggctcggactcagcctcgacctcggaagatga

SEQ ID NO: 38973 - DNA, 1125 bp, Zea mays
  Peptide Sequence Number=SeqID_82348
atggcctccgggcggacgctgctgcaaccttgcctcgcctacaccgacgctcgaggggcgaggacaagtacaaagagccggaggctcgaagcacggatggtggcgatcctcccggacgagtggggcaccgacctccgcatggagacgtcgtaccggtgtaaaggcaggaccgccccagaacacgaacgccgccctggcagcgcgcgacatcttgggcggtcctcccgcgcgctcggtgcgacaaccgccttcgcggcaggagggggcaccgggagccaagccggcgagtccaatgcgccgaggctgacgacgcccgccgtcgaccagccccgcgttgtcgaagtccgcccctcctgcagggccagtgagcgccctctccctcgaacgatgaaggagaggctgacccacgaaaccgcgcgggaggtagagctccggctcagcctagcctccaccctagcgaggatgatgaacatccttgaagctgagggtgggaccaagatcgcagctcggcttgcttctccccacccaggggctggtggtcaccgtcttgggtatcccccatccgggggcttggaaggtgaaaaggcacgatgcataagggagcgcgaagacatggtcgcctttcaagggggtcaccctccttttaaaggcgactctccctacttgcgtccccaaccgtcgggggctgagtcttctccgacacgctccaaggtcctccccctacggcgcgggggctgggtcccacacgtcatgcaagccggcccagagcagaagaagccaaaccgccgcacgcggtgcgtgcaaccgcccagcggattacaagcggctctccacttttgcccggaccagcgggcgaaagggcgggcatccatgcaggcggcatgcaaccgcgccaagtgggcgcacttctccgacttccagcacgcccagcatggaggcccaggcccacgcgtcatgcaaccggcgcgccggatgcttcgtgcaagcaactgcaccgccacttgcgccactaccgcgcctcctcgactgaggaaccgataccgcgactcgaggcgacccagcgcacgacccagcagcgccagcctggcgcgacggtcaatgcggccaaaaatgggctggcagtaa

SEQ ID NO: 38974 - DNA, 1509 bp, Zea mays
  Peptide Sequence Number=SeqID_82349
atggcccctagccccttggacaagggcaaaggggctgcaagcagtgcctctgccccaggtagctccagggggttggaggaggagaggcgacgcaggctgcgtcgcgctgacgggtcgctcgtttcggagccccccagaagcgccagagggctgcaggtgggaccgagaaggccaacacccaggcccacgacgcgtagaggcgcgtcagccctccggtgccgccgccaccaccaccatccagggatgatcactcccgggagcaccagcaacagcaacagcagtagcaggagcggcgatcgcctcgcttccagggtcactggaaggtctagggcccctttttccacgagtctaatcatcatgccgacaagtcttaacccatcatctgtttgccagggcttcttccttcgctgctcccaaggccacgcctcctccgctagataccaggcccaccgacaggatagcgccagcggcttcccatgccccagccaggggtccagcggcagcggctccagcgtcaggtggcgtcgcagtggcagaggaggtcccagctggaggattcacgcccactcccgacactggggggtgacacaggaggcacgtctagctccaaccccccgcctgctccagaggagatggaggtggtgtttgggcagcgactccggtcgggtgccgagcaagaagcggcgccagtccccctccctcgcatgctgtcccgtgcccactaggttcttagtgaaactgaggcagcaatcttgcgagagtgggaggcgcatgaagctgagcactagcgcctcagtgactagcgcacccaactggaggagcataccaagacggcatcccgacagttcacctccgagcggtcccaactcgagcgagaccgcaaggagtacaagagagacctctagagggcgggagacggacctcgctaggcgagagacagatctcgccttcagggaagaaatgctcacccggcgaggcgagttgctggccgagcacgagctagaagcagaggaaaaagagaggaagctggaggagcagatccgccagttcaatgcagagcaggcggcgttgggcccccaggcaatggaggccaccaaaaaggcccttgaagatctccaagcagagcaccgcgccggggtccagcgcatcgtcgagtgggccggtgaggcaagcacggcactagtgccactagggatgagccccatcccagtgtcggagctgcgagtgttgatctctgatgccctcccggtgttggactccgccgccgatcgcctccggcgcctggatcagatcctcggtgcccgcctggaggcagagggctgcaagctctaccgagcagtggttgaatacgtcctgacgtgcttccggaaccacgaccccatcatatccttggcgccggtgatcgatggtccggtggccgccacagaagatgtcgcccgggagagtgtacaagatgcggtggagatggtggccgcacgctttcagcgtgatcctgccgacgctgaatag

SEQ ID NO: 38975 - DNA, 2591 bp, Zea mays
  Peptide Sequence Number=SeqID_82350
aagatgatgcagacgaaggggcccttcggtgcgccgccggtcagagcagcggtcgagatttagttgaagagttcgtggcgtacggggtctggcccttggcgcacggctgggcgctgggcgaagtatgccctcgccagatgccctttcacggaggaagggtggtgcgaagtcctgccttcgcactgaatttgcgaaaccgtgacccggccgcctttgtgcgtgatgcggaggacttggcggtgcggctcgtggggcgttatgtgccgaggacggaaggccagcgcagctttgacatccgcgggtcaaatgaacgtttgaacagggtcttcgaattaaatcaactgccgtacgacggctaccctggtcaagacgaagcggaccgccgtgggaaaaaaccggcggtggagactggaggcgaccctgcgctggtggccgccgcctcctcgaaaaagagaaaattaggtactgcgatgggaagacttggggtgtctgatagtttcgctagagatttaatgaggacgtgtgcggccccgggggagaggatgtcttcgcccgagctccgggagtcttcggctcggatgctgagggttaccgggggttgttggcctaaaaacattcctatcccctgcgcggctgaggaggactgttttacatctcgtatggttcatcggtggaaagtttttccttatgggcgaaatatcggtcatgttgtgtgggcagtgatggacaaggatcgccaaggcgcggcgcgaaaacgccaggcgactgtgagggttcacgaagcccggccgaaaaggcagcggggaacggcgaaggctgaggcctctggcggaggcaagccgccgctgccgacgaaggtgggcgcctccgcgcctggcaaggcgccggagacgacggtgggcgccggaggccccaagctgtcgaaggtggtgccgtctgtcagcggggtggcggaggctgcgaaggcggcccgatcgctaccgccgcctggcaaacgcgttgccgacttcggcaccgaaattaatgtggaggattatcttggggggtcggacgagggcccgcttgctctagttatgcctggcgcggcgatcgcgacggctgcgccagcgccgaaggcgggggagaggcccttggcgccggaggcgagggacgaggcgggcgtgccgacccgccggctgaagggagcgacggaggcgttgagtcgagcggcggaggcgctgagtcaggtggctaacttcaccagccgcaccatgtcgggggcccttacggcagcttggactgcagaggtcgagagacttcggacgcaacatgctgacgctgtccgtgagaagtcggcctccgacagcaagtgccgcaaactggcggagaaggtggccgccttggagaaggagaaggctgacttccggcgccagctggcgggggagaggagggaggccaacgaagccatcgccaaagagcaggctgctcaggcggaggccaggctggcgcgggcggaaggcaatatcgccaaggagctcgccggagagctgcagcggcggcttactgccctggagagccgcgcggagggggtcgaggccgcgatgcgagcggaggtcaaacggacgcgcacgcagctcatgactacatatcgcgagctgggtgtgcggacgggtgacttcgaggtgccggagcgagaggccggacttcgctgtctggaatgggtgcaggaggaactgcaggagctccccactgtcttggcggggttgatgtcgttcacctccttggtcacctgcgaggcagcgatgaacgcgctctctcgcgaaggctgccggcactttgaggccctcgaccaggcagatgaggattttgggcgagatatctttgaggtcgaagaccccgtggtgaaggaatccggcggggccctctatgaccggatgtggggttcatacggtcgtgaggtggttcgggcgcgggccgaggctgcgagggctcaggcggagcgcggcgagcgggtggacgacttcggggcgctgaacagcgcgccgcccgacccggagacgacccctgcggaggccgcgactggagtcgccccgggaccgaccccggagaccgtggaagatgcaccaggcgcccctgcacctgctgcgaccggcgaagaccttcccccaaaggtggccgaaggcgcgcccgatgcccccgcagctgctgtgccgagcgctgaagatccagcggaggtgggggcggaggcagcggcggaggcctcggcggagactcccgcagcggcagggccttcgcaggttcaagattttgggcctgcgcacgcaaccgctactactgagtttttggcggcttcgaccgcggaagatggaaatcaatatggtgggtctgtttctgagttttttgattttactgactctgggagctcggttgagtggactgaggagtcttcggagggggacttggattattttgcggccttggacgtggctgcggcggaggctgcgtcacatgctgcggacgcgccagacgtgcccggtcctagcaccgggcaccaacggcgaagggcggttgcaaagcgtaggattagtgcggaggaaggggcccggcttcgc

SEQ ID NO: 38976 - DNA, 195 bp, Zea mays
  Peptide Sequence Number=SeqID_82351
atggccgcagacatgcccgacctgcgcgcggcgcgacagtcgcccgtgtggtggacggacggccacgcccggatcaggcggcatgatgctccgtcggaggccgtgactgagtctcctaagccaggaccgggaaaggggatatttcgaaagggatccttctccgtgaaggaagcgggccccgagacctcctactga

SEQ ID NO: 38977 - DNA, 591 bp, Zea mays
  Peptide Sequence Number=SeqID_82352
atggtcatccaggatgatgacctccagttcggtggtggtgagaagaaagaaaaaggctgcggcctcagccccgccctcagcttcaaggatcttcatcatccttgctgtggcggagggcgagctgagccggggttctacctcccgcatgggccggcaggccatctcttccttcagcattcaggggagtgggcgctcaccggccttgcggagggggtgaacttcgacaacgcggaaccggtcggccgcaagcatcgtcagctccagcgtgcctggctcactggcttaggtgactctgtcacggcctccgacgctgcctcctgccgcctgatccgggcgtggccgtccgtccaccacacgggcgactgtcgcgccgcgcgcagccgcccgaggcggaggtcgttgtcgctgctggtgcagtggtcgtcgaaccttcggtcgttctgcgatgagccgaagccggaggcagcgatgtcggcgtggacagaggcagagtcggctcgaaaagaggcttcgtcggcctgggagcacgtggcttccctggccgaggaggtgcagcggcggcggctggagcttggccaggtcgtccgctag

SEQ ID NO: 38978 - DNA, 618 bp, Zea mays
  Peptide Sequence Number=SeqID_82353
aagatgaatggacacgattcaggtcaaggcttcgtctacccaagggagcgcaatctcgcctcgcccgagcccagcctcgggtggggaactgtagtcccagacgaagtttacgtctcgccccgaggagcctcctcaggcagtgggcgcaccctcggcacgccccgaggcccaactcgaggaggcttcgtcgagaagcaaccttggccaaatcgcctctccaaccgatcgtatcacaggcgcattcaatgcgaggatcgcctgacaccttatcctgacacacgtgcctcagtcggcaaggtcgaacctcgggcgcaacaggaagctccgcctcgcccgaccttaggcctcggcctcggaaggaggtctccgcctcgcccgaccctagggctcggccgcaacctcggccttgggaggaatcgcgtcctcacccgaccccggccttggcctcaagagaagctacgggggaacaagaccggcgtcccatctggctcgcccgggctcaagcacttctccggcgaccacgttatcacctacgcagggctcaagcacttctccgacagccacgttggcatgtacacagggctcaggcacttccctgccagacacgttagcacctag

SEQ ID NO: 38979 - DNA, 687 bp, Zea mays
  Peptide Sequence Number=SeqID_82354
atggtcactgtcacgcgggaaccgacctgtcagccggtaccacacctacctctcattctcactgatgggtggggccttgctgtcggctacttcctcgacctccactcgcgcatggttgacgcaactgccactgtgatcctcgcgattagcttagaccctatctttttccccggtagatatacggaggccccagttgcggtcttctcctctctgttcgccttgtgcacagcagtagacaccgccgtactcgccaccactgtgagaagagaagggcgcgagccgccgcagaggtgtatgggagtcgcgatcccttggcagatgggtaacataacttgtgggtacagggtacaacctctgcagagtgtaaaactgccttacacatcacatggactcccaccttcgatggtcaataccaggaagggtggtggaattgatctacctcccaatcgacacacttggaggatatttagacaactccaacaacaacaacaacctgagatggatcctccacagcctccaccaacaggagttgacccaactgttgcaacacagatgaggataatgcaacagatggctgacactatggcggatatgcaggcgcagatgcggcaggaacgccaggaaatgcgccaagagcgagaagatatacgccagaagatgcgccaggagcgagaggagatatgctaa

SEQ ID NO: 38980 - DNA, 345 bp, Zea mays
  Peptide Sequence Number=SeqID_82355
atggccagattgatcggaggggtctcaccgtcagtagggtcgagggcgagccaagttggcatcatagcacggttccgccttgaggctctggctccggcgagctattcccagcactttgactaccgttttcgcctagaaagaccttcgcgtgcggcacccaccggcgaacacccctggttcaccactgtggctcggcaccgggtttacactagattacccttaaacccatcatgccctggtccttcatatttatcacggcttactagagtagggaaacttggttcttcgcactcccttcttcacaacctagtcctagaactagaacaacttgcgatgaagaggtga

SEQ ID NO: 38981 - DNA, 369 bp, Zea mays
  Peptide Sequence Number=SeqID_82356
atggttaccgcattgtgtaggagctcttcatgtgaagttaggctcactgatgggccaaaatggtcagggttgtccacggcacccccacagtacaatggccaacgttgtgtcagtaccggcatggggaagattgagtctatggctgttggggcgaaggcaaagacgccacccttcgctcgaggccttcgctgcagccgctggttcgacggagacaaagcgggcagggacacccttcgcaggactcggcacttcgacgaaggcctgcggcgacgtcctgccacggcgcgtcctcgttcagtcccaaggcccacgtgtgatctggcccattgtaacgggccccgcgtggccgcctctgtattacgggcctaa

SEQ ID NO: 38982 - DNA, 345 bp, Zea mays
  Peptide Sequence Number=SeqID_82357
atggctgtcggagaagtgcttgagccctgtgtacgcgataacgtggccgtcggagaagtgcctgagccctgtgtacgcgataacgtggcggtcggagaagtgtcggagccctgtagaagcacagctggcggcgcggctgggatcctgctgatgtctccttgcttccgtagggggctaagaaccatcgacatcatggacgcacgcggggaaccatcattacctgttacagggtcttaccccggtgggtggcacagcagtcggagcggggtgagcggcgttgttttcctgtcaggtcggtcagtgaaagggcaaagtgactgcggtcacttcgaccttgccgactga

SEQ ID NO: 38983 - DNA, 120 bp, Zea mays
  Peptide Sequence Number=SeqID_82358
atggcgggtttggtggatggggttaagctggagtctgattctgcttcccctgattactacctcgagctgtggatctggagagctggatctggagagctggataatgtgggtggcttatga

SEQ ID NO: 38984 - DNA, 537 bp, Zea mays
  Peptide Sequence Number=SeqID_82359
atgcgggggaaggtgaactgctgctgcctagccagggtgcagctgtctgtcctccatctgggcgatggtcgtgccgtgcgcaggcggctgctgtcgccggtgctgaagcggcggccatcgctagagaggcttcccaccgcagcggtggttgcttccgccgaagagaccgaccttcggccgctctgcgatgagcggaagccggaggcagcggtgtcggcagcggtgtcggcgcggacggaggcggtcgtccgcgagcgggaccaatcccggagtcacgccgccgtggccgtgagccgggctaaggtcctcgggggacagctggctgaggctatggagcggctagccggggtgtctgctcgggctggaacccttgcggagagcctggccgtgagggcccaagcgcggtgctggcgtcctccttcgaggtggagatccttccgcccatgtcgccgtctgaggctgggccaggttccgccgagggtgggaacgtcgccgagggtgctgctgctccccctgcctatgtctgaacctgcatga

SEQ ID NO: 38985 - DNA, 2233 bp, Zea mays
  Peptide Sequence Number=SeqID_82360
gttcggacatcgacagggggaggagcagcaccctcggcgtcatttccaccctcggcggaatctggaccggcctcagacggcgacacgggcggagggatctccacctcgaaggagaacgccggcaccgtgcttgggccctcacggccaagctcttcgcaagggttccgacccgagcggacgcctcggctggcagcttcgtagcctcagccaggtgtcccccgaggacctcagcccagctcacggcctcggcagcgtgactccggggttggtcccgctcgcggatgacctggccaagctccagccgccgctgctgcacctcctcggcctaggaaatcacatgctcccgggccgacgaagcctcttttcgagccgactccgcctctgtccacgccgacaccactgcctccggctccagctcatcgcagagcggccgaaggttctaaaactgagcaagagaagccttgagtggcaaggccgaccgagccgagggactcctacacctccgggatacaaatacctcactcgtcaccttccgcacaaggcaactcacgctcggttaagtggttccgctagccgacaggcgagtcttagtgctcgaaataaggaagaaacacagcattacgctaaaatgcctgaatgttcaggcctcagcggccacaatgaacaaacacccatactcagggtaccattacaaacgggactccggttccacttccgcgggtatgaacaacctctacaccagagggcctgtgggataacaaactccaggtggctcgccggcaaccgttgcaccaacagcgcggcaatgacctccatctcgggcggcaagacagctgcaacgatggccttagggaaaacgctgctgctgaagggccctcgttcacgtggcactgacggtctcgtcggcgaaggaaaccgcttcggcagaggcagcctcacctatggcgaccaccacctcaacaccgacgacagcggccacctgcccaccaacaccgcaccagcgagcggcggccgccacaaagcgcaccggcaggtcctcactcccgctctcgccacaagaacgagaacgggaccgtcccagaacacgagtaccgccctcgcggcgtacgacgtgttgtgcgaccccccggtgcagccggccaccgccgcccgagtggaagacggacagctgcaccctgtcctggcagtagcatttcgccttcccccgcatggttggaggacgcctcctccgcagagctggaggatgcccttctccctcgaatgccagaggatgaagcgggtcaccagcccacgcaggccccaactcagctcgccctccaccacaacaaggatgatgaacatccttgaagctgagggcggggcagaggccatagcttggcttgcttctccccaccacaaggctgggatcgggaaaggggatatttcggaaaggatcattctcggcgaaggaaatgggcccccgagccctcctactgatcaggggttcgaaggctggcccctcgaaagggttctacagcagccccagagcactcgggctccgcgccctttactgatcaggggttcgaaggctggcccctcggaagggttcgacagccgccccagagcacgcagagtgagggatgactcttggtacgtccgttacatggccgaggctcgagctacgctcccgaggtcaaggcctcgtctacaaagggacgcaatctcgcttcgcccgagcccggcctcgggcaggaacagtagtcccggacgaattcacgcctcgcccgagggcctcctcaggcagtgggcgcaccctcggctcgcccgaggcccagctcgggcaggcttcgtcgagaagcaaccttggccaaatcgcctcaccaaccgaccgtatcgcaggcgcattcaatgcgaggatcgcctgacaccttatcctgacacacgcgcctcagtcggcaaggtcgaacgtcgctcaccccgctccgactgctgtgccagccacccgagcaaggctgacagcagcaagttcagcatcgggcgcaacaggaagctccgcctcgcccgacctcaggcctcggcctcgggaggaggtctccgcctcgcccgaccccaagactcggcctcagcctcggcctcgggaggaatcgcgtcctcgcccgaccccagccacggcctcaggagaagtctccgcctcgcccgaccttgggctcggaccgaccacgccacagaggatacatcattaccctacccctag

SEQ ID NO: 38986 - DNA, 633 bp, Zea mays
  Peptide Sequence Number=SeqID_82361
atggcgagcaaggagctggacgggttcgacggccacggacgagcgcagatcggcgcgacagagacgaagaccgggcataggaacgcgccatatcccgggcacggcaggggcctgggccagagctgcccacgatcaggagacttgcacggtcaacaaggaaaaagagactcggccgtggaaaaaacaaagcaggggctgggtgagctcgaagccgagctcgaggacgcggctgcgcgccatggaacgagcaaggggccgagtgagcagagcgcagggcgctcgagcgcacgcagtagggagagaagcagggggatgcgacgctgggagaacgcgctgtcgagcaggggcctcggcagagcgtggcgagctgagggagctcctgctgggctcgcgacgccagtgagcagaacgctcggacgcggcgaggacgaggcaccatggccgatgaagatccgagcgccatgtgtaagcagagggagctgggaaccgtggcgcgcagggatttcacggcgcgcagggaggaagacgctctggctgggaggagctgaagcagagggcaggaccgaggccgtcctgggcgagctgcatggccgggatctccatggctgggagaagctcggaacgcgtggctag

SEQ ID NO: 38987 - DNA, 420 bp, Zea mays
  Peptide Sequence Number=SeqID_82362
atgggccggctttgtcagtggaagtgtagcgggtgctcaccgccgggcaccatccctggtttcggtgcgatccagtctcgggcaacccaggagagtggtccacagaggattgtagaagcgcgctcgtggttcgctagtgcccggggcggtgtggtgtacctagaattgctcgtcgaagcagggaggcatcgccttcgaccgccttctaccgtggacagggatctctgtggcataagcagtggtatgacctaccccatcgcattcaccattctttggggatcatgtagatgcacaccatttagctataggggccctggtgccgcaaacctgttgttcgccggttggtgcgccaccgccgagctcgccgctgttgctcggctcgattcctgggaggaaggacgggtctcggccgttggatag

SEQ ID NO: 38988 - DNA, 228 bp, Zea mays
  Peptide Sequence Number=SeqID_82363
atggggaagctcggccaggggctctgtaggggcgcctgggaagggggcctagacgagcaggagcttggaactcgcgtccatggcagaggaaacgaaggggaggagacgccatggatacctaggcgtcgagtggagagcttggacaggggaggaagaggaagctggcctatgttggagagctcgcggccgacggcgaccagcagccagggccgacgagatgagggctag

SEQ ID NO: 38989 - DNA, 504 bp, Zea mays
  Peptide Sequence Number=SeqID_82364
atgaagactgtgcgctgggcgaagccgccaccggagtacctggagccacaaacgccgtgcgccctcgtcgatcccctcgggaccaacctgggatgctcgcggagccttggggaaatcgttgggtcagtgccaacccaaaatgggagctgggtgcgtcagtatttgtacgccggtggtgctccgtcgtttcaatgccgccatgcaacgtcgtcgggcttcatcggcgacgaatctggggtaagtggcctcctctgtggtttgtcgcggtctcgggattccgcgtgggagatccttggacgaaatagaccaccgagctcgccggaattcctcgtcgtcgccataaacccgtgccccgccgtggccgggcgttcctgtgacccaatagctggctttgggattgtggggctgtgtcgcgtcggccatggcgccgccgctcggctttgggacgccgccgccctgtgtccggtgggggaagagatgagagagcggctatggggagaatag

SEQ ID NO: 38990 - DNA, 1068 bp, Zea mays
  Peptide Sequence Number=SeqID_82365
atggctggcgtccctgtgctcgcgcccttgatccccatgcccgagctcctctccatcgtctttagctcgccatggtacaacgccactgtcaaatccggtctccagctcaccagcaacttccccttccttgcccttgcacacctctggtgtagcccctccctggtactcgacgaaattgtcatgtggagctctttattgtgtgcagccccatctgcaacaccgtcgaccccggtgagggagttaactggtaaagaagcgaggtccgtgagacgtttgccaagtgttcgatggaaggttcgaactgggaacctcgccgttctcgcggatcttcgggtcggattacctagtcaaccttcacatactactggatttgggactgctttaaatatagagacacttgttgctgccgcagaacaaagagaaacaccaattgaggacaagattctttttatgatcaacaatatatccatctcaaatatggaagctaaggcaaaggaatttaacgaggtcatacaggaacagcattatccttggtttgcacaatacatggtcatgaaaagggcaagcattgaaccaaatttccatgatctgtatctgaagttctttgataaagtaaactcaaaatccttgaacaaggaaatactgaaagccacatatgagaactgcaagttccgaggagcgctccttgctaaaaacctaggcagttggttgggaaagttcaccattggtaggaatcaggcactaagggctaaggagattgatccaaaatctcttatcgtggaggcatatgagaaaggattgatgattgcggtcataccattcacttcaaaggtgctatttaagaaccttactgttgacataaaggatgtgaaaccaacttccctgctcaaagatcgtctgcgcgaagtcgagggaaatccagatttttcaaataaagatgttactgcatctcaaacccctgtggttgcagaagtcccttcagggaccatcccttcactaactcatatggaacaacaacctgagatcaatatcacattcccgagctatgagccttccaaatatacttaa

SEQ ID NO: 38991 - DNA, 1002 bp, Zea mays
  Peptide Sequence Number=SeqID_82366
atgtggatggttatttcttaccaggaaaatactatctaccttcagggtatcaggctgttgacaaaatattactactccatcgtcctccctctcacccataagatatttgatatattactttgtccagtcgatgcagcttacaaggctgttgacaaaataatccagctctctatgaggtttctgaaagttgacaggaaaacagttgatcttgtcggtaatgagaaactgaaggccagtgcatctgttaagcaccttgctcttccttgtaacaaggcagcaacggcacaagttattccagacattatccgatgttatagccatggaggtcgaaccatcatcttcactgagacgaaggattctgcatcagagctttctggtaatactggtgttgctgtcatgctttatgagcccagatataagcacagtgtcagcagactagaaagggagtctggggttaaatttgagcatatctctgcgccacaacccactgatgtagcacaatctgctggcagtgaagctgcagatgccattgcgagtgtgtcagacagtgttattcctatcttcaggcagcaagcagagcagttgctaagctcttccagtctgtctgcagctgacttgcttgccaaagcacttgcgaaggcagttttggaactaacagaaatatgtgtcttagggttacacggacataaagaaaagatcattgttatcttccttggaggattacagtacactacatcttcaaactggcagaccgatgtggtcacctgggtttgctataacattccggtgatcgtgtttcttcttcgtcggggtcatatttgttcccattggtgttatcttcagtttgacgtcggcaacgtggtcatggtgaccggcgggaggaacaccgggcgtgtaggagtgatcaagaactgggagaagcacaagggcatcttcgaggaaaacatagaatggaattcaaatttggtggtcgcaaaagtgtggagacttgaattcatataa

SEQ ID NO: 38992 - DNA, 2175 bp, Zea mays
  Peptide Sequence Number=SeqID_82367
atgaacagacaccggcacacagggtgccattacaaacggaactccggttccgcccccgcgggcggcgccgacggcctcgacggtggagaagctttctccagctgccaccacgtcagcaccaacggcggcgtccgcctgtccgccaatgccgcgccaacaagcgcgggtcgctccaaagcgcaccggcaggacgcctcctccgtagagctggaggatggtttccaccaccagaagctggaagaagaggtggccagccgacccgtgcgggaggtgaccaccggcgaggggatgcagccgggcagcctgatgaaaatccttgaagccgaacgatggctaaaaggtaccaacttccgtgaagttgtgttcctccaacgacgacaaggtggaagaactgcgggcgccccccatccggaggctcggaagccgttgcgggatgagtcttctccaacacgctccaaggtcccccccctacgacacggggggtgggtcccacgcatcgtgcaagctggcccaggacagaaggagccaaaaccgccgcgcgcgatgcgcgcaactgcccagcggttacgagcattcctccactttcgcccagaccagcgggtgaaatggcggaccgccatgcaggcggcatgcaactgcaccgagggggtgcaccctttcgacttcaacgcgtccagcatgggggcccaggcccatacgtcatgtaaccggcgcgccgattactacgtgcaagaaactgcactgccacttgcgccagtgtcgcgcctcctcgactgcggaaccagtgccgcgactcgaggcgaccttgcgcacggcccaacagtgccaactgagcacatcggtcacggggaccaagaaaggggacaccccgaaagggatccttctccgcgaaggaagcgggccccgagccccctactgatcagaggttcgaaggctggcccctcggaagggttcaacagccgcctcagagcgctcgggctccgtgcccactactggtcagaggttcgaaggccagcccctcggaagggttcaacgaccgcctcaggccactcgggctccgcgcccactactgatcaggggttcataggctggcccccgaagggtttgacagccgcctcagacgcagagcgagggatgaccctgggctcgggggctgctctcgaaaacccgactccggccaaaccgttgacaacgtcaacataccagcccaagaacttgggactcgactgtgcacccgggctacggccacgctgcctgtgctgctccgactgctgtgtcgctcgacagagtgaggctgacagtagccataggaagctccgcctcgcccgaccccagggctcagcccccgtctcggcctcggacgacgaacttcgcctcgcccgacccagggctcggactcagcctcggctccggaagacgacgaactctgcctcgcccgacccagggctcggactcagcctcggctccggaagacgacgaactccgcctcgcccgaccccagggctcggactcagcctcggctccggaagacgacgaactccacctcgcccgaccccagggctcggactcagcctcggctccggaagacgacgaactctgcctcgcccgacccagggctcggactcgacctcgacctcggaagacagactcgacctcgacctcggaggagccaccgcctcgcccgacccagggctcggaccgaccacgtcacaggggggcatcattaccctacccctagctagctcaggctacggggaacaagaccggcgtcccatctggctcgccccgggcactcgtacgggagggttggccacgcggagaggacgggacgacgcgtgcaggcctctcgctccctcccacgcggacgcttgtaaccccctactgcaagcgcacccgacctgggcggaggacaaacacgaaggccgcggggaccccacgggtcgaaacgccgacagcagggatcccttgcctgatcgccatcgcagcaaaatcaacgaaggatctccccacactgaccactcccctactgcccttgcccctttcggggtccccatcttatccccttcaacacacctctctcatctcttcccccacaagacacagggcggcgacgccccaaagccgagcggcgccgccatggccgacacgacacaaccccgcaatcccaaagcctaa

SEQ ID NO: 38993 - DNA, 171 bp, Zea mays
  Peptide Sequence Number=SeqID_82368
atgggttctggcggaggtgagaaacatagggagaaggaagtctcgaggtgtatcattgctgcttccaccgactgggggataacgattgagcctttgatatttacagtgtataacaccattgtcccagtactaaaagttcccaagtcactttacaccttacctccaatttaa

SEQ ID NO: 38994 - DNA, 729 bp, Zea mays
  Peptide Sequence Number=SeqID_82369
atgggggtcttcaatagttttgctatggagttgatggggacatgcgcggccctcgggggaaggatgtcttcgcccgagctccgggagtcctcggcgcggatgctggaggttaccgggggtcgatggcccaagaacgtttcgatccctcacgcggctggcgaagacttctttacatcacgcatggctcgtgacttgagggtgtttccttacggaaggaatatttgctgctgttgtgtcggcagtgatgaacaagaccgttcaagatgctgcgcaaagcgccgggcggtcgtcaggatggtcgatcccatgcgcgaggcgaagagggcatgggggagcacgaaggctgtagcctccggcagtagcaagccggtgccggctgcgaaactggctgcgcccggatccagcaaggcgtcgacgggcgagaaggctacagccgctggcggaaccaagcctccctcgggcggaccttcgcccgcgaagctgccttcgctggggaagcgtgttgctgacttcggaacaaatatcaatgtcgaggattatctggttgggaagtatttgttttttttaccggaggcatgttacagggtcgggcgagggacaattggttgttgtcctgccttcggtggcaaccacctcgccatcggcggtggtaaaggcgaagggggccatgcaggacccgtgggccgccttttgtgtgagtggcgagattcggacagccgctgccgctaa

SEQ ID NO: 38995 - DNA, 456 bp, Zea mays
  Peptide Sequence Number=SeqID_82370
atgggcaaaaacaacaagcgcaagcgcgagccgactcctccatcggaggatttcggtgactcggaatactcggaggaggagttctcctccgagtccgaggggtccccggctcccgtctctcccccggcgtcgtccgacgactcggacgactcccaggggttagccgcggaggtctggacgtacatccgggccgtcgagcgctccgggctcgagggctcggatgagtcggagtactcctcggatgaggaggactcggacggcggtgacgaggatgaggacgacgatgacgacgacgacgacgacggcgacggcgacggcagcggcagtggcaggggcagcggcgacggcagcagggggagcaccaagggcgacagcagcaagggcagcaccaggggcggcagcagcaaggggagcaccaagggcggcggcggcggcaggggcagggccagtggctag

SEQ ID NO: 38996 - DNA, 1050 bp, Zea mays
  Peptide Sequence Number=SeqID_82371
atgcgtaataccctacgtcctggtgaatatttcgatgtgcccgaccaagaggccaacctttgcttccttgaatggttgcaggaggagctgctagtgctcacgactattgtgcagggcttcatgtcttacgcctccctcgtcacatgcgagggggccatgaatgcgttgtcctgcgaggggtgcaaacactatgaggtcttcgaccaatcagatgaaaactttgagcgtgaaatttttaaggccgaagaccctgtggtaaagcagtccgcgggggcactcttcgatcggatgtggggtcctcatggccgagaggcggttagggagcggtctgaccgggcgagagagcagatggcacgtgccgaggatgtcgaagaccttggagatctgaacggcgcgtggcccgaggctgaggtcaacccggtgctgcccgaggctgaggtcaacccggcactgccctcggaagccggtgaaggctcttccactgcacttatgtctactgtgtccggtgaaggctctttgccagcccctgcgccgacggcggaggaccctccgaaggcggtggtggagccggcagctgaggatcccatggcggcggccgggccttcgcaggttcaggattttgggcctgcgcacgcaaccgctactgacactgctaattttgtggcggcttcgaccgtggttgctgaaaatgaattggatgattccgtgtctaagttttttgagtctgatgattctaggagtttggttgcttctctgcgtgtgatggatgctgaagttctgcctggtccgagtgctgggcgtaggcggcgaagggtggtggcgaagcggagagttagtgaggtgtcgcggagtgatgggcgtcattgtggtgaggtggaggatggtcggcttcgtgtggacggggctggcaaacgagaattgttgtcctcgccggctggggcgagtgtaggagagggggagctgcagaatctttttgagggtgaggagctgaggataatgctgtttaactatagggacatgggtatcatcccgaaggttgaaccaatgtaa

SEQ ID NO: 38997 - DNA, 432 bp, Zea mays
  Peptide Sequence Number=SeqID_82372
atggcctcgtcctcccgcacggccgacgtcgccgccagcagggtgctgtccgagaagggggcggccgcaatggcggagtgcgtcggcctgcttttcgggaagtggacggcgctgcagctggcggtgcagaaccagtggggcggccacgactcgcaggctaaggccgaccggctcgcctcctccgtcctctcctggttcacccgcgccgccgccgccagaggcgcgggcgcactcgacccggacgagctggaggatttgctgtacgtcaccatggacgagtccttcaacgccgacatagatgacgggggcgtcgaggagaccgcccccgcccccggaaatcacgcgcccgcctccgcgcgcccgcacgccggaaaccgcggaggctgcaccgcgaatgccgcgaaccgccaaagaaacgcccgcacaccgtaa

SEQ ID NO: 38998 - DNA, 972 bp, Zea mays
  Peptide Sequence Number=SeqID_82373
atggatgacgacgacgtgtctcccgacacccgcgacgtctacgtcgccaacgccaccgtatcctcctacttcgccgcctccgatgtcgcctccgtcgaccgtctcttcgcggaggtctccaccgacgtcgtcgcctggaccaccatggtcgccggccacgccagttccggcggcctaggccgggcaaggcacttcttcgacgccatgcccgagaggaacatcgtatcctggaacgcgatgctgcgcgcgtatgcccgcgccgggatgctcaccgaggcgcgggacctgttcgacgcaatgcctaccaggaacgccgccacctggagctgcatgatcagtggcctcgtgctgtcgggacgctgctgggaggcgctgcgtgatcaggggctcttcggtgacatggtccgcagcagcggcatcgtgccgaatgagcccgcgctggtgagcgtggtctcggcgtgcgcccagctgcggtcactggaacacggcgcgtgggtgcacgcgtacgacgaacaggagctgcagggggcgatgagtgttgtcctcgcctccgctatcgtcgacatgtacatgaaatgtggggggtatccacagtgccatcagggtgccttgtatttcgtcaagagcatgcccgtggagccacaccctggcttatggggcgcactagctagcgcctgcaagatgcatggcaaggttgagcttggtgaggaggttgccaagaagctcattgaactggagcctcgctatggcagccgatacatcctgctgtcaaacttgtatggctctgtgaatagatgggatgacatggcctctgtgcgtaagatcctcaaaaggagcaaggtgcccaaaggcactggcaatgcagtggttgggatgacatcgacatcctgggcattaagatttttgcaacggttggaactgcggccaatgagaattatgagatcgatgaagcctagaggagaatggggctga

SEQ ID NO: 38999 - DNA, 210 bp, Zea mays
  Peptide Sequence Number=SeqID_82374
atggcggtcaggcaagggatccctgcattggagcttcctgtaaactgtagcgggcaagatgatctaactgttggtgagtattataattcaatgatggacaatattgatcaagtgacaaacaaaagagtgatagctcttggagaaatagaaaaggacaagatcatggtcgccaaagcttacaacaagaaggtcaaggctaagtcattctag

SEQ ID NO: 39000 - DNA, 177 bp, Zea mays
  Peptide Sequence Number=SeqID_82375
atgggcaaaagcgacgatgagggcggcagcagcagtgacggtgacggcggcgaaggcgacgacgacggcggcaagggcagtgaaggcgacgacggcggcgacgatggcggcaagggcgacagtggcggcgtcggcagtggcagcggcaaggccagtggtaaagcgccactggtctaa

SEQ ID NO: 39001 - DNA, 486 bp, Zea mays
  Peptide Sequence Number=SeqID_82376
atgggcaagagtaacaaacgcaagcgtgagccgactcctccgtcggaggacttcagcgactcggaatactcggaggaggagttctcctccgagtccgagggatctccggctcccgtctctcccccggtgtcgtctgatgattcagacgactcccaggggattgtcgcggaagtctggacgtacatccgggccgtcgagcgctccgggctcgagggctcggatgagtctgagttctcctcggacgaggaggactcagacggcggcgaggacgaagatgacgacgacgacggcgacgacgacgacggtggcgacggctacggtgacggcagcgggcagcggcgggggcagcggcggcaagggcagcacccagaggcggcagcagcacgggcagcaccagaggcgggagcagcaagggcagcaccagggggcggcggcgacaagggcagcagcagcaaaggccagtggctaaacgccactggtctttag

SEQ ID NO: 39002 - DNA, 87 bp, Zea mays
  Peptide Sequence Number=SeqID_82377
atggggctgaacctttcggacattgtgaagacaattcccgagacctacgtgctcatgcccttcatcatctcacattccatcgcatga

SEQ ID NO: 39003 - DNA, 579 bp, Zea mays
  Peptide Sequence Number=SeqID_82378
atggcggcggcccggccccggcgtcccccgcccgcggcgtggctccccctcctcggccatggcgcgcccgccccggcccctcccatgcgtgtgcgcggcctcgcgtggcggcgctcggccatggcgcgcctgccccggcgtgttccccctgccccaaccccggcgagctcccctatgcggccatggcgcccgcccctgtcctcgcggcccggcgtggtggcgcggtgccctacatgcgcgcgcccccgacccctgcccctgcccggcgcggtgcgcccgcggcgtgcggcccctgcgcacgcgctcccgtctcgcccggcgtggtcgtgtcgccctcgctcggcgtggccgcagcctgctcgcccctgcacgaccttgagctcggccagcgcgttcggtcccggcgtggccccattgccgctcgtggcgcgcagcgcgacgtgtgcacagctcggccccgacgtgtgcgcggctcgttcgcggcacgttagcgcggctttgtgcgtgcgcgtgctcgcgtggtgcgcacggtgctttggcacggctcgccgtgccctcggcgcgctcgtctacccctag

SEQ ID NO: 39004 - DNA, 294 bp, Zea mays
  Peptide Sequence Number=SeqID_82379
atggtttattacccatgggctttttgccatactcagcactacaccaaccactatgacatgggcagcttccccatcaggaaccggacaactccaccaggcacacgcagtcaacagcaagtacaagccccataccacaagtcataccatctacaggggctcgacttcgcctcctcaccgtacacgaccaaccttgacactcctggcagcctctttgaggctacacataggggagtccacgacttcaaggaggcatgcaaacacttcacattctcacctccaccacgatattggtaa

SEQ ID NO: 39005 - DNA, 2181 bp, Zea mays
  Peptide Sequence Number=SeqID_82380
atgaagctctccatccatgatgattggacgcccaccgcaccgtcctcctcctccaccaccaccaccacggttttcaacgcacgtacggaaggcatcgccgacgaagttgctgccgcggaggttgaactggccatgcttccccctgcgccggttttcctctcctgtttgccctggggattcatggttctttcgctggccgatcgggttttccgcttcacggtttcctccagggatgttgggttccacatctacaactccagatgcattgttcgtccagaattcaaagctttcttcaacttgtggaactcgggtggaccaaactggaactatgaactcaaattattccttcaggaggagaatgccaattggtggtttgtctcgggcaggaaaaaaatctcattcgctgatgtggttaggcgcccgccattgtctggtgcgaatgctgtgcctgttcgtcgacatcttcgtccttcctgttcggctggaaaattgattgctccgaggacttctgttttcaatagattaggttccccctctggagctcggggtccgaggtttcctgccaactcttcgacctcgggggcctcgtcgcgtgatcttcatcgtgggattgctcctccggtgggttttcccaggcttaacgggtgcaggactggacacggatatcggggctgtgatgattgctccttttcaaattcaaaatcaatttcaaattcagctgttgggcgaccttggtctcgtaagttgcagtggcggcccattctgcgtaatgggcctcttaggcctgggcctggatttggaaggctggagttgtcgggctcggtttcctcagctttcctctgccttttttgtaaggccaggggacatttggaattgttctgcaaacgtaaaaaatcagaatttggtttccctctctcctcgttcccttccttcaaaagtaatcgccctttggaagggtcacctcgtctcttggacttcggtttttggttccgcccttcctctcggtccctgacgggtgggactcccccttcctttgcctccttcggtgagttcgccagggcggttttattaaaaaaatccgaacaggcgccagaaacgtccttggagctcgcgttgggtgtcacttcaacaaaaccccaacccgcttcttcgcccttggctctccggcgatcgtctgagaatctgtcaatggcgtaccggcgcgttgacccggagccgttcctcccaccaggattcagcgccgcggtggtccagcatcgtgggattatggtcagggatgtggtcagggagtatcttgttgagcatcatagggttggtgtccgtgccattcagcgctcacatttgggacaagtgatggatgaggaccccatccctccggcccccgaggatggacatcagctccccccggccttcttcgggctgggtcagcccttgcctccggcaggcccattcagcaagacccacaacccattttgccagaggagcagcacattcagcaggaagaactgcaactcagcaaccaacactctggcttgtcgtctgatagctcctttggtgctggtcagcttgcacccccccccgaatggtcattttgcggtgaatggtcatgcgctgattgggaatggaatggacatcaatgctgcccctttcaatgggcctcaggaggttgatggaccggcgcctcaggtggatcaggtccaggatttggaggtcgtggtccctcaggcccatgttgatgtgcctaacaataatcaccctcagaatttggagatgaatttcatgctccatcaggattggcagcctgaccccgtcttccagatgattgaagagagaaatagagctgtccagttctctaggctctgggccaaatactttgctccggctggatcgactgatcactcggtggacgtccctaagaagtgggctcctttttttctttcgaatcttcttcagccggagtctttcaattggtccaagacttttcttctgtcagatatccctccaaagttgcaggagcaaggaatgaattccatcccttttgtggtacctaaggattgtccagttgtcccctccctgggggatgtcacctctgggatctccaaggattccaatggttatggtgggccgtctccaatcattgtggagtcagggctcagaagaagcaaactgatagtcgcctag

SEQ ID NO: 39006 - DNA, 1464 bp, Zea mays
  Peptide Sequence Number=SeqID_82381
atggcgtcgtcgagggggcctctcgccgcgctgctactgctggccgcctgcgccgccttcttccctgccgccggagccgccggcacgccggacgggtcggaggagtggggctacgtggaagtccggcccaaggcgcacatgttctggtggctgtaccacagcccacagcgcgtggacaacggcaagacgccatggccgacagtgctgtggctacagggagggccgggcgcgtccggcgtcgggtacggcaacttcatggagatcgggccgctggacgagaagcttaagccccgcgcaaccacatggctcgccaaggccgacctcctcttcgtgccacaaggcaaggcaacgcaaccctatcgaatcgatgaacggcaatggcaggacaacccggttggcacggggttcagctacgtggacggcggcgacaagagcctgatggcgcacacggacgccgaggcggcgcgcgacctcgtcacgctgctctgcgcgctgtaccgcgacagcccgcggctccgtgccagcccgctctacatcgtcgccgagtcctacggcggcaagttcgcggtcaccacggcgctcgcggcgctcagggccgtcgaccagggccgcctcggcgtccacctcgccggcgtcgccctcggggatagctggatctcgccgctcgacttcgtgttgtcgtgggggccgttgctgtaccaggtgtcccgggtggacgagaagggcctgcagcagtgcaacagcgtggcggccaagatcaaggagcagctggagaaggggcagttcgcggacgccgaggcctcgtggtcggagctggagggcgtcgtcctcgccagctccaactccgtcaacttctacaactttctcaaggacgaggcgtcgggggacgccaccgccactgccacagcggcggtgtcgacactggcgtccttcaggcgccggggcggctactcgggctacctcagctccatggcggcgtcttcgtcgtcgtcagcaggcggcttcgacgggctcatgaacacggtcatcaagaagaagctcggcatcatcccaaaggatctcaagtggggagagcagtcagacgacgtgttcgatgctctggctggagacttcatgaagcccaggatacaggaggtggaccagctcctcaagctggcgtcaatgtcaccatctacagcggacagctggacttcattctgcgcgaccaaaggcaccatggactgggttcagaagctcaagtgggacgacctcaacagtttcctgagctctcctagaacgcccatctactgcgacaaggaggggcagtccggcacccaggccttcgtcaagtcctacaagaacctcaatttctactggatactcgaagccggacacatgattggtaccatgctcaaagcagatccaatgcggcataagtttttctatctccgtccaacaaagtacgacatttcagttttgttctga

SEQ ID NO: 39007 - DNA, 1080 bp, Zea mays
  Peptide Sequence Number=SeqID_82382
atggagagtcatgatctccgggcagaaagggaatcacggcttgtgggtggcaatgagattgatggttctggttatgactatggtgctggtaagtggtattctttccgtttggaaagggttgtcagcattgcaaccactgctcaggagaagatgaagccgtggaaggagacttccaggagttccaagactacgacgagttctaggcgtggatggctcgtcttagacacactgcacgaaagtccgtcatccccttcttaccctcccgtcttgctgagcgtccgcttcgccgtcccgtggcaggcgccccctgcaccaccactgggcgccccagcctctggagtagctgctggaggagacccagacgacggaggtggcgacgacagctcgagccacgacaccgacttctctgctgaccaggagccggaaggatgggttgctcgacccatcactcgcgacgctgctcgcgggtgtcacttccacgatgcgctcgacaccctgctacgtcgggcacttaaccggcgtacttggtctatcgagtatcgctatgtggtctaccagcatagtcgcggggtctacccggaccgctgggaggcgacctgcttggtgcgctgtccggagaacagtctccagggtgcggaggcctgctcagagcactattctatctctgagcgggactcagctgaggcggccatgcaagatgctgcatggcgtgcgctttcgcactactgctcgattctcggtggggtagctgacggtctcaacctgaagtattaccccctccgtccatctggcagcacaggaggcgtgattgtctcacctgttggtgaggacaatcctaggttgagcagcacagtcaacctagccgccgtgctaaacacggagctggaccatgcgctagacgagctgagtagggctcgtgctgagatcgccctgctgcgagctgagcacgcggagcgtcgtcacctggacgatggttcccccgctcccgtcgggactcagcacccataccgctcacctcggcgtggacgccagtcttatggcaatcccgactgcaagaccaagataaatctagaaccatag

SEQ ID NO: 39008 - DNA, 672 bp, Zea mays
  Peptide Sequence Number=SeqID_82383
atgtctctcagcttgcaagcagctattggttcgttagagtacttgcaagcagctattggttcgtttggcaggttaattctttgggaggaggatcgacataatgtcaccaggacattgcttcgtgtccgtgtcacatcccttgaagaagtccctcagttcattgtttttttggaggcagatggtttcgttggagattcttggacagtccactccattggtcccattcaggatgcacccctccagaatggccacattttagaggatggacctgtgatgccaggggatgggcttgctttcaatgttgccccttttaatgggccacaagaggttgatggcccagttattcagatggatcctcttcctgttaatgctcgccagccaccacaggagtggcaaccagatccagtgtttcagatgcacatggagaggaaaaggtctgctcagctatataggatttgggccaagtattttgctccagcagggaccccagacatttcagtgaagattccaaaaaatggtcacccttcttcctctcaaatttgcttcaacctgaagccttcaattggtcaaagtccttcctgtcatcagaaattcctccaatattgctggagtcggaacttgagtccttatcttttgccattcctaagggatgcccgaaagataaattcctag

SEQ ID NO: 39009 - DNA, 909 bp, Zea mays
  Peptide Sequence Number=SeqID_82384
atggaggacgtgagtcaaatgaccccaaccattgtaattgggaaaattgtggcatttgagatgtcacgaaaaatgggtcaagaagaggagccaacttcttcaaagccatatgccttggcatgtgatgaacacaaaaagatgaaaggcaagaagaaggctccaagatcaagtgaagaagaggaagaagacgaagaagaagaagaagaagaagaagaagatgatgatgatgaagatgatcaagcctcaacatcatcctctgaggacgaagaaatggtcaaggatcttctctttaacattgacaggaaaaagcacagaaagagaggatgcttcgcatgtggggagaagggccacttccggggtaattgcccaaattgggccgaacccaagaagaggaggagcaaaggcaaggcgcttataagtgtgaaaacttgggatgattcttcatgcgaggatgatcctccaaggactcacagccaccactcttcatcacgctcttcatggtcatcacgcaaatgccttatggctaagttagctagatctcaaaatgtcattgataatttgctagagaaaatggaaattcttagcattcacaataatgagctaactactaagctaggaaacattggtagaaccccaggagcatctttagttaaagttcctgaaattattaagaaagatacttctacttctttcttagatttaattgatgattctaaccgttgcaaccaagttgttgtaaagaatgttgttataataacatgtttcgatgaggttgctttggaaaatgagttgttgaagcaagaggtggctcgccttggtaaagccttgtatgacaagaaaggcaaagccaatcaaatccaacattctcaggataaaatatcaagcagaaaccatgagatggagagatag

SEQ ID NO: 39010 - DNA, 696 bp, Zea mays
  Peptide Sequence Number=SeqID_82385
atggcgtcgtctctgctcggggtcacctttcctccctctcacttcctcttcttcattcaggggttcaccaagtcgctggccatgacggtgctctccgagatcggggacaagaccttcttccccgccgcggctgccgccacgctgcggagccaacgctccccacagcacccgcggtcctggaaggtgaggagagcactgcccttcttccaacgagtttcttgtagcgttgatcgtgattggaagacgattgaagcatgtgtcggctcaaagactgttatacagtttctcaaactattttattacaaggacaacctacctagcgacagcaaggtgcaacaaataactgttcaggtagcacagagagtccgtctggtacttggccaacttctgaagcagttgagcaagaaattatggttccatcactctgtgtgttgtgatggagctgatgcgagggctgagaaatcagctcattcagcttataagtgggttgggtacataagacctgggtccaatgagcttgggattgtcgcacaacttgtttttggcttagtgggttcagtcccgagaaggctaacgttccggagaaagaaatcttatgtctataattcttcaagtctacatatgactgcatcattcttcagccttctagactccttccacttctgcccctcggatacaagtttgatcaccatctaa

SEQ ID NO: 39011 - DNA, 504 bp, Zea mays
  Peptide Sequence Number=SeqID_82386
atgtcctctatcgacagcgcactggaagaggctattcttgaggatcttttgcttgagcttcctgagatcagggtcatcgacgtccgtgtagagtgcccggatgttgtggcctctactggtcctctggctaggcaagagtgtgctctagcccccgaggatgctctggcctccgagggtcctgggaccggctccctctctactgcttccatggatgttcacatggaatcaccattgctttggcctaagtacgctgcaatgacaagttccgatctgctcgttggtttggctagctcggccaccttagaggtcagtggtcatagcactgaacacccaatgggtgctcctgaagttgagatcccaatgggtgctgcacttagtttagattaccccatatctttgatgtctggcactgatcacgatgcggcttctgtcgatgtcccttcttctgggagtgcctcaagacctctagccttcggattcccctctttttggtcccacctttag

SEQ ID NO: 39012 - DNA, 483 bp, Zea mays
  Peptide Sequence Number=SeqID_82387
atggggcgcgggggggttttacagctcggtgacaggctttgctccctccgcggtggcgaggtcactagaagcgaggtagacgcggtcaccgagggtctagggtcaccggcttccggctgcaagaacgggataggaaacgggagaacgacgaagggaggtgctctgggtgggtcgggcaacttcggcgaggaatcacagccgaggagagggggtttatggcgcgctaaggcctggactagttacgatagggacgatgctcagggtggcttggcacgacttctggcggcgtggccacagaactccggcgagtgcgagcggcgagagcagagcgcgagagagggtgagcttgcacgaaatgaggcaggggagcgagtgcgggtgcgggcggtgctcaaaagggatctagggtgcatgggaaggtggtcggggatcttggcgtgcgtgcgtgctggtccacgacggttcacggggaaggcagaatag

SEQ ID NO: 39013 - DNA, 993 bp, Zea mays
  Peptide Sequence Number=SeqID_82388
atgagggtgggctcggtttatgtggctcgctctaccgagggtggtttgccccatagggaggagtgtgatgaggatgaggataatgctggtttctattgtgattatgattatggttatggtttctggtattctttccgtttggaaaggatggctcgtcttagacacacagcacggaagtcagtcattcctttcttgccttctcgtctcgcggagcgtccgctttgccgtccggttgcaccaccgcctgcacaaggaccaggagcgtcggtgactggagttggagcagcaaggctcttcttcctcgcctcagtaggaggtagagtctgtgaggcgctgctctcctgtgcccccgctggaggcaccccctgcaccaccactggcatcccggccgctgaagtagctgttggaggagaccccgatgacggaggcggcgacgacagcagcttgagccacaacaccgacctctcagaggagcaggagccagagggatgggttgctcgacccatcactcgtgacgccgctcatgggtgtcacttccacaatgcgctggacaccttgctacgccaggcactcgaccgacacacttggtccatcgagtatcgttgtgttgtcttccagcacagtcatggggcttacccggaccgctgggaggcgacttgtttggttcgccgtccagaggatagtctccggggcgtggagaaacagtgccaagaaaagaagaaaggagatggagaagagttggctctgtacagccaaaaccagctcgagcctggcacaccggactgtccggtggtgcaccagacagtgtccggtgcccgaggctgctcgacggtgaactggctgctctcggacatcgggcgggcgacgtggctaaaattcaccggactgtccggtgagtcttcgacgcctgcgcccgaggtcttcgacgacgaactcgtcgctctcgggaattcaccgaggacaccaactataatttaccggactgtccggtga

SEQ ID NO: 39014 - DNA, 495 bp, Zea mays
  Peptide Sequence Number=SeqID_82389
atgcccatgcaccaccacagggcatcccagctgctggaggagaccatgacggagatgaagacgacaatgccggtggaagttcgagctatggcacggagctctccgaggagcaggagcccgagggatggaccactagacccatcacgcgcgacgccgctcgcggctgacggcctcgacctgaagtactaccctcgccgttcggcctacagtgctggaggtgtgattgtctcgcccattggtgagggcaatcccaagctaaacaacatggtcaacctggtcgccgagctcaacaccgagctggaccacgcccttgacgagttgggcaagattcgggcggaggttgtggaattgcgtactgagcgcgcagcgtgccactatctggatggtggttctctcgctcctatcgggattcaacaaccttaccgctcatcgccccgtggtcgctttgattacggcacccctgactacaggacccagatagatttggagccatag

SEQ ID NO: 39015 - DNA, 237 bp, Zea mays
  Peptide Sequence Number=SeqID_82390
atgggatccaagccagatgtgaagatccaccaccgcgacaagagtcccgcggcagggatcctcaacctctacctcaacagaatactcaaggaggaagccatagaggagacaagtctacgatgcaagacgccgtcgtcatcgcagccttggataacaacaacgaagcgttcacgccgtgccagcttgggccttgccaccttgggcagttgggctgtgcctgtgacaagtgtgaactga

SEQ ID NO: 39016 - DNA, 846 bp, Zea mays
  Peptide Sequence Number=SeqID_82391
atgtcgtcgattccgccgccggagggcgggctgaaggccaccattgtcgttgtcgcgcggcggaggaaggagtaccatgtcgtagctgccgtcgagggacatgaactcgagactcccgaaacggagcatcgtcccgggctggataggttgctggagactacccatctggagcttgacgggaagctgttcgtcaacacgcagcaggcccctacctggcgcgccaactgtcggcgtttcgaccccgggggggtaatgatgtaccccctgcgacgtggtcggtccgagcccaaggtcgggcgaggcggagactcctccgaggtcggggctgagtccgagccctggggtcgggcgaggcggagaccttcgtccgaggtcgaggttgagttcgagccctggggtcgggcgaggcagagaccatcgtccgaggtcgaggttgagtccgagccctggggtcgggcgaggcggagaccgtcgtccgaggtcgaggttgagtccgagccctggggtcgggcgaggcggagcttcctatggcgcctagggccggacttggcggctgtgagcctcaccctggcgggtggcacagcagtcggagcagcgcaggcggcgctgttttcctgtcaggcgatccttgcattgaatgctcctgcgatccagtcggctggcgaggcgatcttggccaaggttgcttctccgcgaagcctgtccgagctgggcctcgggcgagtcgaaggagtcttgggggtacccctaattatggtccccaacatctgggctattatccaaaaggcacctatcacgtcggaacagctgttccgggaggcggatatctacatcaccaccgactaa

SEQ ID NO: 39017 - DNA, 684 bp, Zea mays
  Peptide Sequence Number=SeqID_82392
atgatcagggactccctggttttatgggagggccctaaggtgatggctcaatctggtttaggtgtgagcagaagccactcaagaactgtatgggcagtcactcaatctggactcgaacggttcaaccctagggttatgatggctggggagcccccggaggataaggagggagaatgttttgtccagtttggacatggcggtggcctgactccttccggtataaccgttaagcctcctgggactagtaattgtatcacatttgagtcccagaggattggggtgcttcaaggaacagtgaacaatgttcactgcgcgcgcagaagtcagagtaggcgtcagaaggcgcaccggacagtgaacaatgattgtccggtgcaccaccggtctgtccggtggaccagctgtcataagctccaatggtcaaaacccaacggccgagtgacgtggctggcgcaccggacagtgtccggtggtgcaccggactgtccggtgcgccatgcgacagcagcctccaccaacggctcctttggtggttggggctataaatacccccaaccacccaccattcatggtatccaagttttcagccttcaaaccccatacaagagctatagcattcaatacaagacacaaacaaagagatcaaatcctctcccaagtccggaatcactccaaccaaattag

SEQ ID NO: 39018 - DNA, 150 bp, Zea mays
  Peptide Sequence Number=SeqID_82393
atgacccagtcgccgcgtgcggggagggctggtggaagcaccgcgaggacgctgatgaggcgtgtgcggcggccgactgagagggcacagaggcgcacacggcggcagaggagaggagatcccgacgaagccggtccgttcctaacttaa

SEQ ID NO: 39019 - DNA, 1617 bp, Zea mays
  Peptide Sequence Number=SeqID_82394
atgggggccgaggtggcggccgccggccgcagcttgccggggttcttggggaggaagaaccggtacgcgcgcgtggacgacgtgctcccgcaggagccggaggacggcggtggcgtccgtgttcgcggcgtcggcggcagctgccggcgatacgtctttgcttgctccgtcttcgcgtctctcaaccatgtcctgctcggctacgatgtgggtgtgatgagcggctgcattatcttcattcagaaggacctccacatcaccgaggtgcagcaagaagtgctggtcggatgcctcggcttcatctccctcctcggcagccttgcggccggccggacctcggacgctatcggccgcagatggaccatcggcctagccgctgccgtgttccagggcggcgcggtgatcatggcgctcgcgccgtcgtttggcctgctcatggcggggcggctgctggccggcatcgggatcgggataggcatcatggtggcgcccgtgtacatctcggagatctccccggagacgctgcggggctccctggcgtccctcccggagatcttcatcagcttcggcatcctcatcgggtacgtctccaacctcgccttcgcgggcctgcccgacaacatcaactggcgcgtcatgctcgccgccggcatcctcccgtccatctccattgcgttcgtgctgctggtcatcccggagtcgccgcggtggctggtcatgcagggccaggccggcgacgcgcgcgcggtgcttgtgaaggtctcggacagcgtggaggaggcggaggagaggctcgccgagatcgaggaggccgcgcgcgccactgccgcttccagcaacggcaaggaggcgtggcgggagctgctgcggccgtcgcctgtgatccgacggatgctggtgaccgggctgggcgtccagttcttccagcaggccaccggcatcgacgcgctggtgtactacagcccgaccatattccgcgactccggcatcacgacggagagccagctcctgggcgccaccgtcgcggtgggcgtggtgaagacggtgttcatcgtgatcgccatcgtcctcgtcgaccgcgtcggccggaagccgctgctgtacgtcagcacggccggaatcacggtgtgcctcgccgtgctggccgcgtcgctgtccgcactcgcgcgcggcgcgctgccgggcggcgtcgccgtcgggctcgccatcctcacggtgtgcggcttcgtggccttcttctcggtggggatcggtcccatcaacatggtgctgagctcggagatctacccgctgcggctgcgcgcgcaggccgtggccgccggcttcgcgctcaaccgcatggccagcggcgccgtggccatgtcgttcctctccatctgccgcgccgtgaccgtcgcgggcgcgttcgccgcgttcgcggccgtctcggcgctgtcggtggcgttcgtgcacctctgcgtgcccgagacgagcggcaagacgctggaggagatcgagtcgctgttcggtggcggcggtgtgagcgtgacgcacggtggctccggcgaagtggagctcggcgacgccgagcggcttgagcacaagaggctagtgtcgcacgggcacgcgtcgagctga

SEQ ID NO: 39020 - DNA, 1647 bp, Zea mays
  Peptide Sequence Number=SeqID_82395
atgctcccgagcgccgagctgtcgtcgtccaacggcggcggcgccagtggcctggcagccctgccggtcttcttgggcaggaagaacaagtacgtgcgcatggacgacgtgctcccttcggagcatgaaggcgacgacggcgggggcgggggcgggggcggcggcgccgtccatgtccgtggccgccaaagcagcaggagatacgtcttcgcctgctccgtcttcgcctccctcaactccgtgctgctcggttacgatgtcggtgtgatgagcggttgcatcctgttcattcagagggaccttcacatcaacgaggtgcagcaggaggtcctggtgggctgcctcagcttcatctccctcctcggcagcctcaccggcgggaggacatcggacgccgtggggcggaagtggaccatcggcctcgccgccgtcgtctttcaggccggcgcggccgtcatgacgctcgccccgtccttccaggtcctcatggtgggccgcctgctggccggcgtcggcatcgggttcggcgtcatgatcgcgccggtgtacatcgccgagatatcccccgcggcgtccaggggatcgttcacgtccttcccggagatcttcatcaacctcggcatcctcctcgggtacatctccaactacgctttctcggggctccccgaccacatcaactggcgcgtcatgctcgccgtcggcatcctgccgtccgtgtccatcgctttcgcgctgctcgtgatcccggagtcgccgcggtggctggtcatgcagggcagggccgacgaggcgcgcgccgtgctcctcagggtcaccgacaccgaggacgaggctaaggagaggctcgccgagatcgaggctgctgctgcggccgccacgacgggcgccgccggcaagcacggggacaggaacaggacggtgtggcaggagctgtcgaggccgtccccggtgatcgcccggatgctcgtcaccggagtaggcatccagtgcttccagcagatcacgggcatcgacgcgctggtgtactacagcccgaccatattccgggacgctgggatcgccaccgagcgccagctcctcgccgccacggtggccgtcgggttcttcaagacggcgttcatcgcgctggccatcgtgctgatcgaccgcgtcggccggaagccgctgttgtacgtcagcacggtcggcatgaccggctgcctggcggcgctgtccgccgcgctcttcctgcaggcgcgcgggtcggtgtcccgcggcgccggcgtcggcgtcgccatcctgacggtgtgcggcgacgtggccttcttctccgtggggatagggcccatatgctgggtggtgagctcggagatcttcccgcttcggctacgctcgcaggccgcggcgctgggggcggtggcgaacagggtgaccagcggcgcggtggccatgtcgttcctgtccgtctgccgcgccatctccgtctcgggcgcgttcgccgccttcgcggccatttcggccctctcggtgctctttgtgcacaggtttgtgccggagaccagcggcaagacgctggagcagatcgagtctctgttcggaggcggcggcgatggggacgaacttcgggagctggagctcggcgatgtggagcagttggtgcacaagtga

SEQ ID NO: 39021 - DNA, 231 bp, Zea mays
  Peptide Sequence Number=SeqID_82396
atgccgttgccggccaacggcggcggcgaaaatggagctgggcctggttcggcattgggccgtgggccgtgggcaataagggcctgtatggattgggggaatgcatgttacgctcttgcgaccagtcgtctgttggcgattttgctagccatggacattcagtctggaacacggattaaaaaaaccgtgaaaactggtccggctaaccattttccagacggtgttttttaa

SEQ ID NO: 39022 - DNA, 864 bp, Zea mays
  Peptide Sequence Number=SeqID_82397
tccgagcctccggttcgggcgaggcgaagtcgtcgcagagtcaggcggagtcgatcctgggtcgcgagcggagtcgtcgtctccgggccgagccgagtcgagcctgggtcagcggagcggagttcgccgtcttccggtcttagccgagtccgagccctggggtcgggcggagcggagttcgccgtcttccgggtcttagcccgagtccgagccctggggtcgggcggagcggagttcgccgtctttcgggtcttagcccgagtccgagccctggggtcgggcggagcggagttcgccgtcttccgggtcttagcccgagtccgagccctggggtcgggcggagcggagttcgccgtcttccgggtcttagcccgagtccgagccctggggtcgggcggagcggagttcgccgtcttccgggtcttagcccgagtccgagccctggggtcgggcggagcggagttcgccgtcttccgggtcttagcccgagtccgagccctggggtcgggcggagcggagttcgccgtcttccgggtcttagcccgagtccgagccctggggtcgggcggagcggagttccctatggcgcccctggcgaggcctgactgcctgtcagactcactctatcgagcggcactgcagtcggagtggcgcaggcggcgctgtccttctgtcagaccgtggtctggtgcagcggtagagcctaccgaccagaaggtctcaggtttgagtcctagcctctccatagtatgcagttgcctatgtcaaactcttgttgtctttgaactctcgcccacagcaaaattacagcatatgcagttcattttatacgccaccacgctcaccaaacacttcctgccgtaa

SEQ ID NO: 39023 - DNA, 794 bp, Zea mays
  Peptide Sequence Number=SeqID_82398
atgcagaccggctccgagcagaagaagccgaaccgccgcgcgtggtgcgcacaaccgcccagcggttacaagcgaccccccacttttgcccagaccaacgggcgggaggggcaggcggacgggagcagcagtcacgtcgtcagccaggctcacatcccatccagggacagcaagagagcctcctcccacggcgtgaagacggagaagcggacgacgcttcgccttcgccgtaataaccgcgccaaaaaagggaccgggaaaggggataccccgaaaaggatccttccctgtgaaggaaccgggctccgagcccccctactgatcagaggttcgaaggctggccctccgaagggttcaacagtcgcctcagatcgcgtgggcccgacacccactactgaggttcgaaggctggcccccgaagggttcacagtcgcctcagacgccgagcgagggatgaccagggccctggtatcagccgacggtctccacctcgcccgacccaggggctcggactcgacctcggcctcggaagacagactcgacctcgacctcggaggagtctcgacctcgcccaacccagggcccggaccgaccacgttacaggaggcgccatcattaccctaccccaaggtaactccaggggcggggaacaagaccggagtcccatctggctcgccccggcccgacagctgtccttacggccagttccaacgatggtccgaccagcacaacagcaccggaacccaaggccataacctctcgaaggagcacgccaccactccgaggggccgggg

SEQ ID NO: 39024 - DNA, 636 bp, Zea mays
  Peptide Sequence Number=SeqID_82399
atggcgcctcctgttgacgtggccggtccgcgccctaggttgggcgatgtggaggctcctccgaggtcgaggtcgagtctgtcttccgtggccaaggtcgagtccgagcccctgggtcaggcgaggcggagaccgtcggctgagaccagggctgagttcgagccctggggtcgggcgaagcggagttcgtcgtctttcggggctgagcccaagtccgagccctgggtcgggcggagcggacccgagtccgagccctgggtcgggcggagtggagttcgccgtcttccggggcttagcccgagtccgagccctgggtcgggcggagcggagttcgccgtcttccggggtttagcccgaatccgagccctgggtcgggcgaagcggagtttcctatggtgcctgaggccgggcctagctgcctgtcagcctcgctctgtcgagtggcacaacagtcggaacggcgcaggcggcactgtccttctgtcaggccggtcagtggagcggcaaagtgactgcggtcacttcggctctgtcgactggaggacgtgcgtcaggataaagctttgtgctgatgggggttaccagctaaaaattaggagtcttgagggtacccctaattatggtccccgacagtag

SEQ ID NO: 39025 - DNA, 315 bp, Zea mays
  Peptide Sequence Number=SeqID_82400
atggtgagagaacgaagaacacaaacaaacacaatgagcaagaacacaagagacacaagatttatcccgaggttcggtcacaccaccaaggtgccctacttcctcgttgaggcgcccacaaagagccgggtctctttcaaccctaatcctccctttgccgaccacaaaggtcaagcccacacaataatctttgctcaaacgagcgggtcagactgtgacagaggggaacagtgcagaaacccggttgaaccgattttaggtccggttgaaccggtttttgaaactgaagaacaagttttgataaaactgagctga

SEQ ID NO: 39026 - DNA, 1104 bp, Zea mays
  Peptide Sequence Number=SeqID_82401
atgtcttcgcattcccttatgcatcgtgtctttccaccttccgagcccccggatgggggacacccgcagtccttccgcctcgtcgttggaggaacgcaactccgtgggagttggtacctttcagccatcgttcggcttcaaggattttcatcatgcagcccggctgcatcccctcgctggtggtcacccaagacggtgacctccagttcgatggcgagggaaagcaagtcgggctgcggcctctgcccctccctcagcctcaaggattttcatcatcagtgctggggaggggactgccgcgtgcctggctctcggacccgagtggctttggagccgctcccggcgccgccttccgccacggcagctggaagaggttcttccgtcgacgagatagccggggccgcccacagaccgacctccaactctacggccttctgcccgtccttgcctcacgagtttgggcacgggcgagggcctcatggcagcagcatccgccctgaggtcatcgctgctgctgttcggctccccggggcagaagtcgtcgtcgccgccgctgttggagcaggcgacggcgggccgttcgtcggtcttccgttgctccgcatgcccccccactcgagcggggttgattccctcggctcggtcggccttgctgtccgaggcttctcttgcttagttaaaggaacccctcggccgctcttcgatgagccgaagccaggggtagcggtgtcagcacggacagaggcagagttggctcgaaaagaagacatggtcggccgaagcctggccgggtcgtccgttagcgggaccgacgccggagttgatctgccgaggcctcgagccgggctgatgtcttcgggggacaactggccgaggcctcggggtgaccagccgagccgcctgctcgagccggattcttgggggagaccctgggggcgatggcctgggcgagatgatgacgtcgtccttcagagtggagatcctcggacccctcggccgtccgaggctaggtcggacctcgccgaaggtgtagtcgacgccgagggtgctgctgctccctttagccgtcaagatatgagcctgcaggatcggattatcttgtag

SEQ ID NO: 39027 - DNA, 852 bp, Zea mays
  Peptide Sequence Number=SeqID_82402
atggctgaaaggtaccaactcccacggagttgcgttcctccaacgacgaggcggaaggactgcgggtgtcccccatccgggggctcggaaggtggaaagacacgatgcataagggaatgcgaagacatggtcgcctttcaagggggtcaccctccttttaaaggcgactctccctacttgcgtccacagccgtcgtgggccgagtcttctccaacacgctccaaggtcctccccctacgacgcgggggctgggtcccacacgtcatgcaaactggcccagagcagaagaagccaaaccgccacgcgcggtgcatgcaaccgcccagcggttacgagcattcctccgcttttcacccagaccagcgggtgaaagggcgggcagccatgcatgcggcatgcaaccgttccaagtgggcgcacccctccgacttccaacgcacccagcatgggggcccacgcccacgcgtcacgcaaccggcgcgccggttgcaacgtgcgagcaactgcaccgccgctcacaccactgccacgcctcctcgactgcggaaccagtaccacgactcgaggcaaccctgcgtacgacccagcagtgccagccaggcgcgacggaaacaggctccgagcctccctactgatcaggggttcgaaggctggcccctcggaggggttcacagccgcctcagagcacgtgggctccacacccactactggtcagaggttcaaaggccggcccctcggaagggttcaacggctgcctcaggccactcgggctccgcgcccactactgatcaggggttcgtaggttggccctcgaagggttcacagccgcctcagacacagagcgagggatga

SEQ ID NO: 39028 - DNA, 453 bp, Zea mays
  Peptide Sequence Number=SeqID_82403
atggaggccatcaccatcctctccagggaggaggcagaggcaggtgatactgcgccgggcacggtgtcgcccacggtctctgacctcttgcacgccatccccgataccctcgaagatgcgttgagctcgggggcgaggatcgccgaggaggccggtcccttgaagccacccagggggtcattcgaggagatcattatccagcctcctgactcagggggtagtggtgacctcgttcgcgccgcgctagacccctcgatacggggagggccgaccctaacgtggatgtccacctggggtgactcgtacttcgtcctcgatgacaccgaggagcgagagatgtgggaggagctaagggcggtgacccaggaggttataacgagatcaatggaaaagtccatcttcgtttgccgtgaacgggacatttcggccacgctactttgttccaaagagtag

SEQ ID NO: 39029 - DNA, 267 bp, Zea mays
  Peptide Sequence Number=SeqID_82404
atgactgccacgataacctacatcgatgactcttccctctctccgaccgcctcccgcgcgatctcaaattcactggccaccgctcaagagtccctgaatcgctcagttcccccaaatctattttccaccaccgtgaacaagctcaccgcggccagtgcaattcaggtcttagccaagttagagccccggtcattgagtgtcgtggccggtacaggtttgccggagcttgattcttcaccgctcgccatcgaggatctcaagttgtaa

SEQ ID NO: 39030 - DNA, 796 bp, Zea mays
  Peptide Sequence Number=SeqID_82405
ccgttcatcgccgaaccgacggcggcaaagttctccccccaaccccgacggtgagcgcggcggcgcagagctatggcacggcggcgccattgccgcccggtctgatcacatgcaatcgagccctaaacttcgattcaatgggtatacacgtggaggaggacatggcaaactcggggtaggcatcgttacctcaattagcgcgacgcagaaatctacccatggagcgcggcggagcccagagcttcggcgagaaatcgtcgtccacccagtggttatctccctctatggaggtagcagacagcaccatggaggcacggcgaagttccccgcccaggcgcgccaatctcggcgcggcgtctacgttgattcgatagcggcggcggagacgctcgtctgcaacctcactgcgtactctacggccgagacgaggggagctggggagaaaaggagggcgaggagagggtcaaggggcttgggtccgcatttgaagccggcgcgaggtgggttcgtgcgtcaacggtcccggtcgactcgcgcggagtttgttgcgcgcgtgatttcagcgggaagggaaggacctgacagcgcggtcccgcgtgtcattgatggagcgaaggaggcggccgcagttcggaaccccgaagcgattgatgatgtccgtgaagaatgctaccgcttgctcggatttgatgttggcgaggggtcggacctcgatccacttggagaatttgtcgatggcgaccatcagcatgaaggtttttgcttggcaggtgagatgtcgggcctcggcctttga

SEQ ID NO: 39031 - DNA, 426 bp, Zea mays
  Peptide Sequence Number=SeqID_82406
atgaagaaaatagacgaggaggtccaacgacaaaaagatcagatgctcaaggtggcggataaatggttcctctcgcacttcagggtagattgccaccagaagaccgtccaagagagggagataaacgccgagtacatgtcagccgtgctgcaacagctccttacaataggtgatgccagcggcggcagccagttcgcccgccagtggaggctcgcccgcagagtgtcaatggcacgcctgctcaccctcgtagcggcgctcgacgggcccgcatgccatcagatgcagagactaaagcacggcgatcacccatggcttcctgaagaagcagcgcatatagaagtgtcagcggtggcgttgcttttctgcccacacgccaagctcgaagccgacggtgctcgttgtgccctcacgggccgcaactag

SEQ ID NO: 39032 - DNA, 177 bp, Zea mays
  Peptide Sequence Number=SeqID_82407
atgggtgatcgccgtgctttagtctctgcatctgatggcatgcgggcccgtcgagcgccgctacgaggtaaatcgcagattcacttgaaatttcttaccggtgtttatgatttagtgaacgcaagcgaagcctgtcgcgtaggacagttcggcaaagccagagacctgccggcttga

SEQ ID NO: 39033 - DNA, 189 bp, Zea mays
  Peptide Sequence Number=SeqID_82408
atgggctcggtgtatgcggctcgctctgccaaggttggtttgccccttggggaggagtgcggtggcaatgagatttatggttttggttatgactatggtactggttgtccgcattgcaaccactactcaggagaagatgaagccatggaaggagaccaccaggagttccaagattacgatgagttctag

SEQ ID NO: 39034 - DNA, 258 bp, Zea mays
  Peptide Sequence Number=SeqID_82409
atgacctcagggcggacgctgctgcgacgagctcctcgcccacgcccccactcgaggggcgaggacaagcagaaggccgtagagtcggaggtcagtccgcgtgtggcaccgactatcccgtcggcagagaaacctcttctagctgcctcggtgggaggtggcaccagaagtagcgccggagccgctcaggccggggagccaggcacgcggcagttgccagcgccacgagcggcgaacgcccttccccccgatcactga

SEQ ID NO: 39035 - DNA, 735 bp, Zea mays
  Peptide Sequence Number=SeqID_82410
atgaagttgcgttcccccaacgacgataaggcggaagaaccgcgggcgccccccatctgggggctcggaaggtggaaagacgcgatgcatgaggggagcgcaaagacatggttgcctttcaagggggtcaccctccttttaaaggcaactctccccacttgcgtcctcagccgtcgtgggctaagtcttctccaacacgctccaaggtcctcccgctatgacacgggggctgggtcccacgtgtcatacaagctggcccagggcagacaaggccaaaccgccgcgcacggtgcgcgcaactgcctagcgggccagcgggtgaaagggcagaccgtcatgcaggcggcatgcaaacgcacccaggggacgcaccctttcgacttcgacgcgtccagcatggaggcccaggcccacacgtcatggatcgggaaaagggatactccgaaagggatccttctccgcgaaggaagcgggccccgagcccccctactgatcagaggttcgaaggctggcccctcggaagggttcaacagccgccacagagcactcgggctccgcgcccactactggtcagaggttcgaaggccggcccctcggaagggttcaatggccgcctcaggccactcgggctccgcgcccactactgatcaggggttcgtaggctggcccccgaagggttcgacagccgcctcagacgcagagcgagggatgaccctgggtacgttcgatacataa

SEQ ID NO: 39036 - DNA, 609 bp, Zea mays
  Peptide Sequence Number=SeqID_82411
atgaccgtaacgccctgccccgagcaggcaagctcgggaaagagcgagcgaagaaaagaaagggctggcggcggtgttcggaagactggcagttctgcgctcgccgatctctacgccgcccttctgcaaccatttctccctcggttccttaagtatgaagatttactccctgctaaggatctcaccgaaaatctcagctctctgttcctattcctcctctcggttccagtcacggtttggatcgaatccttcgattcttggtgttctggtgttaatcctgctggtggaagaaggcgccacaaccagggaaagatcgctattgcagggaagctgccatcgttgttcttgctggtggacattgacgggacctcggcgtgcgtctctgaagaatcgcggggatgcaaggaagctacctcaaccaccaactcgacaaacagacgaacgatgctccaccgatttctcgccgtctctcctcctccaccgtgggctgcgccacgctgtgggccaggtgcctcccgcgtcgtgatcaccaggcgtcgatttgttgggtcaccggcgatggcgctgctatgcccactctgggcgtcaccgcggcccggcatcgggtga

SEQ ID NO: 39037 - DNA, 660 bp, Zea mays
  Peptide Sequence Number=SeqID_82412
atgcggaggctgttgggactggcgctctgtgcatcggccgccacgcgatctaggcctgatatgctgttcgggaagcctgggaagagtggtctcatggctctcaacttggatttcgatcaagtcaaggagtttatcaaggagcggttggggattgagagaggttgggcaacattatcagcttctcagagtgttggagggattgaaatagaggagaactgggacaaggttaagactatttttcttcctactgagaagccaacgacgtctgattcatgtgctcctttgattgcaacccatccattggaggcacacagaaaatttggtgacttcattaaaggagtatttgttgtcttccacggatttgggaaatatttctcatttcttgagatgaatccgttcgccatggtcaacggggagccatatcctctggacatcagaggagaactagatgacacaacaaccttcaaaaacttcaagaagtggggaggtatagaattccctctaccttttggaagagtactcagccctacagaaagtttcatccatgaactagatgagaagattgagataatcttgggaaagagtgacaaattcgacgagttgatggttgctgccaccgacgagaggggagaagttgaagatggtgaagagcaggcttga

SEQ ID NO: 39038 - DNA, 939 bp, Zea mays
  Peptide Sequence Number=SeqID_82413
atggctcgtcttagatacactgcacggaagtctgtcatccccttcttaccctctcgtctcgcggagtgtccgcttcgttgtccagtgaccggtcagtccagccacttggagaggctacaccaccgcatgcacgaggagcaggagcatcaacgactggagctggagcaacaaggctcttctttctcgctccagcaggagatagagtctgtgaggagctgctccctgtgcttccgctggaggcgcccccctgcaccaccactgagtgccctagccgctggagtagctgctggaggagacccagacgacggaggtggcgacagcagctcgagcttcagcatcgacctttccgccgaccaggagctggaaggatgggtcgctcgacccatcactcgtgacgccgctcgcgggtgtcacttccacgacgcgcttgacaccctgctacgccaggcactcgaccggcatacttggtccatcgagtatcactgtgtgatctgctcagagcactattccatctctgagcgggactcagctgaggcggccatgcaagatgccgcacggcgtgtgctttcgcactactgctcagtgctcgacgggatagccgatggtctcaacctgaagtattacccccgccgtccatctggcagcacaagaggcgtgattgtctcacctgttggtgaggacaatccttggttgagcagcacaatcaacctatccatcgtgctaaacatagagttggaccatgcattagacgagctgagtagggctcgtgccgagatcgcccagctctgggctgagcgtgcggagaatcgtcacctggaggatggctcccccgctcccgtcgggactcagcacccaatgttccttatacagactcaggcagttcaagccatcggtcagactctggccaccattcagcaacagcagcagccaccaccttag

SEQ ID NO: 39039 - DNA, 372 bp, Zea mays
  Peptide Sequence Number=SeqID_82414
atggagagtcatgatctccgggcagaaagggaatcacggcttgtgggtggtgatgagaatgttggttttggtattggctatggtaatgctagtccactacagccaaataggacactagctgagtatgttgatgtgtactcacccttgctctacacaccaaacccccctccccaggttgtccccgctgcaaccactgctcaggagaaggtgaagccgtggaaggagactttcaggagttccaagattacgtcgagttctaggcgtgggttagcggcaacccccagtcggctgcctgtgaaggccgcgtgtatctacgtttcttttccacactttgattattgtaaagactatgtggatgtctcagacatatga

SEQ ID NO: 39040 - DNA, 174 bp, Zea mays
  Peptide Sequence Number=SeqID_82415
atggagagtcatgatctccgggcagaaagggaatcacggcttatgggtggtgatgagaatgttggttttggtattgactatggtaatggttgtccccgttgcaaccactgctcaggagaagatgaagccgtggaaggagacttccaggagttccaagattacgacgagttctag

SEQ ID NO: 39041 - DNA, 357 bp, Zea mays
  Peptide Sequence Number=SeqID_82416
atggacagggctacctccccgttcgagggcgactcgccaatgttgcagccgcaggccccgccgtcaagtccaccgagcggggcgcacgactccgtggatagggccacctcgccgaggagcggctccgccacaggccgatccgacgccgcagccatggcactgtcggccaagggcaaggaggtctgccacaggtcctgtgacgtcctcgacatcaacgccgatgagtggggcaacgagaataggagcatgaccaccgagctcagagagcagcagtaccggctcaggaaggcactggaagaccgggtgcaagtcagtagggagaccgccaagatgtggcgatgggacaagctccatcag

SEQ ID NO: 39042 - DNA, 303 bp, Zea mays
  Peptide Sequence Number=SeqID_82417
atgagcgaggcaggggcactaggaaaggggcatagtcacacgacgcctccgactgagaagccagggctcctgcttcacccaagctcgtcggccatcgggaataggtcgcatcgtgacacgagcaagatcgaggctactggatgggctagcgtcgcgatgacaacgagcgaggcaggggcactgggaaaggggcatagtcacgcgacgtctccgactgagaagcaagggctcctgcttcacccaagctcgtcggccaccgagaataggtcgcatcatggcagcgagcgagatcgaggctactag

SEQ ID NO: 39043 - DNA, 606 bp, Zea mays
  Peptide Sequence Number=SeqID_82418
atggcttcggcagcccgactccagggttggtcccgccagtggacgacctggccaggttccagccgccgctgctacacctcctcggcttgggaagtcaccggctcctcggccgacgaagtttcttctcgagccaactccgcctctgtccatgctgacaccgctgtcttcggctccggctcatcgcagagccccgatagccacaatgaacagacaccgacactcaggatgccattacaaacgcaaccccggttccactcccgcgggtatgaacaacctccacatcggagagcctgcgggacgacaaactccgggtggctcgccgccgaccactacagcagcgacaacgacctccgctccgggcggccaaacagcagcagcgatgaccttagggcagacgctgctgcgacaaggccctcgcccgtgtccccacttgaggggcgaggacaagaaatcaaagccaaagagacgaaggcccggagcgcagatggcgccgacgatctcgtcggcggagaagccttctccggcgtccaccacctcagcaccggcgacggcagccacctgcccaccggcagatccccactcgcgtcctcaggcgtcgcggactaa

SEQ ID NO: 39044 - DNA, 165 bp, Zea mays
  Peptide Sequence Number=SeqID_82419
atgagcaaaagagttaacccaacccatagagtcatgatgaatggaagggaagattataaggcaacagcaaacagaaatgaatcctccagatcctccaccggttggaatcgattaagtggttgccgcccaaatgctggtaatacaacaaatggcagaagtggttaa

SEQ ID NO: 39045 - DNA, 51 bp, Zea mays
  Peptide Sequence Number=SeqID_82420
atggaggaagctgatgtggaaggctgtgacgatggtgacgatgagtactga

SEQ ID NO: 39046 - DNA, 408 bp, Zea mays
  Peptide Sequence Number=SeqID_82421
atgacaccttatgaagttgtgtttctctgtgtatctgaaatgttctacatgtcctttcatcaggtgaggatgatgctcgtcagaagctggctccctgtcctaaacgtctgccgggacattattcaaccaatgcacttccagaaatcgaccaattgccaagacctggaggaggcgtttcttcagaacatctccaccttgcttgtcctagaagcccaggagctgttgcagcaatgcctggggttctcgacccgcaatgtcgatgactgcccacatctggtcgccgcgttcaagacatggttccggcgcgcttgccgggctccttcagcttcaggcggggaaaacttagacatgagcggatgtacattatcccccaatcagtgcgtggtcgctgtgtattctcgcatgtag

SEQ ID NO: 39047 - DNA, 483 bp, Zea mays
  Peptide Sequence Number=SeqID_82422
tctcaaaggtgttatgaaagggaaaaggtggacttggaccatgaaagacttccactgcactccgatgagaggccaaagccagcgcagtctgggtgcaccggactgtccggtggtgcaccggacagtgtccgggggtgcaccggacagtgtccggtgcgccaggctggctcgagcgaactggccgctcttgggaattcatcggcgacgtacgactataattcaccggactgtccggtgtgcaccggactgtccggtgagccaacggtcggctgcgcgatctgcgcaagacatgtggccgagccaacggtcgggagggggcaccggactgtccggtgcgccaatggctcccaggcgccaacggttgactacgccacagaaggaaagaaatccgcaccagacagtgtccggtgcgccaggcgactgaaggcaagatttgccttcctggaatgctctcaacggctcctagctgccttggggctataa

SEQ ID NO: 39048 - DNA, 900 bp, Zea mays
  Peptide Sequence Number=SeqID_82423
atgggactgctggttctggttatgtttatggtgctgatggctcgacttagacacactgcacgaaagtccgtcatccccttcttaccctcccgccttgctgagcgtccgcttcgccgtcccgtggccgaacagtccagccatttggagagactgcaccaccgcctacatgaggagcaggaacgtcgacgacaggagcagcagggctcttccttctcgctccagcaggagatagagtctgagccggaaggatgggttgctcgacccatcactcgcgacgctgctcgcgggtgtcacttccacgatgcgctcgacaccctgctacgtcgggcacttaaccggcgtacttggtccatcgagtatcgatgtgtggtctaccagcatagtcgcgggatctacccggaccgctgggaggcgacttgcttggtgcgccgtccggagaacagtctccagggtgcggaggcctgctcagagcactattctatctctgagcgggactcagctgaggcggccatgcaagatgctgcacggcgtgcgctttcgcactactgctcagttctcggtggggtagctgacgatctcaacctgaagtatcacccccaccgtccatctggcagcacaggaggcgtgattgtctcacctgttgatgaggacaatcctaggttgagcagcacagtcaacctagccgtcgtgctaaacacggagctggaccatgcattagacgagctgagtagggctcgtgctgagatcgccatgctgcgggctgagcgcgcggaacgtcgtcacctggatgacggttcccccgctcccgtcgggactcagcacccgtaccgctcacctcggcgtggacgccagtcttatggcaatcccgactgcaagaccaagataaatctagaaccatag

SEQ ID NO: 39049 - DNA, 366 bp, Zea mays
  Peptide Sequence Number=SeqID_82424
atggaagtttgtgctgattgtacccatgtgcctcagaaaaatcatggaaaaagaagggccatctcggcgttctggcaggagcgttggcgacctggtggggcctcgtgtgtctgcaatgttgaaacgcgcattgtaaatggtccggaagcccgccccttccccgccccttctccgccctcgcccggccttgctccggcgagcccgccccgccccgccgtggccgccccggcgacccacgccgccccgtgcccggccgcccccggcgagccgcgctcggccccgtgccgggctcgcgcccggccccgctccggcgagctccgcccgcccccgtgcccggcctcgcctggccgtgtcctcgcccagtga

SEQ ID NO: 39050 - DNA, 896 bp, Zea mays
  Peptide Sequence Number=SeqID_82425
atggcttctcgtcagcagcatcctactagctaccacgccggcgagaccaaggcccatgtcgaggagaagacgggtcaagtgatgggggcggcgcaggagaaagggagggaggccaagcacaaggcatccgacgccgctgatcgcgccatggggatgggccacgacgccggggaggcggccaaggacagggcgtaccgggccaaggacgcggcctccggcgccgctggccgcgccagggacactgcgtccgacgcggccggcgctgccgaggaccgcgcccgcgacggcgcgcagcagaccgggagctacgtcgcgcagacggtcgaggccgccaggcagaaggcggccggcgccgcgctgtacgccaaggacaccgtggtcgccagcaaggacaagaccggcgccctcctgcagcaggtgagatgcactgttggaaggggaaactcgaatacaatagtggctcttgctgggaacaaggctgatttgttagatacgaggcaggtgtcagcagatgaagcaaaggcgttcgctcaagagaatggtctctttttcatggaaacttctgccaaaacagctaccaatgtgaacgacgtgttctatgagattgcgaagaaactgcttcaagggcagcaggttcagaacccacaaggcgggatggttctcaaccagagaccacctaagaggatgtcagttaaattgcaggaggaatccaatgggaagcagtgcatatcgaccaagcgcggtggcacggaggacaacccgagaatggttttctcggcttttgggtatgttcataaaatagccacctttgaaaagctacaggcattgatccagtacactgatgcggctactgcttcagctgctagagaatccttagatggaaggagcatcccaag

SEQ ID NO: 39051 - DNA, 633 bp, Zea mays
  Peptide Sequence Number=SeqID_82426
atgcgagagtggaggtcgtgggtagagggagagtccgctgaccggggggtcgtgggattggggacggttgtgccgcgcatgagtccgctgaccggttgggtgaaggcagccgatggggaggagttggaggacggaagtgcgctggaggccgccattggggaggaggagtccgacggtgcggtgggggaggaggtggaatccgatgatggggtggaggagaggaaggggaggccgccggagttgagcgcagtgaaggaagcgcgcggcacaaccgtggctggagccgccggcggccgtgggccgtggctggacgccccaggcactgatagggcaaggtctgttcaatgtcgtgtcgaccatgttttgtgcgggattgaggaagtgttgtgcatcgtcgctgcttacaacaagatggtcacatacctatctcggtcggggcctctcggcttcgaggcgcctccacttggtatcgccattgacgtggtcgagtttttgcacgagggcgtgggcgtcaagctcctcctactgctcacgaagggaggcctcgcgagaaaggatgcatgcttagtgctgacattggtactcttcttcttgattggggacctccttgtcccctccgctgttgtcatttag

SEQ ID NO: 39052 - DNA, 573 bp, Zea mays
  Peptide Sequence Number=SeqID_82427
atgctctcgttagtacacatcgagatcgagggatcagtactcactcgcagtcacaccaaatccgagtcctccccgggcctgggagatttattagtccacagaataatatgtacgaggagaattaaaggatatgtaactgtaatcattggcgtcgcagtgcaaagaaaagatacagtacctccaaagaagcgaatactggacacatcacaggacttctatacagctggttttgtccctggggctaatgttcatttttcttatgatctccctgaagattcgttgttaaatgcagatgatctaaaagcaggaccctttctccgtgaagaaattctaagtttggatggattgtcacttctgctgaaacctgctagtcaacctgatgattctagaatgaactcttcttctcttcaatctgatgcatctcaatctgttcctgtaccaacaacaacaaataagaagcctggcagaccaaagtggctgaaaagcactcatatccaatatgagggcacttgctgctctcatgcatatttgagaaaaatatttccttatcatcttttggtgataccactctag

SEQ ID NO: 39053 - DNA, 525 bp, Zea mays
  Peptide Sequence Number=SeqID_82428
atgggcgcgaaagggtcgcgagccaaagccgcggacttggtcggcgacgcgaacaggttgtccggcaggctgtgctcggcgctttggtcgttgtccgcgttcgggctcgcgtcgccggcggactccttcctgccggaatcgagcggcgcgagggagcgggagaggagagcaccgaagagagaggccggcgacgttcggtgcgtggatgaggaggaccggcggcgcggatccaggggcgacacggtgatgcgtcgtggatggaggagagagcataggggtggctggcggctgggaagggagccgccccgggagggagggatgagcctcccggggcggcggctggacctgagcagctggctggcggctgtggggtgggagggagacgccggcggctgtgggaggtgggagaaaaaccctaaacctagtctggggcctgcgccggacctggcaaggggtgttgacggcaccggtgacgggagaagctcgaagggtgaggcgctgctgggcatcaacgcagacagttag

SEQ ID NO: 39054 - DNA, 825 bp, Zea mays
  Peptide Sequence Number=SeqID_82429
atgaccgcgcagacgcgtgcgctgctgtcggcctccttggcggggctcgttgaggcccggatgatcgaagaagcagaaagactagatacagattgcaaagttgatccaagatcatttgagtttaagaaaaacaagtttggcaaacctgaggtactgtggcgatctgatgacagcaggatggaatggcctttacatttcaatatttcacacacatcatctttgattgtctgtggcataaccatggatactcctattggcattgacgttgaagagaagacacgaaagacagccaagaatattttatctcttgctcgccgttatttcaccccatctgaaattgattatctagctaaaattccagatcctgatgctcagcaaaaggagttcgtaaaactatggactcttaaagaagcatatgtaaaagctcttggaagggggttttcaggcgcccctttcaacaaattctcgattatattggcagcaaatggcagaatccaaatttctgtggtatactatttccctctttgtgctcatgcttgtcagtataattcatatactacttgcatgaatttatggaatcgtttccaggcaccaaaagtatcgaacggttctgactctatccatgactgtctgtccgagaattggcagtttgcacttgctgaactaaacagttctcattacatggcaatctgtatagaggatgactcaacaagttcagattctggaaacggtagactgccactaggattgaaagtatggaagaccactccgttcgtggaagatatacttgtttctggaacggaagctgtaaaacttgtcagttaa

SEQ ID NO: 39055 - DNA, 1281 bp, Zea mays
  Peptide Sequence Number=SeqID_82430
atgagctgttccgcggccatctccgacggcattccgctgcgcttccccatagagggaagcaggaccctctgcggcggccttggaggtgtctgcgcgcgaggggtgctcgctctcggttcccacaggagtaacaggagtaggagggcgaggcacaggcacgcgacggtcttcgcgaggaggaggaggaggcggcggcccagcaagtggcagcggccgtggtggaagaccttcttctcggactggaacgaagacgacgagagtctggacgggtggagggaggaggacgagctgcttcaggagattggcagcgacaaggggctgtcggaggatgaaaagttcaagacgtggacgagaaaggccgaagcgattgttgatctgcgcgaggcccagcaggatgcggtgaacgccgaggagcggtcgtgggaaaattggatcggtggtggcggcggcacgtcggggactggaggcggtggggaggccagcttgttggaccagatcactgatgaccctgcagagattgtgagggataagagcgtttttgaggttttcagaggttccatcgatgaggattatgaggacatgttgttcgaagatcgagtgttcatgtacgcctcaacaaactcggctaaatttctagcattgctgattgtggttccgtgggtcatagattttatagtccatgactatgttatgatgccctttctagagaggtatgtccagaaagtgccacttgcagcggagttacttgatgtaaggcgcacccagaagctgcagatggttaaagccctaaagattgaaaaggcaagataccgtcttgaagtagagattggcaaatctcctccactttctgatgaggaggtctggatagagttgagggatgattggaggctagagaatcgaaatgctttcgcaaatatatggtctgatacggtttatgggattgttctatttcttcttatgtgcttcaatcagagcaaagtcgcaatgctgaagttcacaggatataagttgctaaataacatttcagacagtgggaaggcctttcttattattttagtatctgacatccttctagggtaccattcagagtcaggttggcatacattggtagaagttattctcgagcattacggttttgaagctgatgaagcggcggtcacattttttgtttgtctggttccagttgctttggatgtgtacataaaattttgggtatacaaataccttccaaggttatcacccagtgtgggcaacgttctggatgaaataaagcgtcattag

SEQ ID NO: 39056 - DNA, 1836 bp, Zea mays
  Peptide Sequence Number=SeqID_82431
atggggtgggggtgctcatattgcaaaactaaacagaccttggttctccaaattgtccgctttgccatggttcggaagcctctagttaggattcgtgagagcaaaatcgagcacttgttccaaatccaagaaaaccgccgtgcgtccagatcgaacagcaggaggagtgcggtgacagagacagcaaacatacctgtatccctcctcctcctgggttcctggcaagaaccagaaccaggaagcatcgcgagccaccggcgagccctcgtcgccgccaggacgtgcaccgacgaccgggtctctgccggccgctggcctttctacaggtcttcgccgtccgctggggctaagcaagctagcttgcgagggagcatatatggtcctccgcgtttcatgaccttcatgaggtgttccgcggccgtctccgacggcattgcgctgcgcttccccgccgagggcagggccctccgcggaggcgtctgcgcgcgcgggcgcgggctgctcgctctgggttcccacaggagcagcagtaggagggcgaggcgcaggcacgtggcggtcttcgcgaggcggcggctcggcaagtggcagcggccgtggtggaggaccttcttcgcggactggaacgacgacgaggagagcctggccgggttcagggaggacgacgagctgctggaggagattggggccgaccaggagctgtcggagaaggccaagttcgaggagtggaggcggaaggccgaggccattgttgagctgcgcgaggcccagcaggacgcgttcaacgccgaggagcggtcgtgggaggactggaccggcggtggcggcggtggtggcgcgccggagaatggtggaggtggggactggggcggggaggccagcttgtcggagcagataaccgatgatcctgcggagatcgtctgggataagggcgtcgttgaggttttcagaggtactatcgatgaggattacgaggatatgctgttcgaagatcgagtttttatgtatgcctccacgaactcggccaaattcctagcattgctgatcgtggttccgtgggtgatagattttctagtgcacgactatgccatgatgccctttttagagaggtatgtccagaaggtgccgcttgcagctgagttacttgatgtgaggcgcagccagaagctgcagatggttaaggacctgaacatcgagaaggcaagataccgtcttgaagtagagatcggcaaatctcccccgctctctgatgaggaggtctggtttgagctgcgggaaaaagcgcttgagttgagggacgattggaggctagaaaaccgacaagcttttgcaaatgtatggtccgatatggtttatggggttgttctattcctgcttatctgcttcaaccagagcaaagttgcgatgctcaagttcacaggatataagttgctaaataacatctcagacactggaaaggccttccttattattctagtatcagacatccttctagggtaccattcagagtcaggttggcatacaatggtagaagttattctcgagcattacgggcttgaatccgatgaagcggcggtcacattttttgtttgtctggttccagttgctttggatgtgtacataaagttttgggtatacaaataccttccaagattatcacccatgcttgaacagtattcgatgggtatatttgcttggcatattaagttttcatcaaatctgaagggcgtccttcgtctggaaaggccttgcctagaatgcctgcctggccacgccatcaatcagagtgtccggctgttcgggaggactgggaattggagaagtaatctgagctag

SEQ ID NO: 39057 - DNA, 1305 bp, Zea mays
  Peptide Sequence Number=SeqID_82432
atggcgtcgcagaccgacgacgaggtttcggcaatcgtcatagatgtgggctcttacagctgcaaggcgggctacgcaggcgacgacacccccaaggccgtcttcccatcggttgttggttcaattgaacaaactgaagacacagatgaccccaagccagagaaggaagctgactctgcatcagattctaagaacggtgccaagcccatggatgtggacaaagccaagacaaaacgcagactttatgtaggccaagagttagagttcaggagggatcacatggaggtgatttcatctatgaaagatggaacggtaactgactgggatattgttgataatatatggaatcatgctttcagacggaggttgttgatcaatcctgaagagcatcctatgctcattgctgaaccatctacaaacactgcacagcaaagagagaaagcagcggaacttatgtttgagaactacaaagtgccagcgctgtttctagccaaaaatgcagtgctcacatcttttgcgtctggacgagctacatctttggtggttgacagtggtggtgggtctactgtggtttctgctgtacacgatggttttgttttacagaagtctgtgtcgacttctccagttggcggtgaatttttaactgactgtatgatgaaaagcttggagagcaagggcatcgtcattaggcccagatattcatttaagaagaaggaaatcagtcctggagaatataagattgtagatcttgatcttccaaacacaactgagagttacaggttgtactgcatgagagctattgctagtgacgtcaaggagtctgtttgcagagttccagacactgcttttgatgaagtggcatatgcaaatgttcctacaacttcatatgagcttcctgatggacaaactattgaagttggtgctgatagattcaaggttcctgatattctatttaatccatctctatcccagactattcctgggattgatggatttgcagattcaataccagtccgtggccttcaacgaatggtcattgatagcgtaaataagtgcgacgttgacatacgaaaagagctattcagtaacatcttgctctctggtgggtcatcatcaattctgcagttaaaggagcgcctggagaaagaagtattggaggtatgtattgaactgaaactagccctgtttgtttcggcttctggcagtttctggccaccaaaagctgctgcggactgccaaacgctcagcttttcagccagcttctataaaattcgttgggccaaaaaccattcaaaatcaacataa

SEQ ID NO: 39058 - DNA, 663 bp, Zea mays
  Peptide Sequence Number=SeqID_82433
atggaggaaggagttgaaatagactccaatcccagtcgcccgctctctgtgcccctgacgcccccgctctctccgaccccgcccgcagcgccatccccgcgcgccatccccgctcggctgcttcaaggaaggaatggtgtcgtgccccgcgcatggaaggtcgccatccccgtgcgccatccttgctcggctgctccaaggaaggaagggcgtcgtgtggaggacccgccctcgctctctgcgcccccgacgccccgccatcacattctccgcgcggtctgctacaagaaaaggtccgcgtgtggagatggaaggtccgaccccgccatccccgccctcgctctcctctctcggctctcctctctctgctggatctatggccgccagctccgcgcccaccagccgcaaattgcccgccatctcctcgatttgcattatccaataacgagtgatccaaacaaatcggcgttcgtcctcgccaagacagtgttccgcgcttccgttcgctccgccgctcattcctttcctccaccgacccccgggggctcacaagagcttgctttcggtggtgctaattcctatagaatcggatgctcccttggccctgcagtgttttacacggttaattttttgtttcgatttaacagcgactgcttcagctaa

SEQ ID NO: 39059 - DNA, 405 bp, Zea mays
  Peptide Sequence Number=SeqID_82434
atgactcggttgtccggtcttcgcctcctcgggtcgagcactcaacctccctacccgagacatcagcgcatgactcggtcatccagtcttcgtctcctcgagtcaagctcatctagcttggttgcagaccgagggcatgccttgctaggcaagtcatcgggaggcccatcaagtggcccatggagcatttctgcgctcccgctcgaggtcagcctcaggcaagtcacgactacatctcccgcccagagctggcttcggcgagtcgtgactgcttcccccgcccagagctgggttcggacgagtcagaacagcgtctcccgaccgaggttggcctcgggcaagacggaagaacgtatcccgcctagagatggcctcgggcgatacagaaccgcatctcccgcctag

SEQ ID NO: 39060 - DNA, 471 bp, Zea mays
  Peptide Sequence Number=SeqID_82435
atggagttgcaaccgggccacaccgtggagttcggcacttcgaggatttcctcggtccatgtgcaggagatgcagctgcttggatactttggtgatggtgtcgggcaggtttcgggcgctgaggagatctctgagcttgagggcgaattggttgtgtttgaggcatttttcattgtcggccttcatctctcggcgtgtcgcttcgtagcggaggttttgtggaggttcgaagtgcaggtccaccagttaacgcctaatgtcatggttgcgctgacgaaaggctctcgcgctataattcaccggactgtccggtgtacaccggacagtgtccggtgcgccaaggaagagcggcctcaagaactcgccagcttcgggaaactccaacggctagtccgctataattcaccagacatgtctgcgcgcgcaaaagtcaggcgtgcccatactagcacaccggacaaggaacagtag

SEQ ID NO: 39061 - DNA, 627 bp, Zea mays
  Peptide Sequence Number=SeqID_82436
atggccgccgccggcaagctcctcctcctggccgccgccatcctggcggcttccttcgtcgccgacgcgcgcccgtgcggccacgcgcagacgctcctcgtctccttctcctccgtcctcaggccgaacccggaccccaccaacccgacgccgctcaccaccacagtcgtcaccgtcctccgcgtccggcgcctcggcccgcaccagatccgccgccccgtggcgctcccctccgtcgagtcggaggtcgccgcctcgtccgcccaggaccgcgccaaggacatcctcgtcgtcgtctccggcctcctcttcggcttcggctgcggcgccctcaccgcggcgtccatgtacctcgtgtggtcgctcctcgcctccacctgcgcctctggatacgacgacgacgtctacagcgacgacgaggaccggctgtccgactccgagagccccaagaatgccggctacgtcatcatccacgacgctgacgagtacggcgccgtatactctatgcacctttttaatcatgtgtgtcgcgtctgtcgagattttcctgggtattttacctgtgcaactgttcatgaatgtgactgctacttcgtctgcaatatctctgagattggtacagtctga

SEQ ID NO: 39062 - DNA, 468 bp, Zea mays
  Peptide Sequence Number=SeqID_82437
atgggcaagagcaagaaaggtgatggctcttcgcatcactctggcgacaagcgcaaacgcgagccgactcctctctcggaggacttcggcgactcggagtactcggaggaggagttctcctccgagtccgagggctctccggctcctgcctctctcccggtgtcgtctgatgattcagacgactcccaggggatcaccgcggaggtatggacttacatccgggccgtcgagcgcgccgggctcgagggcttggatgagtcggagtactcctcggatgaggagaattcctctaactcgtccgaggagggcagcggcggcaacggcggtgacggcgacgacgacggaggcgacggtgacgacagcggcaacagcggcaagggcggtgacggcagcggcaagggtggcagcagcgacggcggtggcggcagcaagggcagcagcaagggcagcaacaaggccagtggctag

SEQ ID NO: 39063 - DNA, 507 bp, Zea mays
  Peptide Sequence Number=SeqID_82438
atggagcaagacttagagtgtgctggaaaatggtgcaccggacactgtccgttcagccgactcatcctcgcccagttccgatgtacagggcccctgcgcgggaaggtcgggtcactgttgcgattactgcccgaatttgttgggccgtctgggcttgcgccgacccggccttgtgttaatccgttccactggtcgttcctcccaggcccacgaggggatgaccttacgaattatggggcccttgggcctttcatgatgtcttttatccttctagtggacccgggggatatctatcccccacaagcccccgatctttgggctgattttgaaataaacggcccaaagatcatagtctttttctgctattattcttcgaaatttggtgttctgtctcaggttcatgcttcgaagaggtcagcattttgcttcttcggggatgatgattcattgggtgcaccaaaggtgcacccaatgggtgtagcccccaagcttcgagtggatttttga

SEQ ID NO: 39064 - DNA, 210 bp, Zea mays
  Peptide Sequence Number=SeqID_82439
atggcagaagcaagcctccacgtgttcgacgcgagctggcatccgggggcgcgctcagagcacgcccactgtaatcttgctgacggagagtacatcctcgtgccggagcaaggagctgctcaggaggtagccccagatccagcacccgagcctgcaccagaggacctgcctgccactgctttggaaggcaagccccggttttatgcataa

SEQ ID NO: 39065 - DNA, 840 bp, Zea mays
  Peptide Sequence Number=SeqID_82440
atggagacgaggctcagcggcctgcacgaccgcctggacaaaatggaggcctcgacgtgcgtggagggatgcgggcacttcgaggtcttcgaccagtcgaacgaaggcttcgagcgtgaaatgttccaggtcgaggacccgattctgaagcggtcagctggggcgctttttgacaggatgtggggccctcacggccgagagattgtccgggagtggtctgaccgggcgctggatcagatggcgcatgatgaagaggtcgaggacctcagtgatctggacagcacactgcccgaggcgtcggggtggagccagcgcccccatccgatgctggcgagggccccttggcaacccccgcgccgactagagctggcgaaggcccccatgtcggccactgcgccgacgggtgaggacgcttcgaaggtggtgggcgaaccagctgccgaagacccagcagcgtcggctgggccgtcgcaggttccgacgtttgggcctgcgcaagcaaccgctgccggtaatacttattttgtggcggccgcaaccgttgtgcctgccgataataatttatttggctttggatctgagtgttttgagtctgatggtgagtctgggagtttgttttcctggacggaggagtcctcggatgaaggcttggattattttgctgcgttagatgtggccgcagctgagtctttgccgcgtgcggaggttggcgaggctgctgatcctcctagtgcgagtgctgagcacaagtggcgaagggtggtgtcgaagcacagtgtggatgagttttcgcgaaatggtaggcgccatcgtatggggatggagcgtggccgtctttga

SEQ ID NO: 39066 - DNA, 501 bp, Zea mays
  Peptide Sequence Number=SeqID_82441
atggaagtcgcgcttgccgcgacactcggtgtcctgcctgctttgctcacccacgtcggctactcgctggtgctccaactcgtcagctatcgttgtcctatctacgtcagcgcgaccgtggtcgtgtttgtcgacactcgtgcttgctgttggctcgcgttaacgctcgcgcgcctgctcgttgtcactgcgtcgcactcgctcttcgtccatcggacttcacgcgtgttcgcgtttgtcatcgagctgttgaacccgtcatccctttctcgtgacttcgtcgtggctagagccctcactagattcgtgtcctcaccagctcgctctagacacaatctcgtcgtcgttctatgcgtcatcaagaaatcccaagaatcaggtgaagacgaagccagcagcgtggtgttcaccaagtgcacgataaaaagctcgaacatcctgcacgactcaagttcaattcgtcaaaattatttagtcgaggagaagatctttagcaattga

SEQ ID NO: 39067 - DNA, 813 bp, Zea mays
  Peptide Sequence Number=SeqID_82442
atgacgacggtcgggcagaggagctgggaaccgcgacttccatggtcgagcagagaaccagcaaggcgcgacgggctgagggagtggcagagcgcgcacgggatgaagggatcgagccgcggcacacagggatcttcgtgcgcgcgtggacacagagaagcaagcgcgcgggatgaaggagcagaggtccgcgcgaacacggctgggcacagggaggagcgccagcgagccggagccggaggccgagcaagtagggacgagcaccatgggaagcaggcagagggagctccacgagtagagaggaattggggaagggctgcagcgctgggagctcggctgggggaaacgaagcgccatgacagagatggccaacgaccgagcgcaacagggaagaacgcgcgcgcaccagagagggagcagggcgcgcggcagggacggagctccgagcgccgagctgcggccggaaccagaggcacagtaagccgacagccatggggacgagcggagctctggccggacaaagggaggaggcgcggcaaaagaagaaactggggaggggagatccgcacgcgcagagagctaaagaccaaatcgagctggggccgacgccggggctgggcgcgaccagccatggagcttggggctaggcgctgtcggggtggagcagggagaccgcgaccagggcgcagatgccagggaagaagacgcacgagagggagagcggagaagaagcagcacgagcagagagaaagaaggagacgcgcgttgataaaggaaccaggggcggtggctggatttttcttcagggattaa

SEQ ID NO: 39068 - DNA, 69 bp, Zea mays
  Peptide Sequence Number=SeqID_82443
atgacgttaaccggaaaccgtcatcgtgcttccgactatcgtgtcgaagtagtcagggttaactggtaa

SEQ ID NO: 39069 - DNA, 165 bp, Zea mays
  Peptide Sequence Number=SeqID_82444
atggccgtgatgggttcaacatcggaaaagatgtacctctaccagaataagataacacgcaatgggagtggagagatggtgagagtagcatgtaccctccgtggcaagaggctggacggtggtgtatctgtgctctcggttggcgtgaacctgatctggtcttaa

SEQ ID NO: 39070 - DNA, 972 bp, Zea mays
  Peptide Sequence Number=SeqID_82445
atgtccgtgtcaaagtcggcaccacccgccgccgcttcgtcggtgcgcaccggcgacggcggccttcgctccttcgtcggctcagccgagggtagcttgccccgtgccggaggaaatagccctcgcacccgccgaagacttgctgggcctgggaaaggccggcttcgcagtcggcggtggtttgccgctgccaggggcggtggacttcacgcctccccgagccctcttcacctcgtgactagggtccccgaccatagcgaacgcccagcgcttccacgccgcatcttgacggtccttgtccatcactgccgatacaacagcaacaatattctgtccataaggaaaaatcttcatctcacggggcaaacgagacgtaaatatgtcctcgccggccgcccgggatatcggaacattccttggccatcgaacctgggtaacattcagcattctcgccgaagactcccggagctcgggcgaagacatccttcccccgagggccgcgcaacctcccgcaaagtgccttcctcagccacggccactggctttttcccgcggcggtcaacagccgcagcagtgtcgtctccaggctccatcctccacttcgcggacgaacgcggctgggtctcggccgcgcagatccaaggcgaaggccacacttcgcaccagctactggcccaaagtaggcatctggcgagggcatacttcgccaagcacccagccatgcgccaggggctacactccataaccaatgaattcctcaaccaaatcacgcccgctgctcatgcgggcggcgcaccaaagggccccttcgtcctcatcatcctcagccacctcaaatggtgggaatgccacatagcagtgggagcacattacagccgtggggagccctgggagttcttcgacttcgtctcccgaaacataaaaccaataatcccaccaattgccccacttgttgtgagcacagggaactaa

SEQ ID NO: 39071 - DNA, 381 bp, Zea mays
  Peptide Sequence Number=SeqID_82446
atgcagtctctcgtgctgctcctggtcctgctcctactcctggcgtcggcgctcctgctcctcgtgcagaggttgcacacttttcctacaagtcgtgatccctttatgcctcgggtcgatcaaaccctcaaacactaccaagcatttaagaacaagttcccaacattggcgcccacctccggtgtactcacttccacaatcttcagcaaagcaccaaccttcgtcatgccgctgaagaagacaacagtgccaggggctgcactgcaaccactggacacaaaccaggagactctctctctctccgagaggccagaagccaaaagagaaaggccaccagtccaacacttcgggaggagttggaccaggagatcaggaacctag

SEQ ID NO: 39072 - DNA, 417 bp, Zea mays
  Peptide Sequence Number=SeqID_82447
atggtggttggagtaggtcggtccacgtgcgcaggcgggggagctcgtcggcggcgaggaatccggcctaaccagggtgcaatagatcaattaaatgggtcagggagcttcaccagagatcaaggaagatgtgtgcgcgaagaatttgagaatgtctcaccggattgctcggtctacgcgcggccacgggcgaccaaagttcggcgaaggcaatcttcggtctccggtgaggttctgtcgggtccgagagcttggaaagctttacgggcaactggtgaagctaaccgagggacaggcgcagcttggacgcggctggccgcagtggccgaggcttgggcagtgatggagggtggaggaaagctcaccgcagctaaggaggggtgtctggccagcgagggtgagcacggggtgaggtga

SEQ ID NO: 39073 - DNA, 327 bp, Zea mays
  Peptide Sequence Number=SeqID_82448
atgaagctcctcgagccctcagacctagcgcaacctcacaggaggacccgaatcacctcgctggacttcttccactcaccggcgaacgtggaccagaggatgaacatatttttcctagtatacttaagtgaaaaagaacatcggaaaaatacagaccaccctaatccacagctaatccaagattgcaacctcgctgacggagagtacgtgctcattcccgagcaagtagctgtccacgaggaagaccaagagccagctctcgagcctgccacagaggatctccccacagccccagcaattgaaggcaagccccggttttatgcataa

SEQ ID NO: 39074 - DNA, 567 bp, Zea mays
  Peptide Sequence Number=SeqID_82449
atgcagaaaaaaattctggttgcgtctgtgttccaagggaaggactctctgccctttgctagactgatatcctcccttgctgctgccggaacttggctgcagagtgcagcctgcaggaccaacttctttgcaactcttatttatgcagcaatttttgttgttcaaaatagtaattgccattaccatgtcctcatgatcgtagctggtggacatgtaacacatgtttgggaattaggggatttcatcacctcgtcggaggcacatcctggaggttttcttttcacgaagtttgccagtagtaaccagactctttttgaccttttcccggatagctttggtagcaggatgaagccctacttacagattggaagcagcagttggattcctggcacaacctcgcttcgccagccaattctaccgatctggattatttcacatgacatcgtcgttgattcagctcacgtctaccaatcagaacttttaatacaaataatcatttatgcctgttgtgttcttatgtcactaacttgtccaatgaaaaagagtcagttcatgcgtgagacttga

SEQ ID NO: 39075 - DNA, 564 bp, Zea mays
  Peptide Sequence Number=SeqID_82450
atggcggcctcggttcttcttgccgcaccggctacctcgcccccgctgacgtggcagagatgggctcctcttcttgccccgtccaagaagcccaccgccattgccgtccctaggcacgctgcggcgccgcgcaagtctgacggtggcggcaagaagcagctcaacctgttccagcgcgcgccggcggccgcgcttgacgcgttcgaggaggggttcgtggccaacgtcctcgagcgggcccacgggcaacccagcacagccaacccggctgtgcagatcgccggcaacgtcgtgcccatcggggagaggctgcccgtgcgcaggctccccgtctccggccgcatcccgcccttcatcagcggcatctacgcgcgcaacgacgtgaacccctgcttcgaccccgtcgccgggcaccacctcttcgacggctctgcctcaaagttgcagcctgctacactggagctctgttcggtcgcacccctcgggccccaaccacggcagcaaaaccatcctcaccggtcccctcctccttcccctcccgcagtccagcaagcagcagcatga

SEQ ID NO: 39076 - DNA, 207 bp, Zea mays
  Peptide Sequence Number=SeqID_82451
atggtgggtacaagtgcggtcactgcagggtggcagccggggtcagtggagcattgtaagccaaggcggtttaaaaactcgattcgaatcgtctgcttctcgcagctaatgagactgcttgaccccttgtactgcatcggtgttggggacttgttctcaaatgctatgagtcaagaacaaggcaacatagaaaatgttaatcggtaa

SEQ ID NO: 39077 - DNA, 231 bp, Zea mays
  Peptide Sequence Number=SeqID_82452
atggacgtactggaggctcatcccccaccaccaactccagccccagctcactctcctgtggacgacgacgatgatgacgatgtgtatgcaccgctgcgacaacgcctcgcacataatcgacaaggttctctggaggacatggttgctggagtgacttggccgtccatcttgccaccaggttggactatcgagtgggaccctgcctcggctgaggaggagcatgaggagtga

SEQ ID NO: 39078 - DNA, 342 bp, Zea mays
  Peptide Sequence Number=SeqID_82453
atgggcccggacacagggtgcgtgagcgtgaagtggtatcccacgatctcggccgtgcgtcgagatcagactggggagatcaaagtcgggagggctggaagggtggtgcaattgatctatcaacacaatcggaggatatttagtcaaccacatcaacaacaagtagagatggaccctccaattcctccaccagctggagctgatcccgtacttgcagcccagatgcggataatgcaacagatggctgatactatggtagacatgcatgcgccgatgcgacaagagcgtcaggagatgcgccaagagagggaggagaggcaccaggagcgaagggcgcaatag

SEQ ID NO: 39079 - DNA, 99 bp, Zea mays
  Peptide Sequence Number=SeqID_82454
atggcgccgccgcgggaggagcttaactccggcgactggcaaatcaccagataccctttcggcacagacattttgcttaagagacctcagactttctga

SEQ ID NO: 39080 - DNA, 948 bp, Zea mays
  Peptide Sequence Number=SeqID_82455
atgcctcgcgtccttccaccttccgagcccccggatggggagcgcccgcggttcttccaccttgtcgtcgttggaggaacgcaacttcgcggaagatggtacctttcagccatcgttcggcttcaaggattttcatcagacagcccggccgcatcccctcgccggtggtcacccaagacggtgaccaccagttcgatggtggggagaagcgagccgggctgcggcctctgccccgtcctcagcttcaaggatcttcatcatccttgctggggcggagagccagcttctggtggtggaaaccatcctccagctatgcggaggaggcgtcctccagccatgccagggaaggcgaactgttgctgcccagctaggatgcaacattccgtcctctgtcctcgctttcgtggcgaggacgggagtgaggacctgccggtgcgctttggagcggcctgcgctcgctggtgcggcattggtggacaggcggacgacgccgtcggtgctgacgtggtggcagctggagaaagcttctccgccatcgaggccgtcagcgccgcctacgaaccgacctctggctctttggctttaatgtctggttcgcgtcccttgagtggggacacgaataagagccttccggtggctgcgtccatcctgggatcatggctgctgctgcagaggtcgctggcgagtcgcccggagcttgtcgccccgcaggctctccggaaccctcggtcgctcttcgacgagccggagccagaggcagcggtgtcagtgtggacagaggcagagttggctcaaaaagaagacttcgtcggccggagcctggccgggccgtccaatagcgggaccagcgccgggctggctgaggcttcggggtggctggccgagccgtctgctcgggccgggttcctggaggagaccctgtcggcgatggccaaggcgcggagctga

SEQ ID NO: 39081 - DNA, 1185 bp, Zea mays
  Peptide Sequence Number=SeqID_82456
atgcaggcggcatgcaaccgcaccaagggggcgcaccctttcgactttgacgcgtccagcatggaggcccaggcccactcgtcatgtgaccggcgcgccggttactacgtgcgagaaactgcaccgccactcgcgccagtgtcgcgccttctcgactgcggaaccggcgggcggaagcagcggtcaagtcgtcagcaagctcacgtcccctcctgggacagcgagagagccctctcccacggcgtgaagacgacgcgctcggaccgagaaaggggatactccgaaagggatccttctccgcgaaggaagcgggccccgagccccctactgatcagaggttcgaaggctggcccctcggaagggttcaacagccgcctcagagcactcgggctccgcgcccactactggctagcccccaaagggttcaacagccgcctcagacgcagagcgagggatgaccctgggtacgttcgatacataaccaaggctcgagctacgctcccgagtcgacagagccaaagtgaccgcagtcacttcgccgctccactgaccgacctgacaacaagacagcgccgcctgcgtcgctccgactgctgtgccactcgacagagtgaggctgacagcagccaaggctcggaatcagcctcggctcccgaagacgacgaactccacctcgcccgaccccagggctcgggctcagcctcggctccggaagacgacgaactccacctcgctcgaccccagggctcggactcagcctcggccccggaagacgatgaactccgcctcgcccgagcacagggctcggacttagccttggcctcggacaacggtctccgcctcgcccgacccgaggctcggactcgacctcgacctcggaagacagactcgacctcgacctcggaggagcctctgcctcgcccgacccagggctcggaccgaccacgtcacaggaggggccatcattaccctacccctagctcgctcaggctacgggggacaagaccggcgtcccatctggctcgccccggtaaacaaataatgatggcgccccgcgtgctccatgacgacggtgggtctcagccccttacggaagcaaggagacgtcagcaaggactcgacagcctcgacagctgtccttccgcaaggctccagcgctcctccgacggccacgacatcacatga

SEQ ID NO: 39082 - DNA, 255 bp, Zea mays
  Peptide Sequence Number=SeqID_82457
atgaaccatgtacaacagtcttcaacccaagaatcaccaagcattgtgatcttaggggcgagggagtggaaaatggagttgcttgctatttggctgagggtgctacgcgacagcaggtgcgacaaggggaagggtggtgttgtcggcgactatggcggcggtgggtgcgctgcaaagggggcatggggcggtggtgctagcttcaaggagaaaacctttcttaaaaagaaggaaaacacacaagctcagcaatga

SEQ ID NO: 39083 - DNA, 970 bp, Zea mays
  Peptide Sequence Number=SeqID_82458
gcaaaaagagagcgggacatcaacccggcgccaaaaggtcctctccgaaaccacgccgcaccgccgcattctcgcaaacacctcgccggcggaggtgacgctccagatggtcaggtccaacgtctctcccggcggctccggcgcgcccccgggttcccccaggctccggcgcgccccagaggtgtcggcgcaggtggacgtggaaggcgcggtggcgtgggcgcgtggcgcggccgcgggggagctgtgggccgtgcgcagacgcaaccgtggcatcgacgtcgacgaggagcagctgagggcggtgatgctggcggtgcggcagttgcgctacgagctcgaccccgacgatcccgacactccctaccccaagaaacagaaaagacatcacaaacaaggcacgaggagttctgaaaggatagctggtcgagtgagtcgcgtatctagttttcttgaatcaacgagcaaacatattgggatagaccctgacaaatgtgcagctgctgtccctgagtggattaatgacccatctgaggaatgtaaggctaactatagaagtcacaatgataccttacaaaggatgggcacggtggtcatgctgccacccattgtagatccaccgaagacaaggaaatcagaggatggtaagtgtaaatgttctgaccctggatctgagacctgtgcaaaagttcatgtaaaagaggcctggaagagggtcaagtatcaattgggtgagcaggctttcagaaactgcgggtttgatgcaatgggtgagcgagttctgaagttatggacagcagaagacaagaaaaaacttgctgatattgagaagttgattcctcagagtaagtgtagtgataaatgcttcatgaaggttgccttgaagcagtttagctcagagagaacaacagatttggctaagtattactacacatttttcttcccaagaagattgggccagcctgagtag

SEQ ID NO: 39084 - DNA, 117 bp, Zea mays
  Peptide Sequence Number=SeqID_82459
atggggcatgtccaaaaaggaactgcctcatgtgccaacataacttcgatggcccacccccgctatcctccaaggtcttttggactatgggatggcacctgggcgtgcctgttttaa

SEQ ID NO: 39085 - DNA, 1041 bp, Zea mays
  Peptide Sequence Number=SeqID_82460
atgcatggtgcccctctttatattgcggagacttctccttcacaaatacgtggaacattgatatctttgaaggagctgtttattgtgttagggatactgttaggataccttgtaggaagtcttgaaattgacaatgtaggaggatggcggtacatgtttggttttagtgctccgcttgcagctattatggctattggtatgtggactttaccatcttcaccaagatggctacttctcagggcagttcaaggaaaggcttctttggaggataataaaaagaaggcaattcaagcccttagaacattgaggggccgcacagcaagtgaaaaggttttggcagatgatgttgacgatacaattgtctctattaaggctgcctacgcaggacaggaagctgaaggaaacgtttgggatgtatttgaaggagctagcttgaaggccttcactattggcggaggtctggttctgtttcagcagataacaggtcaaccgagtgttctatattatgctgcttcaatacttcagactgctggattctcagctgcatcagatgctgccaaagtagcaatcttgattgggttgttcaagttgctaatgacaggtgttgcggtatttaaagttgacgatgttggaaggcgcccattattgataggaggtgttggtggaattgctttgtcactcttcctactggcagcttactacaagatcctgaacaacttcccctttgttgctgtcggcgcgttacttctatatgtcggtgcttaccaggtctcatttggtccaattagttggctaatggtatctgagatctttccactccggacaagagggcgtgggatcagcctcgcagtactaacaaatttcggctcgaacgctctggtgacatttgcgttttcacccttgaaggagctcctcgggccagccaatatatttttcctgttcggcgtcatagcagtgctctccctcgtgtttgtgatcctcgtcgttccagaaaccaaaggactgagcctggaggagatcgagtcgaagatcctgaagtaa

SEQ ID NO: 39086 - DNA, 636 bp, Zea mays
  Peptide Sequence Number=SeqID_82461
atgtcttctcgctcccttatgcaccgcgtctttccaccttccaagcctccggatgggggatacccgttgtcttttcgcctcatcgttagaggaacgcaactccgtgggaattggtacctttcagccatcgttcggcttcaaggattttcatcatgcagcccggctgtacccccccgccggcggtcacccgagacggtgaccaccagctcctgggtggggagaagcaagccggactgcgatcttggtcccaccctcagcttcaaggatgttcatcatccttgctggggtgggggccgggctgagccagcgctctacctcccacgcgggttcgtgggtcgccctctcccgcggtgttcgagggagagggcgctcactggccctgcgggcggcccggacttcgacaacgcggggctggtcgacggcggacgtcgtcacctccagcgtgtcgggctcgtcggcttggctcctggcgaccccttctgtcggagggcggctgccgcgccgtgtgcacgggaggaccgccccagatgccgcgcgctgctagggcggcgttcgtgttctggggtggtcctgcctttgcaccgggatggcgccttcgcgcggaggtcggtcccccactcatccgggaggatttga

SEQ ID NO: 39087 - DNA, 597 bp, Zea mays
  Peptide Sequence Number=SeqID_82462
atgcaggcggcatgcaaccgcgccaagtggacgcgcttctccgactcccgacacgccggcatggaggcccaggcccacgcgtcacgcaaccggcgcgccggatgctgcatgcaagcaactacaccgccacttgcgccaccatcgcgcctcctcgattgcggaaccaataccgcgacccgaggcgacccagcgcacgacccagcagcgccagcctggcgcggcggtcaatgcggtcaaatgacaggcggcgcttctggcaggagcagcgggcgacgcttcgccttcgccgtaataaccgcgccaaaaaagggaccgggaaagggggataccccgaaagggatccttccctgtgaaggaaccaggctccgagcctccttactgatcagaggttcgaaggctggccccccgaagggttcaacaaccgcctcagattgcgtgggccctacacccactactggtcagaggttcgaaggccgccccccgaagggttccacggccgcctcaggctactcgggctccgagcccattactgatcaggggttcgaaggctggcccccgaagggttcacagccgcctcagacgccgagcgagggatga

SEQ ID NO: 39088 - DNA, 339 bp, Zea mays
  Peptide Sequence Number=SeqID_82463
atggcgaccatcggccttgtcccctcgacagtcgtcgcatccaccgccattcgcgccccggcccccgcagcgctgacccgtgccagcaaccgccagcccccgcacgcccgccgcctgctggacctcggccgccgcgcgccggcgatggacgccctccgcgtgtcgggtgccgccgagcccctcctccgccccgccgccgccggggggcaccccaggctccgcgtacgccgcccgaccgaccctcccgtccctccgcggctaaacatagcccttgcccacccctgctattctgggggagggacgcggcggctctcgctggtggtgaaagagtctgaatga

SEQ ID NO: 39089 - DNA, 324 bp, Zea mays
  Peptide Sequence Number=SeqID_82464
atgcgcctccgcagccgggcaatctttcccctcgtccgcaccaccgccaccaccacgtcggccgcgtcttcgtctccggcggtgctgagcatcggccacgcgctgcgcgagcgccggctgttcacgggggacgacgtggcggcgtacgcggcgatcagcggtgaccgcaacccggtgcacctcgacgacgccgtcgcccgggagctgagcgggttccagcgaggccgcgtggtgcacggcatgctcgtggcgtccctcttcccttccatcatcgctggcagcttcgtactttttctttccggcatttcgtccaacagcgcgtga

SEQ ID NO: 39090 - DNA, 246 bp, Zea mays
  Peptide Sequence Number=SeqID_82465
atgaggaaggagactgtcagaggagggggattcgagaaggatcgtactgaaggttctggcagcagcagtagctctggaaggaacgattgcctggatgtcccgcggcttctgtccgttcctaacggcaacgtttgcagtgaaggtttggttttgcagacccggatagcgtcatgctccacggaaccacgtgccgacagggctgtgtctgtacatgttaatgggttgtttacaacatgtcaggcgtag

SEQ ID NO: 39091 - DNA, 408 bp, Zea mays
  Peptide Sequence Number=SeqID_82466
atgagcgcacctaaccttggtcctggatctgacgatgagcgcaccatgcagttccccaggacggtgcccgtggtggggaagttgagggaggtcgtcgacgctgccaaggtcgtggccgcgacgggggcgacaaggcacgcacgctgggcgtggggatggagcatggagcaagaggtggagggaggagggtgcgggaatggggatgatggtgttggacgagttgccatggatagaggaacgtgtggggatgaggacggctctcatcgcatacaagctcgccggctgcatcaccggccgcacgggggcatcggtggcgatattctccttcggcgagttacgggcgggcgatgcgaggaggttttttttttatgcgaggctgaggcggtgtctgttgcttctgttaaggag

SEQ ID NO: 39092 - DNA, 1692 bp, Zea mays
  Peptide Sequence Number=SeqID_82467
atggatatagtggtggaggaaggaaatgtcgatgttggcaatactgctgaaccatcgtatgaggttgtggctagaagtggttgttcagcacaattgtcaactaaggacactgatgaacatgaactggagagcgaggatagtaaggtcagtgttggtaatgctgcaaaacaatcacacgatgttgtgggagtaggcattgactgtattttcaatcatgctaaagtgtcaactgaagccgatcttggaccacaaccggatgtgatacacttgacatctttgaatgttccaaatgaatcaagtcaaataagttctgatgcggatatggtagagcagaacaaacaagatgctttggacacacttattagaatatcacaacataaaaaaccaaagaaattgaatgtagctcgagttgtctctgaagattataagtgcactccagaagatgttcagcttatcgaatacattaaaacattaccggggaaacaagttgtggtggacatcgacagcgcatggttaaatagaaatgatatggaatgtctttttcatggtgacatccaattgtctggcgaagccctcagtgcatatatacactgtattagggatgaagagcatttacttcatagagagggtggaaagagtgagcagcttcatggttcagcattgttgcccaaacctctggagaagggaaagactctgtacttggatgttctgactgtgttcacacactctcttcaaccattcccagaagaaatcactcaagccgaagcacaacttgttgtctatcaggatagtgctcactttctgtcaccttaccctgttaaggctcagacacttgctatcagattgcctggtgggagggttgaatcatacacaaggcatccaaacgcaaaacttgtggattcagaactgaaatatggaccatttcatgatcttcccccgttctcctacttacctgtgattgtgcattttgagaacaacaatccttttgcagttgcaaagaaagttataagggagattgagatatctcactggggaaacgtacagattacggaacactacaacattgctcatggtggtgccagactcaagggtgaattttccaggattgattatcaatctagaccttacacccaactggaaattgaaccaaggtttccattgtttggtgggtggcaaacaaccttcactgttggttatggtttaccacttgaagactttgttttctattctgaaagaaagagatttctcaatatcacatttggttctccattggaggaaattctcattgaaaagcttatcgtaaaggttgttctacctgaagggtcaaaggatatcgaagtttcagctccctttccaacacagcagcagcaagaggttaagtattcacaccttgacattgttggaagaccagttgttgtcttggagaaacctgatgttattccagagcataatttgtatttccagcctgctcacgagaaaatcggtgtcgttgattcccaatggattgtacaccaagtgattccttctctcgggaaccaggggcagtcggagaatgggagggcgccatgggaagggttaagagagcgttgccggaaagagtgggggcttttccagacaagaatggcagaagctgagaaagcatattacgagatgatggggattacacctccgaatgtaatatttgtctcctag

SEQ ID NO: 39093 - DNA, 1701 bp, Zea mays
  Peptide Sequence Number=SeqID_82468
atggacgacgacgaccacgaggaggcgtgggtgcacgactcctccgtcgatcaccgcgggaggtctcccgcccgcgccaccaccgggtcctggaaggccgccatgttcatcatcctgatcgagttcagcgagaggctgagctacttcggcatagccacgagcctcatgatctacctcaccaaggtgctgcaagaggagatgaaggcggccgccaagaatgccaactactggatgagcgtcaccacgctcatgcccctgctcggcggcttcctcgccgacggctacctcggcaggttctccaccgtcgtcgtctccaccgccgtctacctgctgggcctgacggtgctggcgacggcgcagctggcgccggggctggggcccgaccgctcgccgcgcctgcacgaggcgctcttcttcgccggcatctacctggtgtccgccggcaccggcgggcacaagccggccctggagagcttcggcgcggaccagttcgacgaggcccacgcggcggagcgggtgcgcaagatgtccttcttcaactggtggaactgcgcgctctgctcgggcgtcctgctcggcgtcaccgccgtcgtctacgcgcaggaccgcgccggctggggcgccgccaccgtcgcgctcgccgccgtcatggccgcctcgctcgccgtcttcctcgccggccgccggtactaccgctacagggtgcccgagggcagcccgctcacgccgctgctccaggtcctcgtcgccgccttcaggaataggcgactcccgctgccggacgacgacgccgagctgtacgaggtcaggcggccgcagagtggcaagaggaggctgctttgccacacctaccagctgaggttcctcgacaaggcagccatagtagtggagcccggcgccggcgaggacgcctgcgggccgtggcggctggcgacggtgacgcaggtggaggagacaaagctggtgctggcgatggtgcccatctgggtgtgcacgctgcccttcggcatggcggtggcgcaggtgtccaccttcttcatcaagcagagcagcgtgatggaccgtcgcctgggcccgcacttcgagcccccgccggcgtcggtgttcgcgctgtcggcggtggccatgatcggcacggtggcggcctacgacaaggcgctggtgccgtacctgcggcgcgccacgggaggggagcgcgggatcagcatccttgggcgcgtgggcatcggcatggcgttcgccatcgcggggctgggcgtggcggcggcggtggagcggcggcgcctgctgtcggcgggcgccgcgcggccgtcgacgtcggtgctgtggcttgtgccgcagttcgcgctgatgggcgtggccgacgggttcgcgctggtgggcctgcaggagtacttctacgagcaggtccccgacggcatgcgcagcctgggcatcggcctctacctcagcgtcattggcgccgggagcttcctgagcagcctggtgatcacggcggcggaccgcgccagctcccgcggagggcgcgccggctggttcgccaaggacctcaaccgcagcaggctggacctcttctactggctgctggcgtgcatcagcgccgtcaacctggcattctacgcgctggtcgccaccaagtgctcgtacaagcagaccgtcagggccggcagggtcggcgacgaggtcgagtgcgccgcgtag

SEQ ID NO: 39094 - DNA, 112 bp, Zea mays
  Peptide Sequence Number=SeqID_82469
atggggatcaaccccgcccttccaggcgactacctcgccggcaccggtgcagccatagccacggggtattcaaaaacgagctgggatcctgcaccgccaccacttcctctag

SEQ ID NO: 39095 - DNA, 498 bp, Zea mays
  Peptide Sequence Number=SeqID_82470
atgctgcccccaaaacccaattccactgccgtactgatcgatctgggcttgttgggggcgctccatgaatctaacatcatgcaaagagcctacttggctttggctactagactgatagattactggtctacaatctgcaggataagtgtaccctatccgtttcagtggggagcaccaacctttgatgccggtgaagcttttgctatgatggcagcttcttttgttgcccttgtggagtccactggtgcgtttatcgccgtctcacggtacgccagtgcaacaccatgccctccttccgtcatgagccgtggcattgggtggcagggagttggcattttgctaggtggcatatttggaacagctaatggcacctctgtgtctgtcgaaaatgctgggttgctcggtttgacacgcgttggtagtagacgtgttgtgcagatttctgccgggtttatgatattcttctccatccttggtgaggctcatgcttttatgtga

SEQ ID NO: 39096 - DNA, 753 bp, Zea mays
  Peptide Sequence Number=SeqID_82471
atgggcatagattcacatttaagcacttgtgttggcactcaatcaccaaaatacttagaaatggcccacgggcacatttccctttcacccttccatcgatggatggtgccattcctgcgaacctctgcgtctgtccccgccatcctcgccccttccatcggcgactatatccacgtgtcgcgccccttctgccccttccatcgatggaaggtgccattccagggaacctctgcgtccgcccccgccatcgtcgccccgctccctacagtcatcggcaccccctccatcaacacaccgcatcattttggatcgagcgaagctaagcttttcatcgagatggcgcttgttgtcttcggcaagaatggcgggctcgagcagatcggtagcaggaagggctatgtggatgccacaactttgaccaagattagtgaggatagagatgacgccatcgatctggacgaatggcgagctcgacgatctagagtcagatctggtggggaagaagactggtcggtcgttaccgacggcaacactgactgcagagctgatcgtgccactagcacaagagatcaaggagttctttgccatcgtcgaggcggccagtacaagcgcttcgcttccaaaggtctgcttgttgatacatatggttttggtagaatcatccaaaatgagctggaaataactcttgaccatgtgaaggcagttggctttcttggagatggttttggcaccacaccagagatgagcaaatga

SEQ ID NO: 39097 - DNA, 1191 bp, Zea mays
  Peptide Sequence Number=SeqID_82472
atggtgaagatagtgacgtacaacgtgaatgggctgcggccgcgggtggcgcagcacggctcgctccgctgcctcctcgacgccctcgatgccgacatcatctgcttccaggagaccaaattgtcaaggcaggacctatctgcggatgtaattatggctgatggatatgaggcttttgtttcatgcaaccgctcttcaaaaggccgtggagcatactctggtgttgcaacattttgccgagtaacatcatcattttccagccaggaggttgctttgccagtagcagctgaagaaggctttactggacttcaggactatgcaaaaaatagtcaaactgttggggatttcagtattgcaatgcctgttgaggaggagggtcttggtgaactcacaagagaggacctcttaagggtggacaatgaggggcggtgcatcatcactgatcatggacattttgttcttttcaacatatacggcccagctgttgacggagatgataaagagcgtgttcgttttaagctactattttacaagatactgcagaaaagatgggaacgtctattggctcttggaaagagagtttttgttgttggtgatttgaatattgctcctgcttctatagacaggtgtgacgcggcacctggcttcgagaagcaaatgttccgggaatggctgagatccatgctgagagaacatggaggtcccttttttgatgcttttagatcaaaacaccctgaaaggtggaaagggggaagaagcagtaagctagaaggatctgatcatattccagtttatattttactgaaagaaatacctgaacttccggtccataatatcccaccatcagctgcaagatatcttccagagatccgtggaaggcaacaaagtataggatggggtatttataggctcgtctggggacggcacacaccacacaccacacccgcacgctacgctgacaggtggacccctggagatgtcttctggtggactggtgatgcacaggtccgatccgtagcctttgcccttagtgccctcgcatcggggctccttcactgtgcttggccgaatgagggaattccttcagtcgacatattggtgaaggccctggctgatgccgacctattgcgaccggccactggatcggagaccccttcgcctgtggacccttcgtcgggggccgctccctga

SEQ ID NO: 39098 - DNA, 984 bp, Zea mays
  Peptide Sequence Number=SeqID_82473
atggcttcctccaattccaacagcagcagcaacccgctggaagccatgggcgccttcttctcgaagcaggtggaccggcggaagctggtgaccaccgagaagcgggcgctggccacgcggctgtcctcctccggcgacacgttcccggggtcggagcaccggccggcggaccggaagcggtggatggcggagctgggcgccgacaagctgcgcgtgcaccaggtggtgtggcccggcacgcacgactcggccaccaacaagatcggcgtgccgctggtgacccgccccttcgcgcagtgccagtccatgtccgtgtacgagcagctggccatgggcacgcgcgtcgtcgacgtgcgcgtgcaggaggagcgccgggtctgccacggcatcctggcgacgtaccccgtggacgtggtgctggacgacgtgagccggttcctgagcgagaccgagtccgagctggtcatcttggagatccgcaccgagttcgggcacgaggacccgccggggttcgacaggttcctggccgacaagctgggcgagcacctgatcccgcaggacgaggcggtgttccacaggaccgtcgcggagctgctcccgcggcgggtcatctgcgtctggaagccccgcaagtcgccgccgcccaggcccggggacccgctgtggagcgccggctacctcaaggacaactggatcgacacggacctgccggagaccaagttcgagagcaacctcaagttcctggggcagcagccgccggtggccggcccggagaacacggtgacgcccaaggccgacaacccggtgctgtgcgtgtggcccgtcacgaagcggatccacggctacgcgcggctcttcatcgccgaggccttcgccaagggcctcggcgacaagctgcaggtcttctccaccgacttcatcgacggcgacttcgtcgacgcctgcgccggagtcaccaaggcgcgcgtcgatggcaccgcgtga

SEQ ID NO: 39099 - DNA, 558 bp, Zea mays
  Peptide Sequence Number=SeqID_82474
atgcagctcagcctcagcattcgagcagaaaattgtgcaatgcttcttggctctctgggcaatcagtgtggcgtggacgtcgaggaacatggggaagggacgaccgatgcggaggtagcaaacgatgtcgaagaagcagttgttgaggctgcgcaagacgttgaggaccaacgtgctgtcaaatacagcaaggttggaagagatggagccagagatccaggacttgacaacgcaatccatggagtacttgccaacgccaatgaggatctgatcgcgccaacgattgtagttgtcggcgaggtcgaggacgacatgaagaagactactgatgttctggacagcgacaacctaggagtggaggttgacgatagcaacagcctcgtggagaaggatggcgtcatggaggtctttgtcatcatcacccgcctggtcgaagaggatggagtggtcgtcatcttcatgaataggatgggaatcatcctgcgtaatgatggcgcgagcacgagccgcgcagtcgagggcgagcgggagcaatcagcaaccacgtcgcgtccctag

SEQ ID NO: 39100 - DNA, 570 bp, Zea mays
  Peptide Sequence Number=SeqID_82475
atgtggggcatgggcaatagatgggatgttgtgtggggagggggtggtggtataggcagccggttcgggacttcgagccgcagcaaggaggcagtgcagacgagagtcagtttaccggtggaaagagaaagggggaggagagggagagagagggatgtggcgacctccagtcgagggggtgtggggccgagggccgaggctagggagcacaggctaggtaggcagacactagaggcggtggctgctatggcgggcacggaggtacctgcgcgggcgtgggggcgagatacgtgggcgggggcagggacacgatggaggctgggcgagatctgcgggcgtggccggcagggacacgatgcctgcgcgggcgtggaggagagatacgtgggtggggggaggggcacgacgggggctgggaggatgcttccttgcatgggcgtgggagggggcgggggcacccagggtgcggccagcgggggcaggcatggcgaacgatctgggcgaagggaggcagcgggggcagacatgggtgagggcgaggtgtggacgctttccttatcttcttcatag

SEQ ID NO: 39101 - DNA, 258 bp, Zea mays
  Peptide Sequence Number=SeqID_82476
atgactacgggccggtggtggcgagccttcaacgacagcgcctggattaccgccgccgccggtggctccctcgtcgtcggagggaaaagagaggagctctctggagtggcactccaccgtgaaatagtcgctgctccagcggccatggctgtaggtggctacaccggtgatgcgagaactacttggactaaggaattgaggaaagcaacacctcaaaagaagacattaagaagatcaagaaagtccaagaaaggaggc

SEQ ID NO: 39102 - DNA, 837 bp, Zea mays
  Peptide Sequence Number=SeqID_82477
atgacccacgatgaagctattgctacccagaagactagaaatacagcatccccttctaaggtattcaattataaaaggcttctagcttggtgtttcttgtttggtgatacctgtacaagcaaatttggtgacctgctgcttaaaagtcgtttgtgcaaagtggtcatcttgactgatcacaacgatgaagttctggaggcaagtgttgttgtcatgacgaagacagacccaagtattgaaagggatgatctgattttgttccaggagattgccatactatggatagcaggtccatctatattgctgacatacctatggtgcaaggttatttctgattggttagcttcttacccctttttcatcacatacagaatcggctatcttaaggctgggcaaaaggttcgtgaagaaagtgaaaggctgcgagtctgcgacagcaggaacgctagcagaggacttggtctcacaacacatattattgatcactgcaagctgtataatgctcagttcaagatttttgaacctctagaatacaaatatgatgtctgtgaaactatcttattgtgggaacagtaccgcaacatgacaactgtattgacaagggaatacttggatgtgaggccggatggatggttggattatgcagctaaaaggaccgcacagcttggtgttgataaatgttacaaccgcactctctgtgatgagcttcttagcattgtactgcctgctaaaccccctttccatccacgccagttcgcgacatgtgcagttgttgaccaacagctacatggctttcttcctgctgattccaactctgattttttagaagagctttga

SEQ ID NO: 39103 - DNA, 282 bp, Zea mays
  Peptide Sequence Number=SeqID_82478
atgggcagaccgcggacgctgcggagtgcaggaagcctgggcggctgggcgtgcagtgtgctctcctcgactcctgactcctccgacctccatgctgcgtgctccgctgagagggccgagacggacgagggagcgagatccgaaatcccaatgaatggcggtggccggcggatgaaacctaatcgcgtgcgccactgcgccgtgctgtttccgtgccgggccggcacgaacacggcccacagcgacgtgccgggccttgtagcacgacagactgacatttag

SEQ ID NO: 39104 - DNA, 477 bp, Zea mays
  Peptide Sequence Number=SeqID_82479
atgaggctgcacatcgtcgttattgtcctgctcgtcaccacctacgtcgcgccaacggcatcgctacagcagtatcacaagcccagcaggatctcaggtatagggccttcagatgcaacaaaaatttggagaagagtttggaaattttcactggttttttcgatatttgaagactttggcatctctgttgattgtgtggctaccagtgaagataacatttcacaggattctaactcgtactacatcttagcaatgatctcccttgttggtattgtgctcattgtctgcctgaacttcccactgcccccatttcttctctgccatgatgcgtgggctcaagaggatgttcgtggccgcataatggcaagagacaggattgttagggggcatgttatggtgttctctggtttgtcatcgagaatagctcttcctctttcatcaagggtttcaccaatggcttgtaacaactggatgtag

SEQ ID NO: 39105 - DNA, 286 bp, Zea mays
  Peptide Sequence Number=SeqID_82480
atggccggctcggccgcccccgcgcgccctgccccgtgcccgcccggctcggccgcccctgcgccgcccggcttcggccgccccggccccggcccaaccgcccgcccgcccctggccggctcggccgcccttgcgcgccggctcggccgcccctgcccctacgccccgccgaggatctggggtgtagttcgcttcgccgtcgtgccgtcaatggggctcggtgtatgcggctcgctctgccaaggtggttatgagattgatggttttggttatgactatggtgctg

SEQ ID NO: 39106 - DNA, 378 bp, Zea mays
  Peptide Sequence Number=SeqID_82481
atggagtacccgacggcggccactggatcggggggccacaagtactactacctgcaacagcactcgcactcacagtcgtcgcccgccgcgccccgccgctcggttggtcaagcgatggctaggattctcttcctctgcagctacgagaactgcgacaaaacctttgctgatgtcaacgcgctccgcaagcatgctcacattctcctgcagcacgggatggtggcggccttcgcgcgggcagcgtggctcaaggagtaccacgagaaggtgctggtggagatctacaggtcaccgccaccttccttgcccatatgcccgctctccgtcggtgactatacacactcgtcgcgccccatccgcccctttgagagcacctag

SEQ ID NO: 39107 - DNA, 246 bp, Zea mays
  Peptide Sequence Number=SeqID_82482
atgaatcttgtcttcgggctcttgcatctatctgaaggccttagcaaatatgatatcagctgcactgcctgtatcaaccaaaacattatggaccagaaatcctttgatcacacaagagataaccatagcatcattgtgtgggtaattcttgagctgaagatcctcttgagaaaagctctgagcatgaaccgcctgttatcgggagaaccagcttcggagccgaagcagttccagcttgattcttga

SEQ ID NO: 39108 - DNA, 738 bp, Zea mays
  Peptide Sequence Number=SeqID_82483
atggcgcctcctgtgacgtggtcggtccgagccctgtgttgggcgaggtggaggctcctccaaggtcgaggtcgagtcttctccaaggccgaggtcgagtccgagccctgggtcgggcgaggcagagaccgtcggctgaggctagggctgagtccgagccctagggtcgggcgaagcggagtttgtcgtcttccggggctgaacccgagtccgagccctggggtcgggcgaagcggagttcgtcgtcttccggggctgagcccgagtccgagccctggggtcgggcgaagcggagttcgtcgtcttccgggactgagcccgagtccgagccctggggtcgggcgatacggagttcgtcgtctttcggggctgagcccgagtccgagccctaggtcgggcgaggcggagcttcctatggcgctcgaggccggacttggctgctgtcagccgcactctgccgagtggcgcagcagtcggagcggcgcaggcggcgctgtccttttgtcaggccgggtgcgcgtcaggataaaggtgtcaggccacctttgcattaaatgctcctgcgattcggtcggtcggcgcggcgatcgggccaaggttgcttcttggcgaagactgggcctcgggcgagccgaaggacctagtgaccataccattgcaggaatcaatgatgttgtctgtgatggtctaagatctgttaataacacaattgagaatgaagtagttgcactgttatga

SEQ ID NO: 39109 - DNA, 480 bp, Zea mays
  Peptide Sequence Number=SeqID_82484
atggaaaataacaaaggggttcctcagttgccactgactattttgtgctcgcactgctatgttgccttccctcggtttaaggtggagaaggagaatgatgacgaggtcacccttcgtcgtgcatcgaagctgagcagcgagtgcgatttggtcgaagagttcattggttacagggtgttgccattggtgcatggttgggggtgggcgagcggtctgccctatgagccttatccggaggagggctctacggacgtcagagctgccaccaaagacaagaagaaacgtgggctcaagcatggtgttgtagatgaagggtgcccgaaggggaagggtgtggctccgccggtgaggaggaggaagaaggttgagaccagggctaggggtccaacaaggggatcgaaagtgtctgatagtttcattgaagagctggcagagacgtgtgctgagccaggggaggttatgactttgcctgccctctag

SEQ ID NO: 39110 - DNA, 867 bp, Zea mays
  Peptide Sequence Number=SeqID_82485
atgtcgcggccgcggaggtgcccctggaggtgccgcacttcgagctcgacgaggaccccgcgttctggaaggatcgcaatgtgcagcttggcaaccgtgctccttgaaaatattgatggccttgacgacgatcaagttctgatacgaataagaccaattagtgacgctgagaatgcgactcatggtcagaaaagatgcttactgcaggatagctcaaagacattgagctggacagggcatccggaaaccatgttcacgtttgaccatgttgcatgcgaaacaatatcacaggaaaagctattcagagttgtgggtctgccaatggtggagaactgcatgtcaggatacaatggctgtctgtttgcctatggtcagacgggaagtgggaaaacttacacaatgatgggagaactttcaaagttgggcaatgagcttagtaaagatgctggattgacacctcgcatttttgaatatctttttcggcggataaatgaggaagaagagcgccggagagaagaaaagcttaaatatatctgcaaatgctcttttctagagatttacaatgaacaaataactgatctacttgaaccctcatcaaccaatcttcagatccgtgaagatataaagaaaggggtatatgttgaaaatctgatggaatgttacgtgtcatctgttaatgatgttatgttgctattgctacagggagttgcaaataggaaaatggctgccacaaatatgaacagcgagagcagccgctcacatagtgtttttacttgtgtaattgagagtcgttgggaaagtgattcgatgacacacctccggtttgggaggttgaatttggttgatcttgccggttctgagaggtga

SEQ ID NO: 39111 - DNA, 1370 bp, Zea mays
  Peptide Sequence Number=SeqID_82486
cggagcgactgaagagaaatcccgaggctggcgagttcctgaggtcgcgcttccctggagcaccggacactgtccggtgtacaccggacagtccggtgaattatagcgcgccggcctggaaaattcccgaaggtggcgagttcgcgctgaagtcctctggtgcaccggacactgtccggtggtgcaccggacactgtccgaccaacgggcggaaggagtggacagccatgcaggcggcatgcaaccgcgccaagtggacacgcttctccgactcccaacgcgccagcacggaggcccaggcccacgcgtcgcgcaaccggcgcgccggatgctgcatgcaggcaactgcaccgccacttgcgccaccgtcgcgcctcttcggttgcggaaccaatgccgcgactcgaggcgacccagcggcgccagcctggcgcgacggtcaatacggccgaaagagaagcgggcgacgcttcgccttcgccgtgataaccgcgccaaaaaagggaccgggaaagggggataccccaaaaaggatccttccctgtgaaggaaccgggctccgagcccctcctactgatcagaggttcgaagactggccctccgaggggttcaacagtcgcctcagatcgcgtgggccctacacccactactggtcagaggttcgaaggccgaacccccgaagggctccacggccgcctcaggctactcgggctccgcgcccattactgatcaggggttcgaaggctggccccgaagggttcacagtcgcctcagacgccgagcgagggatgaccaggggggaccgggtccggcagatcacccgcaggtacttttgggcgtgcctctgggcccctagccgacccccaacgaacggggcacggacgtccactcggattacccgcttgcagctcaccggagacaccatgttcggtgcccatcgagggctcgggggctgctctcgcaaacccggctccggccagaccgttgacagcgtcaacataccagcccgagagcttgggccccgaccgtgcacccgggctacggccagttcgcatgagggaacaaccagaccagccgaagcattacgcaaggcattaagacctcgaaggagtgaaaccactcctccgaggcctcgggggctacacccggcgggtgcgctcgcgcgcacccaccggaacaaaatgcaaccaagaaaggctggtccccttgcaaaaaagtgcgacgaaagcctccaagcgagtgctaacactcccttcgaggctcgggggctactgtcggggaacataattaggggtaccctcaagacgcctaattctcagctggtaacccccatcagcataaagctgcaaaggcctgatgggagcgattaa

SEQ ID NO: 39112 - DNA, 3648 bp, Zea mays
  Peptide Sequence Number=SeqID_82487
atgtatataggtgaagtaaataagctgcgctgtgaacttatacaataccagaaagcctgcacaaatcaagttgctcctgaggaaaaggagaatgttgtggccacaagcaccaatgcaatgcaacatgttggatttttactctttcattgtgatcaagccgggaagaatttttcatatttgtcaacagatgatgttaacaggcagttcatgcaagcagagatcacaactaatatttcagaatcatttcaacttgaattaccttatgaaattgacagtgaagatccggactctcctcatttgcatgatcctgaaacacatgactttagggatcctagaacagcatcagagtatgatggtgtattgtctcagtgcttaaacttagctatggcgtcttcacatgatgttcttaacaaaagtactattctaactgatctgaattttctagagaaggatgacacatatcatgtccatgaaaagcctccatttaggggtatacatttgcatgatgagactttatcgtgccaagagattgaaacagtgaactcaagtaaacatctatcacaggatgaattggaaaaccttaaaagaacaaatgaagagctcaaagagaagctgtttattatggctgaagaaagcaataagctttcagagattattgttgcaaaagatgtagaaattgcttctttatctgaagaatgggaggctgcaatttttgatctaacaagcttcttaacagatggatgtagatcactggatgatgcatatcagaacattgataatatgattagctcatttcctcacagtaacagttctgtaagtgaacatgttgagaaggctatgaaaattagcattgagaaagaaaagatgatattcaaacttcaaactgaactacaaactgcacaaaaaattggcagggaagtgaaggaaaagctgcatattttaaaaggtgcaacccttgctataactgaagctcagcagttggataatgaagaaaactctcaggaagaactacagctagtgggactattgcaccaaaaggattgtataatacaagaactaaggaacaatttgaaaccagaaaaatttgtatttgcagaaagagcaaaagggcattctcgtgatgacctactgttgcctggtagttcagttgacatgattgaggatcatgatgaaaatcaaccagcagccagtcaagctagtccagattatcagtcaaagcttgatagtgtgatgcatcttgtcgaggacaaatcaaataaggttctggccttattttcaaattttgaggcagctcatgaaaccatggaagaggctgaactcatgctttcagctttgctgaaggccaatgaaggattgaaacttgagagagataattgcaggcaagcggtggaattgttgttgtctgagaaaagttctctgatcggtgagttgaaggaacttgaagcatcaagctcttgtacatcccagaagtatgacaaattgcatcaacagataaatgagtgtgttacagagatgacaaagctcgctgctacaataaggaagtcgttccagcaaattcaaagtgtttctacagtagaactctttgctctttgctcagagattattacttttggccaagacttgaaaagatatataattgactcaaggtcatatatagcaaacatggtatcacttatagaagaaaaaagcagatctatagagcagttccatcacctaagtacacatgcttgtgggtctgctcgccaacaggtagagtcgaattcatgccagtggggtagcagaaaactttctcaatctgattatagtacagactatgcatcactcagaagagaatttaacaggaagagcaatgttgttgaaggattgtcttttgatcttaaactactgcaagagtctgcctcaaacgcgaaagatatgaaagataaagctgatgaaatatctattgcccttagcaatactcaaagagaactagatatgaaaacttccacaatggaaaccatgttgaaaaaacaaaaggtacttgaggaagaactagctgaaaatggtgccagactcattaatttaagattagagttagagcaatctcaaagtttatcatcagcattattgaaggagaacaaaggtctgagagtgatgttggaagatgaaactatgaagaatagtgaaacaaaagtgctgttggaagaaaaagttaaggtcatagagggactggagagccaaatactatttctaaatcgttgtgaagtggggcagttgatgtcagatattgaagaattaaacaatagcattaaaataatgagtagtgacagagacaatctccaggcagagatatttaagttaagggacaagcttgagatggcattggctttagctgaggaaaatgaagctgctgctattgaagttcgtcaaactgcagagattagtaaaatttatgctgaggaaaaagaagaggaggttaagattcttgaacgatctgtcgaggaacttgaaggaacagtaactgttcttgaggaagaggtatgcaaccttaaagaggaagtaaggaactatcaaatacataaacaatctgaagcccaatttcaagctattaatgacatgcttgctgaagaaaaagcatcaaaatgtgatgctgctgaggaatcgtgtcaagcgaaatgtcatctagaaaagagattgcaagctgagattcttgcacatcaaggtgtcagaaagaagattgaaggtctcaaattggaagcaaagcgtaaagatgatgagattggacaatacaaagagcatattgctgagttggtcctgcattcagaagcacagtccttgttgtttcaggagaagtacaatgaaatggaacacatggtttctagacagaggtttggtccgcatgaatcttattctgagactgtccccaagactgaaaagccttcagggcgagcaagaggatccagctcccctttccggtgcatatctagcattattcaacaaatgaactctgagagagatcaagaaatcttggtggcacgccaacgaattgaagaactagaaggtttggttagttgcaaacagaaagagatatgcttgctaacatcaagactagctgctgtggataccatgacgcatgatattataagagaactacttggtgtcaaactagacatgacaaactatgctaatttggttgaccaagaagagcagcaaaagttgctcatagcatcccagcaacagattgaacaatcaaaggcgaaggatacagagctcgaagcgctgaaggaacaacttggccatcttattctggaaagggacagcttgcttgatgacatggaccaaagaaagacggacctattggaggctcaactgctcgttgaacagctcgagcaacgggagcagatgctagaagcgcagattgaaatgttgcagctggagaaagacagccttcagcaaaagaccttggagatggacgagacaatcgagcttctagccagatcaaaccaaccagatataaatccacgaatgggcgacaaccaccatcgcggcagcagtgagttcagcaggcggctcgctcagtccgacatgctcctctcccacgcgaggcatgagcattctcgcaggcacgcggccggaagctcgaggacgcaccacggccggcaccgatga

SEQ ID NO: 39113 - DNA, 884 bp, Zea mays
  Peptide Sequence Number=SeqID_82488
gccaccgggtcgccgaggaggggatccagcgagccatgtcgaccgacgtgcccatgagccccgagctcgagcaggcattcggcggcggccagcgcccggacttcggcagttcctgctccagccgttcctttacatacagctactacccccctcctgcgtcctgccctgctgcacaccaagtcttaaccccgtctcacgctgcttgctccaggaatgggttccagaagatggacaagatcaaggactccagcaggcagtccaagcagctggaggatctcacggccaagatgagagagtgcaagcggtacgtcggcctcagctccgccctgtgcttgatcaaagagtttgaccgtatactcaaggatgaggagaaaaagaacacccctgatgtcaacaagcagctcaatgacaagaagcagttcatgatcaaagaactcaactcctatgtgaccttaaggaaaacgtaccagagcagccttggtaataagaggatcgaactattcgatacgggtaatgaccaggtggctgagggaactccagttcaaatggcatcagaaatgtcaaatcaagaactcattagcaccggaaggaaacaaatggaccaaactgatcaagctattgagcgctcaaaaatggttgtagcacaaactgttgaagttggagctcagactgctgcaactctgacacagcaaacggaacaaatgaagaggataggcaatgagctagattctgtccacttttcactgaagaaggctagtcaaatggtgaaagagattggccgtcagattgtcaacccgcataacaagaacatcagagacattccgggcctagcacctcccgccatgaacaggaagctgctgtccatcgacgctgcaggactctga

SEQ ID NO: 39114 - DNA, 1056 bp, Zea mays
  Peptide Sequence Number=SeqID_82489
atggccaccaagctcgccgttctcggcaccttggtgctcgcgctgctcggccccgtgtcgtgccaacaacagcaagcgggctacggctatggcgccggcagtcctacacctactacatcgccgccgccgccgccacctgccgctggtgccggactgagcgtaggatactacaaggacaagtgcgccgaggcagaaaccatcgtgcaggaggccgtgcgcgctgccgacgccggcaccaaagcagggctcctccgtttgttcttccacgactgcttcgtccagggctgcgacgcctccgttctgctcaagcccgacaacgacaccaacccgcagccggagatgctcggggtccccaacctgagcctgcgcggcttcgaggtcatcgacgcggccaaggcggcggtcgaggcgagatgcccgggcgtcgtgtcctgcgccgacatcgtcgccttcgccggccgcgacgccagcgcgttcctcagcggcggcgccatcaacttcaccatgcccgcgggccgctacgacgggacggtgtcgctcgccaacgagacgctccccaacctgcccccgccgttcgccgacgtccggcgcctcaaggccatgttcgccgccaagggcctcgacaccgtcgacatggtcgcgctctccggcgcgcacagcatcggccgctcccactgctcctccttcagcagcgaccgcctcccgcccagcaacacctccgacatggacccggcgttcgccgccacgctgcaggcgagctgcgcgtcgtcggccaacggcgctgccgacaacacggtggtgcaggactacaggacccctgaccagctggacaaccagtactaccggaacgtcatcagccacaaggtgctcttcgcgtcggatgccgcactcctcaagtcaagcgacacgcttgggctggtctatgtagccgccttctctcagaagctgtggcaggacaagtttggagaagccatggtgaagatgggtggcgtccaggtgaagacggccgccaatggggagatcagacggatgtgtggctacgtcaacaaaccctaa

SEQ ID NO: 39115 - DNA, 195 bp, Zea mays
  Peptide Sequence Number=SeqID_82490
atggagacttcacggaggagccagagccaatatgcaggagtggtcgtcgttgtcctcttgctgctcctcgtcatcgttgtcacgggccatggtattaacacaacctcaactgatgatagcaaactacccccatgcttaggggtggatatcgagccagctcggctcggctcgaccgagctcgagctggctcgttaa

SEQ ID NO: 39116 - DNA, 1875 bp, Zea mays
  Peptide Sequence Number=SeqID_82491
atggccaccaagctcgccgttctcgccaccttggtgctcgcgctgctcggccccgtgtcgtgccaacaacagcaagcgggctacggctatggcgccggcagtcctacacctacatcgtcgccgccgccgcctgctgcatatcctccgatgacgacaagcccgacgccgagctctcccaccgcctatcctcctcctcctcctcccacacctagcccgccgccacctgccgctggtgccggactgagcgtcggatactacaaggacaagtgcgccgaggcagaaaccatcgtgcaggaggccgtgcgcgctgccgacgccggcaccaaagcagggctcgtccgtttgttcttccacgactgcttcgtccagggctgcgacgcctccgttctgctcaagcccgacaacgacaccaacccgcagccggagatgctcggggtccccaacctgagcctgcgcggcttcgaggtcatcgacgcggccaaggcagcggtcgaggcgagatgcccgggcgtcgtgtcctgcgccgacatcgtcgccttcgccggccgcgacgccagcgcgttcctcagcggcggcgccatcaacttcaccatgcccgcgggccgctacgacgggacggtgtcgctcgccaacgagactctccccaacctgcccccgccgttcgccgacgtccggcgcctcaaggccatgttcgccgccaagggcctcgacaccgtcgacatggtcgcgctctccggcgcgcacagcatcggccgctcccactgctcctccttcagcagcgaccgcctcccgcccagcaacacctccgacatggacccggcgttcgccgccacgctgcaggcgagctgcgcgtcgtcggccaacggcgccgccgacaacacggtggtgcaggactacaggacccctgaccagctggacaaccagtactaccggaacgtcatcagccacaaggtgctcttcgcgtcggatgccgcactcctcaagtcaagcgacacgcttgggctggtctatgtagccgccttctctcagaagctgtggcaggacaagtttggacaagccatggtgaagatgggtggcgtccaggtgaagacggccgccaatggggagatcagacggatgacactcggcacaggacaacactcggcaaagacatgtttgccgagtgtcaaacactcgacaaagaaaccgctcggcaaagggccgtcagcggccgtcctaaagctgacggccgtcggtctttgccgagagccgaggactggcactcggcaaagaggcttctttgcccgagtgccgaatactgggcactcagcaaagaaggctttgccgagtgtcttctatagaaactcggcaaaccatatttttgttttttacattttggccaccaaactttttgtggccataacactcggcaaagaatcaagacctgggcaccggcacaggttctttgccgagtggaatgtctctggcactcggcaaagaagcacgctttgccgagtgccagacctagcactcggcaaagaacctgacatggggaccctccctgacgggttctttgccaagtgtcccaggtggcactcggcaaaggtggatcctttgccgagtgtttccaggcagacactcggcaaagataactcctttgccgagtgtcaccagggacactcggcaaagccgccgtctccgtcacccggcgccgtagcggctggttttctttgccgagtgcccgagaaaaagcactcggcaaagaaggctttaccgatgcactatgtgtcgagccttctttgtcgagtgcgacactcggcaaagcctttgccgagtgcttcggcactcggcaaagcttgcgattccggcagtgtttgttcgattgcttcattgtga

SEQ ID NO: 39117 - DNA, 333 bp, Zea mays
  Peptide Sequence Number=SeqID_82492
atgacagagatatacactctcattgaccactctagtattgttactcaattatcaagaagtccttcttcgaaggccgtggtcgaggactccgacattggcacggatcgaaatccccctccactgttgaccctgcgctcaaacatggttaatcacaaccgaataggtctgatcaaggttgggttcgaccttcgctccaacacactagccctcgaggtatcggttcaacttggtgagccggtcccaaagtctgcaatggagatggttgaatgttgccctctatcacaggttgaagtggccttgggggtattctgtaatatgaccattggaatgtga

SEQ ID NO: 39118 - DNA, 969 bp, Zea mays
  Peptide Sequence Number=SeqID_82493
atgatgagccctagtaagctcgccgtcctcactgtgttcgccttcgccctgctcggctccgtgtcatgccaggccggaacctactactacactcctccggctccggccaccccgcaaccaccggcatgtcctcctcctgtcactccggccgggcttgtccgtctcttcttccacgactgcttcgtccgtggatgcgacggctccgtcctcctcgacacgttcagcaacgacaccagcctgaccccggagaagttcggcgtgcccaacttccccagcctgcggggcttcgaggtgatcgacgcggccaaagccgagatggaggcggcgtgcccgggcacggtctcgtgcgcggacatcgtcgccttcgccgcccgcgacgcatcctacttcctcagcggcggcggcatcagcttcgccatgccggcggggcgctacgacgggaccgtctccctcgccagcgagaccctccccaacctgcccccgccgttcgccggcttcgaccagctcgtcaagatgttcgacgacaaggggctcgacgccttggacatgatcacgctctccggcgcgcacagcatcggccgctcccactgctcctccttcaccagggaccgcctgccgcccagcaacaccaccgacatggacccagcgttcgccgccacgctgcaggctagctgcgcgtcggccaacggcaccgacaacacggtgatgcaggacttcgccacccctgacgtcctggacaaccagtactacaagaacgtgctggcccacaaggttctcttcacgtcggacgccgcgctcaccaccaacttcacgtccaacaacctggtgcgcgcctacgcggacttcgtgccctatctgtggcagcagaagttcgcgaaagccatggtgaagatgggcggcgtcgagatcaaaaccgccgccaatggagagatcaggaagacatgccgcaagatcaacagcaggccgtga

SEQ ID NO: 39119 - DNA, 480 bp, Zea mays
  Peptide Sequence Number=SeqID_82494
atggcgccccgcacgctctatgacgacggcggctctcagcccccttacggaagcaagaggacaatactcggaggaggagttctctccgagcctgaggggtctccggctcccgtctctcccccggcgtcgtccgatgactcggacgactcccaggggatagccgcggaggtctggacatatatccgggccgtcgagcgcgccgggctcgaaggctcggatgagtcggagtgctcctcggatgaggaggactcggacggcggcgacgagggtgaagacgacgacgacgacgacgacgacgacgacgacgacgacgacgacggctggggtggcggcgacggcagcagggacagcaccaagggcagcagcaggggcagcaccaagggcggcggcggcagcagcagggacagcaccaagggcagcagcaggggcagcaccaaaggcggcggcggcggcaggggcaggggcagggccagtggctag

SEQ ID NO: 39120 - DNA, 2373 bp, Zea mays
  Peptide Sequence Number=SeqID_82495
atgtcggactcgccggtggagctgccgagccggctcgccgtactgcccttccgcaacaaggtgctgctccccggtgccatcgtgcggattcgctgcaccaaccccagtagtgtgaagctggtggagcaagaactctggcagaaggaagagaaaggcctgatcggggtacttcctgtgcgggactcggaggcaacagctgttggctctttgctgtctcctggtgtgggcagtgattcaggtgaaggaggcagtaaggttggcggttctgcagtagagtcatcaaagcaggacacaaaaaatgggaaggagcccattcactggcacagcaagggagttgctgccagagctttacacctttccagaggggtggagaagccaagtggaagggttacatacattgttgttcttgaaggtctttgtaggttcagcgttcaggaactaagtgcaagaggaccataccatgtcgcccgtgtttcacgccttgacatgacaaagactgaattggagcaggcagagcaagacccagatcttatcgctctttctaggcagtttaaagctactgccatggaactaatttctgttctagaacagaagcagaagacggttggtagaacaaaggtgcttcttgatacagttcctgtttacaggctagctgatatttttgttgctagctttgagataagttttgaggagcagctttcgatgctggattcagttcacttgaaagttagactctcaaaggcaactgaacttgtagacagacacctgcagtccattcttgtagctgagaaaataacacaaaaggttgaggggcagctatcaaagtcgcaaaaagaatttctactgcgccagcagatgagggccataaaagaagaacttggtgataacgatgatgacgaagatgatgttgctgctctggaaagaaagatgcagaatgcaggaatgcctgctaatatttggaagcatgctcaaagggaaatgaggcgcctacgaaagatgcaacctcagcaacctggttatagtagctctcgagcctacttggaacttcttgctgaccttccttggcaaaaggtcagtgaagaaagggagcttgaccttagagttgcgaaagagagccttgaccaggatcattatggactaacaaaagttaagcaaaggattattgagtatttggctgttcgtaagcttaaacctgatgccaggggtccagtgctgtgttttgttggaccacctggtgttgggaagacatctttggcctcctccatagcaaaggccctgaacagaaaattcataagaatctctcttggtggtgtaaaggatgaagctgatattaggggccaccgaaggacatacattggaagcatgccagggagacttattgatggactaaagagggtatctgtgagcaatccagtgatgcttctagatgaaattgacaagactggttctgatgctatggtcaaactggtcatcgagaggtacacgagagaagctggtgtgcgcaatcttgagcggaacctagctgcattggctcgtgcagctgctgttaaggtcgcagagcaagttaaaactcttagacttggcaaggaaatacaaccaattactacaacccttcttgattcaaggcttgctgatggcggtgaagttgaaatggaagttattcctatggagcatgatatatcaaacacttatgaaaatccatctcctatgattgttgatgaggctatgctagaaaaagtacttgggcctcctagatttgatgacagagaagctgcagatcgtgtagcaagcccaggagtctcagttggccttgtctggacttcggttggtggggaagttcagtttgtggaggctacagccatggtgggtaagggtgacttgcatttgactgggcagcttggtgatgttattaaggagtcagcgcagctagctttgacatgggtgagagcaagagctgctgacctcaatttgtcacctacttctgatatcaacttattggagagccgtgatatccacatacattttcctgctggtgctgtgccaaaggatggcccttctgcaggtgtgacattggtaacggcactggtgtcgctttttagtaacagaaaagtcagagcagatactgctatgactggcgagatgactctaaggggccttgtattgccagttggtggtgttaaggacaaggtacttgcggcacatcgttatggaatcaagagagtaattttacctgaaaggaacttgaaggacttatcagaggttccattaccaattctctccgacatggagattctgcttgtgaagcgcatcgaggaagtactcgaccatgctttcgaaggccgatgcccacttagatcacgctccaagttgtag

SEQ ID NO: 39121 - DNA, 948 bp, Zea mays
  Peptide Sequence Number=SeqID_82496
atgcccatcaggcctttgcagctttatgctgatgggggttaccagctgagaattaggcgtcttgaggcccccgagcctctgtacagggcgagaggacgatcagggacagactcggctttttacatacgcccctacgtcgcctttccgcaaggaggagggggggagtgcgccatgttaccctcgatgggcaccgaacatggtgtctccggtgagctgcaagcggcaactggcgcgccggttgctcgacgcgtgggcctgggttctaggctggcgtgtcagaagtcggagaagcgcgtccatctggcgcggttgcatgccgcctgcatggctgcccgccccttctgcccgttggtctgggcgaaaatggggggtcgcctgaacgcaactccatgggagctggtacctctcagccatcgttcggcttcaaggattttcatcacgcagcccggtcgcaccccttcaccggcggtcacccgagatggcgacctccagcttgatggtgggggaaagcgagccgggctgcggcctctgccccttcctcagcctcaaggattttcatcaccaaggccggggaggggagagtgccgagttggggtcggcccctgcgtgggcggtggcccgctccttcactcagtgatggggggagaagcgggcattgcccgtggcgtccgacagctgcagcgtgcctggtcttcagccgcgagtggcttcggggccacttgcggcgtcggcgtctaccacggcagccggaagaggttcttccgccggcgcggcggccgggaccggccacgggctgacctccaacttctacggccttctgcccgtccttgcctcacgagttttggcacgggcgggggcctcctggcagcggcatccaccctgaggtcagcgttgccgctgttcggccccccggagcagaagtcgccgtcgtcgccactgctggagtag

SEQ ID NO: 39122 - DNA, 78 bp, Zea mays
  Peptide Sequence Number=SeqID_82497
atggctcgtagaagatcccaaaagaacaagaagacccaggagaacccaactcggaaggagtgtgataaatgcctttag

SEQ ID NO: 39123 - DNA, 903 bp, Zea mays
  Peptide Sequence Number=SeqID_82498
atggagaagtttgtgcaaaagggtactcagattatagcccctgtacctatgggagttccagctacgacaggtatgggaggctttgaaaggccgactgctaagggtgacatcttgcggtcagatgcaagtgcagcgctaaatgtcggtgttctccatcttgtacccacattggatgtatttccattgttggaagatccaaagacgtatgaaccaaacacaattgatcttgaccaggatgagttcaagtactggttcaagattttgtcagatcattcgccggacctcgtggacaaggcagttgctagtgaaggtgggactgatgatgccaaaagacggggtgatgcatttgcacatgccttttctgctcatctggcaagattgatggaggagccagctgcttatggaaagtttggtttggccaacctgttggaattgagagaagaatgtctgagggaatttcagttcgttgatgcatatattagcatcaagcaaagggaaaatgaagcttcactggctgttttaccggatcttctgatggaacttgatagtatgaatgagattgatgactttgacatgttcaaaaagagaatgcttactgataggaaggaccaatcatacaaaagagcactgctttttgttgataactcaggtgctgatgtggtccttggaatgcttcctttagctagggagcttttacgccatggaacagagtcctcttgcgtttttcgagaaaaaacagacagctttgagggtgaggcagacctttcctcgctagccagtcagcgtccagcaacgcccgtgcgccacaagtcacatgaagaatttacattttccaggagcccagcttttccaaatctcccccatgacctgaaagttgttgaaccaatgaagaaaccatcataa

SEQ ID NO: 39124 - DNA, 615 bp, Zea mays
  Peptide Sequence Number=SeqID_82499
atggaccgaaggtccatgacacctggtatcagagccaggttatcctcaccaccaccagccgcccatccctcaccaccaccagccgccgcgccatctgccgccgcaacgccctcccacccgccctcaacaactctagatgcattcactcggctcgaagagaagtgggatcaattcgttgtgatgttccaccgctacaaggagaagacagaaaaggaactccaagcagcggtgcggcttcaggcggcagcgcgagggttcctggcacgctgccaggtacagtcccttcgtggggagaagcaccttgctgtggcctccagggccaccccatggccgtcatcacatgagcaggccgtggtgcgcctgcaagccgcagtgcgcggcttccttgttaggcgggcggtgcggaagctgcacttgctgatcagctcatcgctgcaccaactcgcagcctgcgcgcccaaccatcaggtctcgtctatactttttgaaccccctgcagaagtcgagatctggctcgaggacgagctggtcctcaagggagggggagatgtcatgggcatcatagggagcgagaggcaacaaccaggctgggataaggctagagaacaagattga

SEQ ID NO: 39125 - DNA, 330 bp, Zea mays
  Peptide Sequence Number=SeqID_82500
atggccgggatcgcggctctggtagccgctcagctcagatcttccttcagatacatggttatcaataccaagtctttagagcatatcttgccggctcctcaggttgttagaccaagggttgcaaactcatgtgctattcctccacgctgtagccggcgtattgctagaattggcgtcgagaacctggctgctttcagcgatggtcagacaagatttaagaaggtgatgagggtcctgcacgtgattgatgagaacgaaggcattgatcaggaggctctggatcgttacaacaagttgtttgaccagcctctctccccttcccatatttag

SEQ ID NO: 39126 - DNA, 1434 bp, Zea mays
  Peptide Sequence Number=SeqID_82501
atggcggccaataatagcgacccgatccaggatcagctgggggaaggaggggcgggcgtgaggcacgaggctgaggaggaggaggtgggggaggagacgtcttctgccgcggcgcaggcgaccgcgacgacgatgctgccccggtcgagctcgcggccgcagctggacctcagcggcgcggcgatccacgggacgctggaggaccgtaaccctaccatccttttgcccaaccagtccgacgacatctctcacctcgcccttgacatcggcggatctcttataaaactggtgtacttctcgcgacatgctgagctctccactgaagataagcacaagatatccacaaagagaagacttgggatgtttaatggtggcaggagaagctacccgattcttggagggaggctccacttcgtaaagtttgagactgggaagctaaatgaatgtttggacttcatttcttccaaacaactacatcgtggtggaattgattcaccttcatggcgctctggggctcagtctgatgacattgtaattaaggcaacaggtggtggagcattcaagtatgcagatgtcttcaaggaaagattgggagtcagccttgaaaaggaagatgaaatggactgtcttgtggctggagcaaactttttgcttaaggctatacgtcatgaagcttttacacacatggatggccagaagcaatatgttcagattgatcagaatgacttgtttcccttccttcttgttaatgtcggatctggtgttagtataatcaaggttgatgggcatgggaaatttcagcgagtaagtgggacaaatgttggtggtggtacgtactggggattggggaggctaatgacgaagtgcaaaagttttgatgagttgctagagttgagccagcgtggagacaatagcaccatggacatgcttgtaggagacatatatggtggtctggactactccaagattggcctttcagcatctacaattgcctctagttttggaaagataatttcagaaaacaaggagctatcagattatagacctgaagatatatcgctctctctgttacggatgatttcatataatattggccagatttcctatcttaatgcacttcgttatggactcaagaggatattttttggtggattcttcatccgtggtcatgcctacactatggatacaatttcttttgcagtgcatttctggtcaaaaggagaggcacaagctatgtttctgcgccatgagggctttctaggagctcttggtgcatttatgagttatgagaagcatggtcttgatgacttaagggtacatcatttggttgaacgcttcccaatgggtgctccatatgttggtggaaagattcacgggccacctcttggagatctcaatgagaaggcaagagcatcttctcctgatcatgcttaa

SEQ ID NO: 39127 - DNA, 1422 bp, Zea mays
  Peptide Sequence Number=SeqID_82502
atgagcttttctaagaaacctgcttttggaaaagctccacccgcagaaactcaaacagacatgcaagtgattctccagatgtcgggaacccgtggttctctacccactctggaagaattaaaatgtttcctgaaagaaataacaccagaggacaattgggctcctctcaagagaatgcccgcaagatctatccttaaaaggacaatcagtcaaaggaagatcaaaagtaatgctacattaagcaccatcaatgaagaaaacatagatgatgctgccaccatggattctgttgcatcaggaaagaggattataaactcgaagtttgcatcagagaactcactggaagttagtggtggaacagaaattactttggatgctttggctgcttacctaaaatatcttgaaggcacaggaaatgctagttggcaagagttgcatgataaagtgcgtttagctgaaaccagatatggtgcttcattctacatcttgtttggtcctgcaattcaacttggagtcatatctaggaggaaagcttacactgagactatccaatatgaaaaagatcgcaatgcaggttttctatcaccatttgggtactcaacacctacagtaacatcagcagtagatgctatatgttcaatggagtacacctttcttggcaacgaaggtccacctgttcttcttgtgcatggttttggagctttcctggagcattttcgtgacaatatagacaagattgctgctacgggccaccgagtttgggcaattactcttgttggctttgggaaatcagagaaaccaaatgtcaactattcagaacttttctggtctgaactactgagggattttattgttgaaattgtgagggagcctgttcatcttcttggcaactctattggaggttatctctgtgctattgctgctggtttatggccttctcttgcaaagtctctggttcttttaaactcagctggttcagttgttccaaattactccttcatcccactgagtgaagaaagacgaacatcatggatttccaggttgcaggcacagctccttttgctcttcttgaggtcaagggcagaaggcattcttaaagaatattatcctacatcatatgatcctggtgctgcaaaagtccttgagagtgtattcaacttcaatctttcaattcctcttaacttcttatttgattcttttggagggaagatattagttatccagggtatgaaagacccccttacaaaatctgaggcatttgtcaccatgctccgagaacattgcagcaaggttcaaatcagagagttaaatgcaggtcatgctccacatgatgaagttccagatgaagtaaataccatactatgtaaatgggtggagcagattgaagttaagccagccctggagaagaccaaggcaatatag

SEQ ID NO: 39128 - DNA, 597 bp, Zea mays
  Peptide Sequence Number=SeqID_82503
atgtgttgtgtggctaatgaaaatgatagcggaagcacaaatgaggatgaggaggaagaaagaagctttgtgcatctctacgctcgcctaagccaagaagataaggcggtcatgctcagacttctagaaagagcaagagagcaaagcgaagctcgtcaaaggctggaagatgttctctccataaagatgcaacactttgacgagttgactaaagaacatgaggagctaaagtgctctcatgttgatttggtccaaagcaaatcttcctttgagctagaatttgcaggaacaaatgatgattcatatcaaaagctcaaagaagaaaatgagaggctaaaaaggagcttgacacaactaaaagggaaatgcattgcccaaccttctcaagataactgtgatcacatggtgaagaagcttgagacgggaacaaccgtggcatgcactacatcccttgaagaaaatgtcaagaatttgaggattgccaagaggaagaaacaaaagatgaaattcaacacatcctccaaaagcctcaaccacgcctccacaaaaggtaacatccaaggcaacccaaagttgcaacttgtgctagaaaggtaa

SEQ ID NO: 39129 - DNA, 423 bp, Zea mays
  Peptide Sequence Number=SeqID_82504
atggcgtcggcgaagctgctgtacattgtggtggttgacgagaacgcctcctccttccgatacacgcgctccctcctccatagcaccctccagctcatgggatgcaagccacgccacgccttcgagatcagccgcagggtgtttgatgtcatccggggtgaccaccagggccacggcgacacggccacctccgcccgggtacaaaggtacgaggtcgccgaagccaccccgaccgcaagcccccgccagttccagttcgagctatacaagcgccggaccaccgtcctcctcccaagggacctcttcctcgacctcgtcctcgacgccctcgccctctacaagtacgttgcccccaaccagcgcgccgatctcatgctcgcctgcaggacagataattctgaacacgccaaggtagcatggtga

SEQ ID NO: 39130 - DNA, 60 bp, Zea mays
  Peptide Sequence Number=SeqID_82505
atgccggtgtgggaactctctaagaagctcatggatgagacacatgggtatgacttataa

SEQ ID NO: 39131 - DNA, 372 bp, Zea mays
  Peptide Sequence Number=SeqID_82506
atggtcacgccgaccccgacctcggcgttccatggaagggcgcggtccactctgctcgatgccgcaatccaagccgacctcaacccagctctccatggaaggtacgcgcaccgtccactcctcgtcgaccccaacccgaccaccacgtggatccactctgctcaatgttgcaatccaagccgaccacgacccggctcaccatggaaggggctcgggacaggtttccatataagtgcatcaagcagaatggatataatagtcaacggtggacaccgcaatcctaaattgtcaagcgtggacaccaaatcaaacccattccttcacatcgctcgcctaggatcggaagactatatccaggtcattccgtcttaa

SEQ ID NO: 39132 - DNA, 429 bp, Zea mays
  Peptide Sequence Number=SeqID_82507
atgacgaagaacggcaacggtgagggtacgagctccagtgtcgtcgaacggtggcaacagagcctcgtagagaacagcgcctcggcgagacagcggggcgtcgggaatcagatgacgtcgcggtggtggtcgtcgaggaagcaggggtggctttggcgagctccgacaagcgcacacgacggacgatggcgcgcgcagccgcagagcagcgtcaacggcaatgagtggcgtctgtggcatatagcagcaagtacaacagagagaaggcacgatgagcagtcggaatgtgaattggaggagctcagcgccgcagcgaggggtgacgcgcagaggcatggtacctcaacctggtacgatggtggaggcaagcaacgaagcgacgacagcggagaaatgcagcggcaacagggagacacagctacggagtag

SEQ ID NO: 39133 - DNA, 1887 bp, Zea mays
  Peptide Sequence Number=SeqID_82508
atggagagcctgatcgggatgatgaaccgcatccagcgcgcctgcaccgccctcggagaccacggaggaggaagcgacttgcccaccctctgggagtcgctcccaaccatcgccgtcgtcggaggccagagctcgggcaagtcctctgtacttgagagcattgttggcaccgattttcttccccgaggatcgggaattgtcacgcgaaggcctttagtgttgcagctgcaacagacagaggatggatctcaggaatatgcagagttcttgcatatgccgaaaagaaggttttcagactttgcccttgttcgccaagaaattgctgatgagacggataggctgactggaaaaactaagcaaatatctcctgtccctattcatctcagcatctactcgcccaaggttgtgaacttaacaatgattgatcttcctgggttgacaaaagttgctgtagagggacaatctgaaagtattgtgcaagatatagagaatatggttcgctcatatgttgataagcccaactgtattattttggctatatctccagcaaatcaggatattgcaacttctgatgcaattaagctctcaaaagaagttgatccaacaggtgaaaggacgttcggtgtgttgacaaaactggacttaatggacaaaggaacaaatgctctcgatgttcttgagggaagagcctatcggctgcagaatccttgggttggaatcgtcaatcgctcacaagcagatattaataggaaggttgacatgatttcagcgagggaaaaagaaagggaatattttgaaacaagtcctgactatgctcatttatcaagtcgtatgggttctggatatcttgctaagcttctttctcagcatcttgaatctgttatcaaagcacacattcctagtatcacagcgacaatcaacaaaactatagacgaacttgaatcagagctggacatcatagggagagctgtggctgctgatccaggggctcaactgtacaccatactggacctctgccgtgcttttgaccgtgttttcaaggaacatcttgatggagggaggtcaggtggagatagaatatacggcgtgtttgaccataagctccctgctgcttttaagaagctttccttcgaccgctacctgtcggtgcaaaacgtgaagaaggtggtttcagaagcagatggctatcagccccatctcatggcacctgaacaagggtaccggcggcttattgagaagggcatcaactatttcagaggaccagctgaagccacggttgatgcgcaactcagaagatttccgacgcttcaagcagcgatcgcgaccgctgcaaacgaagccctggagcgattccgggaggacgggcgcagcacggcgcttcgtctggtggacatggaggctgcgtacgtgacggtggagttcttccggaagctccctcaggatcctcctgctgatgcgcctgctagcaaggctggaggcaagccttcagcggagccggcggctgcgccgcctcctgaccgctacggtgacgggcacttcaggagcatcgcctccaacgtgtcccagtacatccggatggttggagacgagctcctgcagaagatccccaaggcagctgtccactgccaggttcgcgaggccaagaggtctctgctcaaccatttctacgtgcagatggggaagaaagaggctggggagtttgggcatatgctggacgaggacccggcgatgatggagcgccggcagcagtgcttcaagaggctggagctgtacaaatctgccagggatgaggaacggattaatcccagagctaagactaagggccaggacaagtgtaacgtaacattctcgttttatgatttcgaaaaaccccgttttgttgactaa

SEQ ID NO: 39134 - DNA, 819 bp, Zea mays
  Peptide Sequence Number=SeqID_82509
atgtccggtggcacaccggacagtccgattattgtgttaattggaacttggagaaccacccgagaaaacagtgctaccacaagggtagaatgggatacccttggccaagtaattaggaaagctacggaaagattaccttacccgaaagcggcaagcgggaagcacgtcgctacggaaagattaccttacccgaaagccaacctgttccgcaaggtgctccttgagatcctccgcagcgaccgggtgtcgctggggaagaagttccacctcctctacgccttcttcttcgtcaggaaggtggtggcgcatctcgtcaccttcctcttctactgcgtcgtcatcccggcctgcgtgctggtgcagggagacgtgcgcctgcccaagtacgtggccatgtacgtgccggcgctcatcacgctgctcaacgccgcctgcacgcccaggtcctgccacctgctcatcttctggatcctcttcgagaacgtcatgtccatgcaccgctccaaggccgccgtcatcggcctgctggaggccagccgcgccaacgagtgggtggtcaccgacaagctcggcagtagcaaggcagctgcggctgtagtcgcgaagaagaagaaacaacagctggtccggagcaggtgctgcagcacgagacgggagatgcatgtgctggagctcgcgatgggggcgtgcttgctctattgcgctgtctacgacattgtcttcttcggccgcgaccactactacatgtacctgctcctgcaattggcggcggcctttatcgtcggcttcggctacgttggcacctcggcaccctcctga

SEQ ID NO: 39135 - DNA, 390 bp, Zea mays
  Peptide Sequence Number=SeqID_82510
atgaccggggataaacaaaggcaaaagctcaagcaaaagccatcaagcaaaatctccaacacctacatcaaaaaggtggacaaaaaggctgctacaccatatttgatcaagaagaaaaagaatggaaaggtgatagcaatcaaggccaacaagcaagccaacaaaggaaagggggccaaacgcatctgggtgccaaaggaaataatttcaaccatgaaaagcaccaagaagatatgcgtatttatttaccttgtatctagtttacctttcatgcctagtattacatttgatatttacttttatttaaatgtatgcatactaggtgttggggacttgttctcaaatgctataaatcaagaacaaggcaacataaaaactgttaaatgttaa

SEQ ID NO: 39136 - DNA, 960 bp, Zea mays
  Peptide Sequence Number=SeqID_82511
atggccctggtctctggagaggagcgggtggagagccttggggatgaggagttggtacttgtggccagccggttcacgcggttccagaacaaccgtatgagccgccggcgtcgcgggtccaaggacggatgctacaactgtggcgatcctgaccacttcattgccagctgccccaagaagggcaaattggagtctggcccgcgcgaccatcactctggtcggcgcaagggcaagtactcctccagcaagtacaagtccaagggaggattcaacaaggaggcactcaagaagaagtaccttcagaaggaaaagatcaaggagtgtgccttcctcgcctccctcagcgacctcaaccacgactctaacaatgttatatcttcctcgagcgacgaggagactgagaggagggtcgaggacaagctgaatgggttgtgcttcattgccgacactgtaggaggcttctgcaccctggcacttggtgaggacgcggtcggcaccagcaatgacaaagacatcggcgacgacactacttctgaggtactaccttccgccgatgattttgccgctgagatagaagcgctgaacactgctttggctagtcaggataagttgcttaggcaggctactcgtgagaggagagagtttagatccaagtacgagagcacgcttagggaacttgagtctgctagagcttcagttgaggtgtccgacgagactgaatgtgatgagtgcgcttgtcggcgtttcgagaccggggggtccctaagccgacgagtgagtgtgccgcgtgccccagcccagatgggtcgagcgcgtgggcgaacgcgaaggggggaaaggagcgaggagggcggagtccggcgagagagagagagatgggaatcccgcggccttcgtgttcgtcccgcgcctaggtcgggtgcgcttgcagtagggggttacaagcgtccacgcgggtga

SEQ ID NO: 39137 - DNA, 797 bp, Zea mays
  Peptide Sequence Number=SeqID_82512
atggcaagaacagagaaagaggagggagatgtgctgctgtttggcgccggcaagggaagctgcagggcgtcggcggccatggaggagctcctgctggcaaccccacacacgcagcgaaggcagcgaccaaggggaaggggcgcctgcaccaggggacttggccatggagaagagcagggcgccggcgtgctcccaaggagctcggccatggctgcatctgctgggcgccctggaaaaaaacagggggcatgggcgccatggctgctggtggctccctgctgctgccggccaagagagcacagcgagatggggaaaaaagagagcagcggcgtcgcgccatgggcaggaaaactgctcgccatgggagcccacaaccatggcgtggaggagcttcctgcgtggcgcggctttgcacgcggctccggtgcagtggcgcggtgcgcccgccctgcccgccgaggcgacgtggcccgcccgcccgtggcttggcgcggccttgcgcccgccctgctcgctgtggcggcgtggctcgcctgcccgcggctcggcgcggccttgcgcccgccctgcccgccgtggcggcgtggctcgcccgcccgcgacctcggcgcagctcggccatggcggccggagctcggccgtgacgcccgacgcgtccccggcgtcctgcgcaggcccgccctggctgctggcgcgcggccatggccccgccgcggctttggtgcggtgtgcagccccgcccggcacgatttgctcgcgtggctcgcccgcgacgtcgcggcgtggcgtgccccctg

SEQ ID NO: 39138 - DNA, 1920 bp, Zea mays
  Peptide Sequence Number=SeqID_82513
atggagccgtcggcgtgggccgtcgccttcgccgcactctgcatcgtcgcgctcgcgccgccggcctcagggttctacctccccggcgtcgcgcccaatgacttcgagaagaaagatccacttcctgtgaaagtcaacaagctgacctcaatcaagacacaacttccctactcctactattctctcccattctgcaagccggataccatagttgacagtgcagaaaatctcggtgaagttcttcgtggagatcgcattgaaaactctccctatacgtttgaaatgagggagcctcagatgtgtcaagtagtctgcaagatatctgttggggagaaagaagcaaagcttctcaaggagaagattgaagatgaataccgtgttaacatgattcttgacaacctacctttagtcgttcctattcaaagagtggatcaagaaggtgcatatttctatcaacatggattccatgttggggccaaaggaaaatattcagggagcaaagatgaaaaatacttcatccacaaccatctatcttttacggtgaaatatcacagggatgagcaaagggatgtttccaggattgtggcctttgaagtgaaaccatacagcgttaagcatgaatatgaagggcaatggaatgataagaagacccgcctgacaacgtgtgaccctcatgctcaacgtatcattacttcgtccgagtctcctcaggaggtcgaagttggcaaggatatcatatttacttacgatgtggatttcaaggagagcgacatcaagtgggcatctcggtgggacagctatctattgatgacagatgatcagatccactggttctctattgtgaattctctcatgattgttctcttcctttctggaatggttgcaatgatcatgcttcgtaccctttaccgggatatctctaagtataaccaacttgagactcaggaagaggcccaggaggagactggatggaagcttgttcacggcgatgttttcaggcctccgtcaaactcagactggctctgtgtttatgttggcaccggtgtgcaattctttggcatgctgcttgtcactatggtatttgcggttcttggcttcctttctccatcgaacaggggtggactgatgacagccatgctcctgctctgggtgttcatggggttgcttgctggctactcttcttcacgtctttacaaactgttcaagggctcagaatggaagaacatcgccttgaggacagccttcactttccctggcagtgtgtttgctatttttttcttcttgaatgctcttatctgggggcaaaagtcctcaggtgctgttccattcaccaccatgtttgctcttgtcctcctttggttcggtatttcagtacctttggtttttgttggaagcttccttggcttcaagaaacctaccattgaagatccagtgaagacaaacaagataccaaggcagatccctgagcaggcctggtacatgaacccaatcttctcgattctaatcggagggatccttccatttggtgctgtcttcatcgaactcttctttatccttacttccatctggctgcaccagttctactacatctttgggttcctcttccttgtgttcctgattctcatcgtgacatgtgctgagatctcgattgtcctatgttacttccagctctgcagcgaagattacctgtggtggtggaggtcgtacttgacttctggttcctctgcactctacctcttcttgtatgcaaccttctacttcttcacaaagcttgagatcaccaagtttgtctcagctgttatgtacttcggttacatgctcattgcctcgtacgccttcttcgccttgaccggcacaatcggattctatgcttgcttcctgttcacaaggctgatttactcatcggtcaagatcgagtaa

SEQ ID NO: 39139 - DNA, 735 bp, Zea mays
  Peptide Sequence Number=SeqID_82514
atgagagtgttggttgaagttgaaggtcatgtgcaccagaacagtttgcaaactttgaatggcaaccagtcatctggatctttgcctgatgagattggttacctgatgaactttaacagattacaaataaaagataacaacatatcaggcccatacttaaactcttttgccaacttaataagaattaaacatctccttgttgataacaataatttatttgggcctcttccaccagaattagtagatacacgtagtcttcttgctatcttgactcaatgcttttttaatgagttatcttcagttcaatgtgatttattcattgtttttacacttgagcaggttctaggtgacaaggaccgaacacccaaaaagcacgccagcctcctcctccagctcctgttcgagatggtggtggcttcatgtttggaggaatcaggtccaccattgctgaaggtggtatggtattcaaagcttgttcttttctggatagcttcagctataaacattatcatagtccttgaattgaatgaacacattgtttcagggaacatgactgttgacactatattgggtcctcggaccattcagcatgagactgttgtctcagaagctgctgctgccaccccggctgctccagcgatcaatgttgatgcttgcagcatccattctaaggctttccaatattgtaacgttgacatgttggacgagtgtcgtggtggtggtgtgtctgcctaa

SEQ ID NO: 39140 - DNA, 225 bp, Zea mays
  Peptide Sequence Number=SeqID_82515
atggcgcacggcggttctggctcaaccgaagtgctccggcgagcaattagaccacccccggaggatatcctcgcccggaaggaccatggagacgtgcggcatgggaaaattgttaataggccaaacttcagtttgtcaccagcagatttgattgacatccccagcctagcccgaagcataggaaacaggatgatgaagctgaagaatgatgagctgaagccttaa

SEQ ID NO: 39141 - DNA, 141 bp, Zea mays
  Peptide Sequence Number=SeqID_82516
atggctccccttgcctctccggacagcactagcccgaacggtacagcaacataccggtgccgaacccgtgtctgcgacgctcgtcaagtgctcgatgaaataccgcatgcttgtgatgacatggccctatttgcaagttaa

SEQ ID NO: 39142 - DNA, 465 bp, Zea mays
  Peptide Sequence Number=SeqID_82517
atgggctgtaacacaccagttgcaggcctccaacagcagaccgaaacagaagacccaaatatagagcaggtccgcacgcgacccagaaatagggcagcttcgaccgcgacccaaacgctccagaaccaacggcccatatccggaacagagagagaaggcgaccagacagacgcccgacaggcgagcaagaggagctgcacagcaccggcgccggcagtcccctccgaccctcccattcccatcctgcagctgaaggtccaagcaggaactgcaagtttatttgctatgattagaatggaacatggttggtttggagaggagtttcaagatttccttgaccataacgatgggacctcctgctatgccgtttcaattgaagatatagataatgctactgctgttgagtacaacatggatgaaggggatacatcagctagggtcttcccaatttcatttgacgtctga

SEQ ID NO: 39143 - DNA, 474 bp, Zea mays
  Peptide Sequence Number=SeqID_82518
atgcaccgagggccataccccatacccgacaaactcctcaacaaggtcgcgcccgctactcatgcggacagcgcaccgaagggctccttcgacttcatcatcctccgctacctcaaactgcggctggtggacctggacctcgaatctacgcaggacctccgccacgaatcgatgcgcaggcagatgaaggccagcggcgaaaaaggcctcaaagacgaccaactcgccttctggctcggggacctcctccgcccccgggacacgccccactccactgccaaaatatccaagctgttgcatgtcttgcacacggaccgaggacatccgcgacacgccgaattccactgtgtcaccaggatgcaactcctccgccgccacattgctcagtgttgtaacaccccaggtgtttatattctgctcgacaacgagtatagatttaagcacgtgatatcagtggataaaacggatttttaa

SEQ ID NO: 39144 - DNA, 834 bp, Zea mays
  Peptide Sequence Number=SeqID_82519
atgtctacctctcgtatagctcgtggcttgaggattttcccttacgggcagaatattgctgctgttgtgtcggtagtgatgaacaaggatcgtcaggatgctgcgcagaagcgccgggcggttatcaggctccctgatcctaggcgtgaggcgaagagagcacgagggagcgcgaaggattctgccccctgcggtagccagccggcgccgactgcgaaaccggccgcacccggatccagcaaggtgttggagagcgcgaaggcagtcgtcgctggtggaaccaagcctgccctgggcaaagctgcgaaggcgcgggagctgccttcgccggggaagcgtgttgccgacttcggcacgaacattagcgtggacgactattttgttgatgtggctgccgaagtcgagagacttcgggcgcaacacgcggatgtcgtccgggagaagtcagctgcggagagcaaaaaccgcaggctggcggagaaggtggccgccttggaggccgagaagacggaccttcggcgcgagctggtggaggaaaggagggaggcaaaccaggccatcgccgaggcacaggctgcgcaggcggaggccaaagtggcgcgggcggagggaagtctcgccaaccaacgcgccgaggagtgggaggtgaggttcaacgctctgcgcggccgcgtggacaaggccgaggcctctacgcgctcggaggttgagcggacgcttgcactgctcgtcattctgatgaagcaatacgtgccgaagggtgaaactggtgctggccttgtcttcctccttcatatatatttggtggtagccggaaaagcaatcaaggagtga

SEQ ID NO: 39145 - DNA, 120 bp, Zea mays
  Peptide Sequence Number=SeqID_82520
atgcagggccaccctggatcgtctggccccacatgttgtccccactgtattcagtgctcaggaggagatgctggcaacatcgaggactttgaggagttccaggactacgacgagttctag

SEQ ID NO: 39146 - DNA, 633 bp, Zea mays
  Peptide Sequence Number=SeqID_82521
atggcgcagagactcacccggtccacgtgcgccggcggggctccgaactccggcgagcatgattgcgcctttccggtggcgagggtcctcagttcaagcctcggcaagctttacagcctcccagggaagctacctaggggcttggatcaagcggaggagggcggggaatggtttggccacggcggttgtcctcgggcagctctggcgggtcgcggagaggtcgtcggagctagggacgagctccagggtgttgggcgcgggacagggcatgcaacggggaagaggttgggcactggggcgggctttatagccgtggcgcgggcgtggtcacaggcggccgcggacgcgcgggggttcgcgcacgggcgtgctctgagcgcgcccccgagtgtcagcctgcgtcgaacacgtgtgtgtttgcttctgccatggttcaacggccgattggagcaccttagcgtgaagatcttggcaaaaccactatgtacgccctccccccttaaaggaatctcgtcccgagatttttttggtagagtcctttggaggagtgccatgaaggtagcacttaagtgggtaagcggacacatttccgtagctgagatacatggaacacactgtgaactgctgacatga

SEQ ID NO: 39147 - DNA, 455 bp, Zea mays
  Peptide Sequence Number=SeqID_82522
atggtgcccaggcgcccagcccctgctcggctgcttccaactctacttgacacccgagttcctcccctccaacagtcgtgcctccccctattgctcctctccttcattgacgagagctcctcagatccatggtgcaaatcgctcagggccccgatcggcccaagtcgaggccttggcacacagcagcagccgagggatctctacaacatgtgcgccgacccgatccacgcagccccggtgcgatgtcgtttgctccgtcgaaccctctcaccccctctctcgctctgcgcacgcgaccagatagctctgccgccgctcaccgtcgaccaccgtccgttctacgaccgtcgccgagcccgcgccccgtatgttgcctcgccggagcccgccaccgtcgacccgaggctccaccgcacctccgccgttctccaagtgtcccggagttcgcactcgag

SEQ ID NO: 39148 - DNA, 483 bp, Zea mays
  Peptide Sequence Number=SeqID_82523
atgtgccaaaaacttgtgtcgctcgcagggacactagcaggaatgcaaaaacctggtcggtgcggcggggaggttcacagagtcggcgaccatcgcccatctcgagagtgcaaagggtccattttccttatagtcaccaaaggggacttcctcgcagcgcagcacctctcggaggagttggagaaggagaggcttctcctgtcggagatggtgaatgcgatacaagggcgcttcggggtgcttccctcgcccaagtctgaattggtcgtctcctgcctcgaaggcctcaccgatcagttctgggagctcgagaaggaatccttttgtcacggaatctgccaagatttcatcgtcataatgtctcactatgaaggggatcgagctaaaggagctaagcaaaggctattacgacgcttggaactcctcgcactcgcctatgccttccggcgcctcgagagcgcctttccccttaaacaagcttga

SEQ ID NO: 39149 - DNA, 495 bp, Zea mays
  Peptide Sequence Number=SeqID_82524
atggcgcagagactcacccggtccacgtgcgtcggcggggttctgaactccggcgagcacgattgcgcctttccggtggcgggggtcctcgggcagctctggcgggtcgcagagaggtcgccggagctatgggcgagctccggggtgttggacgcgggacaggggatgcaacggggaagaaggctgggcactggggcgagctttatagccgtggcgcgggcgtggtcacgggcggccgcggacggtagggggttcgcgcacgggcttgctctgagcacgcccccgagtccaagtgatctcgacgggacaggggaaagactttggatgtccttcagcctgggcgggatgccaactctttcgttacagacctccttggaccttcaggagagattggtcgccaccaacactgtgctcaaggatgctcatgagttagagctggagcttgctgaccttcgtgagggtgtgtacgaggtggttgactttgttcgggcctag

SEQ ID NO: 39150 - DNA, 855 bp, Zea mays
  Peptide Sequence Number=SeqID_82525
atgaacacaaaccacgtaacaatattacagctaggacaggggcaacttctcacctctatatctccctaccccgaccatatcttgtcttgggactcacatcaaaaaggtaggatacagtgcaaggaagagaccgtacacagtggttttgccaagatcttcacgctaaggtgctccaatcggccgttgaaccatgacagaagcaaacacacacgtgttcgacgcgggctgacactcgggggcgtgctcagagcaagcccgtgcgcgaaccccctaccgtccgcggccgcccgtgaccacgcccgcgccacggctataaagctcgccccagtgcccagccttcttccccgttgcatcccctgtcccgcgtccaacaccccggagctcgcccatagctccggcgacctctctgcgacccgccagagctgcccgaggacccccgccaccggaaaggcgcaatcgtgctcgccggagttcagaaccccgccgacgcacgtggaccggcgtacatattcttattcattgcattcgatagattgcaacctcgctgacggagagtacgtcctcgtgccagagcaaggagttgctcaggaggtagccccggatccagcaccagagcctgcactagaggatctgcctgccccagctttggaaggcaagcccagacatatcccctcacgcgacctgagacgtggtctcccattccggttatggtgggtacaagtgcggtcactgcacgacggtagtcggggttctctggaggacatggttgctggagtgacttggccgtccatcttgccaccgggttggacagtcgagtgggatcctgcctcggctgaggaggagcatgaggagtga

SEQ ID NO: 39151 - DNA, 150 bp, Zea mays
  Peptide Sequence Number=SeqID_82526
atgtcaatggagggtggtgctttaggatctgcagctgtgattgactctgctatggcagaagctggtgcagttcaccctgacttagcgttggcacttcaaatgagtaaggtgtttgaagagagaacgtttgtgtcatgtatccttaattcg

SEQ ID NO: 39152 - DNA, 399 bp, Zea mays
  Peptide Sequence Number=SeqID_82527
atgtcgggagcatccgccaagagggagatcgggaccggcgagaagcccgccacaagccatgggaaagctccatccggggagtccgccaactgttggttgctaaaggttagggaccaacacatcggcggcctggccttcgcgcttgccgccaggcggaaggggttcgaggtgctggtgctggagcgggacgtgagcgccgtctgcggggaagggaggtaccgcggcccgatccagctacagagcaacgcgctcgccgcgctcgaggctcgggtgcgcctccccgctcgctgccctcgcgcctctggcttctgcaccgccgtcggccagggagacacaaccgacctccctctccgccagcggcgaggagaggaaggccatggtgagggtggtggcggctga

SEQ ID NO: 39153 - DNA, 1158 bp, Zea mays
  Peptide Sequence Number=SeqID_82528
atggactcgcgctgcccccatctgctactgctcctccctctcctcctcttggccgccctcctgcccccgccgtcgtcgggggtgccggaggtcatctggctgccgacgagcgggggagcggggcccttgtcctgcgcgccgccggaccccgccgtgtacgaccgccccgtcatcggcatcgtctcgcacccaggggacggtgcgggcggcaggatcagcaacaccaccgcgacctcctacatcggcgcctcctacgtcaagttcgtcgaggccgccggctcgcgcgtcatcccactcgtctacaacgagcccgaagaccgcctcctcgagaaattgagtttgttgaatggagtgctgttcactggtgggtcagagaaggaaggtgtatattttgacacgataaaaagagtatttcagtatgttttggacaagaatgatgcaggtgaaccatttcctttgtttgcccaatgtcttggctttgagcttgtaagcatgattgtcagcaaggacaataatatcttggaggcatttgacgcccaggatcaagcatcaactcttcagtttcccagctatgctttggagggttcagtttttcaaaggtttgacactgacctcatcaagaaagtcagcaccaactgtcttgtcatgcaaaatcacagatatggtatatcaccaaggcgatatcgagagaacgatgcactatcaagtttcttcaaaatcttgactacatcacctgatgaaaacggcaaggtctatgtctcaactgtacaagccaataattatccaatcacttgcacgcaatggcatcctgagaaagccatttttgagtggaggaaaccaatgatcccacacagcgaagatgcagtacaggttactcaacattttgccaatcattttatcagccaagcacgcaagtctccaaacaggcctcctgccgacaaagtgctggataacttaatttacaactacagtccgacatttaccgggaaaaaatcattttctgaatttaaaagtttctccaaatcaggtgaaggtcgaatgttcctggacctgattcatgaaatccatcgaatccaatttgtttggagtgacgtctttgctatggcgctatggcttggctcaagcatcttgcgtcgagaacgtcaccgtgttacctag

SEQ ID NO: 39154 - DNA, 492 bp, Zea mays
  Peptide Sequence Number=SeqID_82529
atgaagaaagtagcagtggtagcaacaatcctatcagggatctggaatcaagtcgaacagcttcaatcagaactccgttacaggaatgatctatgggtcgcggatgcagtcatccgctacttgcaagaccaactcgcgaaacgagatctagtgctcgattggacgggtaactctcgtctactcacctgggctaaggaagccaaagctcgagactgcgtgaaggagcttagcttagtcacggataacttgcaggtctgtggtaatacactacatgaagaagttcatgtgttgtattcgcaactgcacccgaacgtccctgcgaatcctgtcgggatggaagccagaccttctcatgtagcgggagaagcacttcatggtgaactggacctttttaggccccctccctctatgaagttggttgacgaatggtcttctacccccgacagtaaagctaccaaaagtgagaagaagtggcttaccaagtgcccgtaa

SEQ ID NO: 39155 - DNA, 393 bp, Zea mays
  Peptide Sequence Number=SeqID_82530
atggaccgggcccaagttctctggaaagggacgcctgggagggagggaagcggatgggggctggcgacgcgcaccggccgtatgcggaacggctcctgctggtccgccgatcggctcggggcgtggaccgttgtcgcccgcgccggcggccaaagcccgggggcccgaggcgcccccggcagccgtcgtcggcgcggacggtatccgcgcgcctctggcgcgcccctcggggcgctgcgccacaacggcctgcgagctccccatccgacccgtcttgaaacacggaccaaggagtctgacatgcgtgcgagtcgacgggttcagaaacctgggatgcgcaaggaagctgacgagcgggaggccctcacgggccgcaccgctggccgaccctga

SEQ ID NO: 39156 - DNA, 612 bp, Zea mays
  Peptide Sequence Number=SeqID_82531
atgaagaatgtagcaaaatgcgatacctggtgtgaattgcagaatcccgcgaaccatcgagtttttgaacgcaagttgcgcccgaagccttctggcggagggcacgtctgcctgggcgtcacgccaaaagacactcccaacacccccccccgcggggcgaggaacgtggcgtctggccccccgcgccgcagggcgaggtgggccgaagcaggggctgccggcgaaccgcgccgggcacagcacgtggtgggcgacatcaagttgttctcggtgcagcgtcccggcgcgcggccggccattcggccctacggacccatcgagcgaccgagcttgtcctcggaccgcgaccccagaggcgtcctcagcgacggaccgggcccaagttctctggaaagggacgcctgggaggggttcgagttggagcacgcctgtcgggacccgaaagatggtgaactatgcctgagcggggcgaagccagaggaaactctggtggaggctcgaagcgatactgacgatagctggagcccacacgagttctatcgggtaaagccaatgattagaggcatcgggggcgcaacgccctcgacctattctcaaactttaaataggtag

SEQ ID NO: 39157 - DNA, 93 bp, Zea mays
  Peptide Sequence Number=SeqID_82532
atgacaactgggccccacacctctcttaagatgggggcgggttctaggaagagctctatggcaaactcactttccgctctggtggcatacccg

SEQ ID NO: 39158 - DNA, 702 bp, Zea mays
  Peptide Sequence Number=SeqID_82533
atgggggccgcgaaaaagaacccacggcgcctcgggcgccaaggaacaccagtactacctcctgccccgcggagcggtcggcccgccttccgctccccgggcagcggttacaccttaatcgacacgactctcggcaacggatatctcggctctcgcatcgatgaagaacgtagcaaaatgcgatacctgcgtcctggcgcgcggccggccattcggccctacggacccatcgagcgaccgagcttgtcctcggagcgcgagcccaggcgagagaccgatagcgaacaagtaccgcgagggaaagatgaaaatgactttgaaaagagagtcaaagagtgcttgaaattgccgggagggaagcggatgggggctggcgacgcgcaccggccgtatgcggaacggctcctactggtccgccgatcggctcgggcgtggaccgttgtcgcccacgccggcggccaaagcccgtgggccctaggcgcccccggcagccgtcgtcggcgcggacggtatccgcgcgcctctggcgcgcccctcggggcgctgcgccgcaacggcctgcgagctccccatccgacccgtcttgaaacacggaccaaggagtctgacatgcgtgcgagtcgacgggttcagaaacctgggatgcgcaaggaagctgacgagcgggaggccctcacgggccgcaccgctggccgaccctga

SEQ ID NO: 39159 - DNA, 315 bp, Zea mays
  Peptide Sequence Number=SeqID_82534
atggtggctgtgcatgcctcctggcggtggacggttctggtcccggccaccgtcgcgcccagggaaatggctttgccttgccggtcgtcgttcttcgctcagcaaggtttcgttcttagcgccgcccttcaagttcgcgtccttggcggactcgcacctccgtgtcgtgttcgctcatccatgcttgtcgaccccgacgatctatatttcaattgcacgatacttgcgttgagctccgaagccccctgtcgagctcttccccctggaagtcgccttcgagcacaacccctgccaagtgttcgctgggaggtctga

SEQ ID NO: 39160 - DNA, 576 bp, Zea mays
  Peptide Sequence Number=SeqID_82535
aatcccgcgaaccatcgagtttttgaacgcaagttgcgcccgaagccttctggcggagggcacgtctgcctgggcgtcacgctaaaagacactcccaacacccccccgcggggcgagggacgtggcgtctggcccccgcgccgcagggcgagcgtcccggcgcgcggccggccattcagccctaaggacccatcgagcgaccgagcttgccctcggaccgcgaccccagaggcgtcctcagcgacggaccgggcccaagttctctggaaagggacgcctgggagggtgagagccccgtccggcccagaccctgtcgcaccacgaggcgccgtcaacgagtcgggttgtttgggaatgcagcccaaatcgggcgggttggagttggagcacgcctgtcgggacccgaaagatggtgaactatgcctgagcggggcgaagccagaggaaactctggtggaggctcgaagcgatactgacgatagctggagcccacacgagttctatcgggtaaagccaatgattagaggcatcgggggcgcaacgccctcgacctattctcaaactttaaataggtag

SEQ ID NO: 39161 - DNA, 570 bp, Zea mays
  Peptide Sequence Number=SeqID_82536
atgccgccgggctccggcccggcacgctgcccccccccgaacctcccgcggggaaggggggccgcgaaaaagaacccacggcgcctcgggcgccaaggaacaccagtactacctcctgccccgcggagcggtcggcccggcttccgctctccgggcagcggttacaccttaatcgacacgactctcggcaacggatatctcggctctcgcatcgatgaagaacgtagcaaaatgcgatacctggtcgtcccggcgcacggccggccattcggccctaaggacccatcgagcgaccgagcttgccctcggaccgcgaccccagaggcgtcctcagcgacggaccgggcccaagttctctggaaagggacgcctgggagggtgagagccccgtccggcccggaccctgtcgcaccacgaggcgccgtcaacgagtcgggttgtttgggaatgcagcccaaatcgggcgggttcgagttggagcacgcctgtcgggacccgaaagatggtgaactatgcctgagcggggcgaagccagaggaaactctggtggaggctcgaagcgatactgac

SEQ ID NO: 39162 - DNA, 186 bp, Zea mays
  Peptide Sequence Number=SeqID_82537
gttagtgcttttggcaaccaaacccctcagccaaacagctgcatgtctagaggtagaaggagtagactcctcacaccgggttctctggaggacatggttgctggagtgacttggccgtccatcttgccaccgggttggactatcgagtgggaccctacctcggctgaggaggagcatgaggagtga

SEQ ID NO: 39163 - DNA, 888 bp, Zea mays
  Peptide Sequence Number=SeqID_82538
atggggcaagcctcccaggttgacccccctattggagcgaccatcatgccgggggaggctgctgacgcggccgcggccccgagcccgcctgacttgttgccggcaccggtatcgactcctgccggggccatcgttgattcgcccgcggagccacccgtcgccgtcgacgtcgggatggctgaggcaccgtcacccgtggtcatccctgacctccccgttctcgatcacgaggagagggcggccatcgttgccgaggtcggtgatcggaggcctgccaccttagccgaggagaggcccagtacgtcgactgtggagacaacaactttgttattagctgatccactggttgccattgaaaatcggaagaaaattagcgccaaacttgctcggtcagtccaactgaatgccattcgccatggtacagtaactgaacggatatggttgccagcatggcttgctcgtcgacggcgacctctctgcgcgaagattcacgccgccgccgtgatccgtgttcactggcggttggataactacgacagagaaaagatctcacggcggggaagggataggattgcgccatggatattttcgggttgccatggtctcgcagtaccccgaccacgtgcatcaacaacgtggccgtgcgggcgtcaccggagtttgcatcctccgccgcgattgtgccacgcttccgctaccgcacccacctacatcccaaatccctctctggcgagcgctaatttcggatttcccccaaattcgctcaagaacaccgtaacagccgcctctccgtggccagcgctcctcaggttagaacatacccaatcgcttagtgttctagcctctgttaagtcccttattgctcgtgaatctgtccaattgcgctaa

SEQ ID NO: 39164 - DNA, 288 bp, Zea mays
  Peptide Sequence Number=SeqID_82539
atggccgccaccgtgtaccggagggaacgaggcccgcggcgttttggccggaagctcgatagtggagacggcggggagcgtccgagaggagccagaagcggagcaccacttgcacgtggagaaggcccgcggctctatacggagttactcgaccgagggatgaaggccaagtcacaccaacaaccaaagcaaggaggtacctgcaaaaattgtgccacaagcaaggctgagtatactaatactcagctagacttacccggtgtgaggagtctactcctctacctctag

SEQ ID NO: 39165 - DNA, 537 bp, Zea mays
  Peptide Sequence Number=SeqID_82540
atggcgcggtgccccctgcttcttcctcccgcagcaaggcagcaagcagccattcccatggccgagctcacctccctgccgcgagctcgccaacaatctcccccactcagacctccattccccttgctgctgctcgtcgcgagctctctctggctccttccccaagtccggctggagcttgcctcctccatggccggcgcccagccgcaactccaagctccctgcaccctcctcctccaacgccggccaccaattcaccatctccagccgcgcgtcttgctcctccctgctcccagccagggcgcccagaaaatcccccagccgagccccctcctcgctgtcctccgtggtgcccgccggttgttcgacaaaatgcgcagcaagctccgtcgtcgatctgtgcagcccctatttggttgtcgttctgcctctgtcaacctcctccgtgcacgtgcaacagcagccgctgccccttcgcgtcgagtgtgccgacacggatctacgcagtcccgacgcgatgttgtcaaactccggtaa

SEQ ID NO: 39166 - DNA, 456 bp, Zea mays
  Peptide Sequence Number=SeqID_82541
atggacagggacgccattgggctgctggagaaatcagggcgccatccatgggaagaaggaggagctcgcgcccatggagtgggagagctgggcgaccctgaagtttctgcgcgttggagaagacagcaaagggggaggagctcgctgctgggctgctcgccggccatggagaagagcagagaaggtcgtggccaatgggggatcaggggcgtcggcgtgctcccagggagctcctgctcgtgcggtaaaaaccagagagaggaggagctaccaccatgcctgaaggggagaggcgcctgctgcttgaggaagaagaaggggaggagccgagctcccagctgcagccgtgggagaggagaggaagacgccatgggcagggagcgtggagctgccggggggaagaagagacaaggaagaaggaagtggcggctaggaaaaatgcaggggtgggagtga

SEQ ID NO: 39167 - DNA, 489 bp, Zea mays
  Peptide Sequence Number=SeqID_82542
atgaggtggcgcagcggcgatttcgcgagcccagtgagaaattcccccgacgttggcgaccaactcccggtatcgcgaccacaagggtctgtcctgcagccaaggggagtcgccaagccccacatcgggcgcgcgatcgaccgcaagccggaacacccccgcagcagccccagcttaactccgcggcggtggaaaatctcgcgattgcggcaagtcgcaacacacaggcctgtaccaggtgtatcaaggatggagaatcgaagcgcgtcgcgggtcgacgagggaacacagcgggtcggcgagggaacgcagcggttcacatcgcaaagcggttccgcggcagctggagcgcgtggaggaggtcgagaagggtcgtgcatcgagtaccgagggaatgggcctgggcgatggcgaaggtatggatttgcccctggcggcgcttcttcccggctgtccaacaatggtggctcaagcgtggtgcgaatcgag

SEQ ID NO: 39168 - DNA, 174 bp, Zea mays
  Peptide Sequence Number=SeqID_82543
atgagcaagaacacaagagacacaagatttatcccgaggttcggtcacaccaccaaggtgccctacttcctcgttgaggcgcccacaaagagccggctagagttgaaaagctcactcgctgaagttcgctcagctgcagctcaagagctcactcagctgaagtcactcagctga

SEQ ID NO: 39169 - DNA, 537 bp, Zea mays
  Peptide Sequence Number=SeqID_82544
atgctgcggtgccccttgcttcttcctctcgcagcaaggcagcaagcagccattcccatggccgagctcacctccctgccgcgagctcgccaacaatctcccccactcagacctccattccccttgctgctgctcgtcgcgagctctctctggctccttccccaagtccggctggagcttgcctcctccatggccggcgcccagccgcaactccaagctccctgcaccctcctcctccaacgccggccaccaattcaccatctccagccgcgcgtcttgctcctccctgctcccagccagggcgcccagaaaatcccccagccgagccccctcctcgctgtcctccgtggtgcccgccggttgttcgacaaaatgcgcagcaagctccgtcgtcgatctgcgcagcccctatttggttgtcgttctgcctccgtcaacctcctccgtgcacgtgcaacagcagccgctgccccttcgcgtcgagtgtgccaacacggatctacgcagtcccgacgcgatgttgtcaaactccggtaa

SEQ ID NO: 39170 - DNA, 456 bp, Zea mays
  Peptide Sequence Number=SeqID_82545
atggacagggacgccattgggctgctggagaaattagggcgccatccatgggaagaaggaggagctcgcgcccatggagtgggagagctgggcgaccctgaagtttctgcgcgctggagaagacagcaaagggggaggagctcgctgctgggctgctcgccggccatggagaagagcagagaaggtcgtggccaatgggggatcaggggcgtcggcgtgctcccagggagctcctgctcgtgcggtaaaaaccagagagaggaggagctaccaccatgcctgaaggggagaggcgcctgctgcttgaggaagaagaaggggaggagccgagctcccagctgcagccgtgggagaggagaggaagacgccatgggcagggagcgtggagctgccggggggaagaagagacaaggaagaaggaagtggcggctaggaaaaatgcaggggtgggagtga

SEQ ID NO: 39171 - DNA, 632 bp, Zea mays
  Peptide Sequence Number=SeqID_82546
atgaccgcgtcaaaaaaggaatcaggaaaggggatatttcaaaaaaggatccttctcagcgaaggaagcaggccccgagccctcctactgatcaggggttcgaaggttgcgccctgcggggttcggcaaccgccccagagcactcgggctctgagccctttactgatcaggggttcgaaggctggcccctcggaagggttcgacagccgccccagagcacgcagagtcagggatgaccctgggtacgtccgttacatggccgaggcttgggctacgctcccgaggtaccctaggacatttccgagactagcgggaacgatttgtaatggaatcccaccggagggaggcaccgagccctcggaccctatcgaatgggtccgggtccagcaaatcacctgcaggggttcgaaggctggcccctcggaagggttcgacagccgccccagagcacgcagagtcagggatgaccctaggtacatccgttacatggccgaggctcgggctacgctcccgaggtaccctaggacatttccgagaccagcgggaacgatttgtaatggaatcccaccggagggaggcaccgagccctcggaccctatcaaatgggttcgggtccaccaaatcacctgcag

SEQ ID NO: 39172 - DNA, 744 bp, Zea mays
  Peptide Sequence Number=SeqID_82547
atgcctccaagtggttcagtctcccatggttataacgtggctgagagcggttgcctgctccaggttgagacacattctgctttgctggggcattggggcctgactcatgctgagctgccttcttcggacattgcatcacccaatggccttgctctccacagtggaaacatgctatgtttccatcctgagctggaagacgaggtgcctgctaattctgcctctgaaactgacctcctcctgactgattgttctagcgattctgatagtggtgctgaggatactgcctttggaattgctgctgctgaggctgggtccactgatcttgcacttgcgatcctccatctctttgtgcttcctctctgtcatgattgctctgtcaatcaggtgctggaatgtcgggaaggtgatggtgttggggttggcatgagtggcaagataagactcccaccaagactgagctgctcctctcaacagacggggaccatacatgactttctccctgtcattgcactgagcgagtctgaccaatggcttgaactgcctgagtctgcatcaggaacatctgctcgatggacatcgggggcgggggcagcagctgctgttgctggggtgcctcatcctgctaagctggccgctcctgctgagcacgccttcctcctctgcgcctgttttctgacatctgcagaatgcaaccacacatcagaactgatcttgcaaatcttgcagcataagaaaagggtatag

SEQ ID NO: 39173 - DNA, 567 bp, Zea mays
  Peptide Sequence Number=SeqID_82548
atggggatgctcgatccgaaccagggctcgttccgtgacctccccctctcaaggtcggaagatggacttagctccccaatgggcatgggcatccacaacttggcccaggaatgccccatggccaactcatcgaagggccactcctcgcccacagagggcactagggagactcccactagtaccacgatgaaccatcgtttgagccaagcctttcccaggatggtcgaggccacacaaccaagagacaataattattgcgatggcggacatggcggttacataggggcgctgggcggacgcacgacaaaactaccaacacccattgtcgtccggccaatgacgggggccgaccaccgtggttccctcgtgtgggagatggatatcccccaggtccccatgaacattaaaacgtgtcatgggtcgcctggcaggttctctcctaggtcgtcctatgggatgggccaactaaatgttgccacgctaggcaggcccggtctgagccgacaaaaaccaacacccgaattaagcgctataggggcacggacatatcggccaccacaattttaa

SEQ ID NO: 39174 - DNA, 222 bp, Zea mays
  Peptide Sequence Number=SeqID_82549
atggcgcgtgggccgcggaaacggattggtattccttgcgccgacgcaggggacccacgggtcagcctcacgaattacttggccgggttcttccgtgccgagtgccatactgccacttcgccttcttcgtcctcctccctgctcggccatcctcaagccctcgctgtgaacgcccgctccgtcgtggcggattcgagatccaactggggcgcccgccattga

SEQ ID NO: 39175 - DNA, 330 bp, Zea mays
  Peptide Sequence Number=SeqID_82550
atggcggtgcagcggcaggggaggcagactcgcagacctctggcgacgaaggcggtgcgcaagtcgacaccggcgtttcgcgatggcccgcacgaagcagacgtagacgagtcagcggcgcccgtacgaagcagacggtgcgcagaagcagacgacgcgcagatctcatggcgcccgtacgaagcaggcggcgcgcagatctcagcggcttggcccggcgaggacctcggcggcaggcagagcagggagatggtgctcggcgaggccggcgacgagtcagcggcggttagggttagcggaagcgaggtcgcgggagcgaaccttctgtga

SEQ ID NO: 39176 - DNA, 162 bp, Zea mays
  Peptide Sequence Number=SeqID_82551
atggctcctatattctcgctcagggatctgggtatgggcatcgtcccacagctttttcctgagggcggaggttgcctttggtacagtctatgctcaagtaaagaagaaggcgtcgaggtggatctccaggagttccatcacttcgacgagtttgaggattag

SEQ ID NO: 39177 - DNA, 306 bp, Zea mays
  Peptide Sequence Number=SeqID_82552
atggaattactcagcaagtcttacccgactaaagaaaagactctcaagggtatgctggttatatgggagtcaagggtttcaaggagggtaatcaagatcaaggaagggaaaataacaagcttaggaaaaattggtttcacaatttttccatttttctacagatttctaaagctggctaaaaatagaaaaaggaaaacaatgaacagacttgggccgaaatcaatccaagtcggcccaactacagcagaaatgcgcccgcgcgcgctcgaccacggcgactttgcacaaacgacccttgcgtcttga

SEQ ID NO: 39178 - DNA, 207 bp, Zea mays
  Peptide Sequence Number=SeqID_82553
atggcgagacggctcggcggcggcgccaaccgactccgacgagaaattaagcacaacagggagcaggagagggaaaaggagagggcaggggagaccctcgtcaagctctacgacccacctaatggagctagaccaccctgggttgccgtgaacgcccgtgttcttccccgatgcccgcggtcaccgtggccaaagcaaaccgagtag

SEQ ID NO: 39179 - DNA, 213 bp, Zea mays
  Peptide Sequence Number=SeqID_82554
atggccggagggagagcgacacatgaagatgtcgacgttgtgcttaaggtgtcccctgctgccggtgaaggtgctgcgcgcaacgttgcttgtggttgtggcagcggcggagaagacgagcacgagctatggatcggccgcggcgctagcaagccatctccatgcggccataaaggcgagaagggagggggtggtgtttcggggcgggggtag

SEQ ID NO: 39180 - DNA, 447 bp, Zea mays
  Peptide Sequence Number=SeqID_82555
atggacgccacgctcctcctcctccccgccaactgcacggccgccgccagcgggcggatgcggcctcgactgcctgcaggcccacatgtggcttcccctggtccctccgcgcggccaaggacctccatccgggcctcagccgtgtccgcagccctcgccgttcgtggcctcccgcaacacgcttccgtggccgggcaaagcactggaagttatagggttggtgatgttatgaccaaaagggaagagctccatgttgtgaaaccaacaacttcagttgatgacgcccttgagatgctggtgaagcataggatctctggctttcctgttattgatgatgactggaatttggtcgctatttttcatatatttgatcgtcctgggtgcttggacgctgggaaccatcataacccgtccggtgtttccataaccaccacgctacgatggtaa

SEQ ID NO: 39181 - DNA, 396 bp, Zea mays
  Peptide Sequence Number=SeqID_82556
acatttcatgagatacagaagcttttgagcaaaaccaacgggaaggttattgctgatgttatgaccccagcgcctctcgtggtgcgtgaaacaactaaccttgaagatgctgcaaggttactccttgtgactaagtaccgcaggcttccagtggtcgatagctcaggcaaactggtgagggcactgttgcgattcctttgtgcttctttttccttctgttctgttgcgctgagacagcttcttcctgtaaggttgggatcattacaagagggaacgtcgtccaagccgccctcgaaatcaagaaaaaggttgaagggacactctgagatgactacctccaggttaccgattgttctggtttcctgggcttctttggacaccaaattcttaacctag

SEQ ID NO: 39182 - DNA, 396 bp, Zea mays
  Peptide Sequence Number=SeqID_82557
atggcgtggtggataggttaccgaggaaagggggtctgcgagagggggaaagacggaatggtggttgtaacctcctccgtggtgactgcgcggtcttggggcgcccatggcattttcaggaagaaggagacgagctccacgcgggacttgcacgcagcgcacacgatgaccagtgggccccactggttagtcgtggaacatgcgccagcgcgggggaagccaggaaggagtgggccgtcgaagcgggctaaagtgggccgaatggttgtgtcggagaggaaatctccggccgggtggcggagtgcacccgccctaaatcctaagatgaggaggggcctaagtgttttgcttgttagttggaaaatgggaaggacacaagaacacacaaggatttag

SEQ ID NO: 39183 - DNA, 906 bp, Zea mays
  Peptide Sequence Number=SeqID_82558
atgaatgcaagaggagcgaggcatggctacttcccgggagatcgacccctttttaaaggaagatttccccactcgcgccccgaagtgtcacaggcaaagtctcccccgacgtgcaccagggttcccacccctatgacacggggcaaggccccacatgtcatacaggctgacctagagtacgaggaaggcgaaccaccacacaaggagcgtgcaaccgccccacggttatgcgccccttcattttcggagcaaccagcggtcaggaagacgcactgccgcacaaggagcgtgcaacctccccacggttatgcgccctttcatcttcgccgaatccaacggtcgagaagtcaaaccgccgcacaggaagtatacaaccgccccgcggttgtgcgccgcactcagtttcgctacaaccgacggtccaacatgggggcccaggcccacatgtcatgcagccggcgcgccgaaccagtgcggcgactcgaggcaccccgcgcatggcccaacagtgacattaagtatgaaggtcacgggccagttaaccgtgggaacaggctcgcatcctcccctgaggcgggcccgggggccactgtcggtatgctgaatcagggggcgggtgcactccgccacccggccggagatttcctctccgacacaaccattcggcccactttagcccgcttcgacggcccactccttcctggcttcccccgcgctggcgcatgttccacgactaaccagtggggcccactggtcatcgtgtgcgctgcgtgcaagtcccgcgtggagctcgtctccttcttcctgaaaatgccatgggcgccccaagaccgcgcagtcaccacggaggaggttacaaccaccattccgtctttccccctctcgcagaccccctttcctcggtaa

SEQ ID NO: 39184 - DNA, 654 bp, Zea mays
  Peptide Sequence Number=SeqID_82559
atgttcatcatcctcgctggggtggaaggcgagtcgagttggggtcctgccttccgcatgggctggcaacctgtttcttcctccagcattcgggggagaagggcgctcaccagccttgaggaggaggcgaacttcggctacgcggggccggccggctgcaggcgccgtcagctgccgcgtgtctggctccttggcctggatggctttggtgcggcctccggcgctgccttctgccgcctggtcggggcgtggttgtccatccatcgcacgggcgacagtcgcgccgtgcacaggaagacgggggcgaggaccttttcgcagtggcgcacgtgccgaggtgatcgccactgttggcgagtcgtcggtgcagaggtggccgctgccatcggtgctgaggtggtcgcctccgctggcgagccgctcggagctagctatcacgcggccctactggtgtggagtacccggccccccgcctggaatgcaggcttgatgtgtcgaggttggataccagcatatctgaaaagattgtcaacaactctcaggaggcaacccgccgggatctggatctgtacacagcttcagctagggagcgtttcagtctgggtggccaagttgcgtgtccggacccccttgggtcgcggctctagatactag

SEQ ID NO: 39185 - DNA, 936 bp, Zea mays
  Peptide Sequence Number=SeqID_82560
atgttcatcatcctcgctggggtggaaggcgagtcgagttggggtcctgccttccgcatgggctggcgacctgcttcttcctccagcatttgggggagaagggcgctcactagccttgcagaggaggcgaacttcggctacgcggggccggccgactgcaggcgccgtcaactgccgcgtgtctggctccttggcctggatggctttggtgccgccttcggcactgccttctgccgcttggtcggggcgtggctgtccgtccaccgcacgggcgacggtcacgtcgtgcgcaggtccgccacatccacggcttctcccttgccgccggccgcactgttccgccgccgtccgggggtcatacaagatgtcatacgcctcggggggtggcggccgcgttcttggatggtcttgtcctcactcccgtggggggacgggagcgaggacctcttcgcgcgcgctgaggcggccgccatcgccgccttcatctcccgcttcaccatggtacggggaaccatacctcgtacctccgacgcttccattatcactcctttcctacagggggtacgtgatgagaagatgttggaaaaactgatgatgcacgatcactccattatcactccatggtacgacgcttccattatcaccacgctctttgctctgaccaacaagtgtgctagggctgccgttcgtgcatggcactcggccccacaagtcggggctacccaaatgggtgcctcaggcgccgctgctcagggcaacgacaaggaaaataagaaaaagaaccacggtggtgagaagtcgttgctcggtgctccagtcgctgcgactacgactaggagccagaacccgcgtggcaagcgcccacgccagcagggtggcaagggtggctcatgtcctatccaccccaccaactcacagcatacctcattcatgtga

SEQ ID NO: 39186 - DNA, 315 bp, Zea mays
  Peptide Sequence Number=SeqID_82561
atgtggcagcaaaaaggatacctggaggtagtcatctcagagtgtcccttcaacctttttcttgatttcgagggcggcttggacgacgttccctcttgtaatgatcccaaccttacaggaagaagctgtctcagcgcaacagaacagaaggaaaaagaagcacaaaggaatcgcaacagtgccctcaccagtttgcctgagctatcgaccactggaagcctgcggtacttagtcacaaggagtaacctgcagaacagaccacttttagaggataataatattgaagatgtccaggagaaagcaaaggagaagtag

SEQ ID NO: 39187 - DNA, 306 bp, Zea mays
  Peptide Sequence Number=SeqID_82562
atgagggtggtatgggacgcccttggccaagaaattagggaagtcttatgtcaggtgatggttttggtcattggggaacagaggcatctgttatggtgtaacaccctgaatttggggtcgccgaggtccgccaccgtcgactcgggttgccgccgcgccttcgccgccaccgaggggtccccggagttcgccttgagccgtgagctgcccgaggaggcccgcctgttgactgctcatggtgccgtgtgcgcactgcccgaccgagcctttgatgtttggcaagatcagaggattgattttcgctga

SEQ ID NO: 39188 - DNA, 657 bp, Zea mays
  Peptide Sequence Number=SeqID_82563
atgatggaagataatgatgcggttggaagagacatcaagacattggtatcccttatggtcaaaagagtatccgaggaagacacgccaagcgaaacgaggtgcaagtttgtggggagcaaccgtggaaaggttgggatagcaagcgcaaccaaaaacacgaaggtgttcataggagggggagtaccaaacagggcaacatgggggcatgaggccctgatggtgtttgtggggagacaattcagcaaaaagtcagctaggaagcattaccctgactgttccctttcttcttgccatattctaggtgggagtgggcttcctcctggtcctagaggagtgtgccagagtagagaacaaatcatgtcaagcggcgctagccttctactcgagggcggcggccttctcctgttcgaggagatgagtggctacctggacacgaatgtgtgcattggcagcttccttgtccgcatcctgagccgcagcgaacatgtcgtcgatcttcttgcgaaaggccacaacctcatcctcagcgtggtgcgctcctcgtcagtcaatgaggtcctgtcatgggtgcgggagaaagagggagaagatgtgtgtacgttgctacgaccacacgacacaacggtgacaacagccctagaggggccactgccctag

SEQ ID NO: 39189 - DNA, 663 bp, Zea mays
  Peptide Sequence Number=SeqID_82564
atgaacaatcgcgcaaggagttggcaggggcgtagccggtggtcgggctggggccgctgtgctggcaggggcacatccgcgcaacgcagggtggcgcgccgtgctcccgcggctcagagcagggcggagctcagcgcagctgcgcagggcgagctgacgagtgatgcgggacacctggggcacgtcggacgcaggacacaacacagataccagggaggatcagggcgcagcacagggagccaggggcgcggcgggtcggcggcggcgcagggtgggctggtggcttggtgctttggtgggctgattgttgctttggtgggctggcgcctgggctcaatggacaatggtgggctggtgacaggaaaagactcgcgccggatttttgccaagattcgcacgtttgcgacttgggtgagctgtggaacacgggcagaagaaaagctccacgtgttcgacgcgctctgtgtgcgccagagcacgcccgcgcgcgccccgcgtcgcgccaacggccagccggcgccctggcccgcgcccgcgcctataaagcccgctcaggcgtcggctacactcttccgcgcacgcccaaacctcaccggagctcagttcaccgccgtttgcccgtgcgcgacgtgcccgcggccacccgagccactgccgccgtag

SEQ ID NO: 39190 - DNA, 519 bp, Zea mays
  Peptide Sequence Number=SeqID_82565
atgacaagagcatcctccaccatgatatctgtgctcaagaagattatgttagcaggcttacctggcataaatctgagggaggagctcctcgacgtgctctgcaaggaccacagcttcgacatctacagagacgacattgtcttcagagaccctctcaacacattcaagggcctgggaaactacaagaggctcttctgggcgctgcgcctcaccggccgggtcttcttcaaggcgtcgtgggttgaagtggtcagcatatggcagcccgccgagaacagcatcctgcttcgctggaccgcccacggcgtccctcgggtgccctggggctggtgggacggccacgcccgcttcgacggcgcgtccgtgtacaagctcgataggaacggcaagatctacgagcacaaggtgcacaacgtcgctacgaacccgccggccaagtccaaggtcctgccggtccacgagctggtcaggtcactcggttgcccctccactgccgaacccacctgttctgacttctga

SEQ ID NO: 39191 - DNA, 732 bp, Zea mays
  Peptide Sequence Number=SeqID_82566
atggtcattacacagggaatagcacaaaccctagacggttttgatcgtgattggaagaagattgaagcatatgtcggctcgaagactgttatacagataaggagccatgcacagaagtacttcttgaaggttcagaagaatggcacaggcgagcatctgcccccacccaggccaaaacggaaggcagctcatccatatccccagaaatcatctaaaaatgtttctcaaactattttattacaagaacaacctactcagcgggagcaaggttctgtcatgcctatggatactgctactgtgataaacacaaatgcgaatgtggcagtggcagtggcagtgccttcctgggacaatactcttgctcaatctctcagtgctggtcttgttccaggtgcaacaaataactgttcaagtagcatagagagtccatctggtacttggccaacttctgaagcagttgagcaagaaattgtggttccatcactccatgctatgccagattttgcccgagtatacagcttcctaggaagcatatttgatcctgatacaagtgggcatttgcagaggttaaaagtgatggatccaattgatattcaaacggtactactacttatgagaaatctttccacgaaccttaggagtcctgactttgagcaacatatctctcttgaaacttttgcagcttctggtcatgttcgccatgactttgcccagcaagtttatgctgactaa

SEQ ID NO: 39192 - DNA, 441 bp, Zea mays
  Peptide Sequence Number=SeqID_82567
atggccggttcaagggatagctctgatatttctccaagcaacatcatagagccgacttgggaaaccttgccggccgacgagcagctccagttcgaggagcacaaggagcggatgatccaggaggtgaaagcaaagttcttggccaacttcaaagtggacaggaacaacaaggtcgtccgacatcgggcgacggatccggcttcgctccaacccacgccagatatccccaatgtacctgagcactcaacgccttgtgctaaggacgcatgtgccctcagctacctaggttatccccagaatattcccataaagcggggttacagactaccagcggctgcagcgaaggcttcgagcgaagggtggcgtctttgccttcgccccaacatttgccctccgagggaccagttcgacaaagtcatctggtgccgaagacgtcgctag

SEQ ID NO: 39193 - DNA, 966 bp, Zea mays
  Peptide Sequence Number=SeqID_82568
atggatagaggttgcttgggagtctccaagtttgtggacgaccccaagaaggatgcagccgcctttgtcagggaggtggagttagaggttgttaagattgttgcttgtgttgcggtccttccgaagggggactctactgatgctagggatgaccgaggatttgacagggacatgtgcttggcctggggaggttatgacttcgcccaaactccgggaaacatcttcgtaaatgttgaaggttaccggggtcggtggcataggaaggaccctattcctagggtcgtcggcaatgactattttacgtctcgtatggctcgtgagctgaaaatctttccttacggaagaaatattggtgttgttgtgttagcagtgatggataaggatcgccaagaggcccagcggaagaaacagaaggtccctcttcaactggttgacctgtgtcgcgacgctaagatgtcgcgccccagcgtgaagggggtcaatccggctgcagcaatgcccccttctgcggtgcccgtggtacccacaaaggagtcttcgccaccatgcgatgttgaaacgacggtgtcagagacgggagggaccggccaggagttatctgtcgatgactacctggtgggggcattaccatgtttgatgcctagacggggctaccgcctgctggcggttgtatttgccggccacgttgcgtctggggcgctggtggacgtttccacctcgcagctgtgttacgagaggaaacggctcgagggcaaaaatgagcgccttcggatgcaacatacggaagctatcagggataagtcggcggccgagaacaagagccagaactgtctcgataaggtgacggcgcttgcgggctcaatgacgagaaagaagtcgccgatgaggcgaagacgaagacagagagcgcacgcgcggaggcccaagctgcccgcatgcgtgccatcgagcttgagctcgaagtga

SEQ ID NO: 39194 - DNA, 138 bp, Zea mays
  Peptide Sequence Number=SeqID_82569
atgaaggatgccaagcccatcaagacacccatgggaaccaatgggcatctcgacctcgacacgggagggggagaaagcttgaaaagggctctaaaggctccatttttggcgattaatgccaaagggggagagtattag

SEQ ID NO: 39195 - DNA, 216 bp, Zea mays
  Peptide Sequence Number=SeqID_82570
atggcgccaccacgggatggggattaccatcgccaccgacgtccccatgggtgggagcttcgtggaccgttgatttctcgaggtatagctgagattagaaactgcataacggtttggctagggtcgctgcgaaactttgcagatgagtccctagagaatagtgaaaataacccatcatccacgggaaagcacatagtaattgcagatgtaccctga

SEQ ID NO: 39196 - DNA, 285 bp, Zea mays
  Peptide Sequence Number=SeqID_82571
atgaacgtgagcactgatgttgctcgtctgaatcctcaaggatcatttcactatgggtctatcaatgtgagccaagtttacaagctgaggagtgaaccacctgttatcatcaatgggaagaaacggactacaaagagtggaggaggagggcgcaggcgcggcatcgatggcggggtcggggtcgccggtggcatcaaactcccagacctagcggctgacgtcgtcgttcttcttgcgaaggcaagggtcgccaccttctccgtgatccgcaagcgccacggctga

SEQ ID NO: 39197 - DNA, 576 bp, Zea mays
  Peptide Sequence Number=SeqID_82572
atggctacgggactccagctgcgcaaagattgctccagtgagcgcggaccagacgaaacagagagtgagaggacacaccaaagggtgtcccgagcagctgacaacaaggcggagctcaccgtggcactggacggggcgtggacgcgacggtggccgcagaacaggcagtggtcgacggcgggcggtggcggagctccctgtacgcgtgggcagagcgagagagagggcgagggggtttggcaaagggcgcaaatgagtgaggggaggtgggcgagcagggcgcggggctcaaaagggacgcgggcgcagggatgtggctggagaacgcgcggacgtgggcgtgagcgtggcggagagatcgtgggcgagaggttagagacggctgacaggtggggacagcgggacagagagagagagagggcacaaggaaaagaatggtgccgacagctcggccccatagagcagcgagagagcaagggagtgagcgcgctcgggttggcgccgacaggcggcgccctcctgtcaggcaccaagggcttgccagagacgaggaggctagccacggcggggctctag

SEQ ID NO: 39198 - DNA, 225 bp, Zea mays
  Peptide Sequence Number=SeqID_82573
atggtggtggccccctgggtgaagtaccttagccaagaatacgaccccatgttaacgtgggctgccagcacctaccgctccccctcttgcccatctttcaggtgtttgatgaacaacacaatccgtgaactaataagtcttctagtgtttgtgtttgtagttcacaggatgcgaagagaattggaccaaggcaatgaggatgcaatacctcaaaagaagacataa

SEQ ID NO: 39199 - DNA, 252 bp, Zea mays
  Peptide Sequence Number=SeqID_82574
atggacgagcgcgcgggcgcgggcgcgattgacaggcgaggacggttgtcagcgaccagagggaaaggcgggttgactagtcgggcccagggccagggggcgcaggcactgactggcgggctcgtggacagggcgcgcagatcggacggtggagatcaacgccgggaaggttatacggatgagggcgacgccgctcgactccgcggcgaggtctcaccggagacgagggggatggccacggcggggctctag

SEQ ID NO: 39200 - DNA, 1026 bp, Zea mays
  Peptide Sequence Number=SeqID_82575
atgtcttcttcctcccttatgcgtcgtgtctttccatcttccaagcccccggatgggggcccggctgcacccctccactggcggtcacccgagatggtgacctccggcttgatggtgggggaaagcgagccgggctgcggcctctgccccttcctcagcctcaaggattttcatcaccagggctggggaggggagtgcgccgagttgagctgcagcgtgtccggtcttcagacgcgagtggcttcggagccgctcgcgacgccggcgtccgccacggcagctggaagaggttcttccgccggcgcgatagccggggccggccacggaatgacctccaactctacggccttctgcccgtccttgcctcacgagttttttcgtgggcgggggccttctggcagcagcatccgccctagggtcagtgctgccgctgttcgaccccccggagcagaagtcgtcgtcgtcgccgctgctggggaatccctcggcccgatcggccttgttgtctggggctcctctagcttagttaaagagacccttcggccgcccttcgatgagccgaggccagggccgacgccaaagtcgatcagccgaggcctcgggtcgggctggcgcccttggaagccggttggccgaggccccaggggtaaccggccgagccgcctgctcgggccggattcccggaggaattcctggaccgcgtcgccgtccgaggctgggtcggactttgctgaagacgtcgtcgatgccgagggtgctacggctcccttcagcgtgaagatccgagcctacaggatcagatcgtcttgtagcgtgtgccttctgcggccgccgaggccagaaaaacacaccctcgccgtgtttgcgaagccgcgtcttttttcctcttgtttcgagcatctggactctctgtcgaaggtgatgagtgaggtatccgtatcccggaggcgtaggagtccctcggctcggtcagccttggctgcttacgtgtactccgtcgtttccaggatccgctttccgaagtag

SEQ ID NO: 39201 - DNA, 498 bp, Zea mays
  Peptide Sequence Number=SeqID_82576
atgtcaaccgtccccatcgattccccgttcgtggctaggcctcaccgccttggcatacaatgctccactgatcccggctgccgccgtgcagtgaccgcacttgcgggggagctcgtcggcagcgaggagtccggcctatccagggcacaattgaccaatcaaacgggtcagagagctttaccagggatcaaggaaggcgggcggccgaagtcctgcaaggacaaacttggttctccggtgaagttctgccgggtccgagagcttaggaagcttcacaagctcttggtgatgctatccgagcgactggcgcagcttggaagcgactggagtgggctggccacggtgtccgaggctcgggtggcaatggcgggcagaatagagctcgccggagctaaggaggggcgtttggccggcgaaggtgagcacggggtgagcgtcgagcacgaggcagcgcagagagaggtcgcgttcaagcgcggattggctccaaatctttga

SEQ ID NO: 39202 - DNA, 258 bp, Zea mays
  Peptide Sequence Number=SeqID_82577
atggcgcagctgtcgtggcgatcttctttctgttctcctttgagggcagaggtacagaaagaacaacttgcttcctatttgcttccttattccttgcgatttgtgtccattctttcgtcggagagtggacccgggggatatctgtcccccacaactccgaccatcctcgaagacgatccgcacatcggcgtgaccgtcacgacctcccctacaccctcagccacttcacccggagcaatctcgccgccgagaacttag

SEQ ID NO: 39203 - DNA, 222 bp, Zea mays
  Peptide Sequence Number=SeqID_82578
atggcagaagttaaaggatatgctagtcataagcttctagggcttccaaacaaagccaagaagccagcacagctcacggtcttcgggaatgcaacaaacttccaacaggccaccaaccctgagaggcagaggggagaagcttcggaggaaggcgagtcactctcaagcctcctgggctcagttgcagccaccgccaccactggcgcctaccttgatccataa

SEQ ID NO: 39204 - DNA, 210 bp, Zea mays
  Peptide Sequence Number=SeqID_82579
atggcggcgcacagcacgcacaccaaacacaggatgcgagaggagggatggcgagcagggggaatggagaggaagggcttcaaccatggctttataggccaagacaaggcgagggggtgtcggggaagggcagagaaacggcggccggccatcatgccattgatggcgttcatcaatgggggagaaacgaacgatttgatgctccattaa

SEQ ID NO: 39205 - DNA, 201 bp, Zea mays
  Peptide Sequence Number=SeqID_82580
atggctgccacgccgcgctgggctacagggggcaagagcgccgtcgggggctgcgacgcagggaagctctcgccgccggccgagaacaagggaagaagatctaacccccttaacaggaatctcgccctcgagattcaagaagaggctagcaagaacgacaagactggattctttgaccttcagatgatcacgaccaattga

SEQ ID NO: 39206 - DNA, 414 bp, Zea mays
  Peptide Sequence Number=SeqID_82581
atggcaaaaaatatgggatttccgaagcttgaagttggtctctctgccatgtcgaaggatgacctcgcaaacagtcttgcgtacaacagtttgaagcttcggagctacatcagccttcgtctcaaccatgctttccacatcgtgtatggttttagtccgactccaaagatgtccaaggaaaagaaggttgttgcggagacgaaacagattgaagagacaaagctgttcgaggagaagaaggttgtggatccttatattgctggttttgttgaatcaatggcaaagaccatgtcacacccggttttgaaaggtaaaccgaatgcgaaccatgtccttacggagaggtactcaggaaacagcctgagccccatagagtatcacaagatcatcaacatcatcaggataacatcatag

SEQ ID NO: 39207 - DNA, 93 bp, Zea mays
  Peptide Sequence Number=SeqID_82582
atggccggcgctcgggtggctcaggcgggtggcgcagtgctcgccggagctaagggtggtgtctggccagtgaaggcttatgggttttgctga

SEQ ID NO: 39208 - DNA, 144 bp, Zea mays
  Peptide Sequence Number=SeqID_82583
atggatgggtacatccgggctgacaacgacttccgccaaagaagggaagaagcttacatgttctcggagatgaccaggctcaaaacgcttcgttacaataaaagcacaatgtccattctggtgtcccttacattgactatttaa

SEQ ID NO: 39209 - DNA, 252 bp, Zea mays
  Peptide Sequence Number=SeqID_82584
atggccgcgcggactggccgctgggagctggctgtaccgcgttgggcgagccgcttccgctgccgtgcgctggccacaacgccgcgtcgaggcccggacgggctggccgaaaatggctgccacgccgcgctgggctacagggggcaagagcgccgtcgggggctgcgacgcagggaagctctcgccgccggccgagaacaagggaagaagaaaaagagaagaaaagcaggtaaagaagagggtaacacctga

SEQ ID NO: 39210 - DNA, 747 bp, Zea mays
  Peptide Sequence Number=SeqID_82585
atgaagctgtggaaggagactttcaggagttccaagactacgacgagttctaggcgtgggttagcggcaacccccagtcggctgcctgtgaaggccgcagttatctacgtttcgttttcgcactttgatttattgagccgaaaggatgggttgctcgacccatcactcgcgacgctgctcgcgagtgtcacttccatgatgcgctcgacaccctgctacgtcgggcacttaaccggcgtacttggtccatcgagtatcgctgtgtggtctaccagcatagtcgcggggtctacccggaccgctgggaggcgacctgcttggtgcgccgtccggagaacagtctctagggtacggaggcctgctcagagcactattctatctctgagcggggctcagctgaggcggccatgcaagatgctgcacggcatgcgctttcgcactactgctcggttctcggtgggcacaggaggcgtgattgtctcacctgtcggtgagggcaatcctaggttgagcagcacagtcaacctagccgccgtgctaaacacagagctggaccatgcattagacgagctgagtagggctcgtgctgagatcgccctgctgcgggctgagcgcacggaacgtcgtcacctggatgatggttcccccgctcccatcgggactcagcacccgtaccgctcacctcggcgtggacaccagccttatggcaatcccgactgcaagaccaagataaatctagaaccatag

SEQ ID NO: 39211 - DNA, 249 bp, Zea mays
  Peptide Sequence Number=SeqID_82586
atggcggcgcgcggaggacctcgcggtggcgacgcgcgtagggcggtctgggccgcctcggctccggtcgtgggggcggggtggtgcaaggagaggagaggcgacgcggcggtgcccacgcgggctgccacgtcagccctggccgctaccgccacgtcagagttcggcgccatagtctatggcgtcgagctgtgttacctcgacgccataggctatgtcaccgagcagaaggtccaaaaatattattaa

SEQ ID NO: 39212 - DNA, 225 bp, Zea mays
  Peptide Sequence Number=SeqID_82587
atgtgggcccaggggcaaaacgaagggaataacatagaagtaactaatgccagcgtcgcccagaagatctccgagcgccatcatgtccatagtgcagacggtattgatatcttgcgctgcttcctcggtaacggcacattaaatgctgaggtggcacatcgtctgccagtggagtggcagggctcattaaataccgaggcggcacatcacctgccaatggaatag

SEQ ID NO: 39213 - DNA, 306 bp, Zea mays
  Peptide Sequence Number=SeqID_82588
atggacggaaacctcggctgtgagaaccgagggcaatctgacacaagaaagaagaaggagcggacactcaccagggatatgcacccgcgctcgagacgcatcgagggctgggtaagggcgccggcgtccagcctccttaccgtgccggttacccgcctgtggaggtcatcggcggggatggggaccgaggacatctgtgaaccctccaagtcaacccccggcgtcatctccgaaagcagcagctaccgctccgtcaaggggagcacccccggcgatggatggcggcaaccacccccgcggcggtga

SEQ ID NO: 39214 - DNA, 411 bp, Zea mays
  Peptide Sequence Number=SeqID_82589
atggcgactgcggcggtgaaaagcagaagagcgcgagtacagagaagtgcagagggctcggagacgaaagggcgcaacggttggttcgacaaacaaaggcagaagaaggtcacggactttgagacccaccaccgtgattatattgatgaatgggatcagcagggggatctaaactatatcaacgaccagccgcacacaaactaccacttccaaaggtgcaagcttaagggacagtggatagctgcagactatgtagagcaagaatcgtcaaacgacgaagacacttcgttcgacatagctgctcggctagggtcccaaattgaggctgctccaatccttgacaaagtgggtatcacgttgtcttcgtcgtgcaacggctcgttgtggataccggtctctagcgagcgttga

SEQ ID NO: 39215 - DNA, 105 bp, Zea mays
  Peptide Sequence Number=SeqID_82590
atggcgcacacgctgaggtggtcgccaccgctggcaagccgctggtgcagaggccaacaggccgggtttatgaggacggacctctccgggctggcgtacacgtaa

SEQ ID NO: 39216 - DNA, 1230 bp, Zea mays
  Peptide Sequence Number=SeqID_82591
atggcagtgggaggaggtgggaagggaggcacagccgctacggacctcctggtgtgcttccccgctcggcagcacctggcgctgatgcccaagcccatctgcagcccgtcccggaccaccatggacaaggcggcggccgcgcgccggcgccagctccagcttcctggcgcaagcgctgccgcaggtggcgggagagcgcgcgggagcagtagcgccatgttctgggggtccaaggcgaggcagaggccggaagaggaagaggagccgcagtcgccgaaggtcacgtgcgccggccagatcaaggccggccgccccaggaaggtgaagccgggctcggaggcagcgacgaagcacggcaagggcggcgccaagagctggctcgccgtggtggaggagatcgagcggctgcgcggccggcggaagaaggtgggctggctcgagacgctcgggatcaggcgggacgcgctgccgttcctaggcggcgcgctccggagcctgcggtccaaggcgtgctgctttgggtccctccatgccggtgccgcggccgtggactcctccgttgactccgaccacgacgcgggggagcgtgggagcgagcacggagccggagggagcgccgcggccagcgtgttctccaagtggctcatggtgctggaaggcggccaggagccgatggagcaagacgaaaccagtctcgatcacggccaggaagaagacgtcgagctcgagcggcagcagtgcgaggagaccgcgccgccgccgaacgcactgctgctcatgcggtgccgctcggcgcccgcgaggggacgactgtccgtgtccaggaccaggagggagtgcgagcagttggccggcgaggtcgaccaagagaaggaggcagcggatggcatgccgggagacggtgaaacagaggatgagctggtgttcttgagcacggcgcctggcttcatgaagctgtcactggacatcgccaaggagacgtgggtcgtgggcggcggcgcggacccgatcgcgaggagccggagctggaagagcatggcattggcatcgatgccggccagcagacgacctgtgccattcaaagccaggccggcagacagggcaacagagcacaggctctgccgctctggcacgaagaatagattgtttgtcgcaggcctgcaggttgcagcgtcaagaatgccatcagcaattaacaaggcaaaaaatcaccacaagatcacgctctaa

SEQ ID NO: 39217 - DNA, 132 bp, Zea mays
  Peptide Sequence Number=SeqID_82592
atgcgcttcaactatggacgatctacgcagccgcgtgtgagattaggaccttttctcaaatatgtcaagtggcgacgcgacgcggtgcaggcagacccgcagtggctaggaagacaagtatcttctctgtaa

SEQ ID NO: 39218 - DNA, 1056 bp, Zea mays
  Peptide Sequence Number=SeqID_82593
atgcctcgctcctcttgcattcatcgcgcccttccgccttccgggcctccagatggggagcgcaaccccgtgggggttggtgctcttccgccattgctcggcttcaaggattttcatcttgcagcccggctgcaatctcccgccagtgcttcaaggatgttcatcatccgcgctggggaggagggcgagccgagttggggctctgccttccgcatgggctggcggcccgcttcttcctctagcattcgggggagaagggcgttcgccagccttgcgaaggaggcgaacttcgggtacgcggggccggccgactgcaggcaccgccagccgtcgcgtgccctgtgcctcggcttgggtggcttcggtgccgcctccgacgctgcctcctgctgcttggtcagggcgtggctgtccgtccaccgcacgggcgatggttgtgccgtgcgcaggtccgccacatccacggcttctcctgtgccgccggccgcaccggggggggggtcgtataagacgtcgtgcgccgcgggggcggcggccgcgttcttggatggtcttgtcctcactccctcagtgaggatgggagcgaggacctcttcgcccgtgctgaggcagccgccgcccaccggtgcagaggtggccgccgccgctggtgaggttgcccgttgcagaggtggttgcctccgctggcgagaccatcagtgccacctgccgccgagcctccaactctttggctttaatggcctcgttgtcgcccccgtaggaagacgggggcgaggaccttttcgcaatggcgcacgtgctaaggtgatcgcctttgctggcgagtcatcggtgcagaggcgaccgccgccgtcggtgctgaggtggtcgcctccgctggcgagctgctcggagctagctatcccgcggccctactggcccacggtacgggaccaggctgagcggctgcacgggctccagaccaccctagccacggtacgggaccaggctgagcggctacatgggctccggaccaccctatggaacggggtcccgttctctagagccagctcctag

SEQ ID NO: 39219 - DNA, 294 bp, Zea mays
  Peptide Sequence Number=SeqID_82594
atggaggtgatgaggaagacactcgacgacctctgggctgagcaacgcgccggggcccagcgcatcgccgcctgggctggcaagattcttggcgcccgcttggagaccgagggcagcagactctgccattcggcaatagagtacgtcttgacatgcttccggagccacgacccggctgtctccttggggccagtcattgcgggtctggtggccgatgctgaagacgctacccgggaggcggtgcaggacattgtggtcgggcgcttccagcgggatcctactgacgatgagtag

SEQ ID NO: 39220 - DNA, 648 bp, Zea mays
  Peptide Sequence Number=SeqID_82595
atgcgacaaggaacgaacttcggtcctgtctacgtcttcattgctgttctgggatccataacggtgctcattttcgcgtacctggtcctcgtaggggcgcccgagccgagcatcttcgacgtttgggtggagaatggaaccctccacgccatggaaatggactcctccagcaactccaccctgacatacagcctctccgctgtatacggccttcgcaacaaaaactacgagcgtgacaccgtcagcgtcgccaagcttgccgtggcgcccatgtacggcgggcagcagctggggccgggatccagcctgccggcgttccagctgcggtatttggagacggcgacggttcccctcgacgcgcgcggccagctgcccgccgctgcaggcgcggtggtcaccaggacgtacgcggacgacgccgcgcggggctactacgccatacaggtgaagctaagcctggctttgggaggaggactccattggtgccactcctcctgcaccctctatttcttcgcgccgctgccgtcgtcgtccccaagaagaggcgcccccaacatcttcgatggcgacgactgttggactacatgtaagaaaagtgtgttgcatgacgagaaaccggacaaagctatgcagattaaggaacaataa

SEQ ID NO: 39221 - DNA, 390 bp, Zea mays
  Peptide Sequence Number=SeqID_82596
atggagttgtgcttccccgcttcgtcggccgggaactcgatcgagaaaagtgtcatcggtatacaatatagcttgatcttgacggcgtcggtgctgtcacacccagatttaaggggcaaacccgagggagattggagtcatcgcccatctccgacgatgaacctaccatgcatggggaggaacctccccagcgtgatgccccgcgacagagaaacagacgccggaatgtgcggcgacatcatgaagccagagaatgggacccagtgcaacccgtatctcgagacgaagcctcaaaaatgggagacactcctgatgaacgagcacaccgagaaagacgcaactcatgtcgtcgtgatcgccgacaaactcaagaaagagagcgggaactag

SEQ ID NO: 39222 - DNA, 462 bp, Zea mays
  Peptide Sequence Number=SeqID_82597
atgcccgcactccaccattctcgccctcgcgtccactcttggccgctccgccattctcgccccgcatcgacgctcagtccatggaaggcgcatcccagggatcctcttgcccccgcctcgctgaccttcgatggaaggcgcatcccagggatcctccatgaccgtgccctaccatcctcacccccacgcttcctgcccacccgctggcatcctccgttccgctgctcgtgccatctcagcgtcgtccgcccgttcgcatcctccacgactgtcgctcaaccacctctatgcatacacccacctccgcggagggacaagtggaggaggcacccgatggtgggaaacccactgcaccacaccacacccaggctcggcattgccattgtcggctttggaatctacctcatcggtgaggccgcctacaaccgccttaaccgtccctctggcgaccaccaccactaa

SEQ ID NO: 39223 - DNA, 312 bp, Zea mays
  Peptide Sequence Number=SeqID_82598
atggcggtgccttcaatagaaggtcggcgaggcgagggcgagaatggcggggtggaagcatggtgcacagtgtccacggcgatctgcggcgcggtcgcgcgtttgtgggatagtggaggcggtgatctgggggcgaggagagctggggagcgggaattacgaccatgggcaagatctgggggcaaggagagccggggcggcggggattgcggcctcggcgcagggacaggagagccggggcagggagattgctacgatgtcgagtggaggcatggtgaagccatggtggacgccctcctagcgtccttatag

SEQ ID NO: 39224 - DNA, 402 bp, Zea mays
  Peptide Sequence Number=SeqID_82599
atggcttgtgctactgacaccttgttgatcaaagctcgtaataggggttataagcagacaagagagggaggagaggctcacaagtctcttatcgtggtggaggtggagctaagtattacaaggataaggaaggggttggccagtggtggcttcccaggaagaagtcacctagcgacgctcgtaggtcatgagtgggaggtggaccaacacctctaccatggctcagtgccaggcgtggttaatgccatcagtcacttatggtgggtcggtctcgggccaggcaaaggatccactcgagtggtttctcttcggctcacccgaccacccttgtctagtttcgccacgcccgaccccagactcggtgtcgtggggctcgtccgggggcagacgattccagggtag

SEQ ID NO: 39225 - DNA, 357 bp, Zea mays
  Peptide Sequence Number=SeqID_82600
atggcccccaagagagcgacttcgaaggccactacttccatcgacaacgcagcgaaggtggcccttctagctgaaaagaagggcaaggctcctctcgcgaacgacatccctcaggaggccttcaatgacgagacagtcaatagcaaaagacaacgccaagataatccacctaccctagagggcaccgtgcggacatgcagctctgagggagtacctcaggcacccatgccaggtttcacccctccagaggcagaggacatcatcgaagatggcgaaatcttaggcattttagccgaagaccaactcaagttgcctgctctttgcatcaagaataatcatttacaaaagcagaaataa

SEQ ID NO: 39226 - DNA, 786 bp, Zea mays
  Peptide Sequence Number=SeqID_82601
atggcgcctcctgtaacgtggtcggtccgggccctgggttgggcgaggtcgagactcctccgaggtcgaggtcgagtctgtcttccgaggccgaggtcgagtccgagcccctgggtcgggcgaggtggagaccgtcggctgagaccagggctgagtccgagccctagagtcgggcgaggcggagttcgtcatcttccagggctaagcccgagtcggagccctagggtcgggcgaggcggagttcgtcgtcttccggggctgagcccgagtccgagccctagggtcgggcgaggcagagttcgtcgtcttccggggccgagcccgagtccgagccctgggtcgggcgaggcggagttcgtcgtcttccggggccgagcccgagtccgagccctgggtcgggcgaagcggagttcgtcgtctttcggggccgagcccgagtccgagccctgggtcgggcaatgcggagtttcctatggcgcccgaggccggacttggctgctgtcagcctcactctgtcgagtggcacagcagtcggagtggcgcaggcggcgctatcctcttgtcaggccggccacctttgcattaaatgcttctgtgaaacggtcggtcggcatggcgacttggccaaggttgctccttggcgaagactgggcctcgggtgaaccgaagctttgtgctgatgggggttaccagctgagattaggagtcttgcggggcgccgaacatggtgtctccaatgagctgctaacgggtaatccaagtggatgcctgtgccccatttgttag

SEQ ID NO: 39227 - DNA, 618 bp, Zea mays
  Peptide Sequence Number=SeqID_82602
atgggggcccaggcccacacgtcatgcaaccggcgcgccagttgctatgtgcaagaaactgcaccgccactcgcgccactaccgcgcctcctcaactgcggaaccagtaccgcgactcgaggcaaccctgcgtatgacccaacagtgccagccaggcacatcggtcacgggtcagtcagccgcgggaaaaggcgcgacggtcgatacggccaaaaatgggccagcagtaatggcggtggcaggcgaacggaagcagcgcaggacaagcggcacctttggcaggagaagcaggcgacgcttcgccttcgccataataaccgcgtcaaaaaaggaccgggaaaggggatacccgaaagggatccttctccgcgaaggaaacgggccccgagccccctactgatcagaggttcgaaggctgaccactcggaagggttcaacagccgcctcagagcgctcgggctccgcgcccgctactggtcagaggttcgaaggccggcccctcggaagggttcaacggccgcctcaggccactcgggctccgcgcccactactgatcaggggttcgtaggctcgccctcgaagggttcacagccgcctcagacgcagagcgagggatga

SEQ ID NO: 39228 - DNA, 735 bp, Zea mays
  Peptide Sequence Number=SeqID_82603
atggccgtgatgggttcaacgtcggaaaagatgtacctctgccaggtaccaaactttgggtttgaaatgattaagctgagaccgggcgggggacttgcacgagaaaggagtctcggtgtagtgtctccgtctgagtcgattaaggaccgtctcgatgtaggcttgatgaccgaggaccctttaactggtcacatgcctcgtcatggtaagaatttctacaaaacagagtctttgattattgagaagccttaccttgactcccttataaccagcatacccttgagagtcttttctttagtcgggaatgatctatgggtcgcggatggtgaaagaataaacaaattgagagcaaccatccgctatttgcaagaccaacttgcggaacgagatctagcgctggattgggcaattaactctcgtccactcgcttgggctaaggaagccaaagctcgagcccgcgtggaggagcttagctcagccatggataacttgcaggtctattataatacactacatgaagaagttcatgtgttgtattcacaactgcacccgaacgtccctgcggatcctgtcgggatggaagtcggaccttctagagtagcgggagaagcacttggtggtgaactggaccttttgaggccccctccctctatgaagttggttgacaagtggtatcctacgcccgacagtaaagctaccaaaagtgaaaagaagtggcctatcaagtgcccgtaa

SEQ ID NO: 39229 - DNA, 141 bp, Zea mays
  Peptide Sequence Number=SeqID_82604
atggccgtgatgggttcaacatcggaaaagatgtacctctgccaggtgtggaagcgacaaacttttgttgcttctgttctagggtggtaccaaaggaggaacgccatgaatgaagtgcgggaggaaaggatcctccattag

SEQ ID NO: 39230 - DNA, 447 bp, Zea mays
  Peptide Sequence Number=SeqID_82605
atggcggccactgcagtcattgcggactggtgggtcctccctctctccgcattgaggtatctttgtggggctacgaagcatcgcaccgtgggtgtgaaggtggatctcgaccttgctcacctgctagaaagccgctcgcctagctccatcggtcccaactgctacaccgtcaacctactaggcactccctcgagccaaaggagctcgccagaggattcacgaaagattgaggaaactgatgaagcaaggaaaaaattctctaatgctaaggcaattttgtcatctcagttttttggtactcaaaacagagaagagaaagaggctcagctatcccttcagaaattcacgggttcttcatccatttcaagctctgatctttttgttcgtaccaatgtggacgattctaacctggacctaagcgctaaagatctcatcaacagtttgtga

SEQ ID NO: 39231 - DNA, 138 bp, Zea mays
  Peptide Sequence Number=SeqID_82606
atgggggaacgcttagcaaatgaggttccactcctgtttgaatctattgcaatggaaaaggttgcttgccacatcgttcattggatatttaggagaaccggtagacatctctttctgactgacgatgatgaagggtag

SEQ ID NO: 39232 - DNA, 438 bp, Zea mays
  Peptide Sequence Number=SeqID_82607
atggccggcaacaccagcgcgagcctggagcgtgtagaatctggtggaggaagagaaggaagcgacatacctgacctcgtccacgctcacctccatggaaatttagatctaatcgaaaaaggggtagggcatggccctcaccttcggcttgagggagtgcctagcagatgtcctccttccactcgtaatggggtgaggacgatggcgggacacagtgtgtgggtgataccatcaatggaaggggattgtgggctcgagggcgaggatggcggggcacgacctatgaagctcaacgaggcaggcacgccttccatcattcgagcgcggacgtgggggcgaggattgcggtgcgcagcaggggaggaggatggcggtcgccgatggggatcacggtcggggggcgagggaaggggatcacagaggcaggggcgggcgtga

SEQ ID NO: 39233 - DNA, 618 bp, Zea mays
  Peptide Sequence Number=SeqID_82608
atgggcgcgattaaggtcaaggctcagtccactcaagggacacgatctcgagtcacccaagcccagcctcgggcaaaggcagccgaccccggaggattcacgtctcgcccgagggccccctcaagcaacggacacaccttcggctcgcccgaggcccagtcctcgcagagaagcaaccttggccagatcgccacgccaaccgaccgtatcggttcggcccccgtctcggcctcggaagatggactccgccccgcccgaccccagggctcggactcagcctcggctctggaagacgacgaactccgcctcgcccgaccccagggctcggactcagcctcggctccagaagacgacgaactccgcctcgcccgaccccagggctcggactcagcctcggctccggaagacgacgaactccgcctcgcccgaccccagggctcaggctcaacctcgacgctggacgacggactccgcctcgcccgaccccagggctcggacatagcctcggcctcagaagacggtctccgcctcgcccgacccaggggtcagactcagcctcgacctcggaagacggactcgacctcgacctcggaggagcctcctcctcgcccgacctag

SEQ ID NO: 39234 - DNA, 201 bp, Zea mays
  Peptide Sequence Number=SeqID_82609
atggtggtggtaatggaagctggggccaggaagcttgtgaatgacttgccgaagcaacagaagctgcaggttgattacccacgtattctggtatatagggagagtagcacgaagcagtatgtggaaaactggtccaaagtgagaatgtcagaatctgaatttcagtctgcaatatctgaaactgaagattttatattgtga

SEQ ID NO: 39235 - DNA, 270 bp, Zea mays
  Peptide Sequence Number=SeqID_82610
atggggaaatggttaataaatctagaccagacgctgagcagacagagtcgcccatctgtgtcaattaaggaccataccgttgactggcctgttgtggttgagactttgcaactagccacataccctggtatgggacagggtaagcttgaacccggctattccatacgtgaagagacaatcgcgcactgggagtggagagatggcgagagtagcatacctgttcatgtagtggaggactccgtgggaacggttgacatatgcaagggttaa

SEQ ID NO: 39236 - DNA, 861 bp, Zea mays
  Peptide Sequence Number=SeqID_82611
atgggtccacaggtcccagtggggggcgatccccaaatatccttcgcaaaccgccgcgaagatggctgcttgcgagatggagttgggactgagattgtgcagctccaccccgtagacgtgcagaatcgcccgcataaaacggcttgccggcactccgaacccccgctcgtgaaaggagacgaagctcagcacataccccggcggcggggacggggcggctccgctcggaggggccatccactccggctgcgagtcatcggagagagggcgaagcaaaccatcagcaacaagggcctccagatcatccaccgtgacgatggagaaaggccacgggtcacgcggcgaaacaacggtcacccggtcggccatcaccaagcagaagaggtggcggcggagaggacgagggaccgggaaaggggatactccgaaagggatccttcttcgcgaaggaagtgggccccgagccccctactgatcagaggttcgaaggctggcccctcggaagggttcaacagccgccttagagcactcgggctccgcgcccactactggtcagaggttcgaaggctggcccctcggaagggttcaacggccgcctcaggccactcaggctccgtgcccactactgatcaggggttcgtaggctggccctcgaagggttctgacagccgcctcagagcacgcagagcgagggatgaccctggaggctcgggggctgctctcgcaaacccggctccggccaaaccgttgatagcgtcaacataccagcccgagaacttgggactcgactatgcactcgggctacggccagttcgcatgagggaacaacaagaccagccgaagcatcacgaaacgcgctaa

SEQ ID NO: 39237 - DNA, 99 bp, Zea mays
  Peptide Sequence Number=SeqID_82612
ggggagatcttgggggaggacgtcggggaggacttgggccataaagcaatggagggtggatgcaagggggagaaaaagggggtggcggccaagaggggg

SEQ ID NO: 39238 - DNA, 111 bp, Zea mays
  Peptide Sequence Number=SeqID_82613
atggcgctgcctagggcactctgcgccgccgtctgggcgcgggtcaagaacaaggtaccgcaggatgaggcgcatggaggatgctgtgatgagttcgtgagagagatctag

SEQ ID NO: 39239 - DNA, 1527 bp, Zea mays
  Peptide Sequence Number=SeqID_82614
atggccgcgccgccgcccacgggctgcttcaagtgtggccgccccggccactggtcccgcgactgcccctcctccgcctccaccaaccctcctgccgccgccgacgcgcccaccaaccctagccacctctccggcgccgcctcccgcttcaacgccaagcccaggccccccgcggcggcggtggatggcgaggacggcaaggggaagaagaagaaggagagggccacgcgccccaagctcacgccggacctgctcctctccgacggcggcatcggcttcgtgctccgctacttccccaaggcgttcaagccccgcgcccgcccaggccacgaggtggacgacctcgctaacctcatcaagctctacgcggactggcactcccgcctgatcccctactactccttcgaacagttcgtgcgcaaactcgagaaattgggtgccggcaaccgcgtcaggagatgtgtttccgaactcagggatagggtcgccagaggcggtgatcctacgcttctgcacgaaccgccagtccacgaagacatgccattgccaggcggaggtgaacatggtactgaagacccagttctcggcaccgatgctccgctgtcggacaaccatggcactggccccgtggtgcaggaagacgcagatccaccgatggagagcaacgacgtggtggatcccatggaagaggatctgcttaacgaaatctacgaaaacacagctgatatcccggctggtgagggagccagcaaggagtctccggagcagtcggctccaaaagaagccaactcgctggcgcaggaaccccaggacggcgacgtccccaagccggcgaaggacgcaacgagggcgtccaccacggctccgcctccgtccgcgactcctctgcgacccgtccgtgtccgcaaccccaccgcctcctcgctgtaccacatctacgtcgcctccctcgctgccacggtgcccgccgccgtcgtctctgttgactactgcctagcgcccgagcaccacatccccgccgcctacgacgatgcattcgcagccctgaaggcggtcatcgtcgcgtgccgcgcggatggcgccgaggcggaggctgagccctggctcgccgctcacggcgacgccttccgcatcgtccttgtgggggacagcgccgacggtaacatggcacacaacgtggcgataaggccgcgcaaggaaggcagcatcgagggttacgacgacatggtcagcgacgtcatcctcttgtacccttatttctgggggaaggagccgctgggcgtggagcccacggatctcggctaccgcacaatgttcgatcccacttgggaattcatctgcggcggaaagttcggccttgaccacccctacgtcaacccaatggcatcctcggaggagttgaggcagctcggttcccgccgcgtgctggtgaccacgacggaccagtgttggttcgtggagagggcaagggcgtacatagagggaatcaagaagtgcgactgggagggggagctcgagttctactag

SEQ ID NO: 39240 - DNA, 249 bp, Zea mays
  Peptide Sequence Number=SeqID_82615
atgggtttgttaatgggttcaaatggaaacccaacggtgggtatgggaaacccgttgggtacccgaaacccgcatgggtatgggtttgggcaaaattttatacccgtcacggatatgggttttttagcgggcatgttttttcttcgcgggtacgggtttgggcaagtaatacccagcggatttttacccattgccatctctatcctcgacgtgcaattgcactgggtatgcagcagagtaataatataa

SEQ ID NO: 39241 - DNA, 570 bp, Zea mays
  Peptide Sequence Number=SeqID_82616
atgacgcatgcccggaataacgtctattgctcccccacgtcctttgccaactctggatgggacgcgtgtacggtaaagcttggcctggccctcgggagaaaattacgcctcgcccgaagccgccctcagcctcgaagcaaactcttcctcgctcgagctctgcctcagccacctaccccccgcgaataccgcagaaggccgctccttcaactgttccctgcacgactgcaatcccccaggggtaagctcggccatggccttgggaagacttctgcctcgcccaagcgtggcttcgaccttgatagtatagacaaaaagacacccaacgtcacaaaaaccgtagagctgacgccagataccctatgtattgccaagagctttttgccgtacttatcaatgctccagccactacgactcggacagctcctcctcggacaggtttgggtacgcgtccgagccccggaccttggcctcggctctctgctcggtgaaagatgtaaatacacgaaccagacatctccttccgagcttaagtcaacagtaggtacgtggaccattgagagcacctag

SEQ ID NO: 39242 - DNA, 264 bp, Zea mays
  Peptide Sequence Number=SeqID_82617
atggcgcaccggacagtccggtgcacaccggacatgtccggtgccccagccacgtcaccagtgccgttggaatctgaccgttggagttctgacttctgggcccgcctcgatgtccggtggcgcaccggacatgaactgttcagtgtccggtgccccggaactaggtgtaagcctaattccctttcagttcgccgtcttccggggcttagcccgagttcgagccctgggtctggcggagcggagttcgccgtcttccggggctga

SEQ ID NO: 39243 - DNA, 1179 bp, Zea mays
  Peptide Sequence Number=SeqID_82618
atgacctgcaccggcctcggccactcttctcccccttcccgagctccaccgcaccagctccgtcgcccttcctccgctctgaaattcactaggctcaatagcttcgccacatcaccgcggactcggaacaccgctcccctgcccccgatcaccacccaaacctcaccagcgacgactcccgccgcggagctccgccacctcaccgcggttagctccctcccagtctcacctggcaaaattggacccacccttaagcttgccagcccctcctcgtgctttggcacctgcccgatacctaggaaccgggtcaccggcggcaagtcaccgttgaacccgccggcgaccgggttttccccgtggatcggccggttcgcccctgtcccgtcgactactgacgccgtctcccctcccactctccctggcgcgtgggccccggttatgaaggctggggagcaccgggaggataaggagggggaatgttttgtccggtttggacatggcggtggcctgactccttccggtataaccgttaagatggaagactctctagtcattaggacatcctactgctcagaggtggaggggttcccacatttgttgcgaagttgtgcgcttcgcatggggatccacaagaagccagaatatgtctggaaggaatatctcgagaatggaatggagaagtgctctatggcagtctacctgggagaaagccgaaactacccaaaccacccttctttccaggtcactttcactggacaccgcttcccagacacttgccagaatgttgcccgaaaagcccttcgacagctatgcctgaactacaacagagtggtctttgaaaccccccttcgctactttccacctagcaacaaaaatacccccgcctggaggaaaagacttcagactttgtcaggaagagatcctaccgaggatgaccccactatcgtctacatggccggatacctccacactctcgataaccaatatgatgaccttgcctcccactgcactcacctaaattcccgggtggaaagcctggatcaacaagtcaaggaacttcaaagggaaaaggcatccctccaagagagtctcgaaatagaggaaggcgaggaaaccaacactcgtgaagcctatcgaaccctgaagatggattacgacaagaagctaaagaagctctga

SEQ ID NO: 39244 - DNA, 522 bp, Zea mays
  Peptide Sequence Number=SeqID_82619
atgacatgtgatgctaagcatcacccctctaggagatgtccaaatctcagaattgcttcgtctgaaataccagaagaaatacaaaaacatatcacccacttcctacaattcggcctgaacctttgggtaggctccgcaggatcaacaaccatagttgcacggagtacggtagaattccccggtacggtcattcgggaagtccccctcgaggacgactcccatacaattcttgcgagagctggagaagcgtctacgggagtaatgatcctctctccaggcagtgagggggttggctgcctcggcgacttcgatgacgacggtggtggtgccaggcagctcgagcggccacgcgtcaagcgtgatcttgacagcgtcgaagatgtcgagatcgtgcagccgcacagtagagacactggcggcgcggagcagctaggcgacctctgcctcgatgagatcgtcctacgtcctggtgtttcccttgatgatcacgtcatggacgcggatgcccacggggtccgatga

SEQ ID NO: 39245 - DNA, 711 bp, Zea mays
  Peptide Sequence Number=SeqID_82620
atggaagatatcagttttgaagcttggtggagtagatcagctgaggttgtgcctaaggacctcagagatggctttaactccttagtggtcctcgggggcgggccccagccgcctcccctctcgttttctctgaccctttccttcccttcccttgttttgatggcgccaccgcgagccgccgccggcgtgtcaattcctgctgatcctgccgccgacagtccagaggcagagtcggagagcaagctgcggcaaggtgcagcagacgcgcggtggctcgaaaccctctccgagccggagctcgatgtgctggtgagcctgagggaagtggccgtcacgcgggcttccgatgccggccatcctggcctcgccgacaccgtcttccatctccgcgcgctgcgggctctcggggttgtgttgctggaagagttgaaagagcggctcaggcaaagctcagctgatgcaaacgtgttggacaggagtgcgttgctagatgatcctgaggccagccaagatcatcagatgccagcgccgaatggtgggatggagacggtgcccaaagtccaaagagacgaaaaacgacctgaaaactctgaggacgactttacgaggccggtggttgatattgcagctgatccatcactggagaagccagcctcctcttctttgccatccagtcgtctcatcatgtactgtagcgtcagcccgccgtag

SEQ ID NO: 39246 - DNA, 987 bp, Zea mays
  Peptide Sequence Number=SeqID_82621
atgaagcaccagccgccgcgccgctggggcgtcgtggcggcggtcgtcgcactcgtcctcctcgcctgcctccagatccagtaccaccacctcaaggtggatctcggcaaggccggctttgcctctgccacgcaagagaataacgcgatccgcagccgcaatcgcattcgctggggccccgacaggaacggcgcccactccttgccgcgcgggattgtccaccgccactccgacatgtccctccgcccgctctgggaggacgacactgcttccacccacaagaataaaaacagtgactacagtgctctcctcgccatggcagtcggcatctcccaaataaaaaacattgacactatggcccgtaagtttctgaaggaaaactatgcagtcatgctcttccattatgatggaaatgtagatggatggcgtcatcttgagtggagtgataaggccatacacatccttgctcacaaccaaacaaaatggtggtttgctaagcgttttctgcatcctgatgtcatggctatctatgatttcatttttctatgggatgaagaccttggagtggagaacttcaaccctagaagatatcttgatataatggtgtccgaaggcttggaaataacacaacctgctctggaccctgatctatcaactgatatccaccatcgaatcacaatccgtaataagatggcaaaaagttcacagaatgatcttattcatggatggggtcttgacatgaagcttggatattgcgctcagggtgatcgaacagagaaagttggtgttattgacagtgagtatgtagttcatcaagggataccatcattaggagggccatcacttagcagcaagacacctcgaagatcattggatttgaggacccacatacgaagacaatcatcggctgagctggagaagttcaaggagaggtggaacagggctgtaagggaagatgaaggatggagggatccttttgattcttga

SEQ ID NO: 39247 - DNA, 1974 bp, Zea mays
  Peptide Sequence Number=SeqID_82622
atgcggaagcgggatctgggcatcctgctgctcgccgccttcgccatcttcttctccctccaccacgaaggcgacttctccttccgggagtcctggtaccacctcaccgacgaggacttccccatcaagtacgaggccgaccgcctgcccccgccgctcgtcgccgatctcaacggcgacggcaagcccgaggtcctcctccccacccacgacgccaagatccaggttctccagccgccccacgcccgccacctcaacgatgactccgccttccaggaggcccgtgtcatggccgacatctctctcctccccgacaacgtccgcctcgcctcggggaggcgccccatcgccatggccgtcggcaacgtcgaccgctcctacagacctggcgaggtcaggaagcaggtgctcgtcgtcgtcacctccggatggtcagtcatgtgcttcgaccataacctcaagaagctgtgggagcacaacctccaggacgatttccctcatgccgcccaccaccgcgaggtcgcaatctccataaccaattatactctcaagcatggagatgcaggcctcgtcatcgttggaggaaggatggagatgcagcatcattcagcagatctcttcgatgaatttatgataccagaacacaacatggatgatcgccgtcgaagcgccagtgagaaacagggctctgaggctggcaatgcagacctgcgccattttgccctttatgccttcgctggacgtagtggcgaccgtagatggagccggaagaatgagaacatccagtcacagccatcagatgcttctgtgatgttaccacagcataattacaaactcgacgttcatgccctcaatagtcatcaacctggtcagttcgaatgtcgtgaattcagagaatcaatccttggcatcatgcctcatcattgggataggagagaggatactaccctacaacttgcacattttaggaagcataaaaggaaacaagttaagagaacgcctggaaaggctgttattaatagcgtgaacaagcccattgaacacaatccacctgggaaggatgcttccaatagaatagctagagctcttgggaaggctgcagatatggctaactcaaataaagccaggaaggcacagaggatgcagtatgttccgacaatcactaatcatactcaagtttggtgggttcctaatgttgttgttgtacatgaaaaggaagggatagaggttgtccatctagcttctggacgtacaatatgcaagcttcatttaaatgaaggaggccttcatgcagatattaatggagatggagttctggatcatgtccaggttgttggtggaaatggtattaaagagcagactgtcaagttttgggaggacattgatacagctggtttagaggtcgcgactcctatcctggtccagacagacgatgggcataaacacaggagaggaagccatggtgatatcatctttttgacaagccggggagaggtgacatcgtactctcctgggctgctcggccatgatgcggtgtggagatggcaagtatcatcaggggcgacatggtccaaccttccatctccatcgggaatgatggagaacatagtggtgcctaccttgaaggccttctccctacgtgcctatgacccgaaagaggtgatcatcgccggtggtgaccaggaagcggtggtgctctctccttctggtggcatactggccatgatcgagctcccagcgccccccactcacgctcacctcctggaggatttctccggggacggtctcaccgacatgattgtggtaacttccggtggaatatatggattcgtgcagacaaggcagcctggggctcttttcttcagcacgctggtggggtgcctgatagttgtgatcggcgtggtattcgtgtctctgcacctcagttcgtccaatgccgccaaacccagggcttcctcgtctgaatacagatga

SEQ ID NO: 39248 - DNA, 300 bp, Zea mays
  Peptide Sequence Number=SeqID_82623
atgacgcggaacggcaggccaggcgcgggcggcgttggcttcggcctccgcctccgcctccacctcacggcaggccaggcgcaggcggcgttggcctcggcctcggcctccacctgcacccgcagccaaattagacggaagggaacaaacaaggagaagagcggcaggcaggaagttgaagacgcgggtggggtgggggcccgcgggacagaggaacacggcggcggtggcctctgtgagctgagcctgacgcaacttgtcgaccaggaaacaatcttgaccatcatgtactcaaattag

SEQ ID NO: 39249 - DNA, 1548 bp, Zea mays
  Peptide Sequence Number=SeqID_82624
atggcggtggccttcctgctgctgggattgggtttcctccttggcctcctctccctggcgatcgcggaggggctgacgctcctttgggccatccgaagcctcacgcgccgcacatcggcctcacgcagcacgccgccgccatcactccccatccacccgacgccggcgcgtattccacacgttcacgacctgtaccttgacacctttcccattctatctacgagtaaacagggcttcttatggatgctggagcaacccaaggatagcagcatcaatggcgctagcccagggatcagagacaggaagctcctcgtcgaggttttccctgtaaaaatgtctgctacgcttcaaggacattccctcaccttgtctggacccgatgatgcctcgcagctaaccattgacctgctcggttgcacagttgctgctgtttctgcatccaatctgccctcacgtaaatgggccaagaggtatccgataaaactggaaagcaaggaatctggtatttgcagggggagcaaggtatgctatgtttatgcagacacctcttgggagaaggaatcatggtgtaaagcactccgtcttgcttctactacggacaaggacaaactcaaatcccatgaaatgctgacccaagagttccgcagttacatgtcctctctgaaagctggatacccttcctttctgggaccctcgacactctccagtcaggaacatgtgcttgtggacaacactgtgaagaatgatggaccttcaaaactccgaggttttctcaaacgattggtgggaaagaaggcatctgccaaggcttctcaggagagcaaaacaggtccggcgccatctaaacaagatacaagccaacccagtactcctagctccactatgagtttcaacagccagctaccagcttcccccagtgcaaaggtggatgaaaagcttgccgatgacggtacactttgttggaacctcctaatctcccggttgttttttgatgctaaaatgaatgatgagatgaacaaagccatcagagcacgtattcagcgaacattgtcgaacaccagaactccagcctacattggtgagatcacgcttactgacctcaaccttggcaagctcccaccatctctgcacagaatgagagtcctcccactggatttggacgaatcgtgggctttcgaagttgacttcgagtgttctagtggaatactgctgcatatcgaaacaagacttgaggttcaggcgccagagctggaaaaggacattatgaagactgatattagaggcaatcctaatggggacgcgagttcagatttccttgatagtattgagcaatatggtaaccaattcgggccttcagaagtttcggattttgcagcagaggtcaacgatgaagcagataccttaaggaaatcaaagagcgctgggtgggcatcaacatatatgtcaaggtggagaagtatcttgaattcaatagcggaccaggtttcacagtttggaatgttggcatgtagttctgacctggactgtgctttctcactttctttgtaa

SEQ ID NO: 39250 - DNA, 606 bp, Zea mays
  Peptide Sequence Number=SeqID_82625
atgggcgccgaggaggacgccgctgcacgccgcgagcgtctccgcgccctccgtgccgccaaggacctcctctccacccccgacggcgccccaaccccttccaccgacggagaacaccaaaatggcaaccatgagatggcagaagagccagaattaccaggtcatcaggatgcacctggtgaggctgctaaagaggatggtagccccactgaggaggccgaagaggttgaagatgatggtgagcttccagccatgaagttcagaaactaccttccccatgatgaacaacttcgaggaggcaagctggctccagtgtctcttcccaagtttgaagacccaattagtgccgaaactgcagagccaaaggaagtggagaacctttttggaaacatagcaccaaagaatccaaattgggatctgaaacgtgatgtgcagaagagaattgataaactggaaaggcgcacgcagaaagcgttggctgagattgcatatgcttcatctgttttagttcgtttagggtttcaacgtatctactccgggttgcagtggaacagcagagggagaaggaagccttggaggaatctcaagattgaccgacctgtataa

SEQ ID NO: 39251 - DNA, 354 bp, Zea mays
  Peptide Sequence Number=SeqID_82626
atgactcccgccgcggagctccgccgcctcaccgcggtcagctccctcccagtctcacctggcaaaattgagcccacccttaagctcgccagcccctcctcgtgctttggcacctgcccgatacccaggaaccgggtcaccagcggcgaatcaccgttgaacctgccggcggccgggttttccccgtgggtcggccgagagatagcccgcattaacaaacatcttttgaatacaaaatgggggatgggaaaaaggcagtgtggttctctaagcgaggttttcaaaaagtgtgcgatgaagggtattcaccctcatcaccttgtgagtgggatgatcagggactccctggtttag

SEQ ID NO: 39252 - DNA, 489 bp, Zea mays
  Peptide Sequence Number=SeqID_82627
atgaagctgtggaaggagacttccaggagttccaagactacgacgagttctaggtgtgggttagcggcaacccccagtcggctgcctgtgaaggccgcgttatctacgtttcttttccgcactttgatttattgcggcgcctctggcaggagaagcaggcaacgcttcgccttcgccgtaataaccgcgccaaaaaagggaccgggaaagggggataccccgaaaaggatccttccctgtgaaggaaccaggctccgagccaccctactgatcagaggttcgaaggctggccccccggaagggttcgacagccgcctcagatcgcgtgggccctacacccactactggtcagaggttcgaaggtcggcccctcggaagggttccacgaccgcctcaggctactcgggctccgcgcccattactgatcaggggttcgaaggctggcccccgaagggttcacagccgcctcagacgccgagcgagggatga

SEQ ID NO: 39253 - DNA, 495 bp, Zea mays
  Peptide Sequence Number=SeqID_82628
atgtcgcggcaacagcttaacggagctccggcgcggcggagagtgaacacggcagtttcccaagagaagcaagtcttgggacggagggacaacggtgatctgctcgaggagactcgacatgcggcaagcgcggcggatattggtgagagaggaggcgacgtgggcatgagctggccgagcggggcagcggcagaagcgcggctgggcggtttttgtgcgcgcgcgttgggggcgagatgctcgagatcaattgatataattcttgagggtcccttggacctatgggttaggacccacacacgctttcgctgcaccactttaatcttgttggctgatgttgatcgcattgtcttcattggggtgcaagataagcatcatggtaaagatcaagggatgaaaagggttaaggtgataacagacaaacacaaccaaggatgtattttagacaaaacttgtgaggcgtcaaagaaggggaagcaatcaatggtgaagtag

SEQ ID NO: 39254 - DNA, 450 bp, Zea mays
  Peptide Sequence Number=SeqID_82629
atggctcacgcacgcgcaacggctgccccacgaaccactcgtcccgtcgcattaactctgcggcgggacaggcggcacctttggcaggagaagcaggcgacgcttcgccttcgccataatgaccgtgtcaaaaaagggaccgggaaaggggataccccgaaagggatccttctccgtgaaggaaacgggccccgagcccccctactgattagaggttcgaaggctggcccctcggaggggttcaacagccgcctcagagcgctcgggctccgcgccctctactggtcagaggttcgaaggccggcccctcggaagggttcaacggccgcctcaggccacttgggctccgcgcccactactgatcaggggttcgtaggctggccctcgaagggttcacagccacctcagacacagagcgaggggatgaccctgggtacgttcgatacataa

SEQ ID NO: 39255 - DNA, 372 bp, Zea mays
  Peptide Sequence Number=SeqID_82630
atggccgtcagccgtcgtgcatcaacacagcgcttgccgagcctcaccgttgctgctccgcaagtcgccacgcacgctcgtgatagtgtcccctcccaccggcatcgcctcgccccctggcctccacttccccagcgcgacaggatccatcccacccctgtgcagtgctcgtgcgtccagcccatgggcaggcgcgatgacgcccgggcgtgtgtgtcccctgctggtagcgcagctggctgcctcagccgaacctgccctcgtctagctcctgcagctcctgccgagtcccatggacggtcctctctctctctcttctatgctgctgttcaacgaagaagaaatccccttgccgtgtccgtgcggttgtaa

SEQ ID NO: 39256 - DNA, 2154 bp, Zea mays
  Peptide Sequence Number=SeqID_82631
atggcgtcggagatcgaggtgctcgaggacaccaccacctcctcgacctccctcgtcgcggccgcgtccacggccccttccgccgcggagggcgcaggggcgccggcggagaacgagtcgctgaagaacgacgtgtacaccgcagcggcgtacggagatctggagaagctgcagcggctggtggagggggagggccgcccggtcaccgagcccgacggcgggggctattacgcgctccagtgggccgcgctcaacaaccgcgtcgccgccgcgcagtacatcctcgaggttgccctctccccccgctcccgtgccccctccaacgcctcgcaatttggccttctatttgtagacgttcgttttgcgttgctattgggggatttgggttgcaacaggacagttcaggaagaatgtacatggctttgctgtgtcaagtgtcaactagttacttgtatttatgccttcaaccttttcagtttagaccaaaatgtgtatgtgcatggagcagacacaaatgctgtggatcacactggacaaacagcacttcactggagtgctgtacgtggtcatattcaagttgccgaactacttctgaaagaaggagctaagatggatgctgctgatttatatgggtatcagccaactaaagcatttttggatgtgtatctgccagctgaccaattatatccactttaccaggccacacatgttgcagcacagtatggtcagactgcattcatttaccgcattgttgcgaaatggaatgctgatccagatatccctgataatgatgggaggagccctttacactgggctgcttataagggatttgcggactccatacggcttcttttgtttttggatgcttataggggacggcaagacaaagaaggcatgtgttgtactcctttacactgggctgctattcgggggaaccttgaggcatgcactgtgctagttcaggttggcaaaaaggatgatttgatggtgaaagacaaaactggcttaactccagcacagcttgctgccgataagaatcatcggcaaattgcgtttttcctcgacaacgctagaagggtacatgacagaggatgtggtgcgaacaccagatttgggaaattgtcaaaattaggccttgcaccttttctttggtgcaccattattggcatgcttattacatacgtacactctgttatattaggacaatatgtcatgactatgacagcaccatttgggatgttcgcatggtcaggagtttttcttgcaactgctgggttggtcatgttctataaatgtagcaggaaagatccgggttacatcagcataaatacaaggggctcgcaaaatcaaagggacgatgaaccactgctgaagatggagttagaaaatcctgcgcttctttttggcaactggtcacaactttgtataacctgcaaaatagtcagacctgttcgttcgaaacattgttctacatgtgatcgttgcgtggagcagtttgatcaccattgcccttgggtatctaattgcataggaaagaagaacaaatgggaattcttcatgttcctcaccttagaagtttttgcaatgatcattactggctctgctgccattataagacttgtaagggatccagattctccatcatcttttggtgcttggattcattattctgcgtttcagcatcctggggttgtttcatttctcgcattggattgtttccttttctttggagttgcagttcttacagtttctcaagcatcacagatagcaaggaacattacaacaaatgagatggcaaattccatgagatatgcatatctcagaggcccaggtggcagattcaggaacccgtatgatcatgggattcgcaagaactgctctgacttcttgttaaatggatacaatgaggacactgaacggctagaccagacattgcacactgatgaggagatgggaatgatacagatgacaagagcggtttcgcagaatggtgacaatcatttacatcatgctgatctgcactcgggaaatatcagagagcttgtgcagaaaagtatgttattaagtattacaggagcttcgttactagaaaaacttcgacatagatcaatgaaagcacgacgaagcaagctttgttacgttgtcacacattga

SEQ ID NO: 39257 - DNA, 234 bp, Zea mays
  Peptide Sequence Number=SeqID_82632
atggagcctagcggagggacagctgtcggagcggttgagtccttgctgacgtcctcttgcttccgtaaggggtgccaaaggttcatctacaactatactaaatcgactgtccggaataccgtagattattccggacaggagaagctttttggaaaatcaggccaagcgcggaccgtccgggcccttgcggcggaccgtccgcgacaccgctttgacttcgaccaggaactataa

SEQ ID NO: 39258 - DNA, 159 bp, Zea mays
  Peptide Sequence Number=SeqID_82633
atggggagcggtggtgttggcagcccacgttatcatggggacgtattcttggctaagagggtgatgatggaggctttgatggagattttgacgatgatgaactccaagtctaacgatacgtcggtcatcttcctgtgggagattgtccctgttatttaa

SEQ ID NO: 39259 - DNA, 2010 bp, Zea mays
  Peptide Sequence Number=SeqID_82634
atgccatcctcttcttcttccgccgacgccacgccgccggccgccgcctcgtctgaggagacgttgagtaacgtgatggtggaggagttgcgcgccggcgactctgttgaatttggtgtgtcacggatgacgtcagcccgtattgaagatatgcagcggttgggctactttggcggcggagtcgctcatgctccggggacggaggaagtccccgagccggagggcgagttggttgttttcgaggcgttcttcgtcgccggactccgcttgcctgcgcaccgggtcttcgagttaaatcaactgccgtacgacggctaccctggtcaagacgaagcggaccgccgtgggaagaaaccggcggtggagactggaggcgaccctgcgctggtggccgccgcctcctcgaaaaagagaaaattagtgatggacaaggatcgccaaggggcggcgcgaaaacgccaggcgactgtgagggttcacgaagctcggccgaaaaggcagcggggaacggcgaaggcggaggcctccggcggaggcaagccgccgctgccggtgaaggtgggcgcctctgcgcctggcaaggcgccggaggcgacggtgggcgccggaggccccaagctgacgaaggtggtgccgtctgttagcggagtggcggaggctgcgaaggcggcccgaacgttaccgccgcccggcaaacgcgttgccgacttcggcaccgagattaatgtggaggattatcttggggggtcggacgagggccctctcgctctagttatgcctggcgcggcgatcgcgacggctgcgccagcgccgaaggcggggggagaggcccttggcgtcggaggcgaggtgtctgccctcgcactggtcagggacgaggcgggcgtggcgacccgccggctgaagggagcgacggaggcgttgagtcgagcgacggaggcgctgagtcaggtggctgacttcaccagccgcaccgcgtcgggggccctcacggcagctttgtctgccgaggtcgagagacttcggacgcaacatgctgacgctgtccgtgagaagtcggcctccgacaacaagtgccgcaaactggcggagaaggtggccgccctggagaaggagaaggctgacctccggcgccagctggcgggggagaggagggaggccaacgaagccatcgccaaagagcaggctgcccaggcggaggccaggctggcgcgggcggaaggcaatatcgccaaggagctcgccggagagctgcagcggcggcttactgccctggagagccgcgcggagggggccgaggccgcgatgcgagcggaggccgaacggacgcgcacgcagctcatgactgcatatcgcgagctgggtgtgcggacgggtgacttcgaggtgccggagcgagaggccggacttcgctgtctggaatgggtgcaggaagaactgcaggagctccccactgtcttggcggggttgatgtcgttcacctccctggtcacctgcgaggcagcgatgaacgcgctctctcgcgaaggctgccggcactttgaggccctcgaccaggcagatgaggattttggacgagatatctttgaggtcgaagaccccgtggtgaaggaatccgccggggccctctatgaccggatgtggggttcatacggttgtgaggtggtccgagcgcgggccgaggctgcgagggctcaggcggagcgcggcgagcgggtggacgacttcggggcgctgaacagcgcgctgcctgacccggagacgacccctgcggaggccgcgactggagtcgccccgggaccgaccccggagaccgcggaagatgcaccaggcgcccctgcacctgctgcggccggcgaagaccttcccccaaaggtggccgaaggcgcgcccgatgcccccgcagctgctgtgccgagcgctgaagatccagcggaggtgggggcggaggcagcggcggaggcctcggcggaggctcccgcagcggcagggcccccgcaggtggcatag

SEQ ID NO: 39260 - DNA, 414 bp, Zea mays
  Peptide Sequence Number=SeqID_82635
atgcacgagacaccactcgagttacctcttgcccagcggaatcaagcaacgaaagcccaccgtctgggacctcttaacagatggtcgggatatcatcttcaggaggctctgatagcatgtcttcggggacgacctcctctagtacttgatcaaaatctgatattgaaagctcctaaagactaccaagggccgacagagccggagagggaatatcactaccccctcactgcctctatagtgccggctgttcttgcggatcagtgggacttcttcttcctcttcatcctcgtcaaacatgcagccagcagcctatgcacgatcacaacccttggcataaaccttaggattggcctctaccgggacatcatcgggaaccggtacagaagggtcgacattccgatccaagcacgatag

SEQ ID NO: 39261 - DNA, 501 bp, Zea mays
  Peptide Sequence Number=SeqID_82636
atgggcaaaggtaagagaggtcgaggctcgccccgtcgtgctggcgacaagcggaagcacgatccaagtcctcccttggaggacttcggcgattcggagtactcgaaggaggaggtttcctccgagtccgagggatcgctggctctcgcctctcccccgacgtcgtccgatgactcggacgactctcaggggttggccactgaggtgtggacgtacatccgctctgtcgagcgcgctgggctcgaggggtcggatgagtcggaggtctcctcggatgaggagaactccttcggctcgtccgaggagaggagcagcgacgacaacaacgatgagggcggtgacggcggcgacggtagcggcgacggtgacggcggcgatgacgacgacgacggcggtaggggcagtgaaggcgacgacgacggcgatggcgacggtgatgatggtggcagcaagggcggcagtggcagcggcaaggctagtggcaaagtgccactggtctaa

SEQ ID NO: 39262 - DNA, 480 bp, Zea mays
  Peptide Sequence Number=SeqID_82637
atggacgcggtggggaagcatgctgccggatcccggggcgaggggcaccgacaacggtgggaaagtggatgcgcgctgccggatggggaagggcacggtctccggcagggaagtggggaagggcttggacggagggcggcaatgccgtcggtggtggagaatggcgtggacggcgggcggaaatggcatgggcgcggtgcggcaagggcgacacgcggggggaagacgcgcggggcgggaggaagacgtgcggggcgggaagaagacgcgcgcgggggtgagggacatgcgatgaacgcggtggggaagcttgctgtcggatcccggggcgaggggcaccgacaacggtggggaagtggatgctgccggatgggaaagggcgcggtctccgacagggaagtggggaatggcgtggagggcggagcaagggaggaaggcgaccgggaagagggcggggatgggggccggccctcgcggtga

SEQ ID NO: 39263 - DNA, 318 bp, Zea mays
  Peptide Sequence Number=SeqID_82638
atggtctcggacagcgactacaccgagtttgagaacttctcaaagtggctcggcgtgactcaggtggtcagcctgaaatgcaaaccaatacagccaaaattacttctctggtggaacaagatccattctgattttgtgcagcagcaggtctgctgggagtgcttcctcctcaaggagactgtcaacgtcttgcttgtggagagtgatgattcaaccaggcaggtcgtcagtgccctgattcgttgctgcatgtaccaagtcacctaccacctcttcaattttctggaactctacaatctcagccaaagcaccacctaa

SEQ ID NO: 39264 - DNA, 1851 bp, Zea mays
  Peptide Sequence Number=SeqID_82639
atggaatctctatctgtaggcttgtgtcatagcaagccaaaaaaatcggtggcaaccgcaatagttccggaagactatatttgcacgcagggtgatcttgccctcatcgattttattaaggaaatcccttgtgaaccaagggtggaagtcgtacttattgatgatgcctttgttgaaagaaagtcgatggaatgtttatttcaaccgaatgcatatctaggtgacgaggttatagactgttacataaatttgataaaagctcaaaagcatctaaagtgccaatttggaggtctcgttcacatagaaaatgctttccagtttaatttcttgaagcgagatggcgatgttgaaattaaaacagaggagctatatccaattgaagacatgacacaaatatgtagcgctgaacgaagggtgttactttacctagaccatgacatggtgtttattccgataaacatccgagagacacactggattaaaggtctccaaaggcaaattgatatgatatctcaacgtaaggagttaaaagaccacaggtggccagacctccaagttgcttcttggccgctcagagaaatagacatgggatatgcaaagcagacagatagctcttcatgtggcctctttcttttgaattatatcgaatactggacaggggatgaactgtctgacagttttacccaggaaaaaatggctgctatattactatcttcagacctgaataagagaagggggtgtctgttatacaaaaatgataaagaagttgactttgtaagcccatcagatgttgagatattagaaaacccaacagattctaagaagaggaaactactcaacgtgcttcatgatagcgaagtagtgtatgaagatgaggaaggccctattacccaagcagacttgcaaaagtggtttgttgatgattgggataaaagagctcctgtaaaagtctctaacgatgggtgcaccaatgactttttaatggttggtctttccacaaaggacatgccattgaccaaagccgattcaatagatgttttatgtgattatatcatggcaatagaagacgatacgacactagagatgacatgggtgcgaagtttcaatccttttaagatagaaatctctgtcaaagacctgcaaaacatattaacgataaatctagatatgactctaagatgttttgatatggctgttcgactgcttgccaataaagagtcacgtaggccgaaaggagaaatcataaataatagaaagcattatatggacatgcgtttctggagaatggttggctttggtaaacttccaaagtaccatcaagatcctacagcagaagagttagccaaaacactcgattgttggccatcaatgaattattatatcacgggttgtagatatgttcttatgccatggaaattcaatggatgtcacaccctttttgtaatagattatgttaaaaagcatgtgacttttatcgactttacaccgactcaagattggtgtaaacacatgccatacaagaggtttgcagaagcgattatcatggcctcaaagaaatataagattgcttacagcaagaaacgttctggatgggcggaggaaatctttaagtgggaacatacaattcagactagtgttccaattgacttaagagggtttaataccagctacctcgttctacaagctatggccatgtgggggaatgacacacgaatgaaatttgttggggatgcaaagattgttcgaaagaactttgtgattgatctgttaatttatgaggacaatttgtgccgatatgccatccctgcaaacatacaacagagacttatcgatatcgctaaaaagaattag

SEQ ID NO: 39265 - DNA, 228 bp, Zea mays
  Peptide Sequence Number=SeqID_82640
atggctgaaaggacaggcggcgcctcaggcgggagaagcaagcgacgcttcgccttcgccataatgaccgcgtcgaaaaagggaccaagaaagggggataccccgaaatggacccttctccgtgaaggaaacatgctccgagcctccctactgatcagaggttcgaaggctggcccctcggaggggttcaacggccgcctcagatcgattgggttctgcgcccactaa

SEQ ID NO: 39266 - DNA, 354 bp, Zea mays
  Peptide Sequence Number=SeqID_82641
atggtgcggagtagatcggacgccatgcatcaccccggcgagcaggaccgaccgcacaggtacagggccgcggcgctcccgtgcagagcagtggcgcacacaacagcgaagcccgcacggcggtcccggcacccgaaggaggcaacagtcgaaggtgtcggggcttcctgcgcggcctctggtggtggcgcgaggcggacgaccgcagcaagaccggcggttcaacgatccagtgaatgtgggtcgatcctcaagccacggagttggccacgcgcgaaggaggcgccaggactgttgtacgacggggcgcgaggtcggatcaatggtggtcgtgcgagaagcaggaatgagtag

SEQ ID NO: 39267 - DNA, 237 bp, Zea mays
  Peptide Sequence Number=SeqID_82642
atggtcagggcactgtggctgcgggtggatgactacggggagaaggagttgtcaccggtgggtccacacgtcagggagtgcaagtgcgccaaggaatatgggccacacggtgatgaaggccttattcaaaagaacctcaaagttaagcgtgctcaacttggagcaattatgggatggatgaccaaccgggaggttcttactggaaggataatcagtcaccggagtttgtataattga

SEQ ID NO: 39268 - DNA, 138 bp, Zea mays
  Peptide Sequence Number=SeqID_82643
atggctgggaaaagtcttggactgggcatcaattctcagaaagtccaggggtctcggtgcaagtgttaccgagacacaggaaacccaccagatggactgcaggttcaattattaacgactacaggggctctttggtga

SEQ ID NO: 39269 - DNA, 849 bp, Zea mays
  Peptide Sequence Number=SeqID_82644
atgattacatccaacggctgtggtgttttcccccaattcccatcggtctacggtggcgccgccagaggatcacggcggaccaccgccggagacgaccggtctcccgctacaaggcccggtacctcgcctaccattgtgcagaacgtcacccggatcaaggcgagcatcgtgaaggtcaactcaccagtcgagagggcaccgacgaggccggtcgacggtgcagcgccgcccgccgccttcggcgagggattcggagtcgcgtctacggttgaacccacacggcgagcacacggggaaaattctttctccttttacactttcctacaatttgagtattacaccctgaagcaagccaaggatgagcacatccagaagttgatggaggcctacttggtaacccataaccaacgtagagccctgcggatccaagagcccgcttcatccaacccagttcaatctgtcagagatgaggatccccagattcttgaaggtcacccggtctctatcaaaggagagaagaaggcttgggaactaccggaaggagccatagtcttggaaggaattccagtctcccctaaggctatggataagcaagagcaccccgagtcctcccaagatcccccgccggagttgtttgaacccctcaccatgaagaagattccagcaccctcccttgaggtcaaggaagaagctgcaagcaccccgccagcaccaccgccctctgaggagctacaagagccagtcccgcttgaagaagagttcgaccccgtgccgccatctcagtcgctgccagaagaagagatcaacatcagctccctgttgacccatccaggagatgtctcagattga

SEQ ID NO: 39270 - DNA, 1347 bp, Zea mays
  Peptide Sequence Number=SeqID_82645
atgcatcatgtctttccatcttccgagccccccggatgggggacgcccgcagtccttccgccttgtcgtcggaggaacgcaacttcgtggaagttggtacctttcagccatcgttcggcttcaaggattttcatcgtgcagcccggctgcatcccctcgccggtggtcacccaagacggtgacctccagcttgatggcggggagaagcgagccgggctgcggcctctgcccctccctcagcttcatggatgttcatcatcagtgctggggaggggagtgtgccgagttggggtcggtccctgtgcgggtggcggcccgctccttccctcagtgatcggggggaagggcatccaccgttcatggcacgggcagctgccgcgtgcccggctctctgagccgagcggcttcgaagccgctcccggtgccgccttccgccacggcagctggaaggggttccgccgccgtcgagctagccggcgccacccacggactgacctccaactcttcggccttctgcccgtccttgcctctcgagttgggggcatgggcgagggcctcatggcagcagcatccgccctgaggtcatcgctactgctgttcggccctccggggcagaagtcgtcgtcgttgccgctgccggggcgggcgacgacgagccgttcgtcggtcttctgttgctccgtaggccccccaatcgcgtggggttgttcgtacctgcggagcactgagactcgccttgtcgattatctgaaccgcttcactgagcgtgagttgcctcatgcaaaggtgacgagtgagagttggcttcgaaaaggaggtgtggttggccagagcctggccgggtcatccactggcagaaccgacgccggggttgagctgccgaggccacaagccgagctgatgtctttggggagtgggggccctccgaccgcgtcgccgtccgaggctaggtcagaccccgccgaaggtgtagttgatgccgagggtgctgttgcccccttcggctgtcgacgtccgagcctgcaggatcagggttctgtttccgacgcagtcgagaaggcccgaaaaatcatttcggcagaggagctctcgagcatgaagacttgttcggtccgcggagtcacttatccgaacgcgagttacttatcgcagaaggtgatgagtgaggaagtccaggaagtccaggaactttctgccgatgaactgggtgccgttgtcggtgatgatggagttcgggaccccaaagcgatggatgatgttgtcggtgatgatggagttcgggaccccaaagcgatggatgatgttggtgaagaacgccaccgcctgttcggacctgatgctgtttag

SEQ ID NO: 39271 - DNA, 234 bp, Zea mays
  Peptide Sequence Number=SeqID_82646
atgagcccaccatgcaaggggaggaacctccctagcgtgatgcccggtgacgaagaaacagacgccggaacatgcggcgacatcatgaagccagggaacgggatccggtgcagcccgtgtcccgagacgaagcctcggaagtgggggaaactcccgacgaacgagtacaccgagaaaggcgtaactcctgtcgttgcgatcgccgacgagctcaagatcgagagcgagagctag

SEQ ID NO: 39272 - DNA, 2742 bp, Zea mays
  Peptide Sequence Number=SeqID_82647
atgaacgatctggcggcggtggagctgcacccgggccacacggtggagttcggcgtttcacggatctcctcggttcgcgtgcaagacatgcagcagttggggtattttgggaacggagttggacgagttccgggggcggaggagattccggagccggagggtgagattgttaagaggaaagttggaagcgccgaggactgccaagactttggcagaggttgtggagttccttgcgcccgaaacaagtggggcaattggtatgattattggttttatgtggcgggaggcgaagtcgaagacctcctgggactcctggtggccgtgatgtgctcgcactgctatgtggcgttcccgccgtttcaggtggcggaggatgatagtgacgaaggggcccttcattgtgctgcccgcatgagtagcgggcccgatttagttgaggaattcatcggctacggagtgtggcccttggcgcatggctgggcgttgggcaaagtatgccctcgccagatgccctccctgggcgagaagctagtgcgaagtcctgccttcgcgttggatctgcgtggtcgggatcccgccgcattcgtgcgtgaagtggaagacggggctgtgcagattgcggggtgttatgtgccgaggatggaggctctgcggagttgggatattcatggatccaacgttcgcctgaatagggtcttcgagctgaatcgcttgccatacggcggctatctcggggaagacgctgccgtggccgtcgaccgccgtgggaaaagaccagtggctgtgactgaggaaggcccttcgcaggaggctgccccggccgcaaagaagagaaaaatagccttcgggggagggatgtcttcacccgaactccaggagtcttcggcgcgaatgctgaaggttaccaggggtcgatggccaaagaatgttctgatcccccgtgcggctggcgaagacttttttacgtctcgtatggctcgcggcttgaagatttttccttacgggcagaatattgctgctgttgtattggcagtgatggagaaggatcgtcaagacgctgctcagaagcgctgggcggtcgttaggatcggggatcctttccgcgaggcgaagaaggcgcggggagccgcaaagtctgccgccctgggcagtagtaagccattgccggctgcgaaaccggtcggccacgggcccagcaaggcttcggctagtgcaaaggctgctgcttctggcgcgggcaagccaccctcacgcgggcccgcgaaggggcgaacagacgaggcggcggcgcgtgttgcctacttcgacacggacatctgtgtcggggattattttgtttggtcggatgtggggcaactggctgttgtcccgcctccggtggcggccacttcgccaacggcgatggttggggcgaagggtgccacgcgggacttgtgggccaccttctgcgcgagcggtgagattatgtcggccgctaccgctaaggacgtggcgggctccatgtcccagcagctaaggcaagcgtcgcagcagctgtcgcagcagctgaagcatgcggccgacttcgccgaccacgtcgcgtcggaggagaggagggaggcgaacaaggccattgctgatgcgcaggctgcgcaagccgaggccaagcttgcgtgggcggagggcagtctcgcccgccaactcgccgaggagctagaggcgaggctcgatgcctttacgcaactgcatggacaaagccgaggcctcgacgcgtgcggaggtcgagcggacgcatgcgtagaggagctgggggttctcccaacgatcgtgacagttctcatgtcctttgcctccctcgtcacctgcgagggggccgtgaatgctttatcccgtgaggggtccaggcatttcgaggtcttcgaccaatcggacgaaaactttgaacgcgaaatcttcaaggacgaggaccttgtgctgaagcagtcgacgggggcgctcttcaacagaatgtggggcccgcacggccgagaaacggtctgggagcggtctgaccgggcaatagaacagatggcgcatgccaaaggggtcgaggaccttggtggtctagacggcgcgctgcccaaggccgcgggtgtggatccggagccgccatctgatgccggcgagggcccctcgtcgacccccacgccgactggagccagcgaagaccccgcaccagcccctgcaccgacgtgtgaggacgcctcgaaggcggtggtcgaaccagctaccaaagacccccgcggcggccgagccttcgcaggtggcgaaataggggttccgacgtttgggcctgcgcaagcaaccactactgacaatactgattttgcggcagagacttcaattgtagttcatgtcgatgatagtgtgcctggttttatgtctgaatgttttgagtccgacggtgagtctgggagttcgtttccttggacggaggagtcctcggatgaaggcttggattattttgttgcattggatgtggttgtggcggagacttcgccgcgtgtggagggtactatggatcttcctggtgcgagtactgggtgtaggcggcgaagggtggtgggaaaacaaagtgtgggtgaattttcgcggagcggcaggcgccgtcgcatggggatggagcgtggccgacttcgggtagatggggttggtaaacgagaattgttatcctcgccgattggggcgggcataggcgagggggatcttcgagagcttttgagg

SEQ ID NO: 39273 - DNA, 582 bp, Zea mays
  Peptide Sequence Number=SeqID_82648
atgagcccgaccgcctgcgcatgcggtgagccctatcccggccatcatcgtcgacgatccgcacctcgacgtgtccgtcaggacctcctgaacctcacccaacccttcaccagacctccctcgctgtcggtaagccgtgccacactttttccccaccgcggttactgttgcaagggggaaggagctcgggttgaaagaaagacaagccagggggttttgcaagattgtaatctcgctgatggagagtacatcctcattccggagcaaggagttgctcaggaggtagtccaggagccagcaccagagcctgctactgaagacctccctgccccagctttggaaggcaagcccggttatggtgggtacaagtgtggtcactgcatgacggcagtcggggtcagtgaggcattgtacgccaaggcactagtgcttttggcaaaccaaacccctcagccaaacaacttcatgtctagaggtagaggagtagactcctcacaccggaggaaccgcatccctaacgtcacggaggcaccctttatcgaggacttctaccgtgggtccaatgactcgggattcgtctag

SEQ ID NO: 39274 - DNA, 591 bp, Zea mays
  Peptide Sequence Number=SeqID_82649
caagcaccgacggggcactgcgcagcagcacgcaagcagggaggaagccgggtcgcgagccatggtggggatgctccagggcatctgctgcagcgcgccatgggagaggtttgcgccagcgaggagaggagggtcgagctgctgctgctgtggaggagagggagtccttgctgctggaatttctgggcaccatgggaggaagaggtggacgagctgctgctcgccgtggagcaggggaggggcgctgctgctgggcggccatggagcaggaaggtggaggtcggccggaggtggaagaaggacgccgagcacaggggctttggacgccctggttgctggccgagcagggaagaacatgggaaggcgccatgggagaaactcgagctcgctgccatgggggaaagcttcagcgcgccgaggaagaaggagcaggggggcgccatggctggccgaggggagttgctcgccatttggagcagtggcaggggcgtccgtgactgctgtgctgtggaggccgacggccatggaaggcagagagcagagggcatgcatgccaaggaggaagagggctggcgtgggggagatggctga

SEQ ID NO: 39275 - DNA, 561 bp, Zea mays
  Peptide Sequence Number=SeqID_82650
atgccttcgcactctcctcatgcattgcgtccttccgccttccgagcccccagatggggggcgcccgcgttgccttcgtctcgttgctgttggaggagcgcaacttcgtggaggttggcacctttcagccattgcttggcttcaaggattttcatcaggcagcccggctgcaacccctcaccaatggtcacccaggacggtgaccaccagtttgatggtggggagaagcaagccgggctgcggcctctgccccgccctcagcttcaaggatcttcatcatccttgctggggcgggggggcgagctgagccagggcctgccttcgcgtgggctggcgtctcgcctcttcctccggcatctgggggtggaaaccatcctccagctctgcggaggaggcgtcctccatgtcggtgttttgggtccgaccgcacacccggggttgcccctcaaggtgttttttaggagtaggacggtgtcgacgactgtagcaaaatggttcatgtcggatgcacgagagacagtggacaatgtttacaggttcgggccgcttagagatgcgtaa

SEQ ID NO: 39276 - DNA, 1041 bp, Zea mays
  Peptide Sequence Number=SeqID_82651
atgatgcttcctggccctgagctcgccaagaggctggggctcgacattggggtgaagaactccttaggctcgatgagggggacaaacttggtgaaagtgataaccaccctcactgttggcacaacggggattgccagagagttatgttacctttatcgggaaagtccccagtgggaacttggtggtgagcaacacgcggagccggcgcacggcgcgcacacggctcgccaggatgtccagcaacggcagagccacaccgacggccgcaacgtcttgaccatcttctccttccacttggctccacccatcgtcgtcgtccctgggtgccagccgaagtatcatcctcgccgcgcctcaccgatgcacacggcggcagccaccgtgccacgtccacgctgttcctccgcctctatggggtccccaagtgcgaaggcagccccgccacgctgtgtcgcccagatcgagggcgaggttggcgtggtgttgggtgcgggggcatcgtgtctagtcatcccccgtggcgacgattttggcaatgtcgatctcccatatcgtgactacctcctgcgacgcgaggatagcggcgtgttagtcgatgggcctgcgccaagtctccggcaatgggacatcggcctagacgttgtgggttcacctctacgtggtggttgtgacggtggcggtggtgcagtacagcagccagccaagggaggtgaggatagggaggtgtggttgatgatgacgagggaggtgagtagagggagggtggagcggaggaaggtgggaggagagggcaaaaaggtaggatatggagcagagaagcgaccgtacactgtgactttgccaaggagccgccgacgacccccgccgcctgtgctcgtggccagggtagctccgaccacctccgacgccgacccgcacaccgacgtgaccgtcgtgacctcccggacgtcactgaccaccccgccggagctctactgccgccgggggttttgtgcaatgtcagtgacccatgccaatagtagaccgaggactgttttgtga

SEQ ID NO: 39277 - DNA, 279 bp, Zea mays
  Peptide Sequence Number=SeqID_82652
atggggattggttgtctacgggataaaaatttgaataaggattatggtgtggtacctggacatatcccctcacgcgacctgagacgaggtctcccattccggttatggtgggtacaagtgcggtcactgcacgacggcagtcggggtcagtggggcattgtacgccaaggcggttctctggaggaaatggttgctggagtgacttggccgtccatcttgccaccgggttggactgtcgagtgggaccctgcctcggctgaggaggagcatgaggagtga

SEQ ID NO: 39278 - DNA, 702 bp, Zea mays
  Peptide Sequence Number=SeqID_82653
atgacaccacagttaccagatgagactcgaagtagtgtcgcaactttcgccgcgtcagaattaccgcgtacagtagcttatgaatttgcggtagaccggcctctggacgagcaatgcatgcccttcttctcgtctctcgaccacgatcgtgacgctgaccacctgagtggttgcggctacgtagatcaagagggcttctccggcagcgggggcaccaagatgggcgcgcttgtaaggagcgcctttaagttcccgagggcttcatcggcctcgggggtccaagtgaagcactcggtcttccttaagaggtggtacaggggtaggcctctttcgccgaggcgcaagatgaagcggctcagagccgcaaggcatcccatgaccctctgtactccttttcaagtccttgataggccccatgttggtgatggccgcgattttcttcgggttggcctcgatgccccgctcggagacgatgaaccccaggagcatgcctcgggggactccaaagacacacttcttggggttgagttttacgccattcgccttgagacacttgaatgtcgtttcaaggtcagagaggaggtcggaggcttccctcgtcttgactacgatgtcatcgacttaagcctcgaccattcggccaatgtgctctccgaacacatggttcatgcacctttggtatgtcgcgcctgcattccttaa

SEQ ID NO: 39279 - DNA, 1029 bp, Zea mays
  Peptide Sequence Number=SeqID_82654
atgccggggaaggcaaactgctgctgcccagccagggtgcagcattccgtcctctgtctgggcgacggtggccagccgcaccggggggtctcacaacacgtcgtacaccacgagggcggtactcgtgttctgggacggtcccattctcgttttcgtggcgaggacgggagtgaggacctgtcggtgcgctttggggcggccagcgctcgctggtgcggtagtggtgggcaggtggacaccgccgtcggtgctgaggtggtggcagctggagaaagcttctccaccgacaagactgtcagtgccacccgcggaccgacctccggctctttggctttaatgtctggttctcgtccacggcgaggggacgcgaacgagagccttccagcggtagcgtccgccctgggaccatcgctgctgctgcagaggtcgccggcgagttacccggagtttgtcgtcccgtacgccctccgatgtgggggttgttcgtacccgcgggagtggaaccggagtttcgtttgtaatggcaccttgagtgccggtgtctgttcattgtggctgtcggggcctgaacatctagccgccgaggcccaaacatatcgttgtcatgttataaagctgcgtttattttcctcttgtttcgagtatcaggacttgtttgtcggtagcagaatcgtttatccgagcgagagttacttaacgcggaaggtgatgagtgaggtatccgtatcccagaggcgtaggagtcccttggctcggttggcctcgccgcttacgtgtactcttactcgtccgcaggattctgttaccgatatagtcgagaaggcacgaaaaatcatttcggcagaaaagttttcgagcattaagacttgttcggtcagcgaaatcgcatatccgagcgtgagttacttatcgcagaaggtgatgagtgaggatcacgctatcgaagtagtcgaaaagcgcgaaagatgttctggcagaaagactttttccgaggaaaattttgacgcagagggggttccccccttctag

SEQ ID NO: 39280 - DNA, 411 bp, Zea mays
  Peptide Sequence Number=SeqID_82655
atgtgtctctcctataaaacaaatccacccagcctcgtcttcggcctcaaacagaacgccatagcgcagctgagagagagaacagaagggaggagagagggcctcgccggcgaccttcgctccggccttgatgtgggtgcccagttcctcgctgggcagtgccgagcgtacaccgagaaggtcgcgctctcgccggtcaagtctggaggacgagctgctcagaatgcgtcgtcagcattgagagaagtcatgggctcctacacaaatgcaatccgccgtcgtctacgtctcgaccaacgtgtaaatgtgatatctgttagtgattcttgtgtgattgcgctcgccgtcgtcgcgctgttcgcgcatgttgccacgcaccattcacacgtatcgcatgctgtccgagcctaa

SEQ ID NO: 39281 - DNA, 1023 bp, Zea mays
  Peptide Sequence Number=SeqID_82656
atggtgctggcttggctcgggcgcggcgctaggcgtgcgggggcgcgcgtgagcgttctctggcgcgggcaggaagcgtcgaacacgtggagtgcccgtttggttgagcttttggggggattctggccgccagaagctgaagcggctaccaaacgcccagcttctgctgccgcttctccgcgccgcgcttggatgagaagtcgcccgcccacgcgaagccagaagcggggctcagatcgcttccgcggaaagccaaacctcatttcgctagggtttcgcaatcgcgcccgtgacgcgtccccgtcccaactcgccgccgcaggtctcctccccttcgcatctcccgcaaccgccatcattcgcgacgcccgcggcggagttcgtgtcccccatcgcatctcccgccgccgcgctcgtcgtcttcgcagagatttccgcatcaactcgggttattcgtctgaggatcgaaaatcaacttccggcaagtgtgttagtactcttattactacacatgtgcctattaaattgtggtacttgtcccctcctttgttagcagccaaggcagaagacatgtgtccacgccaaatttttgtacatactccccatgtctggtatactaacgacctaataaatccacatcagatggattcagcagactccatagccgacaaggcaattggaaggatgcaagagatttcggacaagatattttccgtagcgagggaaacaatccgtcctggacgcgggttgacctcatttgatgctaccaaacttcgtgtagctttggaggagatagcttgcatgctggagcaagactctctggtgttgcaagaccaattggatatcgtgaacaacgtaaacatcccggttgacagcagctatgaaccttctaccttgtcgtcaccaccaccatctgacgacgaccttactccacattgggactttgcggagcatttccaaaacttttggggtgttgaatatgactctgatcagatgccttcgtttagtgacaatgatgtttaa

SEQ ID NO: 39282 - DNA, 1749 bp, Zea mays
  Peptide Sequence Number=SeqID_82657
atggagagggatcgccaagacgcgccatggaaatgtcgggcttttgcgaggattggtgacccgctgcgcgaggtcaaaatggtgcgagcgagcgcgaagcctgccgcccctggcaccaacatgccttcgcctggcatgctgggccccaacgcgtcgctgcctaccctgcccaagcaagaacgaaggcttgcatcgccaacgcatgctaccgaggcggcagagtttgctgccgagaggcggcgactcgaggggaggattgagttcctccgaacgcagcatactgaggtggtgcgagataaatcagtagcgaagaacaagagccgcaacctgcttgagaagctgtcggcggcggaggctgagaaggaagacctcggccgccagcttgccgcggaaaaggagaacgcggagagggcccgtgcggaggccaaggccgcccgtgatagggcccacgtggagacccaggctgctcgtgccgtggccaacctcgctctccagcacgctgccgacgcggagtcggggcacaggagtcttcacggctatctggacagggcggagacctccactcgcacaagcgtcgatcgagcacataaattgcttgtggacgcgtaccgcgagcttggtgcgcgtaccgccccttttgactcgtctggcgaggaggtgggcctttgcttcgtcacgtggttgcaggaggaactggagatcctcccagctatcatgatgggtctcatgtcctttgcctcgctcatcacctgtgaaggtgctgcgaatgccttgtcccgcgaggggtgcaggcatttcgaagtgtttgaccgatcaaacgaggacttcgaccgtgggatattccaggttgaagacgaggtgttaaagcggtccgctggggctctttacgacatgatgtggggccagcatggccgcgatactgtttgggagaggtcggactgggcgcttgagcagatggcgaatgatgaagaagtcgacgacttcagaggcctggagagctcagagacccaggcagaagatgtgaagacggaggctagggaacaaccggcgccgccgaccggccctcgcgaggatcctgcggcggagaccatcctgcctagcgaagacgctccagctacggctgcgatgaccaccgaagacccttcggtgccgaccgctccttcgcaggttccgacgtctaggcctgcgctagcaacccctactgacaatactaattttgtggtggccgcaaatgcggtgcctactaatgatagtttgtctggttctgaatctgggtcttggtcatctgatggtggtgagtttgggagcccattttcctggactgagtcgtcggatgaagatttggattattttgctgcgttagatgtggctgcggcagagtcctcgccgcggctggagcaagggaatccaacgggggtgagtagtgacattaatagggttctcgcgcaagatggcaatagctctgttaatctagcctctcaagggcactgtgcgggggcccgtaacacgcagcggccactcagggcctgttacaatgggccggatcacacgtgggcctccatgctggacgaggccgcacggtgggatgacctcgtcacaggtcttcgtccgatgtcgtatggggcgaagggtgtccctgcccgttgtcttgtctccattggaccaacgaccacggtgaaggcctcgagcgaagggtggcgtcttcgccttcgccccaacatttgccctacgagggaccagttcgactaa

SEQ ID NO: 39283 - DNA, 252 bp, Zea mays
  Peptide Sequence Number=SeqID_82658
atggcaagaaagcgtaccaagtatcttcggactcgaatcggtaccacagtgggagaagcccaaagaatacgaaggttgacacagcgccgaagctgtgagcaggaaagcttcggcgtgatagcagaaaaggaaaccgacttaaagatgaaaaggctattcagacctcggtggattactatagaattactaccaaatgtaaagggcatggatgtaattttatatgagctatgtcccgtgcctataaataggtga

SEQ ID NO: 39284 - DNA, 1293 bp, Zea mays
  Peptide Sequence Number=SeqID_82659
atgggccgaatcccacatgggcctcccgtggtggtgacaacgtgggagacctgtagacttcgacaaagccttctcttgcgacccgtccacgaagggaaccacgcaggtctccgtctggtcgacgccttcggcatgttcggacgcattgtagatgtgaccatctgcacaatgggcaggcgaagtcatagagcgaagggtagcatgtttgccttcgccccaacatttgccctccgagggaccagttcgaccaagtcagttggtgctgaagacgccgctagatgcccgcatcaagcagactgcacgctgccatcgacggtatgttccgatgccttcttctttgtctgctgcgagtgcatcattggccgcgccatcgtccgaggatactttgagcaatttggcggtgatggagttgctgcctggccataccatagagttcgacaccttgaggatttcctcggttcacgtgctggagatgtagcggcttgggttcatcagttgacgctaaacgtcatggttgcactggcgaagtatgtttgggcggttacttcttacggcgggcggccgtctgtggaggtcttcgccaagaattattgcctgcattggcagaagaggaagatagggaataagattgctcaatttggatcgtgcaccttcacgctgaggactggaaagacttcgacggaggttgttgagatagttccttgcgcaaggaacaagtggggcaattggtgggattactggttctatgtttctcctagtcatgtcgaagacctccctggcctacctctagccattctttgttcacattgttatgtggcgttccctcgattcaaggtggtggaagatgacgaggatgagggggcccttcgatatgcttcccgcttgagtagcgagcgcgatttggttgaggagtttatcgggtatgtggaggccgaggcagtgaagattgtggggaagtatgtgttgaggatggagaccctgaggagttgggatatctgtgggtcaaacgttcggttgaactgcgtctttgaattgaaaaatttgccttatgctggctaccctggggacgaccacaccgatgctgttattcgccgggggaaaaaggtgatggcgatggttgacgaaggcccgtcgtggggaatagcgccgagcgtgcccgccagtaagaggaaattaggtacaacggctgaagggttgtgggcttccgaacattttgatgtggaatttttggagacctacgcagctcctggggagacgatgtctttgcccgagctccagcagtcttctgcgtga

SEQ ID NO: 39285 - DNA, 519 bp, Zea mays
  Peptide Sequence Number=SeqID_82660
atggcccccaagagagcaacgtccaaggccgccgcatccatcgacgacacggcgaaggcagcaatactcacagagaagaaaggcaaggccctcgcggacaccaccccgcaagaggcatttgaagacgacgctgtcaacagcaagagacagcgccaggatcaccccacccccgacggcactgtatgcacctgcagttccgagggcgcaccacaagcaccaccaccaggcttcgctttgccagagggcaaagacaccatagaggacagacaagttattgacatctcagtcgaagaccagctaaatctgcgagctctatgcataaaaaacaaccacctgcagaagcagaaagaaatcctcgaagccaagcaccaacatgtcaccatgcaagccaaggtgcgtcatatgatacaagatgaagagcagagagctcgggagctagagcaagagatcacgctcatacaaggcgaaggccaatacaatctgcagtgcagacccctcgcactgccaacacctctctag

SEQ ID NO: 39286 - DNA, 600 bp, Zea mays
  Peptide Sequence Number=SeqID_82661
atgcagattattgaaagaaagtgcgaggctcaaaagggtgctgggataaggtctaacctgaatttttatgtggttttgtggactgtaggaaaaaaaacactcgataaactcaccgatcaacctggaaatctgataccaattgatgtagctgaggtgcccgatctttcggcgagtagagataattccgatttggcggaagttgacccttgcgatccgactacgacgagcaagcccgaggcgccaatgcaatcgctgaaccaactccctgtggcccgagtcactggcccaggtggaaggggtggcgcctggactggggaagatggtgcctgggctggagaaggtgctgctggtgtagatgtgcccgtgttggtgttgatgtcctcatcatccggggcttgccttccaaggctggggcaggcagatcctatggggcaggctctggtgctggatccggggctacctcctgagcaactccttgctccagcacgaactctccgtcagcgaggttgcaatctatcgaatgcaaagaataagaatatgtatgtcatgatgatgcaggatctagtaatcattatgctaagtgaagaaaaactaagttag

SEQ ID NO: 39287 - DNA, 363 bp, Zea mays
  Peptide Sequence Number=SeqID_82662
atggggaagcctatcccatcactcctcatgctcctcctcagccgaggcaggtacaatggatcaagcagtctcattagctgcgagaagcagacgattcgaatcgattttttatccttgcaagtgaccgcacttgtacccaccataacaggaatgggagaccacgtctcaggtcgcgtgaggggtaaagtccactgccaggttcaatcagctgaggtgcccgatctttcggcgagtagagataattccgatttggcggaagttgacccttgctatccgactacgacgagcaagcccgaggcgccaatgcaatcgctgaaccaactccctgtggttaccgaccttgctgatgcgagatcggcctga

SEQ ID NO: 39288 - DNA, 604 bp, Zea mays
  Peptide Sequence Number=SeqID_82663
ccagtgcgtggaggagacgaggggcttgcgctattgggctagaggcggccttggtttcctaggacctggggggagcggtgcacgatggagcttcagtggtggcgtcactgttctagtcgttgtcccggttgtggctccgccagcgctggggttcggcggatctaggcctcatcggcctagatcaggccctccctcttcggatctgcgccttggcgatgttggtccttctggggaggactggatcctgctgtgcactggcttctatgggcgaaagcccgatccatctcgaacatgtgatagtggtgtcctcaacgtcactaccttcctgaaggcgtcacttttgaagctcgtctcggccatgtcgtcgccttttggttgttgctttcgcttctcggcgtccgaggctggacgtttgtcggggcggggcgaagcggaggatcatgattggaagtctcgcgttgtcggttttttcctttggccatatgttgtccgtcttggggagtcggagttgctcctcctttgtgtggagctcgacaacaatgaacctcgatggtctttgtttgtggagttgtcgttgtctgagttgcttgtgtaccccgtgtaa

SEQ ID NO: 39289 - DNA, 438 bp, Zea mays
  Peptide Sequence Number=SeqID_82664
atgggcaagaacaacaagcgcaagcgtgaaccgactcctccatcggaggagtttggtgactcggaatactcggaggaggagttctcctccgagcccgaggggtctccggctcccgtctctcccccggcgtcgtctgatgactcggacgactcccaggggatagccgcagaggtctggacgtacatccgagctatcgagcgcgccgggctcgaaggctcggatgagtcggagtactcctcggatgaggaggactcggacggcggcgacgagggtgaagacgacgacgacgacgacgacgacgatgacgacgacagtggcaggggcggcggcgacggcggcagggacagcaccaagggcgacagcaggggcagcaccaagggcagcagcaagggcagcaccaagggcggcggcggcggcaggggcagggccagtggctag

SEQ ID NO: 39290 - DNA, 300 bp, Zea mays
  Peptide Sequence Number=SeqID_82665
atggcaagagtaagaaaggtagcagttgttctcctcgctctggtgacaagcgcaaacgtctggacctacatccgggccgtcgagcgctccgggctcgagggctcggatgagtcagagtactcctcggacgaggaggactcctcggactcgtccgaggagagcagcggcggcgacggcggtgatgacggcgacgatggaggcgacagcggcaggggcggcgacggcggcaagggcggcgacggcagcagcaagggctgcaatggcagcggcagcaagggcagcaacaaggctagtggctag

SEQ ID NO: 39291 - DNA, 303 bp, Zea mays
  Peptide Sequence Number=SeqID_82666
atgggcgtgagagaggtggaaatcccgcggccttcgtgttcgtcccgcgcccaggtcggggtgatgatggcgcctcctgttgacacggcaggtctgcgccctaggttgggcgatgtggaagctcctccgaagtcgaggtcgagtccatcttccgtggccgaggtcgagtccgagcccctgggtcgggcgaggcggagaccgttggctgaggccagggcggagtccgagccctggggccgggcgaagcggagttcgtcgtcttctggggctgagcccaagtccgagccctggtgtaggatctag

SEQ ID NO: 39292 - DNA, 768 bp, Zea mays
  Peptide Sequence Number=SeqID_82667
atgccgcccgtcaagttcaacatccccgccccgctcgcccctacagcgaacgccactgccgcccatcctcgcgtcctccccgtcctcagcgcctccccctgcccccgtcatcggcgccacaaccccctcggcctccccggcctcggcgtcgatgccgacaaggacgacgaggcggtgggagatctggagacggcagcagccagcagcagcaggcggttgccacatccggagacgaagaaggcgatgccggactggctgcagtccgtgcagctctggagtaaccagcaacagccctccgcctccccgccgcagcaccaggatgagctgctgctgccgtgcaggccggtggcgctcaacgcctgcaggaagcccgggggcgcgttccagccgttcgagaaggagaagaagaaaaaggacaaggaggagaagcagtgcgccgagctggagctggagctgccggtcgcggcgagctcggccgtggtcggggacagctgcgacagggccggcgccaccgacaccgacaccgacacagccgagaacaataaggccagcagcaccaaaggcggcaaggacaaggaggctcagctgtcgtcgcaggcacccagccggaaggcgcggcggtgctgggccccggagctccaccaccagttcctgcaggcgctgcagcagctcggcgggtcccacggtttgttgctcacccttatcctaccaccacctcatcacagaaaactagaaaacaggaatttctttgttggttatgcctggtaa

SEQ ID NO: 39293 - DNA, 192 bp, Zea mays
  Peptide Sequence Number=SeqID_82668
atggggaagcctgtcccatcactcctcatgctcctcctctgccgagattgtaatctcactgacggagagtacgtgctcatccccgagcaaggaactgtccaagaggaggaccagaagcaagctttcaaggctgctatcgaggatctctccgcagccccagctattgaaggcaagccccggttttatgcataa

SEQ ID NO: 39294 - DNA, 156 bp, Zea mays
  Peptide Sequence Number=SeqID_82669
atggagtctgctctccacttctcaagtgtttatccagaaccgaaggtagtgatgaaggaaatacatgcagacatccagagtcaaatggacttgtcgaaagagcaaatgctctacgagagcaaaatcccccaaaagaatgtaaaatgtaacatctga

SEQ ID NO: 39295 - DNA, 276 bp, Zea mays
  Peptide Sequence Number=SeqID_82670
atggcaatgaatgctgtgtgctgcaggtgtgaaggtgaatcgtcaagtcgcccgtacccgctcaacagtcacccgcactcactaaacggtggaccacggtgcgcgcaagatgaatcgatagatcgtgcatacccgttgcatggtgggaccaccccgcgctcggattattttacgtttctcggcaatgagctcagggaaggtgtttttcggaccttcggcattccgaagcctaggacaaattttcacgtatcaagcttgttacgaaaaatgatctag

SEQ ID NO: 39296 - DNA, 783 bp, Zea mays
  Peptide Sequence Number=SeqID_82671
atggctgataagcgtaagcctcgccagggtggcgaaccatttggtttttgcccttctacaatgaggacagaaacagttgaggaagacccaaatgaacatggtcaacttcccaacataaacatccaactgcctcttatgcaagacctgatggcaactaagatccagatgcttcctgtacatcaacgctccaacttccaagctaagttgattgattatgactcagaggaagcagtccaagctagctgcaagctagctgctacatttggagagttgattgacgaggttcttcgggctgatgaatctgttacacctaatactcaaggtcaggcagtgccaggtggcatagttgaccatgactctggcccagtatttgacaagactcctattggaagtgtttgtgcatcagccatcttcctatccgaattagaatgtgctcgtgctcttcgggcctacttgtgttctaaggtcattgaattggacagaaatataattgactttggtgaacatcgtgccaattgtcgtgacatacaacaatcctttgctggtggcgcgtgtctcgacaatgtgtttatgcaatgcttcattgagtgtgtccgcgatgattgttctaaacatattcctccattgaatgctcaccaactcattctagatgttaatgttgggataatggtacccatgctacgctctagacattggacattgtatgttgttaatcttaagattggacgcatacatgtgttagattccaacccatatggaccagagatgggtgggactatctag

SEQ ID NO: 39297 - DNA, 1664 bp, Zea mays
  Peptide Sequence Number=SeqID_82672
atgccctcccggagcgggcagctggtgcgaaatcctgccttcgcgctggatttgcgtggtcgagatcccgccgcattcgtgcgtgaagcggaagacggtgcggcgaggatcgtggggcgctacgagccgaggacagaggttgatggggacatgtgcggcccccgggggaaggatgtcttcgcccgagctccgggagtcttcggcgcgaatgttggagtgatgaacaaggaccgtcaagacgttgcgcagaagcgccgggcggttatcaggatcgcagatcctaggcgtgaggcgaagagagcgcgggggagtgcgaaggctgcggcccccggcagcagccagccgatgccggctgcgaaaccggccgtgcccggatcctgcaagtcgtcggcgagcgcaaagacagccgccgctggcgggaccaagcctcccctggtcgaggctgcgaaaggacgggagctgccctcgccggggaaacgtgttgccgacttcggcacgaacatcagcgtggaggactattttgttgggtcgggcgagggacaaatggttgttgtcccgccttcggtggcgaccacttcgccatcggcggtggtaagggcgaagggaaccgcgcaggacccgtgggccgccttctgtgcaagcggcgagattctgacagcctctgccgctaaggacgtggcgggcaccatgtcccagcggctgagggaggcatcgcagcggctatcgcagcagctaagtcaagcgatcgacttcgccgaccgtgttgcgtctggcgtcctgattgtggacgtggctgccgaagtcgagaggcttcgggcacagcacgtggatgccgtccgggagaagtcggctgcgaagagaaaaaaccgcaggctggcggagaaagtggccgccttggaggccgagaagacggacctccggcgccagctggtggaggaaaggagggaggcgaaccagaccatcgctgaggcgcaggctacgcaggcgcaggccaaagtggcgcgggcggagggaagtctcgccagccaacgcgccgaggagtgggaggtgaggttcaacgccctgcgcggccgcgtggacaaggccgaggcctctacgcgctcggaggttgagcggacgctcgcacatttagtggactcgtatcgcgagctgggtgcgcggactgctgacttcgaggtgcccgaccgggaggcgggccttcgcttcctcgaatggttgcaggacgagttgttggtactcccgaccatcgtcgagggtttcatgtcctttgcctccctcgttacctgcgagggggccatgaatgtgttgtcccgcgagggatgcagacactacgaggtcttcgaccaatcagacgagagctttgaacgcgagatcttcaaggccgaagaccctgttgtgaggcagtccgcgggggcattttttgataggatgtggggggcgcatggtcgggaggctgtcagggagcgatccgaccgggcgagagagcaggtgaagatggagcgtgccgaggacgtcgaggaccttggaggtctggtcggcgcgccgcccgaggctgcggaggtcaatccggtgctgccctcggatgccggtgaaggcccctcggccgtgcccgtgcctgctatggctggcaaagaccttgtgttggcccatgccgacggtcgaag

SEQ ID NO: 39298 - DNA, 1212 bp, Zea mays
  Peptide Sequence Number=SeqID_82673
atgccgccgccgcgtgagcaccaccagccccaggacgaagaggacgacgataccgcaggcgttgtcaagctcatcagcgccgagggcttcgaattcgttgttgacaggaaggccgccatggtctccaacaccctccgcaacatgctcacatccccaggcggcttctctgagacgcgccagggcgaggtccgcttcccagagatccccaccaacatcctcgagaagatctgccagctttcacctccgccagcacccctacagccgccgacctccttccccacagttaccgcgctgtcgtccccaggagactcatccttccctcccgggggcggcacccccattcaagctgccagcctcccctctctcccctggccggcaccaccatcgtgctctgaagccgacaccgtagaggaccgagaggacgacgagttgggctactcgtaccaccaccgtcggacagcgtcgtcgggcaggctcgtcatcgtgcgtccaaacaagaccacggtcccgacgccccgccccgtggagctccctgccgagacctcgctaccttcctcgacctcctcggacaagccaccggggcggcgggccgcgtcggaactgctggagcccgagccgagatgtcctgggtacatgctgatgcagccggccgtggcggcacctctccaagccccaccatgttgtgcggggccccctgactccatcctggtcgcggttgcgcccacctggggtctcaccggcgtcgcctcctacgacgctgcatctttcgcccccatggcagccagtgctctgtcccccatggccgccgccaccatgtttcctgctccggcgagcaggatgttggcgcccagggccagcctctcccctgccatggctggcactgcgttgtcccacgcctcgcctgagcacaacgcctcccacttcttcaagcttcttccgtcatcggtgttgtccccctgcctggttagatccggtgcagtccctgcctggttggacccgctgccgcccccttcttcgttgtcgccaacgttggatctgtcgctgccgcgaccttcccggctagatccaccgttgttgcgccgttcccgactagatctgccgtctctttggtcggatcgtcatcttcatggctggatccgtcgctatcgtggccttcccggccggatccgctgttgccccttctgttccgccgtcgtcgcgcggccaccctga

SEQ ID NO: 39299 - DNA, 399 bp, Zea mays
  Peptide Sequence Number=SeqID_82674
atgggcaaagacaaggagggtcgaggttcatcacgtctctccggcaacaagcggaagcgtgaaccaagtcctccctcggaggacttcgatgactctgagtactcggaggaggagttttcctccgggtccgaggggtcaccgcgtgccgggctcgagggttcggatgagtcggaggtctcctcggacgaggagaacttttccgactcgtccgaggaagggagcggcgacgacgacgaaggcgacgacagtggcgatgacaacggtggaggtggcggcgacgacgacggcaacgacggtgataagggcgacggtggaggcagtggcgacggcaggggcgacgacggcggcaaggacggcggcagcggcagcagggccagtggcaaagcgtcactggcttaa

SEQ ID NO: 39300 - DNA, 1034 bp, Zea mays
  Peptide Sequence Number=SeqID_82675
atgccgtcctcttcctcttctgctgccgatacaccgccgaccggcgcatcgtccgaggacacactgagcaacgtggcggcggaggagttgcatcctagtgatacagtggagtttggcgtgtcgcggatttcctcggtccgcgtgcaagatatgcaacaacttggatattttggcagcggagtggggcgtgtcccgggggcggaggaggtcctcgagccagaaggcgagttggtcgtttttaggcttttttcgccactggccttcgtctgcctatgcatcgattcgtggcggaggtcctgcggagattcgagaagtcagatggaggttcgttgccaaaccagtttttgccagaatgaagatgatttccccaagttgctgagagcatgcacagtttgcctcgaaatcaggagcgagccagagtatgatggtcatgaattcgtcgagcatggcacagagaagtgtgtcgtgactgtatacattggatccaagaagctcaaccgtaagctccatgtggatctcacctcagctcaagcccgtgtagctgccttggaaagtcgtgaagtcattgctgttgaagctctgaagcaagccaaggatgagcatgtcaagaacttgatggaggcctacttggtaacccataaccaacgtagagccctgcgaatccaagaacccgcttcatacaacccagttcaacccagaagagctgaagatccccagattcttgaaggtcacccggtctctaccagaggagaaaagaaggcttgggaactaccggaaggagccatagtcttggaaggaattcctgtcttccctcaggctatggataagcaagatctccctgagtcctcccaagatcccccgccagagttgtttgagcccctcaccatgaagaagattccagcaccctcccttgaggtcaaagaagaagctgcaagcaccccaccagcaccgccgccctctgaggagctacaagagccagtccagcttgaagaagagttcaaccccgtgtttccattcagtcgctgccagaagaa

SEQ ID NO: 39301 - DNA, 57 bp, Zea mays
  Peptide Sequence Number=SeqID_82676
atggagaaccacccgggaaaacagtgctaccacaagggtgtcttacacttcacatga

SEQ ID NO: 39302 - DNA, 120 bp, Zea mays
  Peptide Sequence Number=SeqID_82677
atggccagcgtgctacaggtatcaaccaagttagagcaccggccattacgtgtcttggccagtacaggctcgccgaagctcggcctggcgccgttcgccgtcggggaccgcgggttgtaa

SEQ ID NO: 39303 - DNA, 213 bp, Zea mays
  Peptide Sequence Number=SeqID_82678
atggacctccgctttagggatggcaacggggcgggttcggggcgggtctccgtgggttttagacccggcggaggcgagggtgggagcgggtctgaattccccgccccccacagatctgtcagtgcaacagatagagccttccactatgttgatgtcagttacaacgatgctgtggctgcttacaatcttctcgacagcactccggcagagtaa

SEQ ID NO: 39304 - DNA, 99 bp, Zea mays
  Peptide Sequence Number=SeqID_82679
atggagtatattgtctttcttggccacatggcagccctggagccgtccacgttgtggggtcagtttttgatgagcatgttcactggagcaaaaggctaa

SEQ ID NO: 39305 - DNA, 849 bp, Zea mays
  Peptide Sequence Number=SeqID_82680
atgccttcttccgcgcaggttctgctctgcctcgccgccgtgctcgcggcggcggcggccaccaccgccgaggcgcactcgcagtgcctggacaacccgccagaccggtccatccacggccgccagctggccgaggccggcgaggtcgtccacgacctccctggtggcctcagggcctacgtcagcggcgccgcgagctcgagccgcgccgtcgtcctcgcctccgacgtcttcgggtacgaggcgccattgctcagacagatagcagacaaggtcgccaaggcagggtacttcgtcgtcgtgcccgatttcttgaagggagactacttagacgacaagaaaaacttcacggaatggctcgaggctcactctccggtgaaagctgcggaagacgctaagccactgttcgccgctttgaagaaggaagggaagtccgtcgcggtgggaggctactgctggggagggaagctgagcgtggaggtggggaagaccagcgacgtcaaagctgtgtgcctttcgcacccgtacagcgtcactgccgacgacatgaaaggtgcagtgcagtgcagtgtgctcctcctcttcttctatgctgcgtcactagcctcaccgcatgtgttggttcgaaatcgaaacagaggtgaaatggccgatcgagatcctgggggcccagaacgacacgaccacgccgccgaaagaagtgtatcggttccctactacgccaagatcttccagggagtcgagcacgggttcgcctgcaggtacaacaccaccgaccctttcgccgtcaagaccgcagagacggccctcgcctacatggtcagctggttcaacaagcacctcaactga

SEQ ID NO: 39306 - DNA, 486 bp, Zea mays
  Peptide Sequence Number=SeqID_82681
atgtcaccaggccattgggttccgaccgttggagcttctgacaactgggccaccggacagtccgatggtgcactggacagacgaccgttggcgctgtgtagccgttactccgctggcacaccggacagtccggtgaattatagcggagtggctcccagaattcccgaagttggcaagtttggagttgggttccctggtgcatcggacactgtccggtggcacaccggacagtccgtagaacatttgcccgacgcgaatgttgctgcagggaaggacatgcaggggatctcgtttgagaagatgctctttggtagagataaataccaggagatgaggatgaaggcttatgaaaagcttaggttcgtgatcaattcagaaactctcaatgataaagatgcgatgaagccccaagcagttaggttgcaggtcctcaaaaagaaggtggatgtcttggctatcgtctcccttccgtctcttactctgtag

SEQ ID NO: 39307 - DNA, 435 bp, Zea mays
  Peptide Sequence Number=SeqID_82682
atgggcaagaacaacaagcgcaagcgtgagccgactcctccatcggaggagtttggtgattcggaatactcagaggaggagttctcctctgagtccgaggggtctccggctcccatccccctgcgtgagtcgtctgatgactcagacgactcccaggggcttgcggcggaggtctggacgtacatccgggccgtcgagcgctccgggctcgaaggctcggatgagtcggagtactcctcggatgaggaggactcggacggcggcgacgagggtgaagacgacgacgacgacgacgacgacgacgacgacgacggcgacggtgacggcagcggcagtggcaggggcggcggcgacggcagcagggacagcaccaagggcgacagcaggggcagcaccaagggcggcggcggcggcagtggcagggccagtggctag

SEQ ID NO: 39308 - DNA, 261 bp, Zea mays
  Peptide Sequence Number=SeqID_82683
atgccggccgccccgccacccgactcggccgaccccctacgccacctccctgcccgtcggttcggccgccccgccccccggctcggccgccccctgcgccgcctccctgcccgccggttcggccgccccgccccccggctcggccgccccctgcgcctcctccctgcacgccggttcggccgcccagccccccggctcggccgccccctgcgccgccccatgccccgccggatcaaccgcccgcgcccgcgccccgcctag

SEQ ID NO: 39309 - DNA, 275 bp, Zea mays
  Peptide Sequence Number=SeqID_82684
agggtgatgctgaagaattcgctgatgatgttgatgatcgtaccattcaaaccactcggaccaacaccaactacatccctccgccacgacaagttcctgtctacccagtggtagtcgagaaaatccctgtggatctccctcgcattcgtgttgagaacggagtcattctggaggacagctcggaggagtttctgcctacgcccaccccgttggcagaatcactagccttcgcagctggatcgtcagattcagcaccgcctgcaccagcagtctaa

SEQ ID NO: 39310 - DNA, 219 bp, Zea mays
  Peptide Sequence Number=SeqID_82685
atgatgctgaatgtttcagtgcctcttctaatgttgacatgcctcacgctgtgggggctcctcccccagcatggtgggcccgttatcggagatcggagcatcccatattcttccctaggtaaagaggacatctgggatgagagggatccaaagcggaaaacctccctagcattgaaggagatcgtggtgttgaaggcgattgccatggagtcatcgtga

SEQ ID NO: 39311 - DNA, 438 bp, Zea mays
  Peptide Sequence Number=SeqID_82686
atgataaagatatttccaaagtccgaagtgggggagaatcccgagaaaggcctcgcacagatgtacgaaaatggaaatttgcagaatggaattggggttcagatgcgtcaagttcaactcatagaaatcaaggagaccgcggaaaaagggggagatgggaagagcaagcccgcgaatgagaaagggaacgtaaacaatagattcatgggtatcctctgtcggaacggtgacaccacggaaaatccgccaagagcagagctccttcggaagcaaaaccccaacctcaacaagatgaagaagatcggattcagaaatgacagacatgtgattaccagcgaagggaagctagttgttggggtcgatgggcgggatgaatgcagcagcggtgctctgcctcttctgcttgggggcctcacaattttttctccagtggggtga

SEQ ID NO: 39312 - DNA, 429 bp, Zea mays
  Peptide Sequence Number=SeqID_82687
atggcgggtgggaagaacagcaagggcaagcgcagaagagcagcaagcggaggcgtcctccgactccacagttggaggactttggagactctgagttctcgaaggaacaacttcccttcgaggataagaagtctccgccgccaattccttgaccatcctcgttcgagaatttggatgactccatgggcctctctcacatcaagagggcgtacatccggcgaggacttcgaggagagcatcgaggaagaggaggatcgggacgatgacaaggacgacgaggattgtggcggcggtgacggtggtggaaaaggtgatggcggtgagggcggtggtggcagtagcaagggcagcaaaagcggcagtggtggcagcaagggcagcgaaggcggcggtggcagcagcagcagtggcggtggcggcgacagttga

SEQ ID NO: 39313 - DNA, 288 bp, Zea mays
  Peptide Sequence Number=SeqID_82688
atgatgatgcacccgctcggactctttcccgttgagaagaaggatgatctgatgtggtgcgaccaagccctacaaagcaatgcaatgacacaattgattgggatagctcagactgacaagacaaccctcgacgacatggaggtcttcatagttgatttatcctctgagttggtggagaaggatctccaaattgagcaaatgggtaaccacacccacgagctggagcggcaagtggagattaaggacaataccatagagatcctagagaatcaactccatgacttgtag

SEQ ID NO: 39314 - DNA, 729 bp, Zea mays
  Peptide Sequence Number=SeqID_82689
atgcagcccggctgcacccctccaccggcggtcacccaagatggtgacctccagcttgatgagccgctcgcggcgccgacgtctgccacggcagctggaagaggttcttccgccggcgagatagccaaggccggccatggaccgacctccaactctatggccttctgcccgtccttgcctcacgagtttgggcatgggcgggggcctcctggcagcagcatccgccctgaggtcagtgctgccgctgttcggccccccggagcagaagtcgtcgtcgtcgccgctgctggagcgggtgacggcgcgccgttcgtcggtcttctgttgctccacaggcccacccctatcgagtggggttactcgcctgttgattatctgaaccgcttcaccaagcatgagtcgccccgtgtcaaggtgacgagtgagagtggggatccctggaccgcgtcgctgtccgaggctaggtcggacctcgctgaaggtgttgtcgatgccgagggttccactacccccttccagcgtcaagacctgagcctggatgtttgtgcgagcgagagttgcttctcgcggaaggtgatgagtgagaaggtgatgagtgagaaagcacgaaagatattctggcagaagagatcttttttcgaggaaaatttcaacgcagagggggttcccccccttttagcccccgagggagggtcgggctttgccgaggcgaggccgacccttccttga

SEQ ID NO: 39315 - DNA, 1227 bp, Zea mays
  Peptide Sequence Number=SeqID_82690
atgaggcgaaaagacggcgggtatcccccatccgggggcttggaaggtggaaagacgcgatgcataagggagcgagaagacatggtcgccttccgaaagggaccaacgggcgaaagaggcgggcagccatgcaggcggcatgcaaccgcgccaagtggacgcgcttctccgactcccgacacgccagcatggaggcccaggcccacgcgtcacgcgaccggcgcgccggatgctgcatgcaagcaactgcaccgccacttgcgccaccaccgtgcctcctcgattgcggaaccaatactgcgactcgaggcgacccagcgcacgacccagcagcgccagcctgacgcggcggtcaatgcggccaaaagtgggccggcagtaatgacggtggcaggcgggcgggagcagcggtcacgtcgtcagccaagctcacgtcccatccgggggcagcaagagaaccccctctcacggcgtgaagacaacgcgcccgtgatccgttcctcgaacggctcgcgcacgcgcaacggccgccccgccaaccgctcgccccgtcgcattaactccgcggcaggacatgcggcgcttccggcaggagcaggaccgggaaagggggataccccgaaaaggatccttccccgtgaaggaaccaggctccgagcctccttactgattagaggttcgaaggctggccccccgaagggtttcgacagccgcctcagatcacgtgggccctacacccactactggtcagaggttcgaaggttggccccccgaagggttccacggccgcctcaggctactcgggctccgcgcccattactgatcaggggttcgaaggctggcccccgaagggttcacagccgcctcagacgccgagcgagggatgaccaggggtacgttcgatacataaccaaggctcgggctgcgctcccgagctcaccggagacaccatgttcggcgcccatcgagggcaacatggcgcttccccccctcctccttgcggaaaggcgacgcaggggcgtatgtaaaaaagcccagtctgtccctaatcgccctctcgccctgtgcagaggctcgggggctgctctcgcaaacccggctccggccgaaccgttgacagcgtcaacataccagctcgagaacttgggccccgaccgtacacccgggctacggccagtttgcatgagggaacaaccagaccagccgaagcattacgcaaggcattaa

SEQ ID NO: 39316 - DNA, 174 bp, Zea mays
  Peptide Sequence Number=SeqID_82691
atggagagtcatgatctccgggcagaatgggaatcacggcttgtgggtggttatgagactgttgaatctggttatgattatggtgctggttgtcagcattgcaacccctgctcaggcgaagatgaagctgtggaaggagacttccaggagttccaagattacgacgagttctag

SEQ ID NO: 39317 - DNA, 66 bp, Zea mays
  Peptide Sequence Number=SeqID_82692
atgaagctacaaaaagtcgttcctaagggagcgcaacctcggaagggaatgaaagtacaagtgtga

SEQ ID NO: 39318 - DNA, 420 bp, Zea mays
  Peptide Sequence Number=SeqID_82693
atggcgtgggcgacggcggcaggggagacggcgatggtggccagggtggcacggcgtggcgtgggcgacaacggcgggggagagccgaggacggcggcgccgcatggtcatcaagggtctctagtggccgaattgatagcacagacagaggttgacggctcccagcgtcgcctggaggacccgagcagcccgtccgcggccacccagacgccctgcacgccgaccatccggccaaccccgcgaagccccgcgccctgcaccgaccccgcgatgccgcgcgcccagggccgaccgcccctgtcccggccgcgccaggccacaacgcccaccagccatgcgcgaaacgacagcgtcattgatggccatgaagacccgccgatgcccattgaagcccctcgaccgaccttccctctcccatag

SEQ ID NO: 39319 - DNA, 438 bp, Zea mays
  Peptide Sequence Number=SeqID_82694
atggccttgcgagataacaggcccaaagcctcttctgaggccttcttgccttctggtggactcgggggatatctgtcccccaaaatagttgtcgcgcatcggggtctgcctgaagaggataaacagaccaacgtcttaatacaacgaccttctagtgactctgagatcgaggttgttcttggcatgttggctagggagtcttctgagtcggtgcggcttgagttggggtgtgggcccctgagtaatcaagcactagcaagagggggcagacaaccttattgttcaagggatacatcggttgccgttgttgcacccctcatgtcgatgttccatgactccattcttgctggcctctttctcccaagcatttcaccaaacagttcaagtgcaaatgttagctctgtgaagactccagctatagaaatcaagcagcgttag

SEQ ID NO: 39320 - DNA, 399 bp, Zea mays
  Peptide Sequence Number=SeqID_82695
atggcaggcggaagagagctcgccggagctaaggaggggcgtctggccggcgaaggcttgcaggttttgctgactggatcaagagatagagaggggagaaatcgggtttgtctcactgccgcgcacagagagaagatcgcagcactgagagaaaccctaggtgacactggggtgtcacatccttccccccttaaaggaatctcgtcccgagattcgggtcagagtccttccggggtgaagcgaaggattcgaagggtaggaggaggggttgggtatgattacgtaccaatttccttagaatcttggaaagggtactcttggtacgatagatctggctctatatccatttctggctctgctaagatctcggtcggcaatcgaacacacttcttcagctga

SEQ ID NO: 39321 - DNA, 1485 bp, Zea mays
  Peptide Sequence Number=SeqID_82696
atgcatcgcgtctttccaccttccgagcccccggatggggggcgcccgcggttcttccgccttgtcgtcgttggaggaacgcaacttcgcggaagttggtacctttcagccatcgttcggcttcaaggattttcatcagacagcccggccgcgtcccctcgccggtggtcacccaagacggtggccaccagttcgatggtggggagaagcgagccgggctgcgatcttggtcccgccctcagcttcaaggatcttcatcatcctggctggggcggaggtcgggctgagccggagctctacctcccacgcgggttcgtgggtcaccttctccctcagcattcaagggagagggcgctcaccggcctagcgggagggtcggacttcgacaatgcggggccggtcggcggcgagcatcgtcagcttcagcgtgttgggctcgctggctcagctggctcaggctcggttcccggtgccccctcctgccgcgggagcggtcgtcgcgccgtgcgcaccggagaaccgcccaagacgtcgcgcgctgctagggcggcattcgtgttctggggctgtcctgcctttgccccggtacggcgcctccgcgctcgtccgggaggatccgagtggggatctgccggtgggcgaatggcttccgtcgtcagcgctgaggtggtggcggctgaagaagtcctcgtcgccgacgggatcaccgccaccatccgcgctccgggcctccggctctttggctttgatagcttgtcctcacccctcaagcggggacgtgggcgagggccttgttgcagcagcgtccgtcctgaggccatcgctgctgcagtttggccacctggagcggaggtcgttgtcgctgatgccggagcgggcgtcagcgagccatccgtcggccttctgttgctccgcaggccctccaacgaaaacccttggccgctcttcgatgagccgaagccggaggcagcggtgttagcatggacagaggcagagttggctcgaaaagaggacttcgtcggccggagcctggccgggccgtccactggcgggatcgacgccggagtcgagttgccgaagccaggagctgggctggtgtcctcgggggacagctggctgaggcttcggggcggccggccgagccgtctgctcgggctcgattcttggaggagaccctggcggcgatggcccgggcgcggcactgacgtcgtccttcagagcggagatcctccgaccgtgttgtcgtccgagacttcgtcgaaggtggagttgacgccgagggtgctgctgctccccctccgtcgacacttattcgtcggtaaaagaattgtttgtccgagcaagagttacttttcacggaaggtgatgagtgagaaggtgatgagtgaggtatccgtatcccggaggcgtaggagtccctcggctcggtcagccttggctgcttacgtgtactccgtcgttttcaggatcccactttcgaagtag

SEQ ID NO: 39322 - DNA, 897 bp, Zea mays
  Peptide Sequence Number=SeqID_82697
atgcaggcggcatgcaaccgcaccaagggggcgcgccccttcgacttcgacgcgtccagcatggaggcccaggcccacacgtcatgcgggcggaagcagcggtcaagtcgtcaggaagctcacgtcccctcctgggacagcgagagaaccctctcccacggcgtgaagacgacacgcccgtgttccgttcctcgaacggctcgcgcacgcacaacggctgccccgcgagccactcgtcccgtcgcattaactccgcggcaggacaggcggcacctttggcaggcgaagcaggcgacacttcacctccgccataatgaccgcgtcaaaaaaggtgcgccacgtcgttcgatttcgtatcctttcccttttcctctttctctctcttacaacagggaccaggaaagggatattccgaaagggatccttctccgtgaaggaagcgggccgatcagaggttcaaaggctggcccctcggaagggttcaacagccgcctcagagcgctcgggctccgcgcccactactggtcagaggttcgaaggccagcccctcggaagggttcaacggccgcctcaggccactcgggctccatgcccactactgatcaggggttcgtaggctggcccccgaaggattcgacagccgcctcagacgcagagcgagggatgaccctggcgccctccgagggcaacatggcgcttcccccctccttgcggaaaggcgacgcaggggcgtatgtaaaaaagtcgagtctgtccttgaccgtcctctcgctctgtgcggaggctcgggggctgctctcacaaacctggctctggccaaaccgtggacagcgtcaacataccagcccgagaacttgggactcgactgtgcacccgggctacggccagttcgcatga

SEQ ID NO: 39323 - DNA, 117 bp, Zea mays
  Peptide Sequence Number=SeqID_82698
agatacttcggtacaggtggatatgagattgatggttttgatcatggttatggtgctggcgaagaggaagctgtggaaggagacttccaggagttccaagactacgacgagttctag

SEQ ID NO: 39324 - DNA, 933 bp, Zea mays
  Peptide Sequence Number=SeqID_82699
atgccgggcatccaccgctacaccgccgagctgctggtgctgctcaccatcattacccgcctcctgctgctggccacggcgtggccggcattgcccgccccagcgtcgctcgagccgtcgctgcttttcccgtccgccggcgccacctcgcccacgcagacccagtcagccggggtcgcctccacaatcccggccttcccggagcagtcagaggccgccgcggctgctgccacctccgtctgccagctcaccccgtcgcctccgctccttcccgctgtcctagcatcgtgcaacgccaatgccggcgggagtggcgtgacgctcccgccgcgcctaagatgctgcccggcgctcgccgcgtggctgtacactgcgtacgcgcccaccgcgctctcgggcagcggcgtcggagaagcgtcggtggccgcgtcggccgaggccgccgccgtggtggacttgccagtgctgccggacgacgcggaggaatgcgccggcgcggcggaccgtgcgctgcgggcggccggggtggcgctaccgcggccgcattggggcgaaagcaccggcactggcaacggaactgcggcgtgcgacgtagcgttctgctactgcggggtgaggctgcggcggcctgcgtgcgcggcgccgcagggccggatggcaaggagactggagagggactgcgcgctgccggggctcgccggctgctccaggtgcctgcgggcgctcagcaagctgggtgggaggagcaacgccacgtcgtcggcgaaggcgaagcaggagcaccgcgaggactgccacctcatgggcctgacatggctgctgaaccgggaaccccacgcgattaacggcgccacgtccgcatcgatgtcctccgcccatggcagtctgcttctggtggtcctcgctgctgccgtcattgtcttgtcctgctga

SEQ ID NO: 39325 - DNA, 303 bp, Zea mays
  Peptide Sequence Number=SeqID_82700
atggatgaagaaatggatgaatatgtcatagtcaaggctgtggactgctcgaaccaatcagaggttcacatgttaatgcatgcaactaaagtgcattaccaatgtcccaagagggtaagggtacagtctgatgtatctgaaaggattgctaatggaactagtgttcatgttaaatatcctatttatgatcaaacagtgtaccttaacgattatcataagaagatgttgaaggatcaatatggctctaggggtggtaatggatcatcgtccgaatgtttcttcacgattcgtttgagcccttaa

SEQ ID NO: 39326 - DNA, 1695 bp, Zea mays
  Peptide Sequence Number=SeqID_82701
atggctggaccggagaagactgttgtttggttcaggagagacctcaggatccaggacaacccggccttggcagcggcggcgaaagggggctctgtcctccctatcttcatatggtgcccctcagactacgggcagtactaccctggaaggtgctcccggtggtggctcaagcagtctcttgtccaccttgggaagtcattagagctgctcgggtgcccactcgtgctgatccgtgcggaggacagcactcttgcagctcttttggagtgcgttcgttccatcagtgccactagagtggtttacaatcgtctctacgaccctatttcacttgtgcttgacaacaaaatcaagaatgagcttccagcccatggaatttctatccaaagtttcaatggtgatttactttacgagccgtgggatgtttatgatgagaatgggcaggcatttacaacctttaacaagtactgggagaaatgtatgagcctacctattgagatatcacaatatcttgcacctacaaggctggtggcagcgccaggtctagcaaatgttcgctgttgttcgattgatgatctaggtcttgaatctagtaaggatgtggaatcaagcaatgctttgctaagcagggcctggtctcctggctggcgcaatgcagagaacatgcttgaggaatttgtgtcttatggtcttctagaatattcagaacatggtatgaaggttgggggaagtactacgtcattattgtcaccgtatctccatttcggggagttgagtgtaaggatgatttatcaacttgttaaaatgcgtcaagtcaagtggcaaaatgaaggaaaatctgaagctgaggagagtgttcgattgttcctacgatcaattggttttcgagaatattcacggtacttatgctttaactacccattcacacatgagagatcatttttaggtaacttgaagcattatccttggctattggatgagggccgtttcaaatcttggagacagggaatgactggatacccattagtagatgctggcatgagggaactctgggctactggttggacacataatcggataagagtgattgtctcaagtttcgctgtaaaatttctacagataccctggatttggggaatgaagtacttttgggatgtgcttctggatgcagacctagaaagtgatattcttggttggcagtacatatctgggagtttgcctgatggacatgagctcagtcgtcttgataatccagaggtatggaattggcccatggttgttgctaccgcagcccctccatgggcctccttaggccctgacactacacccctcctggacaagcagctcgtcctcgagctgcagcatgacggtggcgtcacccatggggacggagacgccgtcaacgaagatgatgtgacgaaatttggcgttgtccctggagatgggcacgccggcgtccaggatgtggtgacaaaattggcaggcgatgctgcccatggagatggggacaccggttgccaggatggtgtgacgaaggtggcatacggcacagcccatggagatggggacgttggttgccaggacggcgtgacgaaggtgacatacgacgcggtccatggagatggggacgccggttgccaggatgacgccgcgaaattggcagcagaagccatgggatcagatcgaaacccaagctag

SEQ ID NO: 39327 - DNA, 378 bp, Zea mays
  Peptide Sequence Number=SeqID_82702
atggcccgtgcacatgcaccaccggaggaaccagcacgcaaattgcaacagaagtatgagtcaaggacaaaggatggattcgatggctgcgccagagatctgctgcaagaagataggaaggaaagccgtcacgacgctcggtccataagcgacaatattcgaggatcagggaggaggcgaagcggaagatccaagattgaggggcaccaaccgaatcgcaacttgtgggtaggagaacaggatcacgagctaggcggccacagcagcatgggcgcggggcaatctgttattgtctccgagttcatccgcttgattgtggcaatggacatcggtggctcaagccggtgctatgcgctgaactcggcgttagcaagttga

SEQ ID NO: 39328 - DNA, 516 bp, Zea mays
  Peptide Sequence Number=SeqID_82703
atgccccagatgccaagagataagtgtgcggagttcatcagaggaagtgctgggagatggaagactagaagcgcaagattggtggacctcaggctgggagcagcagttgtcctcgtttctcaggcaacccaccctagtggttcaagcagagccaccctcagggatactagcaccaaaatcagtgtccgcatcaacaacaatttcagaggcagttccctcagtagcagcagcagcagtgccgctagaacaaccaaccgggatgaaaccagtacgagagacagaacaaccaggcacctttccttcccgctccagcaaccaattagaatagtcagacagccccaacacaaggaggaggccaaggatgtttccactatggagaacaaggccactaggcgatgcaatgcccaaaggaaagtagctcagctgcagtcagccgcaatgccccagcaagacagaatgcacctcagcaaggaacaaacaaccgtggatagcagcgcacccagtatggaaaggtga

SEQ ID NO: 39329 - DNA, 162 bp, Zea mays
  Peptide Sequence Number=SeqID_82704
atggggctcggtgtatgcggctcgctctgccaaggtggtgatgaggatggtagttttggtattgattatggcactggttgtcagcgttgcaaccactgctcaggtgaagatgaagtcgtggaggaggacttccaggagttccaagattactacgagttttag

SEQ ID NO: 39330 - DNA, 141 bp, Zea mays
  Peptide Sequence Number=SeqID_82705
atgggggccgattctgaggacgccgtcaagcagctcagcctcctcatggagcaagtggaggccccgctgaagagatcatttcagagatatgatgatgcagctattactgctaggaagtgcatgctcggagatgttgtttga

SEQ ID NO: 39331 - DNA, 345 bp, Zea mays
  Peptide Sequence Number=SeqID_82706
atgacagaggtgctcaaaagatcccctacaaccagaaacagaggtactactggagagcttggacatcacatcacgcctgaggtggctgagaagacgatgccaagtcatagaagaggcggccgctgcaagaacatgcggggcagaggtcgatgtagtggaagcaggcaggtgaagtgtgtagaggggcccgaggctgtcacaccgagcgagaagggtcatggtggcaagatccttcacagacagaccaaacgggtcaaactccatagaacaagagttgtcagtagtgaactgacggatggaaagaagattctaaatgatgttgggggcaacaaggacattggttaa

SEQ ID NO: 39332 - DNA, 426 bp, Zea mays
  Peptide Sequence Number=SeqID_82707
atggatgttttgatggttaggaatactggagaggaccatcaaggacttgggaaaggccaatatatcaatgatgagaagataggacattcacaacaagacaaagccaagtccgactcaacttcatctccacctcagactccaggaccaatcatatctgtcatcgaacaggataagccttcgtggcgaggtcactcgtgtgtcacgagtgataaccaacggagcagtgccacccagtcagagaccgaggtgggcaaggccaacatcatcatggagaaggagttggcgagagactacgcgtcccacccattagtccagggcccccacatgggctgggttggaggccctgggagcggtagaagccccatgctgaggctggggaggagccaagagcgccgctggaggtgcagggcaaagaagacctgctga

SEQ ID NO: 39333 - DNA, 771 bp, Zea mays
  Peptide Sequence Number=SeqID_82708
atggcgggcggaaaagagctcgccggagctaaggaggggcgtctggccggcgaaggctcaacgcagcaaggtatcgagagcatcgtggaagtgacacatgagagcggcgtcacgagtgatgggtctagtgatccatccctccggctctggctcctccgagagctccgtgccatggctcgaactgccaccggcgtcgtcgtcgtctccgtctccgtcagggtctcctccagtagccgaaatgccctgtggtggtgcagggggcatctccagctggggtgcaggggaaggcggcctcttagactccacctcctgctgaggcgagggggaagagtcctgctgctcctgctcctcgtgcaggcgacgatgcagtctctccaggccatctacaaaagacatcgtaagcacaagagtaagagtagaactatgagaccagaaagggagatcagaccaggggagggtgaacggttgcgggtggcgccgctcctcctcacgatggtgaagtcgccggagttggggcatgcacgtgctagggtgattctggggtcgccggaattgggcacagaggggaagaacgacacggcgaactcagtggtggcaaaaaggccacgaatccaaggtcagagagggggaatggctgggaaaaggcctcgggcggactggaggaactctggtgagggattccaaccgccaggagggcaatcggccacgatagggctcgggctaggtccagtggaggtgggggagcactctgggcaaaagccggggcactag

SEQ ID NO: 39334 - DNA, 261 bp, Zea mays
  Peptide Sequence Number=SeqID_82709
atgggtgctactggtatattatgtgattctacccatgatgcagtcacaaaagaatgtgttgctccagtatcaaataagacatttgcagaatggtactcaactgaaaacgaagacgggctgcctggttgctctgacgctggtattgatttcctccctgctggttactctaatggtactgctgctgctgctgctgaggaaactgcctcttgtactgctgctgctggttctgatgctgatgctggtgctggtgaccctgcttga

SEQ ID NO: 39335 - DNA, 174 bp, Zea mays
  Peptide Sequence Number=SeqID_82710
atggtgggtacaagtgcggtcactgcacggcggcagccggggtcagtggagcattgtatgccaggcggtaccatgcaggatgtagttgatggtgtgacttggcctaccaccctgccaccgggttggacggtcgagtgggatgttgctccggcaggagaggagcatgaggagtag

SEQ ID NO: 39336 - DNA, 60 bp, Zea mays
  Peptide Sequence Number=SeqID_82711
atggcgccacacgaggtgcgaggttcgagcggcgtcatagaaggcgcgagtggagagtaa

SEQ ID NO: 39337 - DNA, 1437 bp, Zea mays
  Peptide Sequence Number=SeqID_82712
atggcgccgccgcggtggaagtccggcgacgggcgccgccggctcctgctgctcctgtgctgctgcctcctcgccttcccctgccacgctcaagtactcaccaacaacaatatctcccaccggtccgatcaaggcggcatccactcgtttgtgggcacgtacggcatcaactacggccgcatcgccgacaacctgccgccgccggaggtggtggtgcggctgctgaagctggcccggatccgcaacgtgaagatctacgacgccgagcacaaggtgctggacgcgttccgtggcaccgggctgaacctcgtggtggccatccccaacgagttcctcaaggacatggccgccaacccggccaaggccatggactggctgaccgagaacgtgcagccgtactacccgtccacgcgcatcgtcggcatcacgtgggcaacgaggtgctgggcgggcaggacgcggggcttcgcccaggcgctcgtcggcgccgtgctcaacgtgcacgacgcgctcaagatgctccggctggacgccaagatcgagctctccacgcctcactcggaggccgtctttcgccaactcctaccctcccctcccgcctgcgtcttcccgcaacgacctcatggtaccggcgcgccctttctacgtgaacgccctacccgttcctcgccctacatgagcgacccgtcgcacatcgacatcaactacgcgctgttcaagccaaacgccggcatcgtggaccccaagaccggcctgcactacaacaacatgttcgacgcgcaggtcgacgccgcctacttcgcgctcgaggccgcgggctactcgggcatggaggtgcgcgtggcggagaccggctgggcgtccgccggtgacgccacggaggccggcgccaacatggagaacgccatcacgtatgaccgaaaccttcggaagcggctgttcctgcgcaaggggacgccctacaggcccgaccgggtggccaaggcctacatcttcgcgctcttcaacgaggacctcaagccgggacccacctccgagcgacactacggcctcttcaagcccgacggcagcgtctccattaacatcggtctcaaggggcttctgccgtcatcggcaccgccgcgtcctctcgtggccttcaagggttcggagatggttaagaattctagtagtataccaaatttccgaataaatcaatcaaaagctaaacctcatgtttcattgttcagcctcatccggtccctttacaaactgaaacatcaagtttacctgtccatcgcgccgaacctacacgccaggtccgagccaaccgccccacccaggccgtcttcgtccctcccgcacgtcttcgtcccacccgcacgctccagacagattcttttcagttccctgcccccgcccctctttctccacgaacggctcaacctcttcacataa

SEQ ID NO: 39338 - DNA, 1212 bp, Zea mays
  Peptide Sequence Number=SeqID_82713
atggcgattgtgctacgtgcttcgcaacaagaaccaaatgcttctacctcatccttaataatgcaagtgttgttagatataatacatgattatttgttcaacttaaactgtaacttcttgagtgattccgggacaatatgtgcatgtcttcgtttatttcagaatatgcaccagggctatcccaaagaaacactgattgttgattctttggattggaggattgaaaatgaaattgatagtgtgctagagagacctatagtcccagtagatttatacagatcaatacgtgattcacaacttattggcctgtcaggatacacaaaggagagttgtcgttgtgtaacaacaccagatgagcatgacgcagatgtggagtgcctcccctgggttgcaccaccatcggtgggcctaatcatattcttctgccttgcgggtctcccagtttttggcattggtgttggacatagcacatatgacaaagcttcggctacaactacagccaaaatcatgaaactggatgcctttagccttttactgtatgctatggacacttttatatttgagagaggcattttatctcaggttcactactatgtgcaatctcatatccagattaatgagtaccgtgatcgtataattttgcctaggctgacacaacagtttgagcggcctgttgtcaggtgcataaaagttctggatatgactggtttgaagctatcagcactgagccaaataaagatgttaacttccatatcaacagttgatgatttaaattaccctgaaaagacagagacctattatgttgtcaacgttccatacatattttctgcttgttggaaggttgtgaagcccttattgcaggagaggacaaaaaagaaggttaaagttttgagtggctgtgggagagatgaactgctgaagattatggactactcatcacttccccatttctgccgccgggagggctctggatcatcaaagcattcgtctgctgatgttgacgattgctactcccttgaccatccattccacaaagaactatacgaccatatcaaagagcaagcgtcgcgtagggagctcatcaagatgggatcgttgcacgtgagcattcctgagccagacccagaggacgccaagatcgttgaggtcatccaggctgagttccagaagatcggcgagcaggatgagtccaccaccggccacaaggattag

SEQ ID NO: 39339 - DNA, 396 bp, Zea mays
  Peptide Sequence Number=SeqID_82714
atggagcagggagatgctgctgctcgcccacagggaagaaggggaggggcgccaaggctgctggccgagcagaggcgtcgggcctgggcgagctactgcttgccgtggggtagggaagggcgcaggcttgggggctcttttctgggcgccatggctgagaggaagctcctgcgcgcagccgcgaggaagacaggaacagggagcacggctggcgttcagcttggaggaaggagcaggggaaaaacggagagggcgccggcttgctgctcgccatggaggggagcacgactccctgctgctgcgcgtggaggaaaaagccagggggagaagaaggcgtgggggaagaagaaggctgatggcggctggaaaaacaataggggtgggaatgcaaaatga

SEQ ID NO: 39340 - DNA, 207 bp, Zea mays
  Peptide Sequence Number=SeqID_82715
cagattgccctcctcacgcgacctgagacgaggtctcccattccggttatggtgggtacaagtgcggtcactgcacgacggccaatcggggtcagtgaggcattgtacgccaaggcggtttaccttgcaaggtttaaaaactcgattcgaatcgtctgcttctcgcagctaatgagactgcttgatccatgctgctacattgagtaa

SEQ ID NO: 39341 - DNA, 246 bp, Zea mays
  Peptide Sequence Number=SeqID_82716
atggactacatggtgtttgaggttgctgaattggatggagcagcaatgatttgtcacactaacaacaaaatgaaagagacaaccgatcaagccaaggatggaggcaagaagagcttcgaggtaccgagtgcacgggagaaggtcaaggagaccaggaacccaaagccaggggtgaagaaggagacttgcaaagtcaaggttgatcgagttaagaagagttatggtgcatcaaggatcactacataa

SEQ ID NO: 39342 - DNA, 246 bp, Zea mays
  Peptide Sequence Number=SeqID_82717
atggcgaaacccatcaccggcgacgaattcactgctccccggctgctaaatctgtatggaacgagtccgcgcgaacgtgggctgagtggccgatggggcgggcccacaagtcggtgcagcacggccaggacgcggataggaggtgcggctgtggcgtggggcccgcacgtcagcgccaaacctgaagctgggctgtgcgaaagtagagatggtactcgggcgcaggggggtttcaacccagtttga

SEQ ID NO: 39343 - DNA, 207 bp, Zea mays
  Peptide Sequence Number=SeqID_82718
cagattgccctcctcacgcgacctgagacgaggtctcccattccggttatggtgggtacaagtgcggtcactgcacgacggccaatcggggtcagtgaggcattgtacgccaaggcggtttaccttgcaaggtttaaaaactcgattcgaatcgtctactcctcgcagctaatgagactgcttgatccatgctgctacattgagtaa

SEQ ID NO: 39344 - DNA, 519 bp, Zea mays
  Peptide Sequence Number=SeqID_82719
atgggacgagggaggaagaagattgaagtcgttagtttccttgcaggttctctggaggacatggttgctggagtgacttggccgtccatcttgccaccgggttggactgtcgagtgggaccctgcctcggctgaggagatgacttctcacggaacctcggacgaagggaatgcacagtcccacaccgacgggcttgcacgagagggttttccccgtattttgtgggaggtacttcagggagctggttacacgacgcctccccagtacgcggtgcagttgttcgagaagcaccgagtgccccgctgtagggtgaggatgaccctagagcctcatcccttgcagccaggctggcgttcgctggactctgagtcttttggataccgggctgaggatactatggaggcaattgctcttcacggactgaccaccttctgcggattccaccccttggagctgtccactcaccccatttgtttgttccccgcggagaaggaggacgacccaatgtggaaggactga

SEQ ID NO: 39345 - DNA, 552 bp, Zea mays
  Peptide Sequence Number=SeqID_82720
atggtgcagagacttacccggtctacgttcaccggcggtcgggtgaggtccggcgaccgtggactggcttctccagcgaggcaaagtccgattccttgctcggggagcttcaccgaggcatgcacggtctattcccgagggtcgggcgtggctgggaagggctctgcaggacggtctatggtggtgggggatcgggtggacgcgggcacgccgtttgcagggcaaacgccggtgatctctggctccggtgaggtcgagcgtgcgcggaggagtacggtcgacgtctatgggggctttataggggcgggcacgggcaacggtggccggctcggctttggcgcgacgtggggcacgcggggggcgcgcgtcgggcgtgctctagcgagctcagagcgcgtcgaacacgtggctctttggcttctgttcgtgttctaccctcagctgagcggcccaaaacgtgcgaatcttgccctaagacctatgagagatctcttcccgcacctagggctacctagttcatgtgagttccaaggggagatgtggtcgggttag

SEQ ID NO: 39346 - DNA, 474 bp, Zea mays
  Peptide Sequence Number=SeqID_82721
accgggaagccccttcgcgcgctgagtggcatcgaggcacgcgccgaggtcacacagatgtctccgactctcgcagccgagccgctgggggggctgagcttgtggcaaggtgagccgccgagggcacgacagcttaggagggaaagccgccggggaagggcacgtacacaggcgagggggcaccgggccctcgaagaggacgcgaccgcagtggaggccatcaagcgaacaccgcctccagcttctacggccaaaatagttactactgcgggtgccgaagccgatgctgctgccgaagctgaaaaactcgcgaccacaatgtcaagaattgacaagcttatgtcagatatggttgcgaaggagacaggtgtggctgcggaggaaagcatggccgcagtgcttgataaagggaagaaagttgttgatacttcttcgggggagaaagattttgacctttggcacttgggtggatag

SEQ ID NO: 39347 - DNA, 576 bp, Zea mays
  Peptide Sequence Number=SeqID_82722
atgaccgacgtgagcaggccccaactaaggcgcgtcgaaatcgcgaccgcgccagagctcacggctgcgcacagggaagaccagggagaacgcgcgtgggagccaggtctgagtgtccgccatgaacaggagaatgacgaggaggaagcccccgctgccacgaacgccaccaggtggatccccatccaacctgggcgagcagggagagaggagaagggcggaactcggcaagtcgcggctgaggagagcaccatggtcgagagggaaaatccgagcgcaggggcgagctcggggagttgggaggccgagttggggatgggcagagggagctggggggaagccgcgacgctggggcaccagggagagcacaagagagaggagagcaaccgggcgccatgggagagcggggaaatgggcgcgacgaccaggggattgaaggcgagggagctcggccggctgggaggagctgggaagccgcggcacgtagagaccaagctcgaagaggacgagcagagatgggagagactcgttcggcagccattgcgagcttgggagaccgcgacgcgcacggcgtga

SEQ ID NO: 39348 - DNA, 438 bp, Zea mays
  Peptide Sequence Number=SeqID_82723
atgagtgaggaaatcggatctgtaggaccgaggaagacgaaaaaagacagtgccttgacggactcggcaaagcgagggaccagtaggctaccacgtggagccccaaaacctcaacaaaagcaactgcaggtgggaccagcaaggctctgggggcagcatgacagcgggagtttggtgttcacgaggagggctcgcgggtacgtggagcgagggaagcagtcgagtggagggatggaggtgaggctgacccggccatggcctgtagagcatgacgcagcagggaaaatgctgtttggggggcacgggtcagacggtggaggaaggaaaccgtccgcgaagtgtggacgctcacggggtgcgtggggcgaggagaagcagctggatggaggcgaggtcaaatcggccgtggagcaggacgcgatagagaaaacgttgtag

SEQ ID NO: 39349 - DNA, 750 bp, Zea mays
  Peptide Sequence Number=SeqID_82724
atggggctcggtgtatgcggttcgctctgccaaggtggtgacgaggatgatggttttggttgtgcctatggtaatgtgactggtcagtctagccacttggagaggctgcaccatcgcctgcacgaggagcaggagcatcgacgacaggagctagagcagcagggctcttctttctcgcttcagcaggagatagagtctgtgaggagctgctcctctgtttttccgctggaggcatcccctgcaccaccactgagcgccccagccgctggagtagctgctggaggagacccagacgacggaggtggcgacaacagctcgagccacaacactgacctttcagaagagcaggagatggaaggatgggttgctcgacccatcactcgcgacgccgctcgcgagtgtcacttccacgatgcgctcgacaccttgctacgccagtcactcgaccgacgcacttggtctaacgacacaggaggcgtggttgtctcacctgtcggtgaggacaatcctaggttgagcagcacaatcaacctagccgccgtgctaaacacggagctggaccatgcattagatgagctgagtagggctcgttctgagatcgcccagctgtgggctgagcgcgcggagcatcgtcacctggaggatggctcccccgctcccgcgactcagcacctgtaccgctcacctcagtgtggacaccatgcttatggtaacttcgactacaggaccaagataaatctagaaccatag

SEQ ID NO: 39350 - DNA, 519 bp, Zea mays
  Peptide Sequence Number=SeqID_82725
atgggtagaggcaggaggggtcgtggttggcctcgccgcgctgacggcaaacgcaagcgtgccccgagtcacccctcggaggactttggggactcggagtacttggaggaagcctcctccgagtctgaccgctcgcctgctctggcttctcccccggcgtcatccgaggactcggatgactccatggggctctctacccgcgccgggctcggtgggtcagatgagttgggggtctcctcggatgaggcagactccaccgactcttttgaggagtggagcggcagcgacggtgacgacgagggcgacgacagcggcgagggtgacgatggcgacggcggcaacgatgacagcgagggcgacagtggcaacgacagcggtgacgggggcgacgatggcagcaagggcgacggtggtgacggtagcaatgacagcggcaagggcgacagtggtggtagcagcgacggtggcaagggcaacgacaggggcggcaaggccagtggcatagtgccactgatttaa

SEQ ID NO: 39351 - DNA, 159 bp, Zea mays
  Peptide Sequence Number=SeqID_82726
atggggaggagggaaggggagctgggcgacgtgggagggagaagggagcaggggcgccgagctaagcggaggagaaatcagcactttgtcttcctgggacttaaaaatctattgggtgcaccgaaggtgcacccaatgggtgtagcccccgagttttga

SEQ ID NO: 39352 - DNA, 978 bp, Zea mays
  Peptide Sequence Number=SeqID_82727
atggatgaaggagtaggataccgcggggaaaaagtgtgtgaaagactgttggaagatgtcatgtgggaagtagcacctgagtcgaagagccacaggtggttgctgttgggcgatgaaggcctgctgctgtggatgagccagaggaggacgtgcgccgggccacatgtggatgggcactgctgcctgcctgccgccacgcttgctacgacgactggtgttcttcgagttgtttctgtggccagcccccctggagttgaaatcagaggtctgcagggactgctgcgaggacttggtggtgtcggtgagagcgacggtcgaaggaggctgctagttcgccaaggtgaggtcctcgcggacgtcgaggaaggaggggaagggtcgagcgcggcggagcaggcgccgacttgggtgaagtgctcgttgaggccacagatcacattgcggatgaggatgttgagactggaccgaaactcagaggacgctatggatggaagccctttggtgaagatgtcgttgaagcgaagtggttgggacgcgaagaacgcggacatcgccgacggccacatgcttacggacgaagcgaatgtcaatctccacgcgcttcgtgctggtgctgcacgggattggtatagagtgcactgcatgaaacctaagagttttgcatggaagttggaagtcgaagctattgcagagaacccgacaaatcgccagcaaaagaattacagctctatatggtcatctttaacggaggcggacgtggcaccggggtcgtcctgcctcgagggcgccttgagggatggccttggagaccagcagggccccagaggttgggagagctccatggtctggtcccttggcctagagggctccgggtgctgggagagccctagggttcaggagggcttggggacctctactctggagctcgtactctcgctccgtgataactccgacagggttatgcccccgtgccgctga

SEQ ID NO: 39353 - DNA, 966 bp, Zea mays
  Peptide Sequence Number=SeqID_82728
atgacaacatatcacattacatctgacctggacaagctaacggtccagaacaagtacaaggggacaaattggatcctcacaagcagtggggcatgctgtttttctttgtctttcctctcctccctctcaactgtcggccaccttggcctggtcgccgcaacctccccaccaccaccaccgctggccctctgcgttggacgtgccgccaccggatcagacccacgtgcgcgaccttccgcgcccacaccacaggcccgtgccagccctgatctttgcccgcctccccttgccagtccacgcctccttacgcctggacgcgccgccgccaccgatctgcacgtctatgctcgtcggaccttcgcgcccccccttagtgctcccctgtgccgccacacaccctccctgagctgcgcaccgccaccagaccgcgtagcctctccgtcaaccgtgcgcccggatctcctactctgccgagccgccaacgccccccttcatctcgttgccatggatcccctagccatcaccacggtgattcatctccctgacaccgccactggtatggcagccaccggacttggccttcccggctacttggtggccacggacgccgctgcaggcgtcctcctaggtgaacccactgagctcccttgtccaatcgtgggtgcctccccccggcttcaccgcgccttttcgcttcgtcgctccctcgccgccgactggggcatcaatggttgtggccctcgccaccatctaatggccaaggctcagtgcctcctcttcagccacgtcgattcgcccaccccggcgaccctggtggtccaccccatcctcgggcttgacgtcgccaccaatgtcgctcttcactctcaggcgaccgaagttcacaacatccggtccctgctctacgctttcgccaaccatgtcctcagcgacgtcgctgcttcgttggctccttcctggctctag

SEQ ID NO: 39354 - DNA, 192 bp, Zea mays
  Peptide Sequence Number=SeqID_82729
atgaagctgcgccgctcgggaatctgggaccagcacggccgggatttctcactatcggtggccatctacctcgggccgcatacttccggagctgggtctgtacacgccaccttcgccgggccgatgagggcgaagttcgcgcactgtgtcaatgctggggagttctctggcgatgggccaccgcgggagtag

SEQ ID NO: 39355 - DNA, 504 bp, Zea mays
  Peptide Sequence Number=SeqID_82730
atggggaagcttgtcccatcactcctcatgctcctcctcagccgaggcagggtcccactcgactgtccatcccggtggcaagatggacggccaagtcactccagcaaccatgtcctccagagaacctgtaaaattatgccacaagcaaggctgagtatactaatactcagcagcatggatcaagcagtctcattagctgcgagaagcagacgattcgaatcaagtttttatccttgcaagatcagggctcaccgccttggcatacaatgcctcactgaccccgactgccatcatgcagtgaccgcacttgtacccaccataactggaatgggagaccacgtcttaggtcgcgtgaggggatatgtctgcgggcaggttcactcaggtactaggcttaccgatttaccatatttctcggcactcaaggggtttgctggtttggttgagtgggtcactatttgtcactgtagtctgccctataagtttgaggtccagaaaaattag

SEQ ID NO: 39356 - DNA, 474 bp, Zea mays
  Peptide Sequence Number=SeqID_82731
atggtaccgatccggggagggagaaccgcgccgcccgtagaggccgcgatctccgtcgactcggtcgccgccgccgggagcaccgccggcgcgtctacgcccgtttgggctgccgctgcgtgcgcccccgcctggagcgccgtcagcgcgtcggcgcctatccgggctgccgccacgcgcacccccatggggatgcgcggctgcccactgtgccgcctgctctcgcgctgcttccctcgccagcctgagctcttcgtcggtgttgtcgtcgacagaagcagagctgccagctctactgccgcgcagaacctcgagctctgttgccgccgcaccagagatgctgtgcggactgcggactgtcctccacacatgacttattccatcagcggggaggggagaatgagaaagacagtgcgggaatgggaatggcagaacacggaatggcagcctaccccttaccgtcttaataagtag

SEQ ID NO: 39357 - DNA, 1482 bp, Zea mays
  Peptide Sequence Number=SeqID_82732
atggcgcgcatgtgcgcgtatcgagggctgagcccgcacaggaggttgagaacgagtgtctcatccgtgactggggtgctgaggtcacaaagggcgtctgccaaggtcttcatctgtcggcaatacgcagtgatggaaaggtcccccctggacaagctggcggaaagcggtgtccagttggaggatccgtacctagcggttgccgaggaactgagcctcgatagcaacccaggcctgacgagcggtgccccatgctcgcgaacgtcgtcctgcatcttgacgcggtggagtcatgaggatctggtcgcgctagcgagagtactgggtcgagtagggggcgaggacgacggagacaagagcccatatgctagggagccctaccgcctaggcacgaagaccggcaatgaccgacgcgtcgagtgcgggaagggtgtcggcagcgttggtatcgggaacagagtgcgaggcggtgcctgggatacccgcgacgagtcggcgttcgagggcgtcaacggccacgcgttcctgctctcaggcatgagcagcgatctgcgcacgctgacgggcggcggaaacatcgtcagtggggcgacgttgagtggtggtgagtgcggacatgtagatccacgacgtggaacgactgcgagccgtagcagggagcatgctgagttcgcccacgaggacgagagccccacccaccaaatccacgaaggggaagtagttgctggtggcagcacgggcgcggtcaaggcgagggaagagctggccgtgggcacattccaatggagtggaacattgagcaaaaagaagggccagaagtggggaataaatagctcaaacaagaaaaatgccgatgtcggctatcatgcaggaatagctggaagcaacacagaagttaataatcttgtcatggacattaaggttactgaaaatggcttctgtgctgtcagtaatagaaggatcgatgaaggcagtaatgttgagatgtccagtgtgaaggctgttgctaatgaagaaaagtctagaggtgtaccttttgatttcgagagcttgtaccccctaacgcaacttccaaaggttggaaaagttgtgttatatgatcccatatcattgcgtatcattctcttacccgttcaagagtatccaatcaccaccgaggaaaacgaagacaaggacgagccagatatgcttgtggacttgtcaccgtacaaggaagatggctccttggagatcgagtactcttcacttcttgatgtaaggctactgaagggtattgaaccagtccccggggctttcagtactcccttggcagaaacatgcaatgaagttggatcggcactggccaaaggaaggccacgagctgcgctcggcatgtgggtgttcaggagtaagcagagcagcccggtgagcagcgtcaggccccggggcgcctgcagggcctacatcttcgcgctggaggttctgttctttctcatcacgtag

SEQ ID NO: 39358 - DNA, 543 bp, Zea mays
  Peptide Sequence Number=SeqID_82733
atgagccgggctgacgtccttaggggacagctggctgaggctacggagcggccggttgagccgtctgctcgggtcgggttcccggaggagaccctggcggcgatggcccaggcgtggtgccaacaggttccttcaaggtggagatcctccgaccgtgttgccgtccgaggccgggtcggattccgccgaagaattgtttgtccgagcgagagttacttttcacggaaggtgatgagtgaggattctgttatcgatatagtcgagaaggcacgaaaaatcgtttcggcagaaaagtttccgagcattaagacttgttcggtcagcggaatcgcttatccgagcgtgagttacttatcgcagaaggtgatgagtgaggatcccactttcgaagtagtcgaaaagcatgaaagacgttctggcagaaagactttttccgaggaaaattttgacgcagaggggtgccccccttctagcccccgagggagggtagggctttgccgaggcaaggctgacccttccttgacggttagactttgtatgtaa

SEQ ID NO: 39359 - DNA, 537 bp, Zea mays
  Peptide Sequence Number=SeqID_82734
atgggcgcgattcaggtcaaggctctgtcccctcaagggacacgatcccgcctcgcccgagcccagcctcgggcaaaggcagccgaccaaggaggattcacgtctcgcccgaggcggctaagtccagcctcgggcgccataggaagctccgccttgcccgacaccaggtctcgtgctcaaactcaacgccggacgacggactccgcctcgcccgaccccagggctcggactgagcctcgacctcggaagacggactccgcctcgcccgaccccagggctcggactcagctcgacctcgaaagacggactccgcctcgcccgaccccagggctcggactcagcctcgacctcggacgacggtctccacctcgaccgaccccagggctcggactcagcctcgaccacggacgacggtctccgcctcgcccgaccctcgggcccagactcgaccttgaccttggaggagcctccgccctcgctcgacctcgagctcggaccgaccacgtcacaggggggccatcattaccctacccctag

SEQ ID NO: 39360 - DNA, 606 bp, Zea mays
  Peptide Sequence Number=SeqID_82735
atggctcacgacggcgagcaatcgctctcccacaactgcactaaccactacgattctaggtgtactgtattcacaaaggtaaccgaaggcttggcaagggtcctcaccttagtttggcgaccgcaggcgcgtcgtctacggcggtgtgcggattgcatggcgatgatggcacaccgacgaggaatcctccaagcgcaggccgtatactgccccacaattccactcggcgacgcccgccaacccaagccgagcttccccgagtgcacggtttgcctaggatcgatggcaatcgccggtgcgcaacaacggcgactgagcttcggctttctctctcccttcctcagcttctcacggggtgacctagaaatctatggacggggaggaaagaaggctgcgtcgcgattgttttatggcctcggaactacgcgctccgctgggatgcagtcgcccacctccgcgtttgatggcacgagcgcgacatgcgcggagatcgttgcggaggggacggttctgccacttgggtcccagaggtcggcggcagaatgcttggggatgactgtgcgactgacacagtggccccaccagcagtggattactgtgggataa

SEQ ID NO: 39361 - DNA, 471 bp, Zea mays
  Peptide Sequence Number=SeqID_82736
atgatggttctcgcctcagttgcctccacctcgttcgtcgtcttgcttcttttctctctcccctcatgcctccccctccgcgccaccccattcttggcagagggcgtgggagcaggtgcctcctccctatattcgtccaacactagccccgacaccgacccgtgtagtggctattgcacgtccacgaggacgtttcacagtatgcacacaccatcgttttcgccgtcatcggacgtcacgttcgtcttcctggccttcaccctgttcttcctccccaacctactacccccgcccacgatcgcaaccgtgagccgactgatgctcttcgacgcgagtatggggcgagtcagtcttgctcctggcctttcttcgtgcgtgctgccgaggaggacacggtggcgcttgccacacttaggttatcttggcaatgaggagtctaggtctgagatattggacaaccaaggcccgtag

SEQ ID NO: 39362 - DNA, 3153 bp, Zea mays
  Peptide Sequence Number=SeqID_82737
atgttccagatgctgggcctccgcggggggagccccagcgctggcgaggcgacccccgtcatgagcggggacggcggcgcggtcgcgggtcccgcgcggccgctgcgcctggcgtactgcgacgagaagggcaggttcgtgatggaccccgaggcggcggcggcgctgcagctcgtgaagggccccgtcggggtcgtctccgtctgcggccgcgcgcgccagggcaagagcttcatcctcaaccagatgcttcttgggcgaagcagcggttttcaagtggcttcaacacatcgtccttgcacaaagggactttggatgtggagtacgcctttgaagagaactggtttggatggaactgaatacagtcttgtgttgttggatactgaaggaattgatgcttatgaccaaacggggacctatagcatccaaatattttccttggctgttctgctgtcgagcatgttcatctacaaccagatgggaggtatagatgaagctgcattggatcgtctctcactggtcacggagatgacaaaacacatacgtgtcagggcctcaggtggaaggtccactgcatctgaacttgggcaattctctcctgtctttgtttggttgttgcgagacttctacctggatttgacagaagacaacagaaaaattactccaagggattacctagaactagcactaaggccagttcaaggtggaggaagggacatatctgcaaagaatgcgataagggagtccatccgtgcccttttcccagatagggaatgctttactcttgtgcgacctgtgaacaatgagaaagatctccaacgcctggatcaactttctctgagtaatttccgaccagagttcagatcgggtctggatactttcacgaaatttgttcttgaccgaacaagaccaaaacaacttggagctagtacaatgacaggacccatcctcgctggactgacacaatcatttcttgatgccattaatagcggtgctgtccctacgatatcttcatcatggcagagtgtggaggaggcagaatgtcggagggcatttgattctgctgtgggcacttacaattcttcttttgaccataaaacatatatagaagaggactctttgagagaagcacatgaagatgccatgaggaaggctatcagtgtttttaatgcttctgctgttggtgctgggtcagctcgtttaaaattcgaaaagcttcttcacagttctctcaaaaaggccttcgaggactacaaaaggaatgcttttctggaggctgacttgcaatgttcaaatagagtacagaacatggaatcaaaggtgcgagcagcatgtaaccgtccggatgcaaagttagatgacataatcaggctccttgatggcctgctcacagagtatgagtcaaaggcctatggtcctggaaaatggaaaatgcttgtcacattcttacagcaatgtatcgctggccctgtcctggactttttcaaaagacagttggagcatatagatgctgaaaggaatgccctgagattgaaatgcaattcaagcgatgataagttggcattgctcaggaagcaacttgaagcaagcgagggtcacagagctgagtatgtgaggcgctatgaggaagttctgaatgataaacagaaaatttcgaaggattactctactcgtataactgaacttcagatcaagagtagcaagttggaagaacggtctttgagcttgtcttcttctcttgaaaccgccaaacgggaatccaatgattggaagagcaaatatgatcatggtattttgcagcaaaaggcagatgagagcaaattaaaatcccaaattgcttctctggaatctagggtgaatatcagcgagggcaggttgtcggcaacacgtgaacaagctgattctgctcaagaggaagcatcagagtggaaacgtaaatatgaagttgctgttagtgaggccaaaacagctctgcagagagcggctgtagcacaggaacgcacaaataagaaagtgcaagagagggaagatgctttgaggtcagagcttgctaaccagctatctgagaaggaagaggaaatcgccagattacatgcaaaacttagtcaaacggaaattcatgctaccagtttgatctcgaggcttgaggccaccgaagcaaagttgaagagccacgagtcggattcgttggctttgaaggaggagatcagattattgactgataacctggagtctgttagaagtgaagcgatgtcgcgtgagaaggaagtcaggatcctggaacaggaaaagaaccatcttgaggagaagtatctgtcacagtgcaaaaagtttgatgagatagatattagatgcaaggaagctgaaagggaagcgagacgagcaacagaattggctgatgtagctcgtacagaagcttcttctgctcaaaaggataagggggaagctcaacggctcgcaatggagaggcttgcactgatagaaagaattgagcgacaggttgaagctctagaaagagacaaggctaagatggtggaagagatcgagagacttcatcagtcagagaaggatgctgtgtccaaggtcgcattgctcgaaagaagcgtcgatgagcgggaaaaagagattgatgagatgttgaagcggaataaccagcaaagatccagcacggttcaagtgcttgagagtctgctggcaacagaacgtgaagcatgcgctgaagccaataagagggcagaggacttgtcattgatgttgcaagcaactcaaggcaaactggacatgctccaacaagaaaccacacttgatagcaagctcaagacctctgcaaggcgcttaaggggtgaaggtacagagtctgtacatgatatggatatcgacgaagacaatggtaggcgccggaaacgatcaaaaagcacaacaagccctttgaagagcaatcacacagaggatggtggatctgtatttattggcgaagatacttgcaacgggagtcagcaagggacagaaacagaagactacaccaaatttacagtgctgaaactgaagcaggagctgaccaagcgcgggtttggtgcccaactcctccagttgaaaaatcccaacaagaaggatattgttgccctgtatgaaaagcatgtcgtcggcaagtag

SEQ ID NO: 39363 - DNA, 113 bp, Zea mays
  Peptide Sequence Number=SeqID_82738
atggccggttcggccgcctccctgccccccggttcggacgcctccctgcccgccggttcggccgccctgccccccggagaaggatccccgtgcgccgccccactgccccgccg

SEQ ID NO: 39364 - DNA, 690 bp, Zea mays
  Peptide Sequence Number=SeqID_82739
atggcgcctgaggctggactcggctgttgtcagcctcaccctggcgggtggcacagcagtcggagcagggcaggcgacgctgttttcctgtcaggtcagtcagtggaggggcgaagtgactgtggtcacttcggcccctgccgactgaggaacgcgtgtcaggataaggtgtcaggcgatccttgcattgaatgctcctgcgatacggtcggttggcgaggcgatctggccaaggttgcttcaccgcgaagcctgcccgagctgggcctcgggcgagtcgaaggttccgagttctcgggctggtatgttgacgctgtcaacggtttggccgtagccaagtttgcgagagcagcccccgagcctctgcatagagcgagaggacggtcaaggacggactcggcttttatcatacgcctctttgtcgcctttccgcaaggaggaggggggaaagcgccatgttgccctcggagggcgtcgaacatggtgtctccaggtccaagggctcgatgcctccctctgatgggatttcgttacagaatcgctcctgctggtctcggaaatgtcctagggtacctcaggagcgtagcccgagcctcggccatgtatcgaacgtacccagagtcatccctcgctctgcgtgttctggggcggctgtcgaacccttcggggggccagccttcgaacccctga

SEQ ID NO: 39365 - DNA, 570 bp, Zea mays
  Peptide Sequence Number=SeqID_82740
atgtcttcttcctcccttatgcgtcgtgtctttccatcttccaagcccccggatgggggcccggccgcacccctctaccggcggtcacccaagacggtgacctccggcttgatggtgggggaaagcgagccgggctgcggcctctgcccctccctcagcctcaaggattttcatcaccaaggctggggaggggactgcagcgtgcccgactttcggacgcgagtggcttcggagccgctcgcggcgccggcgtctgccacggcagctggaagaggttcttccgccggcgtgatagccagggccggccacaggctgacctccaactctacggccttctgcccgtccttgccttacgagtttcggcatgggtgggggcctcctggcagcagcacccgccctgaggtcagtgctgccgctgttcgaccccccggagcagaagtcgtcgtcgtcgctgctgctggagcaggtgacggcgcgccgttcgtcggccttccgttgctccgcaggccttccccctcggagtggggttgttcgtacctgcggaggggggaaccggagttccatttgtaa

SEQ ID NO: 39366 - DNA, 534 bp, Zea mays
  Peptide Sequence Number=SeqID_82741
atgggagagccgagcaaggagctcctggacctgccctccgaccccaggcctcccgcctccttcatcgagtcgcttctcgctggcagggagcagcagcagcaggataaggagggaaagcttatcgggaaagtgaaggatttcttgggggagattgcaagggccaaccaaaagttgcagcttgatgcacagaacaagcctcctgtggagtacgatattgaagcccttactgggaacgaggagcaatacattgagatggatctgcttctaggtgtcgctgatcttcattcagagcaggctgtggaggcagctgaagcgacaataaacggccgccagacttcagaaatgtcatttgcttgcagctcatctgactcggaagatgatagtgatgacagcgatgaagatgctgatgacaaacctgtcatgtctgacaaagataataagtgtaaaagtcctgatgacgcggagatgggtccagcgaaaggaaagaagcccaataaaagacagaaaattgttgttctcaactacgtgccataa

SEQ ID NO: 39367 - DNA, 507 bp, Zea mays
  Peptide Sequence Number=SeqID_82742
atggatccatctatttgtggagaaaaaaaacatggaaagattgatgaagataagtcaagccagttgttggagatgcctcaggaagatattaatccactgaatcaggctcagatgcatggtggaagcactaagaaatcggcacctgatctatccccgaccaaacagaagaagcaacaggcagttcaagaaaggaaaaggaagcaacagtcaaagaggggcaagaaagtggctggtgaatccctggaaataccccaaacaaattttgaatcggagaatcaacctcataatgacgatgtcaacattgagaaacagacaattacgagtagcacactctcaccaaatggtgccaaggggcaaaagggagctcaaaggagaaaccagaccaaaaaaaggaatcaaagaaaaatccttggaggtctttactttttcacactctatacttttaaagttgttttcagaaggatactgatggcctacgtttctattctcatggacttctatccttag

SEQ ID NO: 39368 - DNA, 198 bp, Zea mays
  Peptide Sequence Number=SeqID_82743
atgaaggcgcggtaccaagcagggttgggggttggggccaaggacgagaccgaggtcgacacggctagcggttcagtgaccgacagcgtccgcgaaccggatgatgcaggaacaacgaccgacacaggtcaatcgacacgcgacatgagtggaaacgggcagcagtcgcaggcccaacaacagtacagcacgcaatga

SEQ ID NO: 39369 - DNA, 565 bp, Zea mays
  Peptide Sequence Number=SeqID_82744
atgtaccatcgtataaaaccaactgctctacctggccttcagagatggccaaaactagagtttcagtggcggcggttgcgcgacacgagcgagcgcggcgaagtcagcacgactgcggcggacaagcgtccccatagacgagatccatggcggatcgcctcccgtcatcgttctagagcgccggtgctacatctccagactgcccctgctccgcgcggacctgctctccagtgcgactgcatgacttttgttcctagcggcggtggtgttccgtggcgcgacagcgaaatcgacgaccgcaggaacgcgctcgacttctactctccaggcgccgccaaccgcatcgtcccagtgaagacgcccctcgcgtgccaaccgctgtgtttgcgacgacttgacctcccctccaccgaccagatccacaccgccaatgggctcaccgccgacgaccccgactcaccgctcagttcaggccaggagttcgtcatctcgctcccctctaagccaaaagtaaaggcggaagaagagccagaattctcattaaaagtcatctcaaatgttggag

SEQ ID NO: 39370 - DNA, 93 bp, Zea mays
  Peptide Sequence Number=SeqID_82745
atggcgtggcgcctttgctctccttcccatggcgcccccatttcttccatggaaaaccagcaggaagccccctcccctcagctccaatgctag

SEQ ID NO: 39371 - DNA, 210 bp, Zea mays
  Peptide Sequence Number=SeqID_82746
atggcgctgtcgtggtgcctcggtcaccgccgccgtcgtggtcgggggaaagagatgatacgtgcaaatcattgcacagaggccctggtttttacagtatacaccctgaactccctgctacgagtagacgaacaagtgaccgagggcccaggtgttcagcaggtggaaactgctgagcaggagctcattgaaggaaagttgtgcccttga

SEQ ID NO: 39372 - DNA, 456 bp, Zea mays
  Peptide Sequence Number=SeqID_82747
atggcgtgggagagggaatggggtagagatgcagtggatcttgggtgcggagaggccgacggcgatggaggcctgggcgagctcggccatggggaggagaaacacctgtgtccagggagccgagtggagggttgtcgcctagtcagccgagcgccatgggcaaactggagaggctgctggtttcttgctaccggagaacagggggacacagggaggcgaccatggctggcgtcaagtgattctggcgacctgcagggagggagcgccatggggaagctcgggcttgagccatggagcagggagtgcagagttgctgcacggcaggaggaagaggggagtgtcggctgtgaagaagaaagggagagggtgttgtggcggctagggaaaatagaggggtgggaatggaaaatagccaagtgcaaggggagagggctcgtatttataggcatgtgctag

SEQ ID NO: 39373 - DNA, 240 bp, Zea mays
  Peptide Sequence Number=SeqID_82748
atggccacctgcctagatcttacttacagcagagctgacagcacggcgctggcagtagaagccaagaacacaggccaaggaaaatcaaagtgttttggaggggaagcttcttatagaaggggtgatgggtaccgtgcgccgttcggcacgggcgcactgttcgccaacagaccggtcaggcgcgccgtctactgggtgaccctgacgccgcctgccagcggattagacaggacgcattaa

SEQ ID NO: 39374 - DNA, 177 bp, Zea mays
  Peptide Sequence Number=SeqID_82749
atggccaaagcgcttgcagaagtccagcggcgacagcagaacagtgaagagatagcggggggaagcggcactgcggctgggggcaagctgagggagtgtgcatggtctttacctagtgctcgggcgacgtgcgtgggtcatgcggacgtgggcgcgggtttgacggcgcaggtctga

SEQ ID NO: 39375 - DNA, 276 bp, Zea mays
  Peptide Sequence Number=SeqID_82750
atggtttcccatttcctcaactcttcttcccggtccgcgcttagcctcttccctacacaggtcggagctcactatcgccgcgattcttcgacgttcggccaactggagcctcctcgcgccgtgccaagccgccccaagcaccgtctcaggacaacgagcagcccgtggttccttagtgtgttgccgaagatgttcctgagcaacaacctgtgctcagaaggagatgctggcaacatggagaactttgaggagttccaggactacgacgagttttag

SEQ ID NO: 39376 - DNA, 576 bp, Zea mays
  Peptide Sequence Number=SeqID_82751
atggcacgtatgaggaaaaccgcgtgcaagtccacaggacctattggcgtacctcgtcatcagttggcttcccgacatgaaggaagaagtagcggcagcaacgatccaatcggagacttggaagctaaggtggaacagcttcagatggagctacgtcaccgaaatagggtgtgggcacaggacggtcagtgtataactgagttggcagctgacgtcagacgcttgcaagacgagcttgctgaacgagatttggtggtcgactgggctgtcaactcacgttcgattgcctgggaccgcgaagccaaagctcgtgctcgtgtggtagagcttagtacagccctcgacaacttgcaggtgtactgcaatactttacatgaggaagtacatgtactgtatgcgcgactgcacctagacgtgcctaccgaccctgttgcaatgggagccagaccatcagggatagcaggtgaaggacctgatggggagttggacctttttaggcctcctccttccatgaatctggctgacgatcggtctcctgcagcaggaaatgaagaaaccaaggacgatgaagactag

SEQ ID NO: 39377 - DNA, 222 bp, Zea mays
  Peptide Sequence Number=SeqID_82752
atgatgccatcacggactcgtgcgcataatggtgcgaggacttcccgtggtcgggaagatactcctaatccgccacctgtaccaccaacacatgccgaggctatcactgccttggtcaatgctactgcagataatacccaaatcttgtgtgagatggcgggtaatcaattccagcagcatggcgggagagctcctccacaaggaccgcatgaaacctcgtag

SEQ ID NO: 39378 - DNA, 942 bp, Zea mays
  Peptide Sequence Number=SeqID_82753
atggaggttttgaatggagggagagagagaaggggaaacggctgggagaggaaggggcgacggtttccggctcctggaggcggggcttcggacgcggcggcttcggtcttggcgtggtcgtggttgggtcgcggggcttggtggctcgggcggcctggcgtggtgctcaggcgctgcgtcaggcgctcggttaggcgtggcggcggccctggcgtggggcagagaacgcccgcaggtccctggccagcggggcccgcgcggcaggggaaggggaggaggtccctggcggcgcgcggctgggaagaggcagggaggcggcgtgggaaggaagagggaagggagaagagagagggcgtgcgtggggcccgcctgacggtgatggatggaagggaggggcggtcggatgggccaaatgggccgggtgttacacgagagtaccccgctcttgctgaagccaagggggaatcgactgaagtgccgaaaccgatggtgataacagagcaagagaaaaccgatatggccgaagtgctgaagcgacctgccgaaactaaggagaaaaaggccgaaaaaccagaaccaaggaggtcggtagagcaaccgaagattctgagcccgacgcaagagacggagctgccgaaggtgtcaaaaattcctgttgtaactccaaaaaggagaataatggccaacatattagacgttgtcatggaatcaacaaaggtactgactcctgcttctgcagaagtacctaacataggtgaaaagaatgcgaaggaaactgccgaagttgtcatgactcaggctggaactgaagcctcacagaaacagtgcctacggaggttgttgaaaagaatatcgaagcaagaccttctgatgctacaaaaactagcaaagagtctgaatcccctgctgctggagcttctactgagggattggaatttataa

SEQ ID NO: 39379 - DNA, 255 bp, Zea mays
  Peptide Sequence Number=SeqID_82754
atgcctatacactcctggatgccgccaaaatcaaagaagtcagtgaaggggttgttcaagggcctggacctttttcagggcaggtcttcgagcagcagcagacgtcgagagctgttgagcgctatacatggagatgaggagcagcacaatgaggaggagcagcacaatgaggaggtgaagcacaatgaggtggagcacgcgacatgggaccaggccgcgcagcatcaccagccatgggaccagtgggacaactag

SEQ ID NO: 39380 - DNA, 846 bp, Zea mays
  Peptide Sequence Number=SeqID_82755
atggatgatggctcaggaggctcttcagcgacactcacacgtcgctcaagaaaaagccactcagtaaagcctcatcacgcgatagagcgagaggctgataggatcttaatcatgccacatggagatcggagagtgaataaggaggacttgtcctttgacggcaagggacaccacactcaggttaaccttacgttgggttctctttgccgccttcactaccctggtatagtgaaggtgtcaaacggtgataccaaggatgagcttcgatatcggttgcctgacagagaggattacatggggcacgctgaacgtgtgttccaaaacaatgcaaagaagctagtgaaggatgccatatactatgcgagaattcaagctacaaacctgtattttcaaaagcatccggaagaagcaggccccttgaaaaaggaagggtcctcaaagatatatttgactgaggatcaatatcgtgaggaagctacgagttgccaaaagcctagtaacattgaggtctaccaggagggccacaaaggaccagaccctaacaaccctgaccagctctgcagccagacaaccacagatcggctgcaacagggcatgacaccaaatattccaccgccaccacaatggagccagtttgcatccacaccagctccgccaccacagttcaacacccctctgacacatatacctgcacctagagatatggttacgcccgaagcgggtggtagtgggtctgatcccacagcagggactagatttgttgactccctcttcgcgttccctcctcctggtggtggtggcgacagcggtcaaaactctaaccacccaagtggtggttatctctaa

SEQ ID NO: 39381 - DNA, 345 bp, Zea mays
  Peptide Sequence Number=SeqID_82756
atggccacatcccctcatgctcctccggccacagcgaactcgccctctgttcttccatccatggaattcgtggatgacgtatcggtgcttgatttgggacgtgcgaagctcttgtttgcgctaatcagtgtaagaaactccgtcgatggttcaccgtacaccatggtcggatcggctgccatcttctcccactggttagacatcttggtacttgttcgatttggtccccgcgttgtgttgcatctgttaaacggagcaatgggcgtcgaactggaaaactccggtttgtgccgcaagcagtatgcggacggcattgatgaacggggcgccgccactggtctctag

SEQ ID NO: 39382 - DNA, 171 bp, Zea mays
  Peptide Sequence Number=SeqID_82757
atgcccttcgagatcagggcttcaacgacttcatccttcaatgtgttcgacacctttggaaatgtcggaacgctaaggttttttgaggaaatgatccatgttattgatgtatttccgctccgctatggcgaacgattaattggaattttcaggtggggatcttctcctcat

SEQ ID NO: 39383 - DNA, 870 bp, Zea mays
  Peptide Sequence Number=SeqID_82758
atggctcacgagctccaagaaacgtcctcttcttctgccaccaccacacctcgtcgtgtaccaccttcttgctgctcgtccactgtcacggactcgtcctcgtcgcccccgtcaccggcggcggccaatgccgcgcccgcgccacggaaggcggaggccgagactggcggggacgaggacggttgtgctggtaaggcggcgccggcgaagaagcgggagcggagcagcgaggggaagcaccccgacgtaccgcggcgtgcggatgcgggcgtgggggcaagtgggtgtcagagatccgcgagccgcgcaagaagtcgcgcatatggctcgggcacgttcccgaccgccgagatggccgcgcgcgcccacgacgccgccgcgctcgccatcaagggccgcgccacgcaactcaactttccggtcctcgccggcgtgctcccgcgcgctacgtgcgcggcgcccaaggacgtccagccgccgccatgctggccgccgcgttcacgtcgccgtcgtcagcaccatcggagctcgagcgggccggcccacgcgaagtgcccgccacaaagaacggctccccgtccgaggacgaggcacgctgagggggtaccaccggcggcggcctctcagccagggacgccgtcgagcggcgtggacgaagagcggcagctgttcgacttgccggacctgctcctcgacgtccgggacgggttcgggcgcttcccgccgatgtgggccccgttccatgacgtgttggagcatctcgccttccatctacagtctgcagctttggaaggctccttttgcttcacgcagatgccgatgccgatgccgatgcccacgccgattctacaggagcgcggcttattttaa

SEQ ID NO: 39384 - DNA, 552 bp, Zea mays
  Peptide Sequence Number=SeqID_82759
atgacggtggtgaggtcggacacgaagtgcgccgccttgctgctcagggacggcaggtaccccatcgaccctccttacggcagcggaactgggaggggagcagagggggaggagggcgttgatggcgggtgcagcatcggatcacggcagcggatcaccgtgcacctgttgcgaagggcgcttacctctgcaggagtcgcgtctggcgtctttgcctgcattttcaccaccgcgtcaggggattacctcagcgggaatcgcgtctggcgtcttcgccggtgcctttcactgccgccatgggtgggggagggggcgagtcgcagggtgggggagggggcgccgcgcttccagatgcggtacgtgtcgccggcctgggccccgccaaccggcgccggagacggggacgggggcgcggtggagttgtgcagcgggggagtggtggagcggtggagtggcggtggcgctgggcactggaggccgcgaccgcggctggaggtgagcaagcgggcgggggcgcaaccgtgcagagctggatgccgcgggcggggctag

SEQ ID NO: 39385 - DNA, 426 bp, Zea mays
  Peptide Sequence Number=SeqID_82760
atgaatccttacacgacgcggaagcatatgtcagtgcagcatttcgtcgagcggctggcgtacctgcgcgaacacggagctgtagaacacgggcggccgacggggaggtggctctgcttccgccggagcatcctgccgagtatccgcgcaagcctcctcgcccgcccgccgcagggagcgccatgctgtttgttggcctcggatccccttaatcgcggagcatcgacgtcgatgggagatccgcgggcggtcgcggaggatgaaggtgcgcgccgcgggatggaaggtgagtgccgcggggatcgcggctgcgggatgagtggctgcgcggaggatggaaggcggaggatgaaggtgcgcgccgcgggatggaaggtgagcgtcggcggctgcgggatgcgggggagggttcggccgcgggcgtga

SEQ ID NO: 39386 - DNA, 1131 bp, Zea mays
  Peptide Sequence Number=SeqID_82761
atggaagtcgtggagttggttccctgtgcccgtaataagtggggcaactggtgggattactggttctatgtttcagaaggcaaagtcgaagaccagccagggctccccgcggccattatgtgctcccattattatgtggcgtacccgccatttgatgtagcggaggatgatgagaatgatggagcccttcggatcgctgcccggtcgggtgagggacaattggttgttgtcccgccttcggtggcaaccactttgccatcagcggtggtaagggcgaagggagccgcgcaggacccgtgggccgccttctgcgcgagcggcgagattctgacagccgctgccgctaaggacgtggcgggcaccatgtcccagcggatgagggaggcagccgacttcgccgaccgtgttgcgtcgggtgtcctgactgcggacgtcactaccaaagtcgagagtcttcgggcgcagcatgcggatgctgtacaggagaagtcggctgcggaaagcaaaaaccgcaggctggcgcagaaggtgtccgccttggaggccgagaagacggacctccggcgccggcttgcggaggagaggagggaggctaaccaggccatcgctgaagagcagcctgcgcgagtggaggctaaagtggcgtgggcggagaacagtcttgccagccaacgcgcagaggagtgggaggcaaggttcaacgccttgcgcagtcgcgtggacaaggccgaggcctcagcgcgctcagaagtcaagcggacacacgcacagctcgtggatgcgtaccgcgatctgggtgcgcgaactgcagacttcgaagtacccgaccaagaggtaggccttcgcttcctcgaatggctacaggaggagctgctggtgctcccgactattatgcagggtttcatgtcattcacctccctcgtcacctgcgaggggaccatgaatgcgttatcccacgaggggtgcaaacactacgaggtcttccaccaatcggacgagaactttgaacgtgaaattttcaaggtcaaagaccctgtggtgaagcagtcagcgggggcactcttcgataggatgtggggtccgcacgatcgggaggcggttaaggagcggtctgaccgggcgagagagcag

SEQ ID NO: 39387 - DNA, 969 bp, Zea mays
  Peptide Sequence Number=SeqID_82762
atgaccaccagccttgtggtggggagaagcaagtcgggctgccgcctctctcccaccctcagcttcaaggatgttcatcatccttactgtggtgggaggcaggttgagccggggccctaccctccgttttgggttggtgacccgcttcttcctccagcattcgaagggagaaggtgttcaccaacccctgcgggaggggcaatccttggctatacggggccagccgactgcaggctgtcaactgcagtgtgtctggccctttggggctggatggctctggtgccgcctctgacgctgcctcctgctgtctggttggggggcgaggaccccttcgtgcgtgctgaggtggccgccgcccaccggtgcaggggtggtcgccgtcgctgtggcctcattgtcaccccctataggaggacaggggcgaggacctacccgcagcggcgcacatggtgggatgattgccactgctgtcgagtcgtcggtgcagaggcggccgtcaccgtcggtgctggtgcggtagcctctgctggtgagtcactcggggcttgttatcccgcggccctcgctggtgtggaggattttagcctgggaagcccagttatgtgcccgaaccccctagatggtggcttcaagcttgatgtgttgaggttggatgccagcgttcctgaaaaggttgtcaacaatcctcgggaggcagactcgccgggatctggatctggcggtggagcgtgcgggcccatggtatgggaccaggctgagcggctgcacgggctccggaccaccccaggagactacatgcaggcccacgggtacaggacctggctgagcggctacatgagctccggaccaccctatggaacggggtcccgttctccagagccggcccccaggctgtcggacctccctactttcggatcaggggtcctaaactgcaagcctggctgttcaattcggacgccgccatgttag

SEQ ID NO: 39388 - DNA, 717 bp, Zea mays
  Peptide Sequence Number=SeqID_82763
atggcggcgaaaggacgccaacccccatggggttgcacccctccaacagcagcaagaagaagacaagatcagcgacaccaccccaagcgcacgctctccgacggtgaagtcgccggaagagacggccttgacgcggatccttccagagaacaccggcgcaccccatctggaggcccggaaggcggaagggcgcgaaccaatgcagcgactcgaggcagccccgcgtatggccaaacagtaccgttaagtacgacggtcacgggtcagtcagccgtgggaataggcacggcagttggcgtggtcataggcgggccggcagtaattgcagcagcaggcgcacggaagcagcggtctaaccaccaatcagactctggtcccacctgcaagctcgcatcctcccctgaggcgggaccgggggccactgtcggtaccctaaatcaggggtaccctctcatggagcatgaaggcatcgcacccatgcgacgcggcgtcaaggtcatccagcagacagcccgcctgctgggtctgctggtgaacagtatgcctgtgctgagcggcacgctatactcatcttctcttccgccagaagcttcccctgtacaccaaggatgcgcagatcttgggcgtcagggtgcaagaggattgtctcgacagcagatattagatgttccaagcactatattctttatgtccatgggcccacatgtcggggcctag

SEQ ID NO: 39389 - DNA, 153 bp, Zea mays
  Peptide Sequence Number=SeqID_82764
atggcggtggaggtggatggagcaataggagtgactggagcaggtgaaagggaaatagggtgccaaaggttcatctacaactattctaaatcgactgtccggaataccgtagattattccggacaggagaagctttttggaaaaacagactaa

SEQ ID NO: 39390 - DNA, 1203 bp, Zea mays
  Peptide Sequence Number=SeqID_82765
atgaggtttcgttttgagcgcgaggatgtcacgatcactgctagtcagatccgtcagctttttggattccctgattcgacgactcgccttcacagtctctgctacggcacttcagatcctccacgtcgccctcacggcggtgtggctccagggacagctcacgtcgcggctctgtttcgcccgcctttcacagatgggtcccgacgttctccagcagacttcactactgcagcgaagtacctgtatgagctcgtcaggcggacactcctgcctaggatgggatacagggaggctaccactcacattcagctttggctccttggtgccctggtatcccactctgagtttgatgttgttgactttctgatctgtgagattgaggatactgttctggatgggattcgtgctcgacggcagctaccgtatgctcactacttatgccacatctttgcgcagctgattcagccacctcgatttcagagcactcttgaggcctcacgccttgtgtttggatcttaccgccctgctcctaagattccagtgccagcttctgcttctgtgtttgactctcaggccgaggacgcagctctacgtcagtttgacactcagggtacagctgctgatgatgatgatgatgatgatgatgatgattttggggttcctcttccgcctccgcctccgcctcctatgcctccacgctcacatgatcatgaggctgggagttcccgtgctgcccctgctcctactccagctttggaccctgcccttgcttcaattcttcagactctcactcagcagcagcagactctcacccagcagcaggctcttctggcagccgagcaggcccgtttatccgaaaggatgctcttgatgttcagagcatgcaggacaggcaggatgcacttcagcagcagcttattcaggatagggcagagagtagggcattcatggctctcatgcttcagcattctgccgccagtgccaccagcatctgctgttcccactaccgctgtggcagtatctgtgaccgcttctgttccggtagctcctgcagcgctgcctgcgtccgagtcagtaccagctccagcttctaccgcagatcctggatccgagactgactctgaccctccgtcggcgttcgctctgctacctcgacctcgaccggatgcgcccccgccgcctcctcctgcttcagatgtttag

SEQ ID NO: 39391 - DNA, 1047 bp, Zea mays
  Peptide Sequence Number=SeqID_82766
atgcccgagggcggcacaagctcatgcctccctgggaagggccattcgtcatcgccaagaatatctttcgtgcttttcgactacttcgatagtgggatcatgaaaacgacgaagtacacgctcagacgtcgatggagggggagcagcagcaccctcggcgtcaactccaccttcggcgaagtccgaccgagcctcggacggcaatacggtcggaggatctccgctccgaaggacgacgtcagcaccacgcccgggccatcgccgccagggtctcttccaggaacccggcccgagcagatggctcggctggccgccccgaagcctcagccagctgtccctcgaggacaccagcccggctcgcggcctcggcaactcgactccggcgttggtcccgccagtggacgacccggccaggccccggccgacgaagcttcctttttcgagccaactctgcctctgtccacgctgacaccgctgcccttggccccgtctcaccgcagagcggccgatggtatgaacaacccccacattggagggcctgcggggcgacaaaacccctggtggctcgccgacgcccgctccggcagcagcgacaacgacctccacttcgagtggccaaacagcagcagtgatgacctcagggcggacgctgctgcgacgagctcctcgcccatgtccccactcaaggggcgaggacaagctatcaaagccaaagagccggaggcccagagcgcggatggtggcggcaatctcgtcgccaacgaggacttcttcagccgccaccacctcaacgtcgacgacggcagccatctgcccaccggcagatccccactcggatcctcccggacaggcgagcaccgacctccgcgcaagaggcgtcgtaccggagcaaaggcaggacaacccaagaacacgaacaccgccctagcagcgcgtgatgtcttgggcggccctctggtgcgcgcggcgcggcgaccgctcgtacggtgggagggggcaccgggggccgagctagagccagctgagccagcgagcccaacgcgctga

SEQ ID NO: 39392 - DNA, 372 bp, Zea mays
  Peptide Sequence Number=SeqID_82767
atgcaggcggcatgcaactgcaccaagggggcgcaccctttcgacttcaacgcgtccagcatggaggcccaggcccacacatcatgtaaccggcgcgccggttactacgtgcgagaaactgcaccgccactcgtgccagtaccgcgccttctcgactgcggaaccggtgccgcaactcgaggcgaccctgcgcatgacccaacagtgccaaccgagcacatcggtcacaggacaggcggcacctttggcaggcaaagcaggcgatgcttcacctccgccatgatgaccgcgtcaaaaaagggaccgagaaaggggatactccgaaagggatccttctccacgaaggaagcgggccccgagcccccctactga

SEQ ID NO: 39393 - DNA, 924 bp, Zea mays
  Peptide Sequence Number=SeqID_82768
atgaggcgaaaagacggcgggcatcccccatccgggggcttggaagatggaaggacgcagcaaccgcaccgccacttgcgccaccaccgcgcctcctcgattgtggaaccaacaccgcgactcgaggcgacccagcgcacgacccagcagcgccagcctggcgcgacagtcaatgtggccaaaggtggaccggcagtaatggcggtggcaggcgggcgggagcaacggtcacgtcgtcagccaagctcacgtcccatccgggagcagcacgggaaccccctctcacggcgtgaagacgacgcgcccgtgatccgtccctcgaacggctcgcgcacgcgcaacggccgccccgccaaccactcgcctcgtcgcattaactccgcgacaaggcaggcggcgcaggaaaggcaggcgacgctccgccttcgccgaaacaaccgcaccaaaaaaggctggccctccgaagggttcaacagccgcctcagatcgcgtgggccctacacccactactggtcagaggttcgaaggccggccccccgaagggttccacgaccgcctcaggctacccgggctccgcgcccattactgatcaggggttcgaaggctggcccccgaagggttcacagtcgcctcagacaccgagcgagggatgaccagggaatcccaccagagggaggcatcgagccctcggaccccgtcgccaggggagcgagtctggcagatcacccgcagctcaccggagacaccatgttcggtgcccatcgaggaggctcgggggctgctctcgcaaacccggctccggccacaccgttgacagcgtcaacataccagcccgagaacttgggccccgaccgtacacccgggctacggccagttcgcatgagggaacaaccaggccagccgaagcattacgcgaggcattaa

SEQ ID NO: 39394 - DNA, 129 bp, Zea mays
  Peptide Sequence Number=SeqID_82769
atggcgggcggaaatgcgctcgccggagctaaggaggggtggctggccggtgatgagatatggagccaggaaatcaagtctgtctccctgctcaaacccgaggcaaatctagggtttcgtcgtgtctag

SEQ ID NO: 39395 - DNA, 237 bp, Zea mays
  Peptide Sequence Number=SeqID_82770
atggccggcatagctccagccgcctcccactgctcttccctgcccaacctgggaacgcccagatcctcgtctctctgttccacgcgcccggccctacctctccatcaagctgttctccaggacgtcgctccccctgcggcctatggcctcgcccagatatggtgtatattgatgttgaatatgtgtgactgtgatggttcatttacgtgtcgcgagggtggttcacagaagtattaa

SEQ ID NO: 39396 - DNA, 387 bp, Zea mays
  Peptide Sequence Number=SeqID_82771
atggggaagaaggggagctggctgggtggaaaacgagtagggcgctgcagggagggcacggctgctcctcatccaagcaaggtgagcaacagcaggggtgccatgggaggggaggagccgagctccatggtgcagccgcttgccaggggaggaaaaagggcatcgctggcctctgcgagaaattctgggtgccatggaggaaatgcacgcagggcgttggggcctaggcgtccatggctgctggcttcctgtgtgccggccatggagagaaaggagtggcgctgggcagaggttcggttagaggtggaagaagggcttgggcgccatccatgggagcgactgctccctgctctggcctgcgtgaaggagcgtgggctgctgccatga

SEQ ID NO: 39397 - DNA, 441 bp, Zea mays
  Peptide Sequence Number=SeqID_82772
atggggatgattcgcaagattaatctaatgggtgtgcccctgcaggtcgaggatcttctctttaacatttacaggaaaaagcaaagaaagagaggatgctttgcatgcggggagaagggccacttcagggacaactggccaaatatggttgaacccataaagatgaggagcaaaggcaaggcgcttacaagtgtcaaaacttgggatgactcttcaagcgaagatgaaccttatggtaagagccttatcaaaaagaatgaaaaacttaaggttaagttagctagctctcaagaagctattgaaaacttgctagagaaaatggaaattcttagtgtacacaataatgagctaactactaagctagaaaacatcagtagcaccccaggagcatctttaattgaaattcctgaaatcattaagaaagatgcttctatttcttga

SEQ ID NO: 39398 - DNA, 387 bp, Zea mays
  Peptide Sequence Number=SeqID_82773
atgtctcagctaatgggcttgttggagactaccaagatcaccttagataacagagaggaacttgtggtagacttgtccactgagatggtggaaaaggacctgcaggtggaacaaatggccaaccagatccaggagcttgaggagctagtgggagccagggagaacaccattgaggttctcgaggatcagctgataaatactcaacaacaacttgaggaagctaaccagcacttggatatgcaccatcaggaaattcaggacatggaggccaacgaggatgttgacatcgagggaggagtggagccggagcccgcatctatcctggacattgctggctcagggagacccccttcccccgagtcaagcgttgcatcgtttgttcattaa

SEQ ID NO: 39399 - DNA, 537 bp, Zea mays
  Peptide Sequence Number=SeqID_82774
atgcggtcgcagcagctgaagcatgtggcccgacttcatcgaccatgtcgtgtcaggtgctctgactttggagcttgctgccgaagtcgagcgtcttcgggcgcagcacacggatggagaggttggctgctgcggaggccgagaagggggatctccagcggcagttggtggaggagaggagggacaagaacaaggccattgccgacgcccaggctgctcaagccgaggctaaacttgcgtgggcggaggcccagtctcgcctgccaacgcgccgaggagctggaggcgcggctcggcggcctacgcaaccgcgtggacaaagccgaggcctcgacgcgcgtggagattgagcggacgcatgcgcagctcgtggatgcatactgggagctgggtgcacggaccaccgccttcgaagcaaccggccaagaggtgggcctccgcttccttgagtggctgcaggcggagctggctatgctaccgacaatcgtgacgggcctcatgtcctttgcctccctcgtcacctgcgaggggccgtga

SEQ ID NO: 39400 - DNA, 141 bp, Zea mays
  Peptide Sequence Number=SeqID_82775
atgcggcttcatacccttagaggtatgaaggcagaggacatatgcattgcattcatatgcatcattgaagtgatatttgcagatgatgtggttttatacccccagaggtgcttgttgctcatcaaggggagtgggaagtag

SEQ ID NO: 39401 - DNA, 288 bp, Zea mays
  Peptide Sequence Number=SeqID_82776
atggcgtcgctcaccaacatcgcctgcgccgatggcctcttccgccgccaatcctcgccgtcgaatccaggcgacgaggacaatttgggtgtgacggaacctcccaagaacgtttcacccgtcttgcagacattacagaacatcagagataaagaaatgcggaagcttttacataacttacatttaattagaaagttgcagggaagtgaccaagtcttcataaccgcgaaggtagaagccatcctctcccgggttagactgaggacaacctctatccacaagatctaa

SEQ ID NO: 39402 - DNA, 297 bp, Zea mays
  Peptide Sequence Number=SeqID_82777
atgactcactggattgctcggtctacgcccgtaggcgggcgaccgaagtccagcgaggacgatcttggctttccaatgaagttctgccgggtccgagagcttgggaaacttcacaagctcttggcgaagctatccgagcggctggcacgacttggaagcgactgcagtgggctggccacggtggccgaggctcgggtggcaatggcgggcggaagagagctcgccggagctaaagaggggcgtctggccaacgaagggatcaaggtgaacacgctcggtctatggctcaagggctga

SEQ ID NO: 39403 - DNA, 279 bp, Zea mays
  Peptide Sequence Number=SeqID_82778
atggacactgactgcttcgacaccgggatggggctcaccccccagtggcaccaccgccaagcttgcctcgtcggcccatgcggcaatacgctggaccccagtgcgatgctccactcggagatcttcaagggtctttttcatcgcctccaccgcttgggagctcggagccgcctgcaccgcctgggctacctgcgctgcatgcgtcgcctaaaaaccggcgaacccgctcctctagtgtcctccagtttcttctccttctcctctgcctcgagctcatga

SEQ ID NO: 39404 - DNA, 720 bp, Zea mays
  Peptide Sequence Number=SeqID_82779
atggctgggcgtgcagaggcgcgtcagtcctcctccaccaccatcatcagacccgcctccaccaccaccaccatcaggttcgccaccgcctccccaggggcagcagcaccatcatcagcagcaatagcagcagcagcaggggcagcgaacgtcccgcttccagggtcgctggaaggtccaggggcccaagcgtccgctgggagtggtgccggcgacctgcctccgcctgccactgccgaggcggcgccgttgggcccccaggttccgtctgccactgccgaggcagcgccgttgggcccccaggttccagctgggggtttggaggcagtagtgccgctgacggctactgtagacccaacgacgtcgatgtcgtcgaatacaccgtcgataacggcgggagacgcggggggcgcgtccagctccatcccgccacccactccggaggagccggaggttattcttggacggcggctccggtccggcgtcgagccagaagcggcgccgactcccctccctcgggtgctatcccgcgctcatcaggctctccgggagaccgagctagcgatcctgcgggagtgggaggcgctcgcgaccgagcaccagcgcctcagtgattggcacgcgcagctagaggagcgcaccaaggccgcttcccaccaattcacctcggatcggtccgagcttgagcaagagcgcgaggagtacaaggaggacctctag

SEQ ID NO: 39405 - DNA, 873 bp, Zea mays
  Peptide Sequence Number=SeqID_82780
atgaggaggaggcggagggggagtcgagggcacgaggccggcgagtcggagcgcggagagggacttgggcaggtccccgtggaggtctccgatggcgacgagccaggatggggaagggaggaaggtggtcggagtcttcgggcgaggagggagcaaggaggaggacgggaaggtcgggaagaagatgtcggacacggcaaagtccacgaacgcgtcgacgaatgcagatacggcagccaagaggtcgctgcaggcggggacggggccgccgccatctttctctatttgtgctccggcagggattccccctcgcgcgacatggtggatgcacgggccagtaccggtgccgaggatcccacgaccgtggacgtagtcgtgacgcaactgatgccggaggaggcgctccagctctgcaccggctgcgtccacctctacactttcttgcatcgcctatcgctctgcaggaagcttttaagcggaacggtgttcttgtacaagcaatatccgttgagtatggctcgcaggggctttgtgttgatctcaaagattgtaaaaacagtgaacatcatcgatgccaaaatcagagatcggatgttaagatcctcgtgctccccgcagggcgcttcatgggtccgcagggctcatgggccaatctcattcgaggagcatgttgagcttgagaagagataccgggagctaactgacttgctggtcgaagcagaaaggagtaaagctactcgcagatcagcatcgtcgtgggaagaagatactaatatcaagaaactgactaaaaagctgagcgtttggcagtccgcaacagctttttgtggccagaagctgcaaaaagctgaaacaaacagaggtttctcataa

SEQ ID NO: 39406 - DNA, 684 bp, Zea mays
  Peptide Sequence Number=SeqID_82781
atgaaacgtaaacacacaagagcaccaagaaaaaagaatcaatgttcagaggaccatcagaatattgagattccatcagctgcgcgatgccctcccccaacctctgcccctgccatcagcactggagcagtggagctacagcagtccgagtgggtggaactgtggcgggaggcgtgcaagttggagggcgacctcgacgtgcagctctcctcctacgtgcgtctcgccgcgctctcctcctccgccgccgcctcgtgcgccacctcctccaccgtcgtccgctcctcctataagtctgtggagtttgagatccagtcgctgctcgacaagctacaacacgtcaatgacgccatgagatgttgcgtcgcctgcagccccaccaccacctccgtctcccagaagctcgcacagcaccacaacatcctgcatgagttcacacaggtccgctcctctcactctcgtttcattgaaacaccggttagtaatcgcctcaagtggtggctagcccattctttaatggaagcaggagttcaggaggacgaggggaacctaagctccatgagggagcacactgatctactcagctccgcccgagacgacagtccagggttcgtttctttcgtgataacattagcctttcccatctcttcagataacattagccttcccacttcagaaatctga

SEQ ID NO: 39407 - DNA, 429 bp, Zea mays
  Peptide Sequence Number=SeqID_82782
atgaaccacgccagcaaccccgccattggcacgacggggcgtggtccagcacgaggcaaggctcaggatcccccagagggtagaaggggatactggagtcgttgcccatctctgacgacgaacccaccgtgctgggggaagagcctccccagcgcgacgcacgacgacggtgaaataggcactgaaacatgcaacgacaccacaaggccgaagaacgagatctggcttagcccatctctcaggacgaagcttcagaaatgggggagacccctaacgaaaaaacacatcgagaacggcgctactcccactgccgcgatcgtcgccaagcataggagcgtgagtgggaacaagcagaaaaagatgctaggctccggcgggagaacccactcctcacctggaacttataccctaacttcgcttgggcgctga

SEQ ID NO: 39408 - DNA, 357 bp, Zea mays
  Peptide Sequence Number=SeqID_82783
atgggcaagactaacaaacgcaagcgcgagccgactcctccatcggaggacttcggcgactcggaatactcggaggaggagttctcctccgagtccgaggggtctccgactcccgtctctcccccggcgtcgtctgatgattcagacgactcccaggggattgccgcggaggatgagtcggagtactcctcggatgaggaggactcttcggactcgtccgaggagggcagcggcggtgatggcggagacgacgacgacgacggaggcgacggtgacgacagcagcaggggcggtgacggcggtagcaagggcggcaacggcggcagcagtaggggcaacaacaagaccagtggctag

SEQ ID NO: 39409 - DNA, 141 bp, Zea mays
  Peptide Sequence Number=SeqID_82784
atggggaggctagaaccccacgcaaaatgggaatcacggcttgtgggtaaagtgtgcaacctctgcagagtgttagaaactggaggtgaagctggcaacatggatgactttgaggagttccaggaatacgacgagttctag

SEQ ID NO: 39410 - DNA, 252 bp, Zea mays
  Peptide Sequence Number=SeqID_82785
atggcgaccaagtggtcaggctcctcgagttctataaggttgaagaccctgagcatctgtttgaggaactggggtgtagttcgcttcgccgtcgtgccgttaatggggctcggtgtatgcggctcgctctgccaagatgatgatgaggataatgctggtttctattgtgtttatgattatgattatggtaaagaagaaggcgtcgaggcagatctccaggagttccaggacttcgacgagttcgaggattag

SEQ ID NO: 39411 - DNA, 1443 bp, Zea mays
  Peptide Sequence Number=SeqID_82786
atgcatcgcgtctttccaccttccgagcccctggatggggggtgcccatggtttttccgcctcgtcgttgtcggaggaacacaacttcgtggaagttggtacctttcagccatcgttcggcttcaaggattttcattggatagcccggccgcatcccctcgccggtggtcacccaagacggtgaccaccagttcgatggtggggagaagcgagccgggctgcgatcttggtcccgccctcagtttcaaggatcttcatcatcctggctggggtggaggccgggctgagccggagctctacctcctgcgcggggagagggcgctcaccggcctagcgggagggtcggacttcgacaacgcggagctggtcggcggcgagcgtcgtcagcttcagcgcgttgggctcgctggctcagctggctctggctcggctctcggtgccccctcccgccgcaagagcggttgtcgcgccacgcgcaccggaggaccgcccaagacgtcgcgcgctgctagggcggcgttcgtgttctggggctgtcctgcctttgccccagtacggcgcctctgtgcggaggtcggtgctccgctcgtccgagaggatccgagtggggatctgccggtgggcagatggcttctatcgtcggtgctgaggtggtggcggctgaagaagtcctcgtcgccgacgggatcaccgccaccatcctcgctccgggcctccggctctttggctttgatagcttgtcctcacccctcgagcggagacgtgggcgagggcattgttgcagcggcgtccgccctgaggccatcgcagccgcagtttggccacctggagcggaggtcgttgtcgctgctgctggagcgggcggcggtgagccacctagagcctgtcgccccgcaggctctccggtgtggagggaaccctcggccgctcttcaatgagccgaagccggaggcagcgatgttagcatggacagaggtagagttggctcgaaaagaagacttcgtcggccggagcctggccgggccgtctgctggcgtgatcgacgccggagtcgagttgccgaggccacgagctgggctggtgtcctcaggggacagctggctgaggcttcggggcggccggccgagccgactgctcgggccggattcctggagaagatcctggcggcgatggcccgggcacagtgctgacatcgtccttcggagtggagatccttcgaccgcgttgccgtccgaggctcggtcggacttcgctgaaggtggggttgacgccgagggtgctgctgctccccttccgtcgacgtctgagccttcaggattggttcatcttgtaaaggtgatgagtgaggtatctgtatcccggaggcgtaggagtccctcggctcggtcagtcttggctgcttacatgtactccatcgttttcaggatcccactttcgaagtag

SEQ ID NO: 39412 - DNA, 393 bp, Zea mays
  Peptide Sequence Number=SeqID_82787
atggccggagtttcccaacttcttgcccagatgctaagttctcgattccttggtgttacacgtagagggggtaagggaaatccgatggtgggctttttaccttggtttatgcggcgtcgactctgcccacggaagaaggcggacgcgcgacggtgccccagcttcgacgagcgattcacggagccccagctcaccaacaggcacgggaagaccaccaaaaagcgcggtggaatgcaagcgaatcccccacgacaacaagatggattcccggcgtcgtcaagaagggaatcaccggtggcggcgggattcacaactctctcttttcgatctctctctctcgcgaagaaaagtggatgggtggctggagaattctccggggatacgaagcactga

SEQ ID NO: 39413 - DNA, 411 bp, Zea mays
  Peptide Sequence Number=SeqID_82788
cacgctctacctcaacgttgctgcggatccgatcgacatcaactctccatcaagccggcaggtccccggcctagccgaactgtcctacgcgacaggcttcaattcctctgctcatccgagtacgcgcttcggcctccatgcttcacaatctcgcgtgaaggcagcgcctcgtggccccgaagatgccagtcgcacaccaggcgatatctactgtgcctcgcgcggccatgtccaggcggaggagggcggttggcccagacgcagtcgtatctgcggattggaagaaagcgccacgatccacaaatggcgtgggcacctccttgaccggttgtctgcttcctttctctgctctctgattgcgtgggataagaacgaggctcctcacctcctcaagactcgccagggctgcat

SEQ ID NO: 39414 - DNA, 1602 bp, Zea mays
  Peptide Sequence Number=SeqID_82789
atggacaaggaccgccagggggctgcgcaaaagcggcaggcggctatcaggattgttgaagccaggccaaagaggcaaaagcgggagtcggcgaaggctgcggcccccggcggaggcaagccgccgctggcggcgaagtcaggcgtccctgcatctagcaaggcgccagaggcagcggcgggcgccggaggctccaaaccggcgaaggctgtgccgccgctcagcgaggtggcggaggccgcgaaggcggcccgagcgctgccgtcggcaggcaagcgtgtcgccgacttcgccaccaacatttgtgtggaggactatcttggtgggtcggacgagggccagcttgctatggttgcgcctgccgcggcgatcgcgacggctggcatagtgccgaaggcgaggggcgaggctcttggctccggaggcgaggtgtcggccctcgcggttgtcagggacgaggcgggcgcagcgacccgccggctgaagggagtgacggaggcgctgagtcaggcgacggaggcgctgagtcaggtggctgacttcgccagccgtgctgcgtcgggggccctcatggcagctgtatctgccgaagtcgagagacttcggacgcaacatgctgacgctgtccgtgagaaatcagcctccgacagcaagtgccggaaactgacggacaaggtggccgtgctggagaaggagaaggctgaccttcggcgccaactggcggcggagaggagggaggccaacgaggccatcgccaaggagcaggctgctcaggcgaaggccaaactggcgcgggcggagggcaatcttgccaaggagctcgccgaacatctgcaggagcggctcaccgccctggagagccgcgcgaagggggccgaggccgcggtgcgtgcggaggcagaacggacgtgcacacagcttatggatacatatcgtgagctgggtgcgcggaccggtgacttcgaggtgccggaccgagagcccgggcttcgctgtctgcagtgggtgcaggaggagctgcaggaactccccgctgtcgtggggggttttatgtcgtacgcctccctggtcacctgcgagggggcgatgaacgcgctctcccgtgaagggtgccgacacttcgaggtcttcgaccaggcggatgaagattttgatcgagatgtctataaggttgaagacctcgtggtgaaggattctgccggggccctctacgaccggatgtggggtccgcacggtcgcgaggtggtcagggagcgggcggagacggcaatggctcaggcgtcgcgtggcgagcgggtggacgacctcggggcgctgaacagcgcgctacctgacccggagccgacccctgcggaggccgtgtccggggtcgccctggagccaacccctgagaccgcggcgatcgcggtggctgcccccacgtccgctacggccggcgaagacctacccccaaaggtggccgaaggcgcccctgatgcccccgcagctgttgtgccgtgtgctgaagatcccgcggcggagacggcggaaacaacagcagaagcggcggcggagcccgcggcggaggctcccgcagcgtcagggccttcgcaggtggcatag

SEQ ID NO: 39415 - DNA, 525 bp, Zea mays
  Peptide Sequence Number=SeqID_82790
atggtatgtgcaacccctctcaggggggctcggggacacaaccgagccctcggcctcggtcgcggctctcagcaggaaacaatcaagcacaagtcaataacaaagtacaaaggccatgctgtctacaggacgcgaagacaccctccacagcatgcaagcatgccccgtctacaaggatgcgctccccttgggcatataaataggttagtctacgacctctctagggttggcactgattccattcatcatggcatgcctatatcattcccaagggagaattctctcaagggcatgccatcactatcagggcagcataatcagcatccaagtgtacttcttcgttgtgaggcggaagtggtcgccgcactttctgaggttccatgtgatcctagcgatccttctagacactggctcccaagcagtggccaccatgtgtacctggatgccaagcatcgtttatcaggggaagccaatgcagtacttctggatgtctatcgcgttcatacagatcttcacagtgcttga

SEQ ID NO: 39416 - DNA, 2616 bp, Zea mays
  Peptide Sequence Number=SeqID_82791
atggacggaaggcacacgctacaagacgctttgaccctgcaggctcgggtcttgacgctggaagggggtagcaacaccttcggcatcgacgacaccttcggcgaggcccgacctagcctcggacggcgacgcggtccgagggtctccgctccgaaggacgacgtcatcaccacgcccgggccatcgctgccggggacttcttcgggaatccggcacgagcgggcggctcggtcggttacccctggggcctcggccagccatcttccaagggcgccagcacggtccgaggcctcggctgatcaactccggcattggtcccgccgacggacgacccgccgcgccaggcaactgcaccgccacttgcgccaccatcgcgcctcttcggttgcggaaccaatgccgcgactcgaggcgacccagcggcgccagcctgacgcgacggtcaatgcggccgaaagtgggccggcagtaatgacggtggcaggcgggcgggagcagcggtcacgtcgtcagccaggctcacgtcccatccaggggcagcaggagagcctcctctcacggcgtgaagacggcgtacccgtgatccgtccctcgaacggctcgcgcacgcgcagcggttgccccgccaactactcgccccgtcgcattaactccgcggctggacaggcggcgcttctggcaggcgcagtgggcgacgcttcgccttcgccgaaacaaccgcaccaaaaaaggctggccctccgcggggttcaacagtcgcctcagatcgcgtgggccctacacccactactggtcagaggttcgaaggtcggccccccgaagggctccacggccgcctcaggctactcgggctccgcgcccattactgatcaggggttcgaaggctggcccccgaagggggactgggtccggcagatcacccgcaggtacttttgggcgtgcctctgggcccctagccgacccccaacgaacggggcacggacgcccactcggattacccgcttgcagctcaccggagacaccatgttcgatgcccatcgagggctcgggggctgttctcgcaaacccggctccggccaaaccgttgacagcgtcaacataccagcccgagaacttggaccccgaccgtgcacccgggctacgacctgctcgcatgagggaacaaccagaccagccgaagcattacgcaaggcattaagacctcgaaggagtgaaaccactcctccgaggcctcgggggctacacccggcgggtgcgctcgcgcgcaccccccggaacaaaatgcaaccgagaaaggctggtccccttgcaaaaaagtgcgacgaaagcctccaagcgagtgctaacactcccttcgaggctcgggggctactgtcggggaccataattaggggtaccctcaagacgcctaattctcagctggtaacccccatcagcataaagctgcagaggcctgatggggctcggacttgggctaagccccagaagacgacgaactccgcttcgcccgaccccagggctcggactccgccctggcctctgccgaacgaccttcgcctcgcccgacccaggagctcgggctcggcctcggccacggaagacagactcgacctcggcttcggaggagccaccacgtcgcccgacctagggcacaggcccgccacgtcaacaggaagcgccatcatcaccctaccccgagccgactcgggccgcagagaacaagaccggctccgttgctcctccgacagccacgacatcacgccagctgggtgccaagatctctccggctgccacattggcatggccttcttagagaaggttggccgcgcggggacgaggacggggcaggcgctctcttggggccgctcgcttccctcacccgcgtggacgcttgtaaccccctactgcaagcgcacccgacctgggcgcgggacgaacacgaaggccgcgggatttccacctctctcatgcccgtctccggccgcctcgcttccccccttcgcgctcgcccacgcgctcgacccatctgggctggggcacgcggcacactcactcgtcggctcagggaccccccggtctcgaaacgccgacaaaaacacaaatggcaaagtcgttggtccacccaaggcatatcacctcagtatggaagaacggaagtctgctttactgtacatgttcacgaatatgcctgaggtggagaaatactttgtgatgccgccaaaatcaaagaagtcagtgaaggggttgttcaagggcctgggcctttttcaggccaattcttctagcagcagcagacgtcgagagctgttgagcacggatgagcagcacactgaggagcagcacattgaggaggagcagcacaatgaggaggtggagcacaatgaggaggtggagcacaatgaggaggtggagcacgtgacatgggaccaggccgcacagcatcaccagccatgggaccagtgggaccaccagagagagcagcaacaggcgtgggaccagtggggccaacagggcgaaccggctgacaacccgatggatgatggctcgggaggctcttcagcgacacgcacacgtcgctcaagaaaaagccacttagtaaagcctcgtcacgcgtga

SEQ ID NO: 39417 - DNA, 189 bp, Zea mays
  Peptide Sequence Number=SeqID_82792
atggtgctggcctcctccttcgaggtggagatccttccgcccgcgtcgccgtccgaggccgggccagacttcgccgaaggtggagacgatgccgagggtcctgctgctccctttgttgatgacttgttcgccggtaacagaatcgtttatccgagcgagagttacttttcacggaaggtgacgagtgag

SEQ ID NO: 39418 - DNA, 312 bp, Zea mays
  Peptide Sequence Number=SeqID_82793
atggggattggttgtctacgagacggaaattggaataaggattacagtgtgataccgtgtgtcaagcgtttgaacgtactaagcacataccgagaaatatgtttcattcgaaaagccactaaaagcaggtctaggggtgctttcagatttgcactacgagaaagtcggcttttagaaaaagctgcttcctggatccagccctttggttctttggaggacatggttgctggagtgacttggttgtccatcttgccaccgggttggacagtcgagtgggaccctacctcgggagaggaggagcatgaggagtga

SEQ ID NO: 39419 - DNA, 835 bp, Zea mays
  Peptide Sequence Number=SeqID_82794
atgaatgtcgacgagcagggttcaacgggcaggggaacgggcgcgatcgtcgtgctgcgcggatggaactccggcggggaaacgcggacggtgaacacgagctccggtgagtctccacagacggcggggcggactgcgatggcgtggtcgaactccggcgacgaacagcgacgggcgcgtgctgcggtcggctctgtgtgcactgtcgcggcacggggcagggcggcttggccgcttggcgtgcaggggcccgtcgcgcggtgcaggtggcgcgcacggcgcggcatcgggggaagaaggggcagggcgcgcttggctgcttggcgcacggctctgctggcgtctaggcgggcgtcgaggcggggtcctgggcggtcggcctggagtcgtgtcctggcgctgcaggggagggagcagggcgtcggggcgctggcggctcggccgtctggaggctgcgtcgcgcaagagagagagaagcaaggggagagagaggaacggaagggagagaggaagcggcggtggtcagagagggagagatggaaaggtggggcccgcgcgcagaaaggggagaagggggattttcccctggcggcggcggcggctggagactggggcgcgcgcggcttagggctttctggtgaaatattgagcagtaggtcctggccgaagacccttgatcatggcctcaatgacaatttcattgggcactataggcgcttgttccctcagtcgcaagaaccttcatatatatgcctgaaggtattcttcgtggtcttgcatgcattggaacagggcctgagctgtgactggcttcgtttgaaagccttggaaactg

SEQ ID NO: 39420 - DNA, 604 bp, Zea mays
  Peptide Sequence Number=SeqID_82795
atgtcaaccgtccccatcgattccctgttcgcgtccaggcctcaccgccttggcatacaatgctccactgaccccggctgccgccgtgcagtgaccacacttgagggggagctcgtcggcggcgaggagtccggcctatccagggcacaattgaccaatcaaacgggccagagagcttcaccagggatcaaggaaggcgggcgaccgaagtccggtgaggtcgatcttcgccttccggtgaagttctgccaggtccgagggcttggaaagcttcacgggccaatggcggagctaaccgaagcgctggcgcaacttgggggtgactggagtgggctggccacggtggccgaagctctggcggcaatggcgggcggaaaggagcttgctggagctaaggaggggtgtctggcttgcgatgcgtcgagcacgaggcagcgcagagagaggttgagttcgagcgcagattggccccaaatctttgagattatggccatgatcccgttgagagatctcttcctctcaggttcctttgtcggagaagatctctggtttgacgtgtccaaggcacgcgtcccgatgccatcttctggcacaagacagagag

SEQ ID NO: 39421 - DNA, 698 bp, Zea mays
  Peptide Sequence Number=SeqID_82796
gtgtcaaaggatcacacttagccaatagaaagaccaagtgttgggttcaacaaaaatgcaaaaggagcaacccaaaggctcctctggtctggcgcaccggactgtccggtgtgccaccggacatgtccggtgtaccagaggactcaggtttcaaactcgtcaccttcgggaatttccagaggccactccgctataattcaccggactgtccggtgtgcaccggacatgtccggtgctccaaggaagggcggccccaggaactcgccagcctcgggttttcattccagccgctccgctataattcaccggactgtccggtgtgcaccggactgtccggtgcatctgcggagcaacggctacttcaggcgccaacggctacctgcagcgcatttattgcgcaccagcgcgcgcagaggtcaggcacgcccatgctggcgcaccggacactctacagtacatgtccggtgcgccaccggacatcaaggctggcccagaagtcagaactccaacggtcgatttccaacggcactggtgacgtggcgggggcaccggacatgtccggtgtgcaccggactgtccggctacgaaggaacaagaccggtgtcccatctaaggttactctgggctcaaggcacttccccgacggccacgttagctcgtgtacagggctcaaggcgcttctccgatggccacgttag

SEQ ID NO: 39422 - DNA, 450 bp, Zea mays
  Peptide Sequence Number=SeqID_82797
atgggaagctccgcctcgcccgacctagggctcggactcagtctcgaccccggaagacggactccgcctcgcccgaccccagggctcggactcagcctcggcctcggaagatggtctccgccttgcccgacccagggctcggactcagccttgaccccagaagacggactccgcctcgcccgaccccagggctcggactcagcctcggcctcggaagacggtctctgcctcacccgacccagggctcggactcagcctcgaccccggaagacggactctgcctcgcccgaccccagggctcggactcagcctcgacatcggaagacgaactccgcctcgaccgaccccagggcccagactcgacctcgacctcggaggagcctcgcctcgcccgacctcgggctcggacccgccacgtcacagggaaggccatcattaccctacccctag

SEQ ID NO: 39423 - DNA, 117 bp, Zea mays
  Peptide Sequence Number=SeqID_82798
atggctagaataggccaagtgcttgatctaagaatagaaaggaatctagatgcaggtgatgaaactgctgagttctgttgtttctactccaaggttgttccaaagcaggaggaataa

SEQ ID NO: 39424 - DNA, 330 bp, Zea mays
  Peptide Sequence Number=SeqID_82799
atgggtacggcctacgcgctctacaccgtcactggcgatcgccagtatgaaacctgctccaccgattttgagaacgacagcgacttccgtcccagccgtgccaggtgctgcctcagattcaggttatgccgctcaattcgctgcgtatatcgcttgctgattacgtgcagctttcccttcaggcgggattcatacagcggccagccatccgtcatccatatcaccacgtcaaagggtgacagcaggctcataagacgccccagcgtcgccatagtgcgttcaccgaatacgtgcgcaacaaccgtcttccggagactgtcatacgcgtaa

SEQ ID NO: 39425 - DNA, 261 bp, Zea mays
  Peptide Sequence Number=SeqID_82800
atggctggtgtaacagatgggtccggtgatgagagtgagggcttggacattgaagaggacggcgaagagattaggccgatgaaaccaaaccatattgcctttgggaagtcaacaatcggaacctgtcatatagaagtgttgaagaattggcattgtataagcgatattgacttagttcttcttggaggtgctaacaatgttcatctaagtgctagggaacttatcaagtcaagccaaaatgtactgaagaaggttggctaa

SEQ ID NO: 39426 - DNA, 840 bp, Zea mays
  Peptide Sequence Number=SeqID_82801
atggaatgccgtttttatttcccagtcaaacataaaggtcttgctggtgccacagcagatgtccattgctacgatgtgtcattgaacaagtggagcaggcttaccccacttggcgagcctccttcaccaagagctgcacatgtggcaactgcggttggaaccatggtggttattcagggccacgaaacatccaacctttctaccgcgcccgcgaaaccttctaggaggttcctgtcgtctccgtgggcgccgtcatgggtcaaggaggcccccgaccccctcttcaacgctgccctccaggagctccggctagacgccaccccccctaatctgtctcccctcagtgacaccgacgtgcgtggaagcgttgcggcgaactgcaggctatgggacgacctttatgtgactacgctgttgctgggtggcggcagccgcgcaggatggcgcgcaccgcgacgcagtccgcgaatgtgcgccgcaccccgcgcagcgacgtcgtgtacagcaccaccgcctgcggccgaggcgcacgcggctcgtccgcgagctgatgctgctggtgctgctgtcgccacctggacgcggccgccggccggtgccccgggtggtggtgaaatctttcggtttgaagcccgattcagcgaagtttggaaattactactaatccttacaaatttctcaaaggaggtttggtttaattcagctcttttcgttcaagctcgtgcaacaggatgtttgatccttatacaatttgctggcgagtccattctgtggccatattacctgttcagtagagatgatggaagcagcagaatggtcagcaagggtcctgactcctga

SEQ ID NO: 39427 - DNA, 495 bp, Zea mays
  Peptide Sequence Number=SeqID_82802
atgtacatgaaaccgaagcaaatgccaactctaggatctttggctgacattccaaaaagtgaacggatagttcctctaatcaatgctttattatttgacaacatagaggataacgaaggcaaagctaacttgggggcttcggaaaaagaagtcatggtagcatcggcaacgctagaggcggtcgacctgcacgaagaagttgtaacggtgatagttgaggaggagagtgcaagcacttcgatgactataggaaaattgaaggaactaagtccaagtgagcttaattggaggctagaaagtgcaagttgtggtaaaatgcaaaatgtgcattttagacttggtttcggccatattaaaaaattatggcaaagagtcatatggaagctcccaagaataactgaaaaagattggaggacttgggctcaaaagagcctaagttgtgttggtctagacctcattggacctgtatggtggtgcacgggacaaagtccatag

SEQ ID NO: 39428 - DNA, 183 bp, Zea mays
  Peptide Sequence Number=SeqID_82803
atggtggagctcgcgggcggcggcggcagggacgcgggggccatggaccgggagatgcaggcgaaggcggaggggatgaggcgggtgctggagatggcggacgcgcgggccatggactgggagatctggggggctccctgttccaagctgtcacgtcgtgttgttcgtatcgtttgggagtag

SEQ ID NO: 39429 - DNA, 381 bp, Zea mays
  Peptide Sequence Number=SeqID_82804
atgaagcaatcggcggttgctgctgcgcaagccctccttattgccttggcgatcgccgccctggccatggtggtggtgacggccgacccggcgccgccgccggggtacacgaagcaggaggatgtgggcagcgacttcatcaagcaggtgggcaagttcgcggtgaccgtgtacaagatggctcacatgataccgatgagctacctgaggacgttgcagtgctggtcgtcgccggcgggcggcggcgccaacaactactggatggtgctcacggcgaccaactggaccggcaccgccggcagctacgtctccaccgtgtggggcatcccgggctccgagtccaggacgtggaagctcctcaccttcaatggcaccatgtga

SEQ ID NO: 39430 - DNA, 354 bp, Zea mays
  Peptide Sequence Number=SeqID_82805
atggacggtggtagttcgatccatcgtacgttcttcgagagaggcagagagcgcgcccagcaactactggttcaggtcttcggcggcgtcggcgtcgcgcggaataacgaagccggccggcacgagagtgctccggagaggcatgcagttgagcattcgagagcccacaagagcctcacagctcagtgggccccacaggttagaatgattcgctattctagcgaagggaaggatgcaagcctcttcctcatgacgaaggcacacgagatgaagacagatctaaagagaataagagtaaacgccgaagctatcaccagatggacaactttggctcataacggagatgaagtataa

SEQ ID NO: 39431 - DNA, 957 bp, Zea mays
  Peptide Sequence Number=SeqID_82806
atgagctttagcgccgcaagagtctcggagcatggcggcgagttcgaggaggcaagggggatgccggcagaggtgagctgggagatgctcgacaagtcgcggttttttgtactcggcgccgcgctcttctctggcgtctccgcggcgctatatccggccgtcgtcctcaagacgcacctccaggttgctgcccccgcacaggccgcggcctcggcggcagcggcggcgattctccggcgcgacggtccccgagggttctaccgtggcttcggtgcgtccctcgcgggcacggtgcccgcgcgcgctctctatatggcggcgctcgaggccaccaagagcgtcgtgggctccgccgccctccgcctcggcgtcgcggaaccggccgcctcggctgccgcctcggccgcgggcggcgtctccgctgccgtagccgcgcaggtcgtctggaccccggtggacgtcgtcagccagcgtctcatgcttcagacggcgcccctcgctgccgcccgctaccgcggcggtaccgacgcgttccggaagatcctactcgcggacggcgtgcgcggcctgtacccgcggcttcggcatctcggtgctgacctacgcgccctccagtgccgcgtgcggctcctctggcgcgccgtcggccccgcggcgcacgacagccgcggcgccgcgatagccctgcagggtgcgagcgcggccgcggcgggaagcgcggcggcgctggtgacgatgccgctggacaccgtgaagacgcggctgcaggttatggacgctggggcgcaggcgccgacgctcgcggccgcggcgcgcgcgctagttcgggagggaggttggtctgcttgctaccgcgggctcgggccgcggtgggcgtccatgtcgctgtcttcggccaccatggtcaccgtctacgagttcttgaagcggctctcggccaaggaaggctccctctaa

SEQ ID NO: 39432 - DNA, 282 bp, Zea mays
  Peptide Sequence Number=SeqID_82807
atggccactcagggccagcatgcggctccacgtagacccacccgaggggatgtcttcagcgtcgaaggttcgaccaaagtcccccaccgcctcagacaaagcattgagcttggcggtcttctcatcgacgtcttgggagagcatccgggacgtatcgatggaaatatcgaggtcccacttgtggcggaactgcccgaattattccaacttaagtgcctaagtcccgccttagaggctagaccacacttaaatgggaataacgcgtcaatccctcggatctag

SEQ ID NO: 39433 - DNA, 693 bp, Zea mays
  Peptide Sequence Number=SeqID_82808
atggtccgtgataatggagtttgggatgtcgaaacgatggatgatgttcgtgaagaaagccaccgtatgctcggacttgatgttagtgaggggccagacctagatccacttggaaaatttgtcgatggcaaccaacaggtgtgtgaagcccctgagcaccttttacagaggaccaacgaggaccgcacaatctcagtggcatcgaaaaccacagttgaccagtataacccttgtctgaaggcatttccaacgagggttcgaggcaccttgtggctctccggctggaggcgtgctagtgtctggaccaggttcgagcgcctctttgattgcaatagaaggagatgtctggttcctctatttgcatctttgaatacgcagagagttgaggccagagccgagagctcagtctcgtacccaagccctcttgatggggaaggtgtccaaatcatagtggttggagaagtggccaaagccatgctcgggcgaggcagaagtcttcccgaggccatggccgagccttctctagggcttgatgccgtgcaggacacagtcaaaggagtggccttctgcggcattcatggggagcagcctttgattgaggcctggcttggggttgtcttcttttcccaagacaggcttgagcgaggcaaaaatagtggttccatggagagaggacctcggtcgagacaatga

SEQ ID NO: 39434 - DNA, 357 bp, Zea mays
  Peptide Sequence Number=SeqID_82809
atgacggtagaatggaaatttagttcccatcttgttcctaaagaacatagggttagacgaccactaatcagggagacatgtctatgcaagaatacaaccaagagcttcataaagatgaagatactcttggagctaacattgcatgtatcgatgatggtgatgaagaggttcttggtacaacatcgatcgagacagtctcctgctagcctttacaagaatgagaatgagaagaagtgtgagaaagaaaaccaatcacaagagcgcaagaacgtagcaacaactcaagcacaaactctctgcaaggcactaagattttctagctcaattctattgaatgtggcacttgggaggctttga

SEQ ID NO: 39435 - DNA, 552 bp, Zea mays
  Peptide Sequence Number=SeqID_82810
atggctgctggagctcactgtgttgtacaaccatctgcaaagggaatggagtacacatggtctaaccgtaggactactgctgatggggatcttggcgtttccattagtgcacctggtggtgcagttgctcctgtaccaacttggacgcttcaatctcgcatgctcatgaatggcacttccatgtcatctccttctgcttgtggtggggtagctcttcttgttagtggcatgaaggctgaaggcattccattaagcccttattctgtaagaaaagcaatagagaatacagccgcatctataagtaatgcacctgaggagaaactgaccacaagaaatgggcttttgcaagttgataggcgtccacgcaccccggtgcatgttctgccgcacgcatccgccccgcaaccgcccacgacgaaccctcccccgcataccgccggcagccccatatctcgcagcccccagatcccgctccggctcctcgccagcgcaaaccacgcggcaccctcgacccatggagcgtcgatgtgcccgcataatctgaactactga

SEQ ID NO: 39436 - DNA, 243 bp, Zea mays
  Peptide Sequence Number=SeqID_82811
atggtcaagatcgctcagggaggcgagaaaggagcactccttgatcttcgccttctagaggtacttcttcttgagtgcctccttgtcagaccaacccctagacttgtgcttgccagagatgtgctcctgcttgtcgttgcaccgacaagagtggtggtcgtgcagactagcatacttgatgaggacatcctccactattacccattggcaaagacgcaattggcccagttggctcaattgtag

SEQ ID NO: 39437 - DNA, 477 bp, Zea mays
  Peptide Sequence Number=SeqID_82812
atgggcattggtgatgatgcggtgagtggtgacgacaagcacatccacgacgactctactttagaggtatctcattccaccgatgatcttgtcgctgaggtagaagaactgatggctgctttggctagtcatgataagtttcttaggcttgctcatgccaaaggttcatctacaaactatactaaatcgactgtccggaataccgtagattattctggacaggagaagcctttcacaaaaataggccaagcgcgaaccgtccgggcctttgcggcggaccgtccgcgacacctaaataaccctcagacagaaccaatgcaaaaactcatgtctctactgcggaccgtccgatggaagagcaagcaccgtccgagaccacgcgcggaccatccggcctcaggtgcggaccgtccggggcggaccgtccggaccaggggcgcggaccgtccgcggtcggcagaaaggagcaacagctag

SEQ ID NO: 39438 - DNA, 1056 bp, Zea mays
  Peptide Sequence Number=SeqID_82813
atggaattgaatgggattaaggatgttaaaatcttcttctatttaaaattaaataaaaaaggtgggcgccagcgccaccgtcggcggcgcgggagaggccgaggcggcgacctggccaaaccatccttctcgtccacgctgctggacgccatctgcgattccttggacgagcaggccggcggccacggagcaacggcggagcgtgccacggcaccgacgcctcggagcgccaaggagcaacaccaggcggccctacattactactactacaagcccttcttggccgccagccaccgggcggcgcgcgcggccccttcgcctgcggacgactgctcctccggccgtggctacttctcgtcgtccgaggtcgagtactccctccgccgcctccgccccatccgaacctcagctggcggcgttgggccggcctcggtggctcccgtggagaagcagaagccggccccgccaggcacggcgaagagggcgcggaagccgtccgccgcccccgccagcggcggctgccgcaggccggcctcccccggcgcgcggctcgccagccttctcaacgccatattctccggcaagcggaattctgcgcggcagcacccggctccggcggacgaggagccggcgtgctcgacggcgccatccaccgcgcgcccctgcctcgccaagacaccgccgtccgcgagggcccgggccagggcgacccggaaccgtagcaggaccgtgcggttcttggacatcgaaggcgaggtggctgtggctgcggccgccgctggttgcaggcgattcccggtggtggaagtggaggacagcgacggcggcgaggagagcagcgacgcgagctccgacttgtttgagctagagaacctcgcagcccttgctcccgcgaacggcgggcccggttgccgtaggacgtgcgagaacgagcttccggtgtacgggacgactggagctggtcttgggaacgacagtagacttgtccgtcgtcgacgcccgtttgggtacgtcagccatggtcggagttgcagagggttgtttgatttcaaatag

SEQ ID NO: 39439 - DNA, 693 bp, Zea mays
  Peptide Sequence Number=SeqID_82814
atggtgcctcctgtcgacgtggcggtctgtgccctaagcagggcgacgtggggggcggagtccgagccctggggtcgggcgaggcggagtttcgtcgtcttccgggttttagcccgagtccgagccctggggtcgggcggagcggagttcgccgtcttccgggttttagcccgagtccgagccctggggtcgggcggagcggagttcgccgtcttccgggtcttagcccgagtccgagccctggggtcgggcggagcggagttcgtcgtcttccgggtcttagcccgagtccgagccctggggtcgggcggagcggagttcgccgtcttccgggtcttagcccgagtccgagccctggggtcgggcggagcggagttcgccgtggcgcctttggcaaggcctgattgcctgtcagacttcactctgtcgagtggcactgcagtcggagtggcgcaggcggcgctgcccttctgtcagactggccagtggagtggtggagtgacggcggtcacttcggctctgccgggggcgcgtgtcaggatagagctttatgctgatgggggttaccagctgagaattaggcgtcttgagggctcggagactactgttggggaccataataatgggtaccctcaagacgactatttcagcccgcaagggatcccccagcagcatgatgctgaggaggcctga

SEQ ID NO: 39440 - DNA, 1353 bp, Zea mays
  Peptide Sequence Number=SeqID_82815
atggaggccggcggcgccagcggcggcgacgacggggacggccagctgcacggcctcaagttcggcaagaagatctacttcgaggacgccggcggctccagtagcagcggcggcagtggcagtgccagcgcgaccgcgcctccagcgacgcagcagccgtcgccgccggccgcttcgcctagggccgcgcccggtggcggcaggaggggcagggccgcggctggcggcgcgggcccctccttgccgcccgcgcccccgcgctgcctggtcgacggctgcaacgccgacctcaccgacgccaagacctactactgccgccacaaggtgtgcgaaatgcactccaaggagccccgcgtcgtcgtcaacggtctcgagctacgcttctgccagcagtgcagcaggtgtaatatgagtggcataagacagaggttccacaacctggccgaatttgaccagcaaaagaaaagctgtcgcaagcgtctagcaggccacaacgaacgccggagacggccacctcctggaccccttgcgtcacgatatggccgtctcgctgcaccgctcggtggtacaaaaaagctgcttcatttctttctacttggtgacttgggtgaccaaagtttcagttttttcgtatctgttgctaatgttcctacacttgatccagaagagcccggcggcaggttcagaagcttcatgctggatttctcatacccaagggttccaagcgccatgagggatgggtttccagcggttcgacctggtggtgaaagggtgcctggcagcaatatccagtggcaagcagcgagcctagatcctcctccccctcaccatcagagcgcggcagcaggatacggtgcccactcgtacgggagcccgggtagctcgtcgtcgtcgaggccaccggtgttccctgctggcccggagctccccccaggcggtggatgtctcgcaggagtccccacggactctagctgtgctctctctcttctgtcaactcagccatgggacgctgctggccacagcgccggccacggccacggccacgccgcgtcactgcccgcaacagcaggcttcgacggcaaccccgtggccatggcgagtagctacatcgcgccgccaagcccctggaccgactcccgggcccacgaaggcgggcggcggaacgtgcctcaactgccacccgacgtccccctcggcgacgtgcactctggcccaggcacccatcacggccagttctcaggtgagctcgagcttgccctgcagggaaacaggccagccccggcgccgcgcaatggccagggctccgcgggcgcgttcgaccaggccggcagcacgacggagtggtcgctctag

SEQ ID NO: 39441 - DNA, 360 bp, Zea mays
  Peptide Sequence Number=SeqID_82816
atgaagagcctcgccgaccccgcatcgatgaggagccccactccgcccaaacgaggagcctcgctctgcatccgccagctcgaccaccacctccatggacaagcggcctgccagccgggcttctgccactgtaccgcggcgcggtgcgccaaagatggcatgcggctgagcggcctccgcctcgctcggctcgccgccacaagcgcaagtacctggcgtctacaaaaagccctcggcaggacgccagttgttgggacgggggacggggctataccaaccagccaaaaccaagcagggaatcacaccattcaccaagcagcagatggaagcgaaaggtggcgccgcggcgtggctagctag

SEQ ID NO: 39442 - DNA, 333 bp, Zea mays
  Peptide Sequence Number=SeqID_82817
atggtggctgacacctgggacacacactcaagcgaggacgtggcggaacgagtcatgctgttggtgcggtcgaggactagcgggacacgtgtccaggatgtgagggacgagcacgtgtcgattgtcaacaagatgcgtgccaacaaggcacatcttccctatgatgatcacgagagagcgctgaagttgctacatgctctagatcgaagggtttgggaggtgaaggtctcggcgaccatcgagtcgcccaactacaagactctcactttggatgagcttttcaacaagctcaagtccatagagattgaccactggacccggaccaagatttag

SEQ ID NO: 39443 - DNA, 684 bp, Zea mays
  Peptide Sequence Number=SeqID_82818
atgaagagagaggagaagaggaagaagctggaagaggagcagaggctcaatgaggaagagaagatgaacaaggtgaggaacccctaccctatgcacaccatctcacgcaccctcctcgcaactgacgagtttctctatgcgtccgtgcacctctccccctcttctccgccgcgcgtcctgcaccacatgccctccgtgcaggctaccgctagagatggcaatggatacccgctacccgaaactcggtgggtttttgctctattaggttatgggtttgggtcaatttctctacccatgggtttgttaatggtttcaaatagaaacccaacgggatttaccaaagagagtggaactttgggtgatatatgggagactgtaccaagcagtgatcctgttttgctactaatatcagattctactcagactggtcttcgaaaaggttctaaatcttttgatgaagcccaagcagcaggattcaccaaagagagtgaaactttgggtgatatatgggagactgtaccaagtagtgatcttgttttgctactaatatctgattctgctcaggtattgttgacgcagggaagtgttatagaacctattgtggttgttcgaggaaatgagatggtgcttgttgctcatcaagggaagtgggaagtagcagcacatccaccttcactcttataa

SEQ ID NO: 39444 - DNA, 1042 bp, Zea mays
  Peptide Sequence Number=SeqID_82819
gctccgtcgcacctccgacagccacgacatcacgccagcaaggtgccaagacctctccggctaccacattgtcatggccttcttagagaaggttggccgcgcgggaccgaggacgggacaggcgctctcttggggccgctcgcttccctcacccgcgtggacgcttgtaacccccctactgcaagcgcacccgacctgggcgcgggacgaacacgaaggccgcaggacttccacctctctcacgcccgactccggccacctcgcctctccccccttcgcgctcgcccacgcgctcgacccatctgggctggggcacgcagcacactcactcgtcggcttagggacccccctgtctcgaaacgccgacagcctcggccacggaagacagactcgacctcggcttcggaggagcccccacgtcgcccgacctagggcacaggcccaccacgtcaacaggaagcgccaacatcatcctaccccgagtcgactcgggtcacggagaacaagaccggcgtcccatctggctagctccgccagatgggcaatgatggcgccccacaagctctgtgacgacggcggctctcagctctcttacggaagcagggcgacgtcagcaaggactcgaccgctccgacagctgtcccttcgccaggctccgttgctcctccgacagccacgacatcacgccagcagggtgccaagatctctccggctgccacattggcatggccttcttagagaaggttggccgcgcggggacaaggacgggacaggcgctctcttggggccgctcgcttccctcacccgcgtggacgcttgtaaccccatacagcaagcgcacccgacctgggcgcgggacgaacaagaaggtcgcgggatttccacctctctcgcgcccggtctccggccacctcgctctccccccttcgcgctcgcccacgcgctcgacccatctgggctggggcacgcggcacactcactcgtcggctcagggaccccccggtctcgaaacgccgacatcattaatgacaaaagtgattag

SEQ ID NO: 39445 - DNA, 900 bp, Zea mays
  Peptide Sequence Number=SeqID_82820
atggccggttcggccgcccccctgcgccgccccctgcgccgccccctgccccgccgccgtgctcgcggttatgagcggccaagggagctccagagattagtggtacttgatcagagacattgtggtacaggtggttatgagattgatggttctggttatgattatggtattgctagtccactacagccaaacaggatgcttgctgagtatgttgatgtgtactcacccttgctctacacaccaaaccccccccaggttgtcagcattgcaaccactgctcaggcgaagatgaagctgtggaaggagacttccaggagttccaagattacgacgagttctaggtgtgggttagcggcaacccccagtcggcttcctgtgaaggccgcgttatctacgtttcttttccgcactttgatttattgtaagaactatatggacgtctcagacatggctcgacttagacacactgcacgaaagtcagtcatccccttcttaccctcccgccttgctgagcgtccgcttcgccgtcccgtggccggacagtctagccacttggagagactacaccaccgcctgcgtgaggagcaggagcgtcgacgacaggagcagcagagctcttccttctcgctccaccaggagatagagtctgtgaggagctgctcccctgtgcttcctctggagccgccccctgcatcaccactgggcgccccagcctctggagtagctgctggaggagacccagacgacggagatggcgacgacagctcgagccacgacaccgacttctctgctaaccctgagccgggaggatgggttgctcgacccatcactcgagaggatgtcctgtgtcactccacgatgcgctcgacacctgctacgtcgggcatgacgaatctctag

SEQ ID NO: 39446 - DNA, 1614 bp, Zea mays
  Peptide Sequence Number=SeqID_82821
atgggcctagcccacagcccactaggggttttgggaaggaagtatgttagactctatcctgcttctacatctgtgggcctataccctaacacagaaagcatgctaagcaatactagtgaggtagacctcgacaacactgacggaaaagagtacccggagactgcagctcttgagttcgtggactgcgtattggaggaagcccgcactcggcaaagggtctaccagcggggccctttgtcagcttctttgtcgagtgctataggaggcaatcggcaaagcttgaacacagcttccttgagaggggaagttcataacgatggttttgacaaatttgatccccgcactcggcaaagggtctaccagcggggccctttgtcagcttctttgtcgagtgctataggaggcaatcggcaaagcttgaacacagcttccttgagaggggaagttcataacgatggttttgacaaatttgatccccgcactcggcaaagggtctaccagcggggccctttgtcagcttctttgtcgagtgctataggaggcaatcggcaaagcttgaacacagcttccttgagaggggaagttcataacgatggttttgacatatttgatccccgcactcggcaaagggtctaccagcggggccctttgtcagcttctttgtcgagtgctataggaggcaatcggcaaagcttgaacacagcttccttgagaggggaagttcataacgatggttttgacaaatttgatccccgcactcggcaaagggtctaccagcggggccctttgtcagcttctttgtcgagtgctataggaggcaatcggcaaagcttgaacacagcttccttgagaggggaagttcataacgatggttttgacatatttgatccccgcactcggcaaagggtctaccagcggggccctttgtcagcttctttgtcgagtgctataggaggcaatcggcaaagcttgaacacagcttccttgagaggggaagttcataacgatggttttgacaaatttgatccccgcactcggcaaagggtctaccagcggggccctttgtcagcttctttgtcgagtgctataggaggcaatcgacaaagcttgaacacagcttccttgagaggggaagttcataacgatggttttgacaaatttgatccccgcactcggcaaagggtctaccagcggggccctttgtcagcttctttgtcgagtgctataggaggcaatcggcaaagcttgaacacagcttccttgagaggggaagttcataacgatggttttgacaaatttgatccccgcactcggcaaagggtctaccagcggggccctttgtcagcttctttgtcgagtgctataggaggcaatcggcaaagcttgaacacagcttccttgagaggggaagttcataacgatggttttgacaaatttgatccccgcactcggcaaagggtctaccagcggggccctttatcagcttctttgccgagtgctataggaggcaatcggcaaagcttgaacacagcttccttgagaggggaagttcataacgatggttttgacaaatttgatcgtacgtccacgatgttccaatcatcccattggtag

SEQ ID NO: 39447 - DNA, 216 bp, Zea mays
  Peptide Sequence Number=SeqID_82822
atgtggtcaagtgattctgcaaacttggcatatattgcgcagcatcaattgtttgaccagataaaggagctccacgaagatattgctgttcctgagtactgttcagctggtggtggcaaactccagtcacttaatgcttggttcggccctcatgggacaataactcctttgcatcatgacccacatcacaacctttttgctcagaatcccgtttag

SEQ ID NO: 39448 - DNA, 351 bp, Zea mays
  Peptide Sequence Number=SeqID_82823
atggtggcgagggtgcccatgctcgttgggtaccccgggaggccgagcctagaggggagaacgccggcaacgcgcgctggctgccgcggctgcggtcgcagcgctttgtgcgagcgcgaaagtggtgcgggtcgctgcatcagcgatgaccgcggcgacgccagggacgatggcggctgtggctacggttgcctccaggggatccatcgcagggaggcaagcgacgaaggggaggggccgacggtggtgcaggcgatgcagggaggcgacgacggcccgtcaggggcgcgaccgtcgggggtggcgcggccggtagggggcatggccggcgtcgagggaggcatgagttaa

SEQ ID NO: 39449 - DNA, 1032 bp, Zea mays
  Peptide Sequence Number=SeqID_82824
atggacagtttggtgctctcgtggctgcacgacaccctcaccgtcgagctacagaacatcatccgtgaccaggcggacacaagtcgacaggcggggtctctccgtggggagtattgccgccagatgaaaggcatggcagactccctctgcgaccttggcgagccggtcgcgcgatcgtaccttggtgctgaaccttctgcgtggcctcagctcccactatggcctcctgaaggttctcatcaagaggaccgtgccctttcccacctttcatgttgtgcggaacgagcttctcctcgaggagctcaccacggtgaccgaggcacccactccgatctcggcactctacaacgctcctccgggtggttaggcgccttccggggggcagacccctcgtcctccgtcgaccagggccctgctcgccctcctaccgcggcccctgcggccctcgtccggcttccaccgtcgacggaggacgtcgcccccgcaagggcggacgcgggggtggtggctccacccgtggaggttccaccggtcggggtggcggccaggcgtggtcgtcattctacaatcactggaccgggaccatctccatgtggctggggcctgaccatctccatgtggccggacgcctatggcgtacctccctatgtcatgccactgacgccgccaacactgccccagctcccgcccctagggaccccctcctcgatcgtcgttggaaatggttccactctgccggtcacctcagtaggtgtcccggttttccatgggccgttctatctcaacgacgttctcgatttggccaccaggacccctctcgttcgctgtgacagcgcggggccactctacacgctccggccttccaccaccgatgcgtccacctcctgtcctgctgagcaagcttttgacctggttcattttgatctctggacctccccttccgacacgttcaccaccatcacacgcgtcttcgcctgggtatccacgctgtttcgtcgcgcggttcgtcgactggctgattctggccgctaa

SEQ ID NO: 39450 - DNA, 805 bp, Zea mays
  Peptide Sequence Number=SeqID_82825
atggcgcttcctgttgacgtggcgggcctgtgccctaggcagggtgacgtgggggctcctccgaagccgaggttgagtctgtcttctgttgccgaggccgagtccgagccattgggtcgggcgaggcggaggtcgttcggccgaggccagggcggagtccgagccctggggtcgggcgaggcggagtttcgtcgtcttccgggtcttagcccgagtccgagccctggggtcgggcggagcggagtcttagcccgagtccgagccctggggtcgggcggagcggagttcgccgtggcgcctttggcaaggcctgactgcctgtcagactcactctgtcgagtggcaccgcagtcggagtggcgcaggcggcgctgtccttctgtcagactgcccgagtccgagcccctggggtcgggcggagcggagttcgccgtcttccgggtcttagcccgagtccgagccctggggtcgggcggagcggagttcgccgtcttccgggtcttagcccgagtccgagccctggggtcggacggagcggagttcgccgtcttccgggtcttagcccgagtccgagccctggggtcgggcggagcggagttcgccgtcttccggttcttagcccgagtccgagccctggggtcgggcggagcggagtttcctatggcgcttctggcgaggccttactgcctgtcagactcactctgccgagtggcactgcagtcggagtggcgcaggcggcgctgtccttctgtcagaccgctttatgctgatgggggttaccagctgagaattaggcgtcttgagg

SEQ ID NO: 39451 - DNA, 726 bp, Zea mays
  Peptide Sequence Number=SeqID_82826
atggcgcagagacttacccggtccacgtgcgccgacggggttccgaacttcggcgagcgcgattgcgcctttccggtggcgggggtccctggttcaagctctagcaagcttctcggcctcctagggaagctacctaggggcttggatcaagcggaggagggcgggaaacggttcggccacggtggttgtcctcgggcggctctggcgggtcgcggaggggtcgccagagctatgggcgagctctggggagttcggcgcgggacagaggatgcaacggggaagatagccgggcactgggacaggctttatagccatggcacgggcgtggtcacgggcgaccgcgggcgcgcggggggtattaagtgcactacatcttttataattggcccaagacatgatcaagtggttttcatagcttttgggtcatacttacttatagtactccaattgtccacagggggtgcattagggttttgggccatttctcccccttctatgtgcatgattcaaagggcaggtgggggtggggttttggattacgtaccgactcctttgggcaaaaagtcggggaagcgagaacgtagaaaatcctccatctcccacgtaatacttcagtgggtaagcggacacactttcgtagctgagatacatggaacacattgtgaactgctgacatgtggggtggcaactccaattgataggctatgggtccacaatttgctttga

SEQ ID NO: 39452 - DNA, 411 bp, Zea mays
  Peptide Sequence Number=SeqID_82827
atggcgtggaatgggaatcagctgtgctgtgcgctgtgccgctggctgtggacatgccaggaagtggaagcacatggtgcagtggatcgaacgatgggtgatagtcgtcgctggatgtatgaaggctggcgaaaaatgatccttcgcttgagtggatacagaaaaccgaagattttatcaatcgtgttttttcttcgtcaagaaatggtcgagtgtggtgcccatgcagtgtttgcaaaaattatcaacgtcaaaccaagaaagagatgtctggtcatctttgcaaaaatggctacgtgccaaatttatgaagattgggtgcatcatggtgaggagcttccccgtggatatgctccagaaggtcaagacgattttgacccggatttagaccgaatggaggagatggtttag

SEQ ID NO: 39453 - DNA, 162 bp, Zea mays
  Peptide Sequence Number=SeqID_82828
atgaaggtagacccagtttatggcgtggcagggagcggagaactcgtgcttgattccttcctcctcaaggtactcctccacttgcagattcttgaactcggacccgttgtcactccttatctttttcacctagagctcaaattcgttttgagctctccttag

SEQ ID NO: 39454 - DNA, 372 bp, Zea mays
  Peptide Sequence Number=SeqID_82829
atggcgagagtagtgtgtaccctccgtggcaagaggttggatggtggtgtatctgtgctctcgcatacccttgagagtcttttcttgagtcggcctaggttgtacagacccgatcttcactaccaatgtgaatggccagggatacactacgtggcctttacaaagactaccgtggtgtatagttgctcgttaggtttcgccagtcgtacaaacgcagtacaccgccccaaggtccttacagagaggtactcaggaaaaaggcccaagtcccctaaggacataataggtcagaggacacttgccttcaccaggttgttgctcagggatgtctccaacaacacactcaggaacctcggactgctcgttgtctaa

SEQ ID NO: 39455 - DNA, 737 bp, Zea mays
  Peptide Sequence Number=SeqID_82830
atggcgcacgcgccgaaaactgaggcccgggcacgaccccgaaaaaaagctaagtccaagcgtgtggaatggaaagacaacaaagctaagaactccccgaaagtcctgggaggggggtatgcccctcaggtctcctcggccgagccccgcaccccctcgcggcctagccgtggccggtcggcaccctaccgcgcccagctccggctggcgctgttggctgcctggccggccgtgcggctacgctggcgcatgagttgtcttggacccgtgactgcttggaggacccccgctgccgtgcggccgactcccggcgcccgtgtcccatcactcgtgcgggcatcctgtgcctgctgcgttgagaagtgcttgcgtgctgctacccgtcccacgggaagccgtgctcgatacacgttgccttcgtcgagctcaccccccggggtgcggctcgtcggctcgagagcgcccgcggcgtttgcctcgtgccgccgtcggcctatggccggcggcaccgaggacacctcgctggcgcttttggtctcggatgtggctcacgctgaaggccggagacgcgttggcgtcacgcgcccaagaatcggtccgcccgaacgaacgacgtccagcccggcacgacgcctccgcgcggaggccggcgctggcccgtctgcgaggacgtgctacctggttgatcctgccagtagtcatatgcttgtctcaaagattaagccatgcatgtgcaa

SEQ ID NO: 39456 - DNA, 354 bp, Zea mays
  Peptide Sequence Number=SeqID_82831
atggcgaactcgaccgtcgccatcacgccggcgcgggagcaccagagagcgcgggacacagcgaggcaggcaaacggcggttgcttaccacaagcgcaaactcaggaccgcctggaggtcagcggggaggcgatgaagcctcgggttgatggcggtggactccggctgcgcaagaatgctccgggcgagagagggggcgagggagctcagctgtgggcgcaagtgagcagggggaagtgggcgagcgaggtacgatgtctaaaggggcaggggcgtgcagaggtgaccggagaacgcgcggacgtgggcacgtccacatcgagggacgtgggcgggaggttagggacgggctga

SEQ ID NO: 39457 - DNA, 351 bp, Zea mays
  Peptide Sequence Number=SeqID_82832
atgcaggggcactccgtccccacacacatcaaccgtccccaacgattccccgtcagcagatcagggctcaccgccttggcgtacaatgcctcactgaccccgactggccgtcgtgcagtgaccgcacttgtacccaccataaccggaatgggagacctcgtctcaggtcgcgtgaggggcaaagtctactgccaggttcaatcaggtactaggcttaccgatttaccatatttctcggtcctctggtgcaggctcgggtgctggatctggggctacctcctgagcagctccttgctccggcacgaggatgtactttctgttggggacttgttctcaagtgctaagagttaa

SEQ ID NO: 39458 - DNA, 399 bp, Zea mays
  Peptide Sequence Number=SeqID_82833
atgtctcaccgggggtcgacgacgtcgcggatggagctgcgcaaaaacaggaaacacccagcgagcgtcgacggtgctgcaacaacacatctccctcgtaggcattacgtcgaacaccctgcgcacagcggaaaggagcaagggaaggggctgttcggggaaggcgacaggggtgctgttcttgggagaggggctcggcctccatggggaagaaggttcccggcgctggttgtgtggggagaacgagaggaggccggctggttttccatgggggtgtcggggcgcgctggagaggggctggagcaaaggcgttgcgcagggctgctgctggccgtggagcagggggaggacgagccagaggaggggtgtgtgcgtccaggttcccagggagaaaagtag

SEQ ID NO: 39459 - DNA, 78 bp, Zea mays
  Peptide Sequence Number=SeqID_82834
atggagaacgccgacgagccgagccccggtgttctcgagcgtgaatcacaaatcgtcccgactctacacgatgcggag

SEQ ID NO: 39460 - DNA, 870 bp, Zea mays
  Peptide Sequence Number=SeqID_82835
atgatttctcacggatcctcggacgaagggaatgcacagtcccacacggacgggcttgcacgagagggtttcccccatatcttgtgggaggtacttcaaggagctggttacaccatgcctccccagtacgcggtgcagctgttcgagaagcaccgagtgccccgctgtagggtgaggatgaccctagagcctcatcccctgctgccaggctggcgttcgctggactctgagacttttggatatagggctgaggatactatcgaggcgattgcccttcacaaactgaccaccttctgcggactccaccccttggagctaaccactcaccccattggcttgttccccgtggagaaggaggacgacccaatgtggaaggaccgagtggagcatgccaaggatatctgggccatctacctaggtcagactgctcacttgacggtgcggtgcatgaatgccatgtatcgtctgcaagtgatgcgtggagaggcaatgtcccatctgatggcattgttggaggcgaccaagatcactttggataacagagaggaacttgtggttgacttgtccactgagatggtggaaaaagacctgcaagtggaacaattgttaaatgagatccaagagcttgaggagctagtgggcaccagggagaacaccatcgaggttctcgaggatcagctaatcaacactcaacagcagcttgcggaggctaaccagcacctggatatgcaccaccaggagatccaggacatggaggccaacgaggatgtcgacatcgagggaggagaggagcctgcctccagcttggacactgctggcttagggagaccaccttcccctgagtcgagcgttgcctcgtttgctcactag

SEQ ID NO: 39461 - DNA, 432 bp, Zea mays
  Peptide Sequence Number=SeqID_82836
atggccatagttgctactcactgggtctgtctgagaaggataggtagacccatgtttcaattcaacacctggctgatgactcggagattgaagatgtccttggtatgctcgctggagtcatttgagttagtggatcttgaattgggaggtggatcccccgagcaatcagatgcctccaggaagaaggcaggtagccttgcgagccctaagtgcaagcaaccaagtcaatcctatgtccaagctgacacctcaaaagccaagtggaagaggagaaaactccgatgtatagtggacatgcaaccagtgtccgttcgtgcggagccggttattgatgatgaggtggtggatacagctttggttgatgaagtgaaaagtggtggtgggactaggttggcgaggtacatcatagaggaggcagaggatgaagaataa

SEQ ID NO: 39462 - DNA, 570 bp, Zea mays
  Peptide Sequence Number=SeqID_82837
atggtggaggtgctctcctgtatcaaggattgggagttggctgaccagcacaagcaatatactgtggagaaggaaaccaaataccttaaagaaatctttgaggatatgtacctagatgatgagcagcaatatcatgcaaacttcgatatatgccacgatttgcatggtctcatcattgaagagcacgtgtcacacctgccggtagaagttccctcgtacattgtcagtcatcagcacaacccgagagtcaccggcgttggcgacgaccatgaggtccccctatttgaagatggacagtgcggtgcagccactctggaccgcgtccaagcggcggttgcgccggagcttgccgaacacagcgacgtatgcagtcacgtagtactgcttccagatgtcgaactggcagtcgccaaacttcttttcgtcgtcgatgagcgacgccaacgcgagcgcctcctgtcagtggtgtttgttcgaggtttccaagtaaaaaacatggattcatctttgtcgttggtttatgaaaatgactcacaagtcagagccatggaaaaatattacggagaataa

SEQ ID NO: 39463 - DNA, 753 bp, Zea mays
  Peptide Sequence Number=SeqID_82838
atggagagctcgtcgccgtcagtgccgttcccgctgctgcaggcgccggtcgagagcacctaccgcgcctgcaccatcccctaccgtttcccctccgacaacccgcgcaaggccacccctgtcgagatccaatggattgacctctttctcaactctgtcccgtccttcaagtacgccccgggtcttggtttgatccgatctccgttcccttttcggttccgccgcctgttcccgctcaccccatgcttcgatggcttttgcagacagcgggcggagaacgaccccaccgtacccgatgcgcccgcgaaagcggagaagttcgcgcagaggcttcgtgagctagtactcagagagctgggatttagggatatcttcaagaaggtcaaggatgaggagaatgccaaggctatgtcactttttgagggagttattaagcggaatgacgaaattgaggatgacggcaaaagaattgagaacttggtccgtggaattttagctggaaacatttttgatctaggatctgcacagcttgcagaagtttttgctaaagatggcatgtcatttttggcaagttgccagaatcttgtatctcgaccatgggttattgatgaccttgatgcttttaagagtaaatggaccaagaaatcatgggaaaagtgtcaagagcgtcgaacccttgactcgccgggcctcggctacgtaactcgtagccttcggccgtcttctccgtgctgcgcacttggggatatatag

SEQ ID NO: 39464 - DNA, 372 bp, Zea mays
  Peptide Sequence Number=SeqID_82839
atggcgaaccgctggtgggcgtggtcggggatggtggtgtggttagtggatcggtgggcgggactgggtgaggcaaggatctccggactcgggataccaagctgtcaagagcgtcgaacccttgactcgccgggcctcggctacgtaactcgtagccttcggccgtcttctccggcagttatttttgttgataactctggtgctgatattatcttgggtatattaccatttgcgagggagttgctccgacgtggcacaaaggaacagcagggaatgcaactattccaccagggaatattccctaatattccgggtgagaacctttccctaaaatttggtggaaagaggtgggatgagcaatcttttgcctga

SEQ ID NO: 39465 - DNA, 426 bp, Zea mays
  Peptide Sequence Number=SeqID_82840
atggacaatgcgtgtggatcagcaccttcgacactcccgaggccgcaccttcgacactcccgaggccaccgtgctgactacgaccaggaccaggccgcctactccatgcgcagctcggccgcagtgttcaacttccccgtggagcacattcaagagtcgctgcgggcgctggggctcagcgtcgacgcagggggctcgccggtgctggcgctgaagcggcgccactgcatccataggcgcttgcccaagaacaagatggaggccaacaaggaggaacaaacgaaggcccaacctgcccgggctgggcacaacaaaacggagccttatgtggaaactttcagcactgagtacgcccttcttgatcaatccaagacacctgcttttgaaaagagtttcaaaagctacactatccaagtgcagtcctaa

SEQ ID NO: 39466 - DNA, 570 bp, Zea mays
  Peptide Sequence Number=SeqID_82841
atgatgctcgcaactcctcctagcatcactcaccgccaccttcacagcggcatcatcccgccaccgggtccgggccaccgcaggagactcgtctccactgcacgcgccgccgtgaagcgagatggtgccaccacggaggtagcaggcgatgagggcgcgtcgtcgtcgtcgtcgtcgccgccgccgccggaaagctcgagggtgactaaggctgccgcgacggcgaccccggcggcgttttcgttgcccaaggactacagccatacgctgttccactccgagttcctggaggtgctgggcctgatcgacctcgagtcgctgcggaagcggccgaggctcaccgtaggggtgacggtgaaggcgtccctgccgctcccggtgctcgtggtcctggcggccctgtacctcgcggacgtgaccagcggtcttgttgactggacgcatcatcacctggagggcgacgccgacgacccacgctgtgacacttcttctagtctccgcctttgcttcgaccctttcgagcggtctccatcttcgctctggccctttcctggtctcgcctccgcctag

SEQ ID NO: 39467 - DNA, 165 bp, Zea mays
  Peptide Sequence Number=SeqID_82842
atgtcgcgcgcgttcgacgactactatatcaaggattatggcgtcatctcggcgccggaggtgtggcacgtgccctccaatgatgagactatgcaaaatcgtgacatatatcaaagtctgcatgacactgatggttgcaatgtagtagtgaaacaactaaattaa

SEQ ID NO: 39468 - DNA, 924 bp, Zea mays
  Peptide Sequence Number=SeqID_82843
atgtccaacagagacgaggtgtctgttgttgtcaagtgcttgcggcttggcgccgccgagtacctggtgaagccgctgcgcacgaatgagctgctgaacctttggacccatgtgtggcggcggagacggatgcttggtttgcccgagaaaaacttcttcaatgacaacttcgagttggtgctctcagaacctagcgatgccaataccaatagcaccaccctcctctcagacgagaccgacgataggcctaaaggaaacacgaatcaagaaacaggcacctcaaagcaacttgaatacgagtctaatccttcagttgctgagcccgaccagagagaaaagatggagggtgttccaggctctgccctagatgccagtaaaaaatcctctccgagaagagcgttttcacgccctataaaaactaacctgagggttgccgagtcgtctgcatttctagcatatgtcaagtcaagcaccccagccaccagctcatttgacagcgaattacaaaggggtggcagccgattagattccttggataaccagggtaattgctctagcgcaaccgatagaagtgacaccggtactgatgtaaatattcggaacaaagaagcttttgagatgcctgcgcagtaccctatggtatggttttcttcctctaacatgcatatggagcgaagcagcgaaggccataatgatacttcaggaactccacctgcataccatttcccattttattatccagggatggtagagcacaacatggcactttcgtcggcgcaagattttcaagcaaacataaacaatgctcaagcacatacaccgcaagaaggcacatttaagatttgccattatgcaggggagctcttctatatgcaacatgatagtggtcctgattggctgattttcattccaggtgacatatga

SEQ ID NO: 39469 - DNA, 204 bp, Zea mays
  Peptide Sequence Number=SeqID_82844
atggatcacgtgctcgcaggactgatgggcgaccatctcgcgttgatcgtggaccggctgctgacagagtcgacgctggaggcggcgatcggcggtgggaagcagatggtcgatctgtgtcaggagacgatggacgtcgagtactgccatcgcgggctaggcggcggctcggtgacgaaggtggtggagtgcaggatttgctag

SEQ ID NO: 39470 - DNA, 1905 bp, Zea mays
  Peptide Sequence Number=SeqID_82845
atgccatcctcttcttcttccgccaccgccacgccgccggccgccgcctcgtctgaggagacattgagtaacgtgatggtggaggagttgcgcgccggcgactctgttgaatttggtgtgtcacggatgacgtcagcccgtattgaagatatgcagcggttgggctactttggcggcggagtcgctcgtgctccggggacggaggaagtccccgagccggagggcgagttggttgttttcgaggcgttcttcgccgccggactccgcttgcctgcgcaccgggtcttcgaattaaatcaactgccgtacgacggctaccctggtcaggacgaagcagaccgccgcgggaagaaaccggcggtggagaccggaggcgaccctgcgctggcggccgccacctcttcgaaaaagagaaaattagtgatggacaaggatcgccaaggggcgacgcgaaaacgccaggcgaccgtgagggttcacgaagcgcggccgaaaaggcagcggggatcggcgaaggctgaggcctccggcggaggcaagccgcctttgccggcgaaggtgggcgcctccgcgcctgtcaaggcgccggaggcgacggtgggcgccggaggccccaagctgtcgaaggtggtgccgtccgtcagcggagtggcggaggcggcgaaggcggcccgatcgttaccgccgtctggcaaacgcgttgccgacttcggcaccgagattaatgtggaggattatcttggggggtcggacgagggcccgctcgctctagttgtgcctggcgcggcgatcgcgacggctgcgccagcgccgaaggcgggggtagagacccttggcgttggaggcgaggtgactgccctcgcgctggtcagagacgaggcgggcgaggcgacccaccggctgaagggagcgatggaggcgctgggtcaggtggctgacttcaccagccgcactgcgtcgggggcccttacggcggcgttgtctgccgaggtcgagagacttcggacgcaacatgcggacgctgtccgtgagaagtcggcctccgacagcaagtgccgcaaactggcggagaaggcggccgcccttgagaaggagaaggcagacctccggcgccagctgacggaggagaggagggaggccaacgaagccatcgccaaagagcaggctgcgcaggcggaggccaggctggcgcgggcggaaggcaatatcgctaaggagctcgccggagagctgcagcggcggcttgctgccttcgagagccgcgcggagggggccgaggccgcggcgcgagcggaggccgaacggacgcgcacgcagctcatgacttcatatcgcgagctgggtgtgcggacgagtgacttcgaggtgccggagcgagaggccggacttcgctgtctggagtgggtgcaggaggaactgcaggagctccccactgtcttggcggggttgatgtcgttcacctccctggtcacctgcgaggcagcgatgaacgcgctctctcgcgaaggctgccggcactacgaggccctcgaccaggtggatgaggattttgggcgagatatctttgaggtcgaagaccccgtggtgaaggagtccgccggggccctctatgaccggatgtggggttcatacggtcgtgaggtggtccgggcgcgggccgaggctgcgagggctcaggcggagcgcggcgagcgggtggacgactttggggcgctgaacagcgcgctgcctgagccggagacgacccccgcggaggccgcgactggagtcgccccgggactgaccccggagactgcggaagatgcaccgggcgcccctgcacctgctgcggccggcgaaggccttcccccaaaggtggccgaaggcgcacctgatgccccccgcagctgctgtgccgagcgctga

SEQ ID NO: 39471 - DNA, 684 bp, Zea mays
  Peptide Sequence Number=SeqID_82846
atggcgcttcctgtcgacgtggcgggcctgtgccctaggtcgggcgacgtgggggttcctccgaagccgaggtcgagtctgtcttccgtggccgaggccgagcccgagcccccaagtcgggcgaggcggagatcgttcggccgaggccagggcggagtccgagccctggggtcgggcgaggcggagtttcgtcgtcttatagggctgagcccgagtccgagccctgggtcgggcggagcggagttcgccgtcttccgggtcttagcccgagtccgagccctggggtcaggcggagcggagttcgccgtcttccgggtcttagcccgagtccgagccctggggtcgggcagagcggagttcgccgtcttccgggtcttagcccgagtccgagccctggggttgggcggagcggagttcgccgtctttcgggtcttagcccgagtccgagccctggggtcgggcggagcggagttcgccgtcttccgggtcttagcccgagttcgagccctggggtcgggcggagcggagttcgccgtcttccgggcggcgctgtccttctgtcagactgggttgcttctaagcgaagccaaggcctcgggcgagccggagctttatgctgatgggggttaccagctgagaattaggcgtcttgagggtacccctaattatggtccccgacagtag

SEQ ID NO: 39472 - DNA, 267 bp, Zea mays
  Peptide Sequence Number=SeqID_82847
atggccaaaatccgcgccgcccggggactcccacaccgtggcgcgcatgctcaagacccactcgtagctccaggggccttcgtcttcttccccctggcggtcaccacatcatggcggacccacctttcgccacgattggggcactacgcctatagactcatggactactcatttgtgagattggagctctggcttggcggttggccgcacgtcggtgatggtctgctgtggcctgtgcttgcgcgccgcttggcctgccgtgggtga

SEQ ID NO: 39473 - DNA, 258 bp, Zea mays
  Peptide Sequence Number=SeqID_82848
atgaccgggaaaaagaccacggcttcctctgacggcggcactccaaagaaagccaaggtggtggtggaggatgaggaagaggcggggttggaggatgaggaagaggcgactgtgacactatccgtggagaaggacgcgctggagtgcgacatctgctgcctacccttccagtccgaagttttcatggcaagtcagattaatgcattgcaagaacgggcattctggatgtgcaaagtgctgcatccgcacagacggtaa

SEQ ID NO: 39474 - DNA, 123 bp, Zea mays
  Peptide Sequence Number=SeqID_82849
atggcgccccgccgtgccttcgcgctctgtcgccggtcgggcgccgtgaagagcccggatcctggtgagcagcagatagaagtagctgagcaggagctcattgaaggcaagttgtgcccttga

SEQ ID NO: 39475 - DNA, 930 bp, Zea mays
  Peptide Sequence Number=SeqID_82850
atggcttacatcaggctacgcccgttggcttatgtcacgagccataggccacatggcagcaccgagactccgcctgaacagggagcaaggaccaagagttactggacatgtggcagctctggactgtccctgattgggggtccggatggcacatttaggggtctaggaccgacctatgggagatcgaccctgactgtaatccatagagtgcttcttctcttgggacatgtggcaccttcggacccccttgccgaagaaccggagagcttatgtagaggcatggacctatggttgcagtcatcagacaacttcagctctaggatacttcgtgacaccgcgttggtccaccgaggcaaagattcgggaatcactacaagaaaacccgccacgcttcttctctcctatctccctgcccgccgtccagtacacagtcgaccaccgccgtctctccagtctagccagcggcgtgcggcctcgccgagccagcgtgggacgggcggccgagccaccagcggcgggcgggctcgccaaacagcgccgggcgggcggcctcgccaagcagcgcacctccaagcagcgtcgggcggtcgagctagcggcgggcgggcggtcgagccaccagcgccgggcggccgagccaccagtgccgggcggccgagccaagcagcgtcgggcgacctcacgcagcgccccgacaagcagcgccaggccgaggcagcggcaggcggcaggcaggccccgccaagcagcgccaagccccgccaagcagcggcaggcggcctcaccgaggcagcggactcacctagccggacgccaggcggcctcgccgagctccaagctccaggcgcagcgcagtgcctcgccgagccaagcattcttcaaatccgtgtgcagttcttgttaaggtatttagttcacactgatttttaa

SEQ ID NO: 39476 - DNA, 288 bp, Zea mays
  Peptide Sequence Number=SeqID_82851
atggcctcccccggacttcggacgccaagggctatcggcggctgctcactcgggcagctaatcatcttctacctctcgcccatccaccaagtgatctacaacatgccatcaacagtcagcgggacgcacggagctccatcaacgcttcacgtgaacgacgacacgaaaacgagattcggcgccgagaagaatatgatcgggatcacggcatccctgcgcgaagttaggccaccagagttgagttggcaacggcttcgaccggcgacacgacccggggacggtcgatga

SEQ ID NO: 39477 - DNA, 699 bp, Zea mays
  Peptide Sequence Number=SeqID_82852
atgactggcacagggttgattctgggagaaccttcttcttatcttctcttcactgtcttcttttctcttctcacttttcacttttcactgcctctttctttctctttgctcttcccactggaggattctatcgatgagtattaccatcatacagaggaggaaaccaaagactatgaaccatgtacaacagtcttcaacccaagaatcaccaagcattgtgatcttaggggcgagggagtggggaaatggagttgcttgcaatttggcagaggggattttatcggggctgtttttgctttgtgcgagatgggagttgatggagctggtgggggggtgctacgcggcagcgggtgcgataaggggagggggcatggtgttgccggcgatgatggtggcgatgggtgcgctgcaaaacggggcgtgggtggcggtagtgcgctgcaaagggggcgtggggcggtggtgatgcgcatggagacgggcacgcgtgcgaggggcacggagaaaacctttttaagaaaaacgaaaagaaaacacacaagctcagcaatgataagcacaaacaaatcaaatattttgaataagggaagaatagagtttttccaaagtacggactactcagattcgggggctaagcataactactactgctcagctcctgaattgaggactatgctaaccaggacttatgagcactaa

SEQ ID NO: 39478 - DNA, 267 bp, Zea mays
  Peptide Sequence Number=SeqID_82853
atggactactcagcaccagcagggtcgcgttggaagctagctccgggcagcctcaccagcggtggtgaccacctctactccgagcggccgcctctgcaccaacggctcgccagcgacggcggccaccttcgccctagtggcttgccggcaacggcggccatcatagtgcacacgaagaggtcctcactcccgtcctcctacgggggtgaggacaagaccatccaagaacgcggctgccacctccacgacgtacgacatcttgtatga

SEQ ID NO: 39479 - DNA, 159 bp, Zea mays
  Peptide Sequence Number=SeqID_82854
atggcaccggtgtcagcgctcgccaagtacaagctcgtcttcctgggggaccagtccgtcggcaagacgagcatcatcacccgcttcatgtacgacaagttcgataacacctaccagtggagtctagttatagaagacctagacaactgcattatctag

SEQ ID NO: 39480 - DNA, 645 bp, Zea mays
  Peptide Sequence Number=SeqID_82855
atgcagttggtggacgacccagagaaggatggacttgaccagtggatgctcgccaagcgagtgccacccagcaaacactgtctaagtgttaaattaaagtggactttacccctcacgcgacctgagacgaggtctcccattccggttatggtgggtacaagtgcggtcactgcacgacggccagtcggggtcagtgaggcattgtacgccaaggcggctcggatcttgacagttgaagggagcagcagcaccctcggcgtcgactacaccttcggcgagggtcttctccaagaatccggctcgagcaggcggctcggccggtcaccccgaagtctcggccagctgtcccccgaagacatcagcccggcccgaggcctcgacagatcaactccggcgtcagtcccgctaacggacgacccggccaggctccggctgaccaagtcttcttttcgagccaactctgcctctatccgtgctgacaccgctacccctggcttcgggtcatcaaagagcggccgaggggttcctttaactaagcaagagaagcctcggacaataaggtcgaccgagccgtgggactcctacgcctccgggatacggatacctcactcgtcacctttgcacggggcgactcacgcttggtga

SEQ ID NO: 39481 - DNA, 432 bp, Zea mays
  Peptide Sequence Number=SeqID_82856
atggtgcagatcattgagcaccgtgctgagacttcggtagactttgcggtggagggagaagctgcttcctccacaccgtcgaagacgcggtcatcccagcgccaacacgaggcgtcaacatctgtgcgctcgccctcaataaggggcgcacagaccaacgacctctgggcagagctcaaccgcaggcatgcgggagaggatgcccgggtctccttggaaagggcccgcgagcgccgccagaacatcgatggccgcgacctcaatcaagacttcgctgcggttgcaccgcatacaccaatgggcacccggtcccaaacgggtgtccctttggccggtgtgggctacgccgctcttgcggatcatctccgcgcggcgtcctggccacccaagttccggcctgttggggacttgttctcaagtgctaggagttaa

SEQ ID NO: 39482 - DNA, 159 bp, Zea mays
  Peptide Sequence Number=SeqID_82857
atggcggtaacgtacacctgcaggaactccgacgggttcgtcgttgcatcgtatttttctggcaggtaccctcagactaaagtcggcattgcagcagaacggaataatacgaagcttgatacagagccgaaggtgttgaacaggaaagcttcggcgtaa

SEQ ID NO: 39483 - DNA, 588 bp, Zea mays
  Peptide Sequence Number=SeqID_82858
atggcgaacttcgccagtgcttaccagcagcacggtgtggaggcccacctccatgcgttgaggcaggagcccggggagaccatcctaaagttcatctcccgcttcaccaaggtgcgagtgcaccagagctgccgagggtcgtgcgtggcactcggccccacaaactggagctgcccagtcgggtggcttgggggccatcctccgggacagaaagaagagaagaagaaggaccgtgactaccagaagccgcggtccaccgctctggtggtcgcagccgtgaccggaggccagggcgaccgcaacaaacgcccgcggccgcagaagggtagcagcggttcatgccctatgcacccgaatggtcgccacagtgccgcggagtgtcgcgagatcattgacctcgcaaaacacgtcaacgagcggcgcgagcagtcttccaaagacggctcctcgcctcgccgctggcccgacaaggaaaaggtgaacgacggcgaggtggccgcggctgagtgggacctcgggtatcagtcgcccgagggggacctgaaggatatcttcatcggaggttcctactccggtgaagacaactag

SEQ ID NO: 39484 - DNA, 1140 bp, Zea mays
  Peptide Sequence Number=SeqID_82859
atgccggggtcctcctcgtctcgggaccttgccaagacccggaccttactggggagcctggagcttattcgagggacccggcatgtccttctaggagctccggacccgttcgtacaggggttcggtgtcccttggagatggggtgcgccggtgttctctggagggatccgcgtcaaggtcgtccctgccggtgacttcaccgtcggagagcgcgcgctcgtggtgcccggtcgcaacctctggccggtggtcatccacaaggatgactaccagccttgtggtggagagaacattcgagggagaagggcgttcgccagccttgcggaggaggcgaattctgggtacgcggggccagccgtctgtggcgctgtcagctaccgcgtgtctggctccccggcctgggtggctctggtgccgcctgcggcgctgcctcctgccgctggggcggagcgtggctgcccatccaccgcacgggcgacggtcgcgctgtgcgcgggtcggccacattcacggcttctcccgcgccaccggccgcaccgggaggtcgtacaagacgtcaggtggtcgctgccactagtggggctgatgtggtcgcctccgctggtgaggctacccactacagaggtggttgccaccgctggcgagaccgtcagtgccacctgccgctggacctctggctctttggctgtaatggcctcgctgtcgtcccccgtaggaggacgggggcgaggacctattcgcagtagcgctcaccctaaggtgatcgctgctgctggcgagccgctcggagcggaggtcgttgtcgctgctggtgcagaggtggtcgccgtcgtcggcaatccgtcgatgcagaggtggtcgccgccgttggtggggctatccggagccagcttccagcgcgactcttgctggcgcagcgtagttcattcctgcagaaatggagctagggtcccgtttggcggtggagtatgcaagctcacggtacgggaccaggctgagcggctacatggtttccggaccctccaggagacaagtgcccgttcttcagagccggacctccagggcggtggagcgtgcaggcccacggtacgggaccaggctgagcggctgcacgggctccggaccaccccaggagactaa

SEQ ID NO: 39485 - DNA, 84 bp, Zea mays
  Peptide Sequence Number=SeqID_82860
atgtcctggaggagcaagttacggactgctgctgatgagacgagatcgatagaacagacgataaattcgtacagtgggaagtga

SEQ ID NO: 39486 - DNA, 279 bp, Zea mays
  Peptide Sequence Number=SeqID_82861
atgtccatgctcgtgcgaggcccatggctttggaggtcgccaacattaggaagtgccgatatggtagcaccgctgtgccctcgcgaggctcgctacagaaacctggtgctagccaggatagatgctatagcgggtagttgggtatgtttaagcgtagttggtccgaggctgaggtcgggcaaggcggagacttctcctaaggccaaagctgaggccgaggcctggggtcgggcgaggcggagaccttctcccgaggccaaggctgaggccgaggcctag

SEQ ID NO: 39487 - DNA, 471 bp, Zea mays
  Peptide Sequence Number=SeqID_82862
atgtcgcgtcttctcggctgcggaaccagtgccgcgactcaaggcagccctgcatgtgacccaacagtgtcaattgagtgcaacgatcacggggcaagcgacacctccggcaggagaagcgggcgccgtttcgcctccgtcatgatgaccgcgccaaaaaagggaccgggaaaggggatatttcgaaaaaggatccttcccagcgaaggaaacgggcctcgagccctcctactgatcaggggttcgaaggttgcgccctccggggttcggcaaccgccccagagcactcgagctttgagccctttactgatcaggggttcgaaggctggcccctcgaaagggttcgacagctgccccagagcatgcagagtcagggatgaccctgggtacgtccgttacatggccgaggctcgggctacgctcccgatgtaccctaggacatttccgagaccagcgggaacgattttgtaa

SEQ ID NO: 39488 - DNA, 1155 bp, Zea mays
  Peptide Sequence Number=SeqID_82863
atgcaggtggcatgcaaccgcaccacggagacgcaccccttcagctttgacgcatccagcatggaggcccaggcccacacgtcatgtaaccggcgcgccggttactatgtgcgagaaactgcaccgccactcgcgccaataccacgccttctcgactgtggaaccagtgccgcgactcgaggcaaccctgcgcatggcccaacagtgccagccgagcacatcgatcatgggtcagtcagccgcgggaggaggcgcaacggtcgatatggccaaaaggaccgagaaaggggatactccgaaagggatccttctccgcgaaggaagcgggccccgagccctcctactgatcaggggttcgaaggctggcccctcggaagggtttcgacagccgccccagagcactcgggcttcaggctcattactgatcagaggttcgaaggctggcccctcggaagggttcgacagccgcctcagagcactcgggctccgcgcccactactgatcaggggttcgaaggctggcccctcgaagggttcgacagccgccccagagcacgcagagcgagggatgactctgggtacgtccgatacatggccgaggctcgggctacgctcccgaggtaccctaggacatttccgagaccagcaggagcgattttgtaatggaatcccaccagagggaggcatcgagccctcgaaccctatcgaacgggaccaggtccggcaaatcacctgcagcctcagaaggaggtctccgcctcacccgaccctagggctcggcctcaacctcggcctcggaggatggtctccacctcgcctgaccctagggctcggcctcaacctcgacctcggaggatgttctccacctcgcccgaccccagggctcagcctcaaccttgacctcagaaggaatcgcatcctcaccccaccccggcctcggcctcaggaggagtctccgcctcacccgaccttgggctcagaccgaccacgccacagggggtacatcattaccctacccctagctagctcaggctacggggaacaagaccggcgtcccatctggcttgccccgggctcaagcgctcctccgacgcccatgacaccgcatgcacagggctctagcacctctccgatagccacgttggcatgtacatag

SEQ ID NO: 39489 - DNA, 234 bp, Zea mays
  Peptide Sequence Number=SeqID_82864
atggtgcagcgcctcacctaccggaagcggcacagctacgccaccaaatcgaaccagacccgcgtcgtcaagacacctggtgggaaacttgtgtaccagtacaccaagaagcgcgcgagcggaccgaagtgcccagtcaccgggaagaagatccaaggaatttcagggttttctgtttgtctagaaattagaacaaatcaggatgccacgaatcaagctgattcatcgaagtag

SEQ ID NO: 39490 - DNA, 243 bp, Zea mays
  Peptide Sequence Number=SeqID_82865
atggggaccctccctggcgggctctttgccgagtgtcccaagtggcactcggcaaagaaggcggctttgccgagtgctgccaggaggacactcggcaaagatatcttcgttgccgagtgcttcgccgagtgcttccggcactcggcgaagaggttgattccggtagtgatactcgtgtttactcaaaatctcaactctatatctgctccgccctctctatgtttgtggtcgtcggtgagctag

SEQ ID NO: 39491 - DNA, 345 bp, Zea mays
  Peptide Sequence Number=SeqID_82866
atgtgcagtggtggtgccatggatttgcttgagaggatgctcgtgtttgatccgagcaagaggattactgttaatcctgcagctctgcatgaacttgctgcattgatatcatataaaatgtgtgacatgcttgcctggatgcagtatattttgctgggatatatagtccagattgatgaggctctatgccacccatacctggcatcccttcatgagataaacgacgaacccgtctgcccagcgcctttcagcttcgacttcgagcagccatcgctcaccgaagaagatatcaaggagctcatctggagggagtctctcaagttcaaccctgacccagtccgctga

SEQ ID NO: 39492 - DNA, 417 bp, Zea mays
  Peptide Sequence Number=SeqID_82867
atggggactcacatacaagagacaactctaggtgctaggaggaggcctgcgctggatttttgccaagattcgcacgcttgcgatctcggcgagctgttgaacaagggcagaagaacacttccacgtgttcgacgcgctctgagcgcgccaaagcacgcccagcgcccgaccccgcgcgccctgcgccgcgccgagccgcgcccgtgtctcctgctcgcgcccgcgcctataaagcccacggaagcttcaaccgtactcctccgcgcacgctcgacttcaccggagccagagatcaccgacgtttgccctgcaaacggcgtgcccgcgatcacccgatcccccgccaccatagaccgaccaacagagcctttcccagccacgctcgaccctcggaagagaccgtgcatgcctcggtga

SEQ ID NO: 39493 - DNA, 900 bp, Zea mays
  Peptide Sequence Number=SeqID_82868
atggctcctgaagatgaagaactattgcgtgatgatcaggtcctcacccctattaaacaagaaggtacaaggaaaagggagaggcccactgacaaaggtgtttcttggttggtcaaaacacaatacatatctccactaagtgctgatgcagccaaaacgtcccttactgagaagcaagcaaaggaaaggcgggaatcaagggggggtcgcaatgctttcctagacaatcttaatgatagagagaaacagatcaaagccattgaagaatcctttagagcagccaagtcaaggcctgttcaccagactaaacgtgggatgcaagctgagtgggttatgcctttgctacctgattttgataggtacgaggagccgtttgttatggtgaattttgatggcgatccaactgctgattctgagcagtacaacaaacttgagagacccgtacgtgatgaatgtgaatctcgggccgtgatgaaaagttttagtgtaagtggttcagacccttcaaaacaagagaagtttttggcatacatggccccagcaccccatgagcttaccagagacttggatgatgaaaacgatgacatccagtattcctggctaagagaatatcactgggaagtaagaggagatgataaagacgatcctacaacataccttgtcacatttgataagaaggatggtgcaaaatatttgcctcttcctaccaagctagttttgcagaagaaaaaggcaaaggaggggaggtctggagatgaaatcgaacattttccagtaccttcccgtatcactgcgaattcaaagccacgaagatctcatgttgatgatgatcttgatgagcatccaaagcgtactcgggtagaagatattgaccaatatagtgaagaatattctgagtga

SEQ ID NO: 39494 - DNA, 468 bp, Zea mays
  Peptide Sequence Number=SeqID_82869
atgtacgcggaggaggagcgtgaactgctggtggaggtgcgggcgccgctgggcagccacccgcactcgttgacggtgcggtgcacgtaccgcaacccggcgtcgcaggagacgatggcatctagagaaggtctcagcgtctatgtcagcggggcagttgcatgggcagtgcagcgagccgcggagcagcgagtacgtgtgtttgtgtcaagaaaaacaattgttgacatcactacaacaatgaacgagagcttgttcacatgtgaactttcaaaacaaaccttatcatccgtcaaggatacagttgaaatggctatcaaaaaatggggagagaaatcattaactgaactggaagcagaaaaagcggttgtcctactcatgtcattacagcaggtggtaggaacagagcgccatgaatcacgcagaattgacaatcatagaaggcgacatgaagcgggccttcgatag

SEQ ID NO: 39495 - DNA, 714 bp, Zea mays
  Peptide Sequence Number=SeqID_82870
atgacttctcacggatcctcggacgaagggaatgcagagtcccacactaacggacttgtacgagagggtttcccccgtattttgtgggaggtacttcagggagctggttacacgacgcctccccagtacgcgatgcagttgttcgagaagcaccgagtgccccgctgtagggtgaggatgaccctggagcctcatcccctacagccaggctggcgttcgctggactctgagtcttttggatacagggctgaggatactatcgaggggattgctcttcacggactgaccaccttctgtggattccaccccttggagctgtccactcaccccattggcttgttccccgcggagaaggaggacgacccaatgtggaaggaccgagtggagcatgccaaggatatctgggctatctacccaggtcagactgctcacttgacggtggaacaattgtcaaatgagatccaagagcttgaggagctagtgggaacgagggagaacaccatcgaggttctcgaggatcagcttatcaacactcagcagcaacttgcggaggctaaccagcatttggatatgcaccaccaggagatccaggacatggaggccaacgaggatgtcgacatcgagggaggagaggagcctgcctccagcttagacactgctggctcggggagaccaccttcccccgagtcgagcgttgcctcgtttgctcactag

SEQ ID NO: 39496 - DNA, 270 bp, Zea mays
  Peptide Sequence Number=SeqID_82871
atgaccctcactaagaaaaaagacaaacaacaagtgtcatgtcaggttgagcgacgcttctgctacatgcgtagtgagcatggtcatctacctaaggtaaacggcaaagctcaagggggcacatacaaggatactgagccccgacatgtgggcccagggaccaatggaaggaaggaaggaactactgcctctaacgccagggtgatctccaagcgccataatggtcgtagcgcatacagtattgatatctcgcggcagcatccttggtaa

SEQ ID NO: 39497 - DNA, 731 bp, Zea mays
  Peptide Sequence Number=SeqID_82872
agtcccgggacctggctgtgggcggcccggaccccacacagaggggtccgggacctgtcccgggggtccaggtcacgcccgtgggggtcctggaccttactcggtggtccggtctacatgtacaggggtccagcactttcccatgggggtctagacccactgttgatatcttggagtatatcgtcttctctggcccacgtggcgaccccggagccgtccacgtggcgggggtaccgacagtggcccccgggcccacatcaggggaggatacgagcctgcaggtggggccaaagctttggcgattagcgcgccgcttccgtgcgcttgctgacgaaccggcgcccaaggaggatgactcatgggcccgggcccccatgtcaaagactgggccgttggtttcagcggagatgaagaggcgcgacagttcgctccttgcgtggtggttcgccttcttcgcactcggagaccgacgcccaaggagtatgactcatgggctcgggccccgtgtcagaggctgggccactgctttcagcggtgatgaagaggcgcaccaccacaagcggcggttcgctcctcgcgcggctgttcgccttctcagcactcggagacccgcacaccagctgtatgactcgtgggcctgggcccccgtgtcagaggctggattgctttggtgtgcgccgggcgagatttcctgcggcgtctcagggcacgagcaagggagatttccttga

SEQ ID NO: 39498 - DNA, 183 bp, Zea mays
  Peptide Sequence Number=SeqID_82873
atggcgcgcatgctgaggtggtcgccaccgctggggaggctgcctggcgcagaggtggtcgccgccgcttaccaacaggtcgggcttatgagggaggacctcaccgggttggcgtacgcatatgcgttacctagttacaaaagggagaaaaattcgacccctcagacttgctcctatggatag

SEQ ID NO: 39499 - DNA, 1230 bp, Zea mays
  Peptide Sequence Number=SeqID_82874
atgaccgcgtcaaaaaaggctggcccctcggaagggttcgacagctgcctcagagcactcgggttccgcgcccactactggtcagaggttcgaaggctggcccctcggaagggttcgacagccgcctcaggcaactcgggctccgcgcccactactgatcaggggttcgaaggctggccccccgaagggttcgacagcctcctcagaacatgtagagcgagggatgactctgggtacatccgatacatggccgaggctcgggctacgctcctgagatcacctgttagcaactcactggagacaccatgttcagcgccctccgagggcaacatggcgctttccccccctcctccttgcggaaaggcgacgaaggggcgtatgataaaagccgagtcagtccttgaccgtcctctcgctctgtgcggaggctcgggggctgctctcgcaaacccggccccggccaaaccgttgacggcgtcaacatacgagcccgagaactcagaacctgaccatgcacccgggctacgatcagatcgcatgagggaacaaccagacccgccgaggcgtcacgaaaggcaccaagacctcagaggagtcaaaccactcctcctaggcctcgggggctacacccggcgggtgcgctcgcgcgcacccaccagaacaaaatataaccgagaaaggtggattcatgcctcgcccgagggcctcctcaagcaacgggcgcaccttcgactcgcccgaggcccagctcgggcaggcttcgcagtgaagcaaccttggctagatcgcctcgccaaccgaccgtatcgcaggagcattcaatgcaaggatcgcctgacaccttatcctgacgcacgttcctcagtcggcagggccgaagtgaccgcagtcactccgcctcacctgaccccggggctcggcccccgcctcgacctcggaagacggtctccgcctcgcccgaccccagggctcggactcaacctcgacctcggaagacggtctccgcctcgcccgaccccagggctcggacttagccttgaccttggaagacggttaccgcctcgcccgaccccagggctcggactcagcctcgacctcggaagacagtctccgcctcgcccgaccccagggctcggactcagcctcgacctcggaggagtcaccgcctcgcccgaccttgggcccggaccgaccacgttacaggggggcacatcattaccctacccctag

SEQ ID NO: 39500 - DNA, 2268 bp, Zea mays
  Peptide Sequence Number=SeqID_82875
atggcgcgtcaaccaggctttagccccacctacagggtcgtaacctcccctgaggcgggcccgggggccactgtcgacccccgtgagaggatgccggaccccaacatacctaattgggatctcagtgttcccctaagacggaacccggacccctctaggcacgcctacgctccccgcccgcgcggggagccagtactgccacgtggcctgcggaccgtgacgaaagccggagagcagggcctgacatgtcgaccagaccagacgacatgcctgtccaatcaagcagcgggcagtacgcccacgccgctgtacgcgcgtagtggtcatcataacttggacgataccgaggaacctttggcagcacgccaagtctacttaggcagtagatgtcaaggcgcatggagatatctcaaggtgaccaacattagttgctccggcggcggcgcgaaggcggcggagccatgggcggagtcggcgaaggtgacgcgtgggcggatcaggagcagggcaacggcgggggcagcccgtggtgttggcggtggcggcggcgaggcgaagcggtcggagatctacacgtacgaggccgcctggcacatctacgcgatgaactggagcgtgcggcgcgataagaaataccgccttgccatcgccagccttctcgagcaggtcaccaaccgcgtcgaggtcgtccagctcgatgaggcctcgggtgacatcgcccccgtcctcaccttcgaccatcagtacccgcccaccaagaccatgttcatgccggacccgcacgcgctccgccccgacctgctcgccacctccgccgaccacctgcgcatctggcgcatcccgtcctccgacgacgccgaggacggcgccgcctccgccaacaacaacaacggctccgtccgctgcaacggcacccagcagccgggcatcgagctacgctccgagctcaacggcaaccgcaacagcgactactgcgggccgctcacctccttcgactggaacgacgccgatccgcgccgcatcggtacctcctccatcgacaccacctgcacaatctgggacgtcgagcgcgaggccgttgacacccagctcatcgcccacgacaaggaggtctacgacatcgcctggggcggcgcgggggtctttgcctccgtctccgccgacggctctgttcgcgtctttgatttacgggacaaggagcactccacaatcatttatgagtctggttcaggtggcagcagcggcggcggttccaactctggcgccggagatggtgggactgcgtccccgacaccactcgtgaggttgggctggaacaagcaggacccaaggtacatggccaccatcatcatggacagccccaaggtggttgtgcttgatatccgctacccaacactgccagtggtagagctacaccgtcaccatgcccctgtcaatgccattgcgtgggcacctcactcttcttgccacatctgcacagctggggatgacatgcaggcactgatatgggatttgtcgtctatgggaactggtagcaatggcagtggcaatgggaatggtaacacagccgctggagcagcagcagagggcggtcttgatcccattttggcatatacagcaggggcagagattgagcagttgcagtggtcggcgacccagcctgactgggttgcaatcgcattcgccaataagcttcagattctcaggtggaggcaacgatatgacgcgagttgcttcttcgagcagccgtcaagtaggcaagtagcttcaagtcgttcgtcgtggagggcccgcctgggggagcagtgggtgtgccttcgcaccaggcgggggaggggagccgaggaggtgaaggtcgaggcccccaccatgttggacgtcgtcgccgagcctgtcccggacgacgcacccttcttctaccgcgtcgagtcgctcgagcgtggctgcgtgggtccggcttccacctcattctccttggacgggcgctcaaccacgaggactgtcgacttcttgcacgactgcgacgtcttcttctctatcacggttgccgcctcgtctttcttcctccagtcgtcccgcttcttctccagctgcagcttatatgacgcagcctcctcctcccccccacagggcgcgcggggtcggcatcgatgggatcgacagcgggcggagacactggtttggcggcgtcggcagaccggcatctccggtacccgacaccacctcgctggtttggttcggcaggtaggtcctcgcctagttgggtag

SEQ ID NO: 39501 - DNA, 1347 bp, Zea mays
  Peptide Sequence Number=SeqID_82876
atggatttggcggccgaccgttgcgctggcggccgttggctcaccggacagttaggcattcccccgctttgcgacgacccagggttgaggacagcgatcttggattcgctgccgacccttgacgagagcggcgtagcggttcgccagaccggcgaccgggacccccatcgccggattcagatccccgacatacggggcagaggttctcggcccaccgatgccgactctagacctccccgggcaactctcagtccctcgggcaagggcaagggagctgcgagcagttcttctgcccttggtggttccgagaggaagcgccagaaaacagctggcagggtcagagaggccggttccccggcccagggcttgcagaggcgcgtcagtcctctgccagcaccatcatcagtcccgccaccaccgccgccaccatcatccggcctgccaccgccacaggggcaacagcatcaacaacaacagcagcaaagccagcggacgtctcgcttccaaggtcgttggaaggtccagggccccaaggcttcttcttcctctgtctccaaggccgctcccactggtgagtctggcttacagcagcaagtatctgccggtcttgatgccggcaacctgccttcgactgctactgttgaggcggcgcccactgggccccccagattctggctggcactgccgaggcagcgccgtcggtcccctaggtacccgccgggagtccagaagcaacgccgtcaggcccccaggtttcggctggcactgccgaggcagtaccgtcggctcccccaggcaccagccgggcgtccagcagctgctgcactgccaatgattacggcagacccaacgacggtggcgatgtcgaatatgccttcggcgacggtggaacccatagggggcgtgcctgattccatcccgccgcctgttctggaggagccagaggtcattcttgggcggtggctccaggtcggtgctggaccagaaacagcgccgcctcccctccctcgggtgctgtcccgcgctcaccaggctctccaagagactgaggcggcaatccttcgggagtgggaggatcagcgggataagcagaccacgactgaggcggcactgcaaaagctgcagcaggagcttgatgacaaggcttgcaaaatctctcttgccgaggaaaacctcagggcgaagggtgtcttcctggaggagcgggcatcggatctcatccgaaaggagaaggaactcgcctggagggaggagatgtgggaaaggcgggacaagttcctggcggagcacgagcgtgaggcggaggagaaggagaagaagctggaggagtgggtctactggttctag

SEQ ID NO: 39502 - DNA, 202 bp, Zea mays
  Peptide Sequence Number=SeqID_82877
atgcctgatgtcgttgcagttcttatcagcgatagcgtcactttgccagaaccaaagcagccagcttactcctatgcgaaagaagattcagctgccacacgactccgcctggcgttcccggactccccctacgagcgcggatccctggcgttcccagactccccctacggcgcgcgcgtgtggctcgacacgcggatccctg

SEQ ID NO: 39503 - DNA, 519 bp, Zea mays
  Peptide Sequence Number=SeqID_82878
atgagtaggcaggtgactttttccaagaggtggaacggactgctgaagaagatgaaggagctctctatcctctgtgatgcgaagattggcctcatcatcatctctagcaccagcatgctctacgagttctccaacaccaaatcgagcagatttggaaggctgcagggagtgaagcgtgcgattgcagggaggaacctttacaagaggtgcagctgcagctgcagcacaggggatgccatggggatgaacatgatctccaaagatgtcctctttgttcgtgttggtggatcaggtgagcaaggcagcaagggagaagtggcatgctatattagattaagacacgtgtggtggagaagggctgctggccttggctttgtgggcaacacactggttgaaggtgactatctatttgttccttcgaaatgtcagggtggcattcaaagagttcatattataaaaggatgtgtagatggatcacttctattaaaaattttacaggagatggagaaggaacaatga

SEQ ID NO: 39504 - DNA, 660 bp, Zea mays
  Peptide Sequence Number=SeqID_82879
atggagccacgggctcgcgcagcttcctccactgcgctcaactacggcggcctcccctccctctcctccaccccaccattggactccacctcctcccccaccgcaccgtcggaccccacctccctaatggcggcctccagctcctccaactcctcccccatcggctgccttcacccaaccctcatcttcatgcgcggcacaatcgtccctaatcccatgaccccccggtcagcggactcttcctgtacccacgacctccaccccaagcgcaaggaccgcctcgtcgagcgcgcgccctacgcccgccccgttgtcccccgcggaggagccagagaagaagacggtcaagccggcctcggccttggcctcctggctcgggctcggcagcacggactccacctcctcccccaccgcacccagtcgccgctcgcccgctcccccttcaacctccaagccctgatcctgatgtaccagctttgcaacagcgtggccttcgtccacgaccccaaggtgctgcaccgggagctcaagttgcacatccttctcaaggaccacaagaccatggtgctcaagatcgccgacctcagtcttagccacgccatcaggcaccaggagtctaaccttcgctatgctctccaggggtttttcatggatctttaa

SEQ ID NO: 39505 - DNA, 831 bp, Zea mays
  Peptide Sequence Number=SeqID_82880
atggggaaacactgccccattcctgacgaactattcgtcgaagttctcggatcaccgccaaaccgcctcccgccaggattgttggtctccacgaccacctgctcactcaccgccgcttgggtgctgccagaggtagaagatgatctgggcatcgtcacccaactcgaactgtggccggtgctggagaacacgacgataactgcgtcagtcttcctcgtcgagcacaacgctggcggcggctgcggccacctgcagcctgccgcggtgcagcgccaggctgaggttgtggctggcaacccatgcagcgagctcacctgcaagaacaattacgacgccacctggtccctgcccaagaagccctcgtggaccggcgacgcgggtctgtggaatagagatatgggggccactgttttttggtgggatggggacccaatagctatggggggccggtgcggtggcacccctagcaccccctcagagccggccctaggtgcactgctcgttcgttttgagaacgagaggctgcgggcgggcctggaggaggcccggcgccggcacatcttggccgtggtgtcgaccatggagcgcgccgccacgtggtgcctgcgggcggcggaggccgaccttgagcgcgcgctggagcgcaatgcggagctcggcgatagggtccatcagatgggcgcagagggccagacgtggcagggcatcgccaatggccacgaggctatcgccgcgggtctgcgcagggacggatccagcgatggggcaggcggggctcgagccccccctaatgctttggattctatggagccccactacatcctcccctaa

SEQ ID NO: 39506 - DNA, 465 bp, Zea mays
  Peptide Sequence Number=SeqID_82881
atggcgtcagtttctgttggctgtaacggtagctctgatgacaaccgttactgtccgttcgcctccttctacgcgcgtatatatacagaggagcccattcctgtcccaccttctgcgagcacagagagtgtgggagagcagacctccgaaatcgccattcgcagagctacacttgcacgggtgtgcgggcgatcaagtttttggggagcgtactcgcgactgctcgcttcgttcacccgaccaacgctgatcaagttcctcgtcgacggcgccgttcgagggactgcactgactacatcgactacgtacgactacatcgaacatacacacgagatatctcgtgagaatggagccaccgatgccttgagcatcggcccctccgcagatcacaagagcttttcagaagccacggttcaaccaattttaattaagttttgtttatggaaaaagaacactctacactag

SEQ ID NO: 39507 - DNA, 381 bp, Zea mays
  Peptide Sequence Number=SeqID_82882
atgcccttctctattggactagttaagaaggttgatagaggatctgacaatctatttcttgttgactcacatccatctttcctcccggataaatggatatgcttcgtcatttatcctaaggttggaaaggtgctggtgttcgactccttggattacaacccttcgagctatgcaaaattcctcagcatcttagagtttgccacaagcaaccacccggatcggtcctatgtgggttctatgtgtgaatttcaacaaggaaagatgaagaatatgaccaaaggtgcattgtacaacataattgaggacctatgcacattcataatgagagaagtcattcatgttgaagaaaaaatatcacgatgctaccagtatcttagctag

SEQ ID NO: 39508 - DNA, 288 bp, Zea mays
  Peptide Sequence Number=SeqID_82883
atgaagaatcaaggatgtgcatcctccaagatgaccctctccaaggaaaatgacaaacagcaagcgtcatgtcaggttgagcgacgcttctgctacaagtgtggtgagcagggtcatatatcaaagtctcaaggtggaaaagagaagatgagcaagaaatggagcaatcgggacttgggtacctccgatgttggagctaagaaatgtcaatccagatcaagtcaagccgacttgatgatttatgagtccaacatcaaagctcaagcatgtgaaatgctatggatgtaa

SEQ ID NO: 39509 - DNA, 498 bp, Zea mays
  Peptide Sequence Number=SeqID_82884
atgtccctttgggcacacctcgatctcgatattttcactagtgatgtgatcatgaggataacaaaggcagatcgagttgtggaccaagtttctcatgcttttacttatggcaagttgatgttgaaggatgtcgaaggatgttggggaggcgcttccctagctggcatatttaaagcaaaggatggcataatgaagtatattcctaatccacgacatggttggaaaatagttgctatgagaggagctagaccatcttctacacacgatgctacgaaggcaggaccttctagtagacctactcctcctcctgtttctcaacaggaagttccacaaatagaggcatatgggctttcttgtttggagccactacttgtaggagaaattgctactattgttgacattatttgtaaggatgaggttttgagggctttgagagattgtaatagagatgtttcaaagatgtctggtaaatatccaagccaattagctgaagattga

SEQ ID NO: 39510 - DNA, 1149 bp, Zea mays
  Peptide Sequence Number=SeqID_82885
atggccacgaaccatctctcccaagggcagcaccagcacccgcaggcctggccctggggcgtggccatgtacaccaacctacactaccaccaccagcagcaccaccactacgagaaggagcacctgttcgagaagccgctgacgccgagcgacgtgggcaagctcaacaggctggtgatccccaagcagcacgccgagaggtacttccctctcagcagcagcggcgccggcgacaaaggcctcatcctgtgcttcgaggacgacgacgacgacgaggctgccgccgccaacaagccgtggcggttccgctactcgtactggaccagcagccagagctacgtgctcaccaagggctggagccgctacgtcaaggagaagcagcttgacgccggcgacgtcgtgcgcttccagaggatgcgtggtttcggcatgcccgaccgcctgttcatcagccacagccgccgcggcgagactactgctactgctgcaacaacagtgccccccgctgctgctgccgtgcgcgtagtagtggcacctgcacagagcgctggcgcagaccaccagcagcagcagcagccgtcgccttggagcccaatgtgctacagcacatcaggctcgtactcgtaccccaccagcagcccagccaattcccagcatgcctaccaccgccactcagctgaccatgaccacagcaacaacatgcaacatgcaggagaatctcagtccgacagagacaacaggagctgcagtgcagcttcggcaccgccgccaccgtcgcggcggctccggctgttcggcgtaaacctcgactgcggcccggggccggagccggagacaccaacggcgatgtacggctacatgcaccaaagcccctacgcttacaacaactgtacattagctgcatccaggactgatgcacagccttcagataataacagaactgatgccaaaatggaaaagagatccaacttccacacaaccttctacaacagcaaaatctgcacagctaagaacatacagtgttacgataataacagaactgatgcacaaggcggggatccgttcagacttcagatgagcagggccccccgcacctgcgcttccatctgctacgcacagttcaagacgacagtgctgacattacgctag

SEQ ID NO: 39511 - DNA, 177 bp, Zea mays
  Peptide Sequence Number=SeqID_82886
atgagactacgatcccggagctttcgcagtgcccccagcaacgacttgaggctacgggccggtggatcggggccggagcaggtcgtcttcgaccagcgcctccagatcctcgtcagtgacggaggatacaggccacatgtcatggggaggaaggacggtgatcttttccaccattag

SEQ ID NO: 39512 - DNA, 360 bp, Zea mays
  Peptide Sequence Number=SeqID_82887
atgccgcgaatcctctgcctcgcccgagctcggcctcggccacctactacgccgcgaatcccgcagacggccacttcgcccaactgtggcacacatcaagggacggctcggctaacgcctcgggaagacttctgcctcgaccatgcaggggctctgatctggataagcacaacagggaatctcgacgtcatccgtgccaggacgctgacgcaccctattgtatttttaacagatgagatagcaagtggagttacgagacacaagtcatgcacggctctgttctgtggcgggcggaaaggcgcagtaacgatcgacgtggtgggggccattgtctacgcgtggcgcgccgccaagatttga

SEQ ID NO: 39513 - DNA, 309 bp, Zea mays
  Peptide Sequence Number=SeqID_82888
aacaggggggatgccttcatctgcgagccgtcactgacaccagagagtcacaaagtttcatctattgccaagggtaacatacagatagccccacatcagggagacaatctgctccaaggaacagaaattgtcacttctccgcctagcgtgcagacaccatcaggagctgcttacagcgtgctagatgggtctacaaacaaggctcacagaagtgttactggaaaaaggaaggttgccaagaaactttttagagatgaagacacaggagatgacgatgttgctggttctggagacgttgatgctgagtag

SEQ ID NO: 39514 - DNA, 774 bp, Zea mays
  Peptide Sequence Number=SeqID_82889
gggaaagcagctgctgagggtacagtgattgcggtgcctgaacataagaaactcaaggatattaagtacctccatccttttgaaaataagaagaaggaatggcttgtcatcgtaaagattctcaagattgatagatcatggtggtacaacgcatgcaaaaaatgccttaggacaaccaaaccacacggtgacacatataagtgcaccaatagttcctgtgacagcattggatcgcctaccccaaggtcagctcttctacgtctctccccgttttttgttaaggaccttctagacaccttctatttagatctaaaaatgttaactcacacgcgttctaaattaagcacactgtacaagatatccctcaccgctgaagacgacactgacaccaccgaatttatcttctttggacgaatggcgcaacgcctcattaaaaaaaatgtggacaccctcatctcgactaatccacccgatttcattccaaaagagattacaaatctactggaaaagtctttcgagtggaatgttagcttcaccgaaagcacaattatttatggcaatgtttccttccaagtgaatgctataaacgcaaaaatggatggtggcaacatacttccaactacaccgtcctcacagccatcgtcgaccattctttctcaagaaaattacttgaagcaaccacaatattatagctcaggtagatatttagaatatgttccgcccatattaaagactcagccacattacactgggagggtccataacagcgtttag

SEQ ID NO: 39515 - DNA, 381 bp, Zea mays
  Peptide Sequence Number=SeqID_82890
atgccgaatgtgcttatagcccagctgggtaaaacaaaggttgataaggctgaagagccaaaaattgaagaaataacgaagatgccagagattttgagccctccaacaaagacaacagtaccgaagttgccaaagcttccaaggcgctacccaaaggtgattttaagcaagcagaaatcgaaggtacaacaattcaggctgaaaccgaagctgggccttcagtgcccaccgagatggaacatgttgaccctaaggaaaaatcaacatagtggattgcaactgaaaaaatcgcagctcctggtcccgaagcatcgaacaaaagtattgactacattattcgccatgcttcgggaaaggtactatcccaagaagagatgttag

SEQ ID NO: 39516 - DNA, 1199 bp, Zea mays
  Peptide Sequence Number=SeqID_82891
atgaggctctccaactcgtctttacatgggaaggaacgcgcggacttggaacaatttagcaaatgggtcttagatatcggcgatggtgctttgccagccatgacaagaggagacgagtccgaacctacatgggttacgattcctgaagatttattgatacgcacggatggtgatgctgctgcgaccctcatatccgaggtctacccagatttgttagagagatatatggaccctacatacctagctacacgcgccattgtatgtcctaataaccttacagctgataaaataaacaactacattgtctcaatgctccctggaaatggtgttcaatgccttagttgcgacacgatctcaaaggcgtctgaacgcatacctgattttgacatgttgtatcctactgagttcctaaactctattaatgcagcaaatttcccttgccacaaacttgtgctaaaaacaggcgttactgtcatgctgctacgtaacttgaaccagactgcagggctctgtaacggaacaaggatgcttgtaactgagatcggccatcgtattcttaaatgcgtagtactaacgccctccggagtcggagaagaggttttcataccgaggattgcgcttaacactaccgacgtcaaatggcccttcacattgcagagaagacaatttccagtacggctatgctatgccatgacgattaataagagccagggtcagaccctctcaacagttggcctctaccttgacaaacctgtgtttacgcatggccagctttacgttgctgtttcaaggatgggggacatactcattcctagccttatggttggagactgctctcacagcctgtgtgtgcgtgtctctaggctttgggaattccttgatcctcaggatgacagtaggctcctgcatactgatcttgttttgcttgatgaagagggaaatagcatacatgcccaggtctatcctccgttatgccaacagttcagtgcgctgcttgatgagggagggatcccccctgcttttccggtttgcacatataacctcactcccatagaacagctgcaaccgcgcgtggactacaaggaatatttcatggatgtgctcggtgttgtcagtgtgatctcccatgtttcgtcgctgcgcacaaggggacgacaggctgaggttatgaagagaacagtcactataagcaatgcaag

SEQ ID NO: 39517 - DNA, 780 bp, Zea mays
  Peptide Sequence Number=SeqID_82892
atgaggacaaggactccctcatcaaacgcagatgggaactcaggatcgggacctagtcctacggcatgtaccaaaccaagaagggctccacaactctcccccagctgggaaggaaccttcaaggtgacgggaatacgtcgacccgagggtgactatcttgctatgactgaaggagtacctcttcctggtcactggagcatctctggccgcgtggtagctagctccaagcggttcgccagcggaggcgaccacctcagcaccgacggcagcggccacctctgcaccgacggttcgccaacgacaacgactacctcacctccaagcggctcaccagcagaggcaaccacctctgcaacgggcagccttaccagaggcagcgaccacctctacgccgggcaaccccctagcggtggcgaccaccttagcatgcgcgccatggcgaagaggtcctcacctccgccccctatgggggtgaggacaagaccatccaagccatggagctgggagcacgatggaaggcggtccttgcagtctagccgcgaccacgtagccgaagtttgccttcttcacaaggctggtgaacatccttttcctccgaatgctggaggaagaggcgggcaccagcccatgtgggaggcgaagccacggctcatctcgctccccaccaccgtgaggctgatgaacatccttgaagccaagcaccggtggaagagtgccgctcccacaaggccgcgcacctccaacagaggaaaaacaataccggtagcaccggcccgctag

SEQ ID NO: 39518 - DNA, 378 bp, Zea mays
  Peptide Sequence Number=SeqID_82893
atgaagaacgcgaaggtacataatctgcaaaagatcacaggtgcagtgaacgtgccaccagtgaactctgtgtcgcggtcctcgccggtgttgcgattcatgcgctctggcgtgtggataacggtcgacggcgaagagatcttgcgcgaggatgaatttggggcactgttctaccctatcgccgtacccacttgcgtcgcgcgacatagctacgtgaccgccaccgtcgtgccgccgtttatcacggttatgacacgccttcggtcgattcacctcgttgtcacaagccgtgaagactcggtagtgaccgctttagaccttaaaccagtgagcgccacgttagcaactccggtgaaacttcctcctttctcaccgtga

SEQ ID NO: 39519 - DNA, 411 bp, Zea mays
  Peptide Sequence Number=SeqID_82894
atggatgcaagagtcaccaccctgtgcgatgagttgtgcaagctgaacctggaagttgtttcttcgggtaacctaagctatatctcggtggagcccactttgcaagagcagatagtcagggcacaggttgaggataagggtgttcagattatcaaagatatgatcaagcaaaaggcagaaaaatacaagtgtttcctgatgtgcacccgttgggtgattgcccgatctttcgatgagagggtgtggaataactcgattgggggaggagacgacgttcacggcccgactacagccttccaaagacgctgcgccttagcaaccgatacaccacctcctatggctgtcacgatcttgtggagcgtgacaccctggccactagggcactcgtcctgcaagcaatcgaagaactag

SEQ ID NO: 39520 - DNA, 2343 bp, Zea mays
  Peptide Sequence Number=SeqID_82895
atggacgaggaggaagagcgcgagatcgggcctgggcggcatggacatcacgtgttccaggccgtggtgtgcggatccagtcctaccttcctcggatttggtgtcctctcgcccggaagggggcgagtgctgcacggcccaccgacgcaccgcacgtggagccccgtagacgcggacctggcggagctgctcctagagggcttcgtcaagaggacgagcgacagggagctggtgcggccaccggcagcgacgccacagaaggaggtcctcgtgcacgtggccatgggtggtttcgtcacgcactacgggtgcatgaaacatataaagtgcctgaagggctcttgtgatctcgagtatgttgtatggcacaccgatgggaagaaggggtcaccctcaccgaccaaggctaaatggcaggcttcccaaacagaggagaagaatcgggctacttcacccaagaagaaatctgttgcttcccctgggcgtggtattctggcaattgatgagtcaaatgcaacatgtggaaagaggttatcatctattggtttggacaacacagaagtgaaccgccaggcttacaggcagcttttgctgacaactgctggtcttggcgaatatatttctggtgctattcttttcgaggagaccctttataaatcaactacagatggcaagaagtttgttgactgcttgaaggatcagaatatcatgcctggcatcaaggttgacaagggtttggttccattgcctggatccaacaatgaatcatggtgccaaggtcttgatggtttggcttcaagctgggttgatgtcgtttgtgaggatggtgtgtcagtgttagctctggagcagccggcgttccgccccgccgtgccgcccgaccgcttcatgcccctggccgaccggatccgggacctcggggtcggcgtcgcgttcccgaagccgacactactccccagcccctccgggaggtgtgattccacctcctgcccggtagcaaaggctcccgatggtaatggcggagtatatgctgctctaaaatctaaaaggttgctcgatgatatggctgcaaaaggtgttaactatgtagattgctatggagttgataatgtattggtctgtgttgcagatccaacattcctaggatacttcattgacagaggtgtatatgctgctgctaaggttgtcaggaaggcatatccacaagagaaagttggagtatttgttcagcgtggaaagggtggacccctctctgtagttgaatacagtgaaatggatgcagctatgacaactggaatcaatcaaactactggccgccttcgttattgctggagcaatgttttgcgtgaggaggaatttgcgccagtgaagaatgctaatggtgcaacttatgacactcctgacagtgccagattaatgctgcttcggctacatagccgctgggtggttgctgcaggtggcttcttgactcattctgtacccttgtatatgacagccaccttcctccgctcgccgtgcttctgcttcctccgccaccaccgccggcatggctgcgcgctgccccctacttcgccgtcgaggagtcctccccgcggcatccgctcgggggagtccccggccgcggcgctccgccggatcctcgcgacgcctggtgcgcaccaggcgccctgctgctacgacgcgctcggcgcgcgcctcgtcgagcgcgcggggtttccgatcgggttcatgggcgggcttagaaataactgcatacaagattttgcttacttgtccaaaaggaaccatctggagatattcaagttatctcgtacattggagtcttcttatgatggtaccttttcaggtttctgtgtttctgccgcgcgacttggcttgcctgatgttggcctcatttcctatggagaaatggtagatcaagggcgtctcatcaatgaagctgtttcaatcccagtgattggtgatggagacaatggttacggaaactctatgaatatcaagagaaccataaaaggatatatcaatgctggttttgctggaattatgcttgaggatcaggacgctcttcaccccgttgccactagcactgctctgagcgcgcgcagcctcccctctcctcttccgtcctccttctatccgcgtcgccaaatgcttgagcgcagcctggagaggatgtggacgggaggggccaccgtggaggtgagggaggccgtcaggggccgccgcgccaccaaatcgctaaggtcagatccaaccttgaaccttattccatccctacaacaccctaaggcgtcctcttctcatcgccttttgcctctccaaggcatcggggcgacgccctaa

SEQ ID NO: 39521 - DNA, 2892 bp, Zea mays
  Peptide Sequence Number=SeqID_82896
atgccgacctcttcttcttctgctgccgctacgccgccggccgacgcgtcgtctgaggagacgctgagcactgtggcggcggaggagttgcgcgccggcgacacggtggatttcggtgtgtcgcggatgtcctcggtctgcgtgcaagatatgcagcagcttggctactttggcggcggagtcgctcgtgtcccggggacggaggaggtccccgagccagaaggcgagttggttgtcttcgaggcgttctttgccgctgtcgaagaccatccggggctccccgtggccgagatgtgctcgcattattactcagcatacccgcagtttgaagtggcggaggaggatgcaaacgaagggacccttcggtgcgcggctggcctgagcagcgggcgcgatttggttgaggagtttgtggcgtatgaggtgtggcctttggcgcatggctgggcgctgggcgaagtatgcccttgccagatgccttcccgtggtgggatgctggtgcgaagtcccgccttcgcactggatctgcatagccgcgacccagccgccttcgtgcgtgaggcggaggatggggcgatgcggattgtcggtcggtacgtgccgaagacagagggccagcgtagctgggatatacgcgggtctaatgaccgcttgaacagggtcttcgagttgaactgtctgccgtatggcggttatcccgggcaagaagatgtggatcgtcgcgggaagaagccggcggtagagactggagacgaccccgcgccggcggccgccccgtcctctaagaagaggaagctaggtattgctacgggaggactgggggtttctgatggttttgctagggaattgatgaggacatgtgcggccccggggggaaggatgtcttcgcccgagctccgggagtcttcggcgcggatgctgagggttaccgggggttggtggcctaagaatgttcctatcccccgcgcggccggcgaatacttttttacatctcgcatggttcgtgattggagagtgtttccttacgggcggaatattgctgctgttgtgtcggcagtgttggacaaggatcgtcagggagctgcgcagaagcgccaggcggtcgtcaggctgcatgaggccaggccgaagaggtcgcgggggactgcgaaggctgctgcccccggcggaagccagccgacgctggcggcgaagtcggccgcccctgggtccagcagggtgccggaggctgtgaaggcggccgccgccggcggtaccaagtctgtcccggcgggagccgtgaaggcccgagagttgcctccgccgggcaagcgcgttgccgacttcgccaccgatattagcgtggatgattatcttgttgggtcgggcgaaggccaacttgttgttgttccgcttgccgtggcgaccgcggcggctgccgtggtgcccagggcgaagggtagtgctcttagtgccggtggtgagattccggcactcactgccgtcagggacgagacgggcgctgtgtcccgccggctgaaggaggcattaagtcaggcggctgacttcgcagaccgcgcggcgtcgggggcccttacggcagttgtgtctgccgaagtcgagagacttcgggcgcaacatgctgacgccgttcgggaaaagtcggccgccgacagcaagtgccgcaagttggcggataaggcggaggccaatttggcgcgggcggagggcagtcttgccagacagcgcgccgaggaattggaggagcggctcaacgctctgcagacccgtgtggagagggccgaggcttcgacgcgctcagaggttgagcgaacacgcaaacagcttatggactcataccacgagctgggcgcgcgaaccgctgacttcgaggtgccagaccgagagcccggacttcgctgcctcgagtggctgcaggaggagttgctggcgctccccgccatcgtggaggggtttatgtcctatgcctccctggtcacctgcgaaggggcgatgaacgcgctgtcccgcgaagggtgccagcactatgaggtcttcgaccaagctgatgaggatttcgagcgcgatatttacaaggttgaggaccctgtagtgaaggaatccgcgggagccctcttcgaccggatgtggggtcctcacggtcgggaggtggtcagggagcggcggcgcgtaatgagaaaggtggaggacttcggggctttgaacaacgcgcagcctgactcagagtcgaacccggtggcggctgtgtccgaggtcgccccggcgccgcccccagaaaccgtcgaaggcgttcctgatgcccccgcagccactgcggccggcggaggctcgtcgccaactgctgcgccgagggctgaggatcctgtgaagatggcggcggagccggcagcggaggatcccgcgacggctgggccttcgcaggttcaagattttgggcctgcgcacgcaaccgatactgctaattttttggcggcttcgaccgtggatgatggaaataaatcggatgagtctgcatctaagttttctgattttggtgactctgggagctcggttgagtggactgaagagtcgtcggatgaggacttggactactttccggccttggatgtggcagcggcggaggcttcgtcgcgtgctgcggatgctgaagttgtgcctggtccgagtgttgggcgtaggcggcgaagggcgattgcgaagcgtagagtgagtgaggcggacggcggtcggcttcgtgtgagcagggctggcaggcaggaactgttgtccttgccggccgctgtgagtgcaggtgagggggagctgcgaagtctttttgcgggtgaggaacggaggataatgctatttaactatagggagatgggaattattccgaaggttgagccgatgtaa

SEQ ID NO: 39522 - DNA, 660 bp, Zea mays
  Peptide Sequence Number=SeqID_82897
atgaagcggtcgggcggcacggcggggcggaacgccggctgctcctgcaggaaccgtcggagcccgaacgtcgtcggcgctcaaccgcacggcggcaaggaggaggagcggagcagtggcccagggtttagggatttgatttgggaggaggatcgatctcaacccgtggaggggggaggcggggcggcggcggctcacgcggggtgggggagggggacgaacgtgggcgtgggcgtgtggacggttcatgcattctctgtttgtgatgaccctgaatacttctatgactatgtccaaggcctgattgatggacttaattctggtttggattcacgtgatatagttagcatcgaaaatgctaaggggttaggctatgccatgaacacagccgaggagcttaagtttgtcaaagacatagctgcatcaacaggcattgtccttgatccagtctacagtgggaaggcggtttatggattgctaaaagacatggctggcaatccagccaaatggaaaggtcgaaaagttctgtttatccacacaggtggtcttcttgggttgtatgataaggctgaccagttgtcatctttggctgggagctggcgcagaatggatcttgaagattctgttccacgcaaagatggcactggtaagatgttctga

SEQ ID NO: 39523 - DNA, 51 bp, Zea mays
  Peptide Sequence Number=SeqID_82898
atggtgctggctccaccctcacctgactgggtcatcgactctggtgcataa

SEQ ID NO: 39524 - DNA, 243 bp, Zea mays
  Peptide Sequence Number=SeqID_82899
atggcccagccgcaccagcacccccgcccagcgcgctcgccaggccgcctcctgtgcgcgcgcgagctccatggctcggccggccatggtgcggccaagcctggcggcccgatgcggcaccgtggccagccccgcgtgtcgcggggtcccgacgacatccgtctacccctagacgacgcccgtctacccctagacgactcccatctaccccacgtctaccttgtctactcctccccgcgctaa

SEQ ID NO: 39525 - DNA, 227 bp, Zea mays
  Peptide Sequence Number=SeqID_82900
ataacggtcagttggcggagtccgaaggaggagcaagggaagaccctgagcagcagatggttggtgaaggtggtgatgaggatgatggttatgattatgcttatggtactggtaagtggtattctttccgtttggaaagggttgtccgcgttgcaaccactgctcaggtgaagatgaaagtcgtggaggaggacttccaggagttccaagagtacgatgagttctag

SEQ ID NO: 39526 - DNA, 129 bp, Zea mays
  Peptide Sequence Number=SeqID_82901
atggcggcagccgtggctaggcggcacgcagggaggcccgtcggaggaggcggcgccgccgccatgggtgcgacgggtcaattccctgtatgtcattggaaaatatacttgttccttgtgtggcactag

SEQ ID NO: 39527 - DNA, 1410 bp, Zea mays
  Peptide Sequence Number=SeqID_82902
atgtggaacgagcttctcctcgaggagctcaccctagcgattaaggcacccgctctggcccccgactctctacaacgctcgtcccggaggtcaggcgtcttccggggagtaggcccctcgtacttcattgaccgggccccccgcttgccctcctactgcatcccctacgacccctcttccggccctgtcgcgcgcaccctgcagccccccgcgccctcggccccacgcccccctggcggctcgcccccgtgcggccccgcgtccgcggccccgcgtgctcagcccccgtgccgcgtccctacgcgccccggcggctcgcccccgtgcggccccgtgcccgcgtcccgcgcgccccgcgcctcacgtcccgcggcccctcgcccgctcccctggtggctcgcccgcgccctggcggccccgtgccccggcgactgcgcgccccggcggccgcgtgtcccggcggccgtgcaccctggcggccctgcctcgtgtcccagcgtggcctcgcgtgctgtgttcgactgtagttgcgcgacgttcgactttcagcttaatccctttttcaattttagtttagtcgatgtgctgtgtcgtggtgatgaggatgatggttatgattatgcttatggtattggtgagtggtattctttccgtttggaaaggcaggagatagagtctgtgaggagctgttcccctgtgctcccgctggaggtgccccctgcaccaccactgagcgccccagccactagagtagctactggaggagacctagacgacggaggtggtgacagcagctcgagccacgacactgacctttcagaggagcaggagctggaagaatgggttgcccaacccatcacccgtgacgccgctcgcgggtgtcacttccacgacgcgctcgacaccctactacgccaggcacttgaccggcgtacttggtctatcgaatatcgctgtgttgtcttccagcacagtcgcggggtttacccggaccgttgggaggcgacctgcttggtgcgccgtccggagaacagtctctggggtgcggaggtctgctcagagtactattccatctctgagcgggactcagctgaggcggccatgcaagatgtcgcacggcgtgcgctttcgcactactgcgcagtgctcggcggggtagctgatggtctcaacctgaacacagtcaacctagccgccgtgctaaacacggagttggaccatgcattatacgagctgagtagggctcatgctgagatcacccagctatgggttgagcgcgcagagcatcgtcacctggaggatggctcccccactcccgtcaggactcagcacccgtatcgctcacctcagcgtggacaccaggcttatggcaaccccgactgcaggaccaagataaatttagaacaatag

SEQ ID NO: 39528 - DNA, 141 bp, Zea mays
  Peptide Sequence Number=SeqID_82903
atggagatgcattattcccttgaggataatgaaccttggacgaaggttgatgagaatataattacgaagttatacctctgccttgacaaagattggttcctgaacgatgcgattgtaattacaagaatgcgtgaacagtaa

SEQ ID NO: 39529 - DNA, 387 bp, Zea mays
  Peptide Sequence Number=SeqID_82904
atgcacataaaagctgctgtagatgctaggaaagagagtggctctgacattgttattgtagcaaggacagattctcgccaagctatttctcatgatgaagcattatggagggtgaaagcatttgctgatgctggagcagatgttctatttattgatgcccttgcttcagtagaagagatgaaagcattttgtgcggttgcaccagaagttccaaagatggcaaacatgttagaaggtggtggtaaaactcccatattgagccctgctgaacttgaggaaattggtttcaggcttgtagtatatcctttatccttagttggggtatcaatgcgtgcaatgcagctgaccacattctctgtgcctctgtatcctttattggtggaataa

SEQ ID NO: 39530 - DNA, 519 bp, Zea mays
  Peptide Sequence Number=SeqID_82905
atgcatatggatacaaatgcatgtggatatggacaaccgggcggcaaggtgacgcaggcgcacggcgccaaggcgggtagcgtgagtgccaaggagatcgagtgggccgagcgacagcagcaacgggacggagcgaggggtggcgttctggtggggagaaagctacggctgcggagcaagcggcagcggcgccatccgaggcgggccgggcctaggccgagtggcggtggggatgcgcgatttgggcgagttcgaggggttgggaacttaagagaaactggttgtagaaatatgtggcgctactgcagacaggttaagcttctaaaaaacaatatccaggcctgccagccaaatatactatgtgaaagtattaagacatatctacaattctacacatacacataccaagttggcatatgttcagtcaagataatggattggaaggttatggtggatagggtaagcaggaacactacccctgttatcatccatggttctctgcacatgctttctcattga

SEQ ID NO: 39531 - DNA, 363 bp, Zea mays
  Peptide Sequence Number=SeqID_82906
atggcatggcaggcacctgcacgcaaccgatcctcccgctctagaaagacgaaagaagccatgcaatgcaatgcaagcaaaggaggaaccgaggcaactgtgaggatgggcccacgcgcacagtacatagaactcagcgaaaaccagggatcgataaagctgcagaatcttgcggtcaatctggtgtccctggtgcaccaaatctttgggccgttctttctcctccagacctgcccctgcccctgcctggcaatcttctcgtctctctctgccccagaccccagtgccagtgccccagcggcgcaggcgcaggcgcagcagcggacggagcctgccctccctctccctcccagaccccagtga

SEQ ID NO: 39532 - DNA, 681 bp, Zea mays
  Peptide Sequence Number=SeqID_82907
ccggggccgtggggggcctcgccggagggcaagcagcagggccagcagcaggcgggcgccatcgtgccgctgcggaggccgcgggggcggccgcttgggtccaagaacaagccgaagccgccggtgatcatcacgcgggacagccccgacgcgctgcactcgcacgtcctcgaggtgtcgccgggcgccgacgtgtgcgcgtgcgtggcggagtacgcgcgccgccggggccgcggcgtctgcgtcctgggcgcgtcgggcgcggtcggggacgtggccgtgcgcggcgccgcggcgccgctccgcggccggttcgagctcctctccgtgacgggcaccgtgctgccgcccccggccccgcccgaggcgtccggcctcgccgtgctggtctccgccggccagggccaggtcctcggcggcagcgtcgtggggcccctcgtcgccgccgggcccgtcacgatcttcgccgcgacgttcgccaacgcggtctacgagcgcctcccgctcgccgatgcccccgagctcgaggtcaagcccgacctctccaccgccacctcggctggtgggcaagatgtgcagccgcagctcccaatggcgccctcccaccagcaacctccggacatgggcgcgggctacgctggccaccgctcgcctccgtacccgtggggaggcgacgtatga

SEQ ID NO: 39533 - DNA, 552 bp, Zea mays
  Peptide Sequence Number=SeqID_82908
atggaggcgggacgatctgggacgccacatcgccgcggagctgagcctaccgatgggcccgccaccacggtccactacacccgctgtgatgtgaccgacgaggcgcaggtcgcggcggccgtggacttggttgtggaactccacggccgcttcgacatgatgcttaggaacgccagggtcagtggctgcctagcaccgggcctcgtggaggcgctggacctagtcgacttcgaccgtgtcatggccatcaacgcccgggtcacggtggcgggcgtcaagcacgcgacacgcgtcatgcgtggccggcgtgctggcggcatcgcgctgccgccctatagcgtgtctaaggccgtcgttctaggactggtgcaagccgtggctaggcagctcacgcggtcgggtgtccgcgtcaacgccatctcgccgacctacaaccacacgccgctcgtcatgggcaacatggccgagtggttccccggcgccaccatcaaggagcgctggcggatcgtgaaggacatgaacgatgttatgaatcaatacgacaccaagtag

SEQ ID NO: 39534 - DNA, 159 bp, Zea mays
  Peptide Sequence Number=SeqID_82909
atgaacttagagcagaatttccccagttattctcggaagtttcttaatctcgaggacgagattctttttaagagggccgccgcctgcaagcttgggcactgcctcgccagctacaccgcgcctctcgccgccgtgccggccgtgcacatcaccccatga

SEQ ID NO: 39535 - DNA, 891 bp, Zea mays
  Peptide Sequence Number=SeqID_82910
atggaggcggtggggaagagcgtgtgcgtgaccggcgcgggcggcttcatcgcgtcgtggctggtgaagctcctcctctgccggggccaatacaaggtccgcggcaccgtgcgcgaccctggtgctagcaagaatgctcatctcaaggtgctggaaggagctggggaaaggttgcagcttgtcaaggctgatttgttggactacagcagtgttgcttcagcaattgccggctgtgagggtgtcttccatgtagctagccctgtcccttccggtcggtcctccaaccctgaggtggaggtcataggtcctgctgtaacagctgtctatgctaatcctaattatcccaagggtaaggtctttgatgaagactgctggtcagatgaagcttactgcaggaagaacgaggattggtattttgtttccaagacactggcggaacgagaggcttttgcttatgcagcaaaaacagggctggatgttgtaactatttgcccgtcattagtatttggacccttgatgcagcctacagtaaattcgagcagcaaaatcatccttaaatatttcacaggagatcgcgagactgttgaaaacatactcagaaatatggtggatgttcgtgatgttgctgatgctcttcttctggcttacgaaaagccagaagcgtctggacgatacatctgcagttcacatgcaataaaagttgctgatatgataaacatactgaagaccttgtatccatcttacccttatcccaaaaatttcgtggaagatgatgacaactctgtatacagctctgagaaactgcagaagctggggtggagcttcaagcctatagaggaatccctccgtgacactgttgaatcctacaaagcatttggcatcctgaattga

SEQ ID NO: 39536 - DNA, 483 bp, Zea mays
  Peptide Sequence Number=SeqID_82911
atgcctacaccaatgagactgtgtttgttcagttccatcggtgtaggcatgatgatttatggccctggtcaagttaagggtgttcagaagcacgaagaggtcagtaaagtcaaggatgacagtgttctcagcagcagttggccacgtgctcctagccgcacgctgccgccgctctctgcttggagctctcctctcccgaccatagctacaccacacgactgtgagctcgtgaagggattcgatgagtacatgaacttggtcctcgatgatgctgaggaaatcaacgtcaagaaaaacactaggaagacactgggccgaatactcctcaaaggtgacaacataactttgatgatgaacaggacataccgactgacctttgaaagtactaaagaactgatagctacaagatctatggcatttgacattaacatcctagagaggcagacctgcaaaagtctaaccacatatggaccaagacgttag

SEQ ID NO: 39537 - DNA, 513 bp, Zea mays
  Peptide Sequence Number=SeqID_82912
atggccctggtcgtacgctacccgcacacgctgcaggcgaaggccacccgcatgtgccaccgtggtgatttcgtcaagagggaccaaggtagtgtcaacaccacccgcatgtgccactgtggtgattttgtgaagagggaccaaggtagtgtcaacacctcccgtctgcctgtcccgccgactctgctcgccgtcggtggcccctccattcccgaccccgtcgtccagccgctccccaaggcggcgcacaccaccaggcccatagccgcgtactgcccatgcgacacaggactcaggtcaaccaacatcacatcatcaatcagtcccagacgggcaccattcgaggagtgtggagagcgtagcagccataggagagggagcagcaagcacgagaaagggtgggatgggaatggaagacaacctggccacaataaatctctgcctctcatggcccaaatgtgtgacccaccagatctgggacttcgaagacatgggagctgtctacggaactga

SEQ ID NO: 39538 - DNA, 531 bp, Zea mays
  Peptide Sequence Number=SeqID_82913
atgcccgggcccgcccccgtcgcggcgccgccactcaccatcttctatggtggcatggtggtggtgttcgaggacttcccggtggagaaggcagccgagcggttcctggccaagcgcaaggaccggctcatcgagccctacgcccgcccgtcgtcccccacggaggagccggagaagaagacggtgggccccatcttcgagcgtctatctcctgctgcagctcgcccacagaaccgctcccgccgcccactcccaagattttcgccgtgctcgctacctagtctgccccgccgtcttcccccagatcgtgcgagacctgggtccacccaatcgccgctcgcccgctcctcccccacaacctccaagcccagatgccacaaggaagggggagggatgcggatggggacgatctacgtcgtcgcggcactggcgctcgacgtggctagcgacgtggtggtggactgcaaggacaacctcatcaccgcaaaagggtcacctctggcacttcgacatcgacatcgcctcgagtga

SEQ ID NO: 39539 - DNA, 1224 bp, Zea mays
  Peptide Sequence Number=SeqID_82914
atggatccggtgcggaagagcgtgtgcgtgaccggcgctggcggcttcgtcgcgtcggagctggtgaagctcctcctctcccggggccaatacgcggtccgcggcaccgtgcgcgaccctgcatttttggaccctttactcggcgtcatagcctatggcgccgaggtaacacagctcggcgccataggttatggcgccgagaccatctataaaaggaccatcaacagtttcaccgacttctttccaccaagccgtgaaacgttaagtggtaggttgcggtgccaaaacttggagcccgaattgcctaagcatcatgaaccaactttctctagagaagacacaagctacaaggagaagatcgattgtctccatttcccgatcacagagaggacatctttccgggtgatcaaggacacatttttcgagtctgtgacattttttgggtgcccaggttttccaaatcctgtcataaggttcaaattgtacagatccaaggaagaggcgctcataggcagctttagccgagtatttgccatcagtagccaacagaaagatatgcttatcatcttcttctggatgatgattgacctgtgcaacaatgtcccaacggtgaaggaaggattgtctccagaaggcgaggagcactatcagcgaccaactgccctccaggctccaagtgctagcaagaatgcccatctcaaggtgctggaaggagctgaggaaaggttgcagcttctcaaggctgatctgatggactacgacagcattgcatcagcagttgccggctgtgagggtgtcttccatgtggaggtcatagctcccgctgtaataggtacaaccaatgtgttaaaggcttgctatgaggcaaaagttaggcgagttgtggtggtgtcttcatgtggagctgtgtatgctaatcctatttatccgaaggcagatctcgagactgttgaaaatgtactcagtaatatggtggatattcgtgatgttgctgatgctcttcttctgacttacgaaaagccagaagcgtctggacgatacatctgcagttcacatgcaataaaaatttctgatatgataaacatactgaagaccatgtatccgtcttacccttatcccaaaaactctgagaaactgcagaagctggggtggagcttcaagcctatagaggaatccctccgtgacactgttgaatcctacaaggcatttggcatcctgaattga

SEQ ID NO: 39540 - DNA, 453 bp, Zea mays
  Peptide Sequence Number=SeqID_82915
atgggcaagagcaagaagggcggaagttcgtcgcaccacttcggcgacaaacggaagcgcgagccgagtcccccctcggaggacttcggtgactccgagtactcagaggaggagttctcctctgagtctgaggggtcaccggtctacgcccctcccccggtgtcgtccgatgactcagacgattcccaggggatcgctgctgaggtgtggacgtacatccgggccgtcgagcgctccgggctcgagggctcggatgagtcagagatctcctcggacgaggaggactcctccgactcgtccgaggaggggagcggtggtgacggcgacgacggcaatggaggcgacgacgacggtggaggcaatggcgacgacaacggcggcaagggcgacggtggcatcggcaagggagacggcggcagcggcagggccagtggcaaagcgccactggcttaa

SEQ ID NO: 39541 - DNA, 402 bp, Zea mays
  Peptide Sequence Number=SeqID_82916
atgggcaggaacaacaagcgcaagcgtgagccgactcctccatccgaggacttcggtgactcggagtactcagaggaagagttctcctctgagtccgaggggtccccggctccaatccccctgcgggcttgcggcggaggtctagacttacatccgggccgtcgagcgctctgggctcgagggctcggtgagtccgagtactcctcggacgaggaggactcgtccgaggagggcggtggcggcgatggcgacgacgacgacgacgagggcggtggcggcgatgacggtgacggcggcggcaggggcggcagcagcggcagcaaggatggcaacggcggcagcagcaggggcggcagcggcggcggcggcagcagcaagggcagcaacaaggccagtggctaa

SEQ ID NO: 39542 - DNA, 516 bp, Zea mays
  Peptide Sequence Number=SeqID_82917
atgaatgaaaatggaaatttgcagaatagaattgggattcaaatgggtcaggttaagatgatagaaatcaaggaggccgcggaaaaagggagaaatgggaagaccgagaccgcgaagaagaaaaggaacgtaaattacggactcatgggtatcctctgtcgggacagtgaccccatgacaaatccgccaagaacacagctccctcgagggaaggaccccgatggacacgaggtggagaaggtcgggctcgaagacaacagacatgtgacggagcaagagccgaattgcagaaaggatttggaggcaggaaagcaagaactagggcacggaaagcagaggcggctaaaagcacagtacttatgggatattcccgagtcagataccgtttctaaaagcacccagtcagcacctggcaggtactttcaaaacaccagcgcgccacgttgtcactcggcggtcacttccacatcatcactcggctattaccctcaacatggccggcgcagcccattctag

SEQ ID NO: 39543 - DNA, 810 bp, Zea mays
  Peptide Sequence Number=SeqID_82918
atggatctccctcgcattcgggtggagaacagagtgattctggaggacagctcggaggagtttctgcctacgcccaccccgttggcagaatcactagccttcgcaactggatcgtcagcttcagcaccgccagcacccgcagtccaagcccctgctcctggaggcgacgacccagacgactttggtgacgatgatgaagacgatgaagaagaagaagatgaggaaaacctaaacgatgaagccaacaaagaacaacaggaccactatgtggggttatggcctatcactgaacattacaccttaatgttcaagacagggcacttccctaacctgctgcaggatgttctgcatgcgttgggaacctatgttcggcccgtgtatgagacaagggaagtgtacgagcctcctcgggcttgctactacatcactcgcattcatgacagggtaatggataaaggtgatagaggccacacctaccggcagcagctgcacaatacgaagtacatgcatcttcctctatgtattcgtggagagaaccaaactagcattgttccaggtggagcaaatgaagatcgcctcaacaccttagctggtgtggtggcaggtcttaacaccgacctagatagtgctaccctggacctctctatggtacacttggagttggaggatgcacatgcaaggatcgcagccttggaagcctatcttgatggaaggaatcccccgaaagttcaattccccgctatggcgttatcccctccccacaagaggattcgctatggagaaccagtatccatcaccagactgctttag

SEQ ID NO: 39544 - DNA, 198 bp, Zea mays
  Peptide Sequence Number=SeqID_82919
atggcacgtctagccgatctgcagaagagattgatgaagctgctgaagagatgcgtcatcttactcaagatgaccaggaccgaaggcctcagcatagggagcttcgtcaagagaactcatacattaacgatgaatggcacaattacatcatggcagaagctcaaagacatgttggtcactagctttcaaggtttctag

SEQ ID NO: 39545 - DNA, 351 bp, Zea mays
  Peptide Sequence Number=SeqID_82920
atgaccttcttctggagatcattatacccgaagggagataatggatcgaaggacgaagacctcaacaccaagaaatccaagctctaccgccccaccaccacagcatgcaaatcaactattaccaccaccaccccaccgaagcaagaggacttcgctgaccaaccctttcaaggggtattccacatgatcaccgaaggatccagctccgaattcgacacaaaatggcagaagaaagaccactatcgaagggtcaatcatgtagccctcaccgggccagttgttcaaacaaagtggtccaatgtaccactcaccttcgacgcaagtgttggggactcgttctcaatgctatga

SEQ ID NO: 39546 - DNA, 1632 bp, Zea mays
  Peptide Sequence Number=SeqID_82921
atggagctggtcccctgtgcccgtaataagtggggcaactggtgggattactggttctatgtttcagaggccgaagtcaaagaccacccagggctccccgcggccattatgtgctctcattattatgtggcgtacccgccatttgaagtagcggaggatgatgagaatgaaaaggcccttcggatcgctgcccgccgggatcctgctgcggtcgtgcgcgaagcggaggatggggtggtgcgaattgtggggcgctacgtgccgaagacggaggccctacggagctgggatatacgcggatccaatgactgcctgaatagggtcttcaagttgaatcgcttaccgtatggcggttatcccggggaagacgttgtcgaccgccgcgggaaaaagccagcgactgtgactgaagaagaccctgcgcaggaggctgccccagccactaagaaaaggaagctaggtactgcggtgggggaactaggggtctctgatagttttgctatggagttgatggggacatgcacggcccttgggggaaggatgtcttcgcccgagctccgggagtcttcggcgcggatgctggaggttaccgggggtcgatggcccaagaacgttccgatctcccgcgcggctggcgaagacttctttacgtctcgcatggctcgtgacttgagggtgtttccttacggatggaatattgctgctgttgtgtcgtcagtgatgaacaaggaccgtcaagatgctgcgcagaagcgccgagcggtcgtcagaatggtcgatcccgtgcgcaaggcgaagagggcgcgggggagcgcgaaggctgcaggctccgacagtagcaagccggtgccggctgcgaaaccggctacgcccgaagccagcaaagcattgatgggcgagaaggctgcagccgctggcggaaccaagcctcccgcgggcggaccttcacccgcgaagctgcctccgtcggggaagcgtgttgctgactttggcacgaatatcagtgtcgaggattatcttgttgccactgccgctaaggacgtggcgggcaccatgtcccagcggctgagggaagtgtctcagcagctgtcgcagcagctgacgcagcagctgaagcaagcggccgactttgctgaccgtgttgtgtcgggcgtcctgactgcggacgtcgccgccgaagtcgagaatcttcaggcgcagcatgcggatgatgtccgggataagtcggctacggagagcaaaaaccgcaggctggcagagaaggtagccaccctagaggccgagaagacggacctccggcgccggctggcagaggagaggagggaggctaaccaggccgtcgctaaagcgcaggttgcgcaagcggagcctaaggtggcgctggcgaagggtagcctcgccagccaacgcgtagaggagtgggaggcgaggttcaacgccctgcgcagtcgcgtggacaaggccgagacctcggtacgctcagaagtcgtgcggacgcacgcacagctcgcggaagcataccgcgatctgggtgcgcggactgcagatttcgatgtgcccgaccaagaggccagcctccgcttcctcgaatggttgcaggaggagctgctggtgctcccgactattgtgtag

SEQ ID NO: 39547 - DNA, 201 bp, Zea mays
  Peptide Sequence Number=SeqID_82922
atgcggggaaagccctcccgtgctagcccgtcagtgtgggacagtgcatttccgtcgtctgaggatccgtgggaagccatctgtgtacggttaagcctgtggcggaaccgcccgaattattccagcttaagtgcccaagtcacacccttaagggcagcaacacacttaaacaggaataacccgtcagtccctcggatctag

SEQ ID NO: 39548 - DNA, 378 bp, Zea mays
  Peptide Sequence Number=SeqID_82923
atgggggccgccacgcgtgttggtgtggactgggcgcacacactctttgtggatgcgtaccgcgacctaggtgcgcaaactgcccccttccacaagttgggaggggaggtgggaactcattttctcgggtggctgcaagaggagttggagtctctcccgtccatcatgatgggcctgatgtcctacgcgtcgctcgtgtcctgtgaaggggctgtgaatgccttggcccgcgagggctgcaagcacttcaaggcctttgaccagagcaatgaggacttcgatgctggtgtattccaggcaatgagggacgaagaagttggggacctcaccggcctggagagctttatagcccgaaaagatgctgtagttgaggcatga

SEQ ID NO: 39549 - DNA, 957 bp, Zea mays
  Peptide Sequence Number=SeqID_82924
atggcgaggccttcggcctcttggtgtttcattgaggaattggcggggacatgtgctgggcctggggaggttatgacttcgtcctatctccgggaaacatcttcacgaatgttgaaggtgaccggggttagtggcataggaaggatcccattccccgggccaccggcgatgactactttacgtctcgtatggctcgaggccctgcgtaagaagtggaaggccccactttggctggtggacccacgccgtgatgccaaggtgtcgtgccccagcgcgaagggagctgctccggctgcagtgatgccccctcccgcggcgccagtggtgcccgagagggtgtcttcgccaccacatgctgttgaagcagcggtttcagagattggatggaccgaccaggagttgtctgttgacgactacatggtaggaggtgtcaccatgtttgatgcccagacggttctggggctgccgcctgctaggactgaaactgggcagttgatggtggcattggcgaggccgcctactgacactggggcttcggcgaagggcatggctgtgacctcgtcggacccatgggcgcatttttgcgctgttgctgatgtcggcggagaagtcatcagcgcatctgcgaccgaaggcatggcggcggctgtcgcgcgacaactgcattatgcggctgtctacgccgatcaagttgcatccggggcattggtaaatgttgtgacctcgcagctgcgttctgagaggagatggctggaggacaaaatagagcgcctttggatacaacacatcgaaattgtcagggacaagtcggcggccgagaataagagccgaaaccttctcaataagctgactgcacttgaaaaagagaatgaagatctcgttcatcggcttaatgatgagaatgatgtagccgtggaggcgaagacggaggccgaaggtgcccgtgtggaggcctaa

SEQ ID NO: 39550 - DNA, 351 bp, Zea mays
  Peptide Sequence Number=SeqID_82925
atgaaacttaaccccgaaacaacctacgcgtggcagaggacaagccagacgctaaggacggacttacaggggaaaggggttcgtgaatggggcctgaccacgccatggagagtccgcggcggaagcagaacgtctggcgagcaattacttgtgcgctatcaactctccgagtctgacgacttctcgaaagctccaacgagtcgcggtgaagccctaggtcgatgcaccgaggatgtttcaccaccgtgggcagagatctccagcggcggccctccccccgtaaatgttttagttatgcggcacacaaataatcttaaagttaggagtttaatccaaataaacattgattaa

SEQ ID NO: 39551 - DNA, 357 bp, Zea mays
  Peptide Sequence Number=SeqID_82926
atgagcgtcgacgagcaggaagggttcaacgggcaggggaacgggcgcgatcgtcgtactgcgcggatggaactccggcgaggttccacggacagcggggcggacggcgacgggcgtagacgaactccggcgacggtgtgggcaagtgggagagagagagagagggagcttgggaaggaagagatctcggggtgctacagagagtcgagcgggcggaagtggaaccaaggaggcaacgactggcttttggtcttcggagccggagacggcgaggtggcgggtttgttcccgtcccaggcgaggcgacgagcacgttggagccttcagaaaagagaagagaacaaacgggtctcctaa

SEQ ID NO: 39552 - DNA, 312 bp, Zea mays
  Peptide Sequence Number=SeqID_82927
atgacgatggctcggatcgtgacagttaaagggaacaacagcaccctcggcgtcatctacaccttcggcggggaatccggctcgagcagacggctcggtcggccaccccgaggccacagccagctgtcccccgaggacatcagcccggcccgtggcctcggcaactcaactccggcgtcggtcccgctagtggacgacccggccaggctccggccgaccaggtcttcttttcgagccaactccgcctctgtccgtgctgacactgctacctccggcttcggctcgtcgaagagcggccgagggtccctttaa

SEQ ID NO: 39553 - DNA, 1122 bp, Zea mays
  Peptide Sequence Number=SeqID_82928
atgacctcctcagtatccccagccgcggccgcctcccagccccaactgcatattaccaccaccggtacgagcaccgggtccactgcaatcatatcgccctcctcaaaccaaagcaccagcaacgcgcgttcctcctccccgcattccacgagcagcccccctcgcggacccagcaccaccggaggcacaggcagcggcggcggaagcggaagcgggtgcacgaaccaggcgtgcgcggcgtgcaagtaccaacggcgcaagtgcaacacggactgcccactcgcgccctacttccctgcggatcagcaggagcgcttcctcaactcgcaccgtctcttcggcgtccgaaagatccttaagacgctggagaacaccagtccggagctctccgccaacgctatggccactctgattttccagtcggacatgcgcgcacaggaccccgtcggcggctgctaccacctcatcctcagcctcgagcgccagctccagattgagatggccgagcactccgccatggtccaaagactggcgctcttccgccaggctgctaccacgatgccaccggatcaaggcggcggcacggttggcctcgactacaccgcgtcatccaagcagccgctcttccacaacgctcagcaagaggtggtttacgcactctacaagaacaaccacggtggaggccacggccccaacaaggatgatcacggcgggcaacaacaccaggtctttgactattacataaacctcgacaacatgcaacagttccattttaatgatagctgtgccgccgtcgacaaagtggatctgactccggcgggggctgacgaaatgagacatcatcagcacttcgacgagaactgccagattgaccacaaggattatttcgagattaaagcggccgcactcgtcgacgacgcgtttgacatgcgacaggaggtggtggacgtgtgcgccgaggttgacatggacaccaagacggtggatgtgaatgccggcatcggcggcgtcgatatcaaggcgatgggcatgaacgccaacgtcgatgtcaatgtctccacaccacaaatggcagctgagtcatcgcactgcagactagggctaggcttttcatcgttctga

SEQ ID NO: 39554 - DNA, 594 bp, Zea mays
  Peptide Sequence Number=SeqID_82929
atgggtgcgttcgtgaggagcgccttcaggttcccgagggcttcttcggcctccgaggtccaagtgaagcactcggccttccttaagaggcggtatagaggcaagactctttcgccgaggcgcgagatgaaatggctcagagccgcaaggcatcccgtgaccctctgtacgcctttcaatgccccgctcggagacgatgaaccccaagagcatgcctcggggaaccccgaagacacacttctcgggattgagcttcacgcctttcgccttgagacatcggaatgtcgcttcaaggtcggaaaggaggtcggaggctttcctcgtcttgactacgatgtcatcgacgtaggcctcgaccgttcagccaatgtgttcgccgaacacgtggttcatgcaccgttggtacattgcacccacattcctcaaactaaacgtcatggtaacatagcagtacatgccgaagggtgtgatgaaagaagtcgcgagctagtcggactctttcatcctgatctagtgataccccgagtaggcatcgaggaaagacatggtttcacacccagcagtggaatccacgatttgatcgatgcgaggtag

SEQ ID NO: 39555 - DNA, 468 bp, Zea mays
  Peptide Sequence Number=SeqID_82930
atggatgccctgaacttcgagtatccggactatgagagacttgaagaaggggccagggtagcgaaaagaaaaagaattgtcagcgttctaagcaggcaagctgcccggtccgtaaaggtagacgaagaggctctgaagaaagtgaaagcagcgccagagacgaaggtaccaattactaagaaaaggaaacttgatgagataccttctgctgaatcgaaggtatatgaagcgccgaagaaaactttgagcccgccgttgcctactaccgccgaggtgtcagaaattttgaaggtaatgactgaatccccactgatagcaatgggggtgcccgatcttccgtcaggtgaaggtaactatcgatttggtggagatgcacacagacgatccggcttccaatcaacacgactagaaccccgcaatcgcagcaccacttctcctctggttatcaactgtgcactgcgcgattga

SEQ ID NO: 39556 - DNA, 204 bp, Zea mays
  Peptide Sequence Number=SeqID_82931
atggatacaaacaacactcccctagttgatgttcaaggaatgaaggaaaggaccagcaaggacatggtgaaggacttggaggcgtggaaggccagcaaggacgttcggatcaaggtggaggaccaaactgacgtccgtaatctgtctcggtgctgcgacaccgtaattggcctttgggccgtgtatctttgttgggcccattag

SEQ ID NO: 39557 - DNA, 345 bp, Zea mays
  Peptide Sequence Number=SeqID_82932
atggggaagctacacgacacctatcatgaagaccccctcgccgccgaaggcacttgcgggggcgcggcggtatcgggcttcccgtcggcggccatcgcgtcgggatggtatgggaagatcgaggacggccgcgcgcacgcttcaggcagtgagaccacaaggtggtcttgcctggcggggtactggtcatttgccatatgggaccctatgccagtggttttggtttctacttccctagtggaccacagtttccttctcgtggtgatcgcaatcccctatgggactggggatgacagaggcctagagaagacatggctcatggattcagttgttcgcgtcacatga

SEQ ID NO: 39558 - DNA, 375 bp, Zea mays
  Peptide Sequence Number=SeqID_82933
atggcgctggcttggctcgggcgcggcgctgggcatgcgggggcgcgcgtgagcgtgctctggcgcgggcaggaagcgtcgaacacgtggagagtgaggctgaaagcagctaagtccagcctcgggtgccataggaagctccgcctcgcccgaccccagggctcgaactcaacctcgacgccggaagacggactccgcctcgcccgaccccagggctcggactcagcctcgaccccggaagacggactctgcctcgcccgaccccagggctcggactcaacctcgacgccggaagacggactccgcctcgcccgaccccagggctcggactcaacctcgacctcggacgacggactccgcctcgcccgaccctag

SEQ ID NO: 39559 - DNA, 204 bp, Zea mays
  Peptide Sequence Number=SeqID_82934
atgacgctggtattccctagacgcgagctacgacgacggacttccctaggcgcgactataagtgcacattcgggccgcccgtacatgaaagtgtggaatgaagtgtggtttaataatcgcgtgatgcggaagacgaaccaagtggaccccaagcgcgggctaatccgcaggatgatgctgatggacgaatcggaagatggataa

SEQ ID NO: 39560 - DNA, 834 bp, Zea mays
  Peptide Sequence Number=SeqID_82935
atgaccatacgcccaggggctggcaaggaactgaagataacaaaagatacggttcgtctgattttgggtttgccatgtgctggaggaggcagggagtttactgattggtacggtaaagtggatgttgctgccaaagtgagacgtgatctcaatgttggtaaagaagaatttgatgttgtcaagcttcaagacaagatagtgcttggcaatgatgatgagctatcaattagatgtttttttctgattctattcaatcgacttctttttccttctgcttcttggggcattacaaacaatgagatttactatcttgatcacctacatcaccctgcatctcctgacaacaaatatggtactccacgcattaagttttttgataatgagaccataagagagttggctaggggtgacagacgtcccccccgtaaaactggtgaaccattcggctatgcagagtttcgtagccgttcagaaacgtgttacgtcattgctccagaacggcctgtttctgccgttttcaacatatatgtgccacgtatcaagcatttgattggcaacaagttgcaatgtttgccctcccagcatcggccaatgtttcaatcaatgtttgatgctcatgacaaagaggtggataagtactgtgattcccttcagctgagccatcagatgattgtttcgaagcagattgaactctctgaaacatttggtgaaatgatcgatgaagtactgagagctgcaacgcagcgcgattcacagcaagaaggttttattatttatgtttatttttttaaactgataaagttcacgaattattgcgaggaaaattatatatag

SEQ ID NO: 39561 - DNA, 240 bp, Zea mays
  Peptide Sequence Number=SeqID_82936
atgcctccaacaaatgctccagtatcctcaccacctgttccaacacctgataaacagcaacatgatcaggaaatccatgttcctactgatcatatcaaagtatcagatcatgctcccacaaccgacaagcctgctgctcctgagttaacaccagatataaatagtgaaggacaaaaatctgttacgcatgatactcctgtatctggtgcacatcagttcgataaaaccccactgacagat

SEQ ID NO: 39562 - DNA, 318 bp, Zea mays
  Peptide Sequence Number=SeqID_82937
atggcgacttctatggatttgcgccgcgagtccactggatgcacaacaaatcactgtgggactcgctcgagccacgataccgcatgggtcatgatctctcggtggcataaagctcttcccaaccccacaatcgacctcgccttgcgtcctctgccctaccgagcgaaccgcgattgtaatcttgccgacggagagtacgtgctcatcctcgagcaaggacctgtccaagaggaggaccaggagcaggcttcagaggctgccattgaggatctccccgcagccccagcaattgaaggcaagccccggttttatgcataa

SEQ ID NO: 39563 - DNA, 249 bp, Zea mays
  Peptide Sequence Number=SeqID_82938
atggcggaacttcgccgcaagctccgggggattccgttaccggccaaaccacacggtctccgcccgtacctcatatatagagcctctgggatctcgagccccaacccaagccctagaaatctaacctccgccgcagccgtggggagtgagggagatggaatcgccgccgcaagaccccagacaccaccgccgtcgacgttctccgcttcggtcgtcgtccggagttctcggtcgggttttggggactga

SEQ ID NO: 39564 - DNA, 336 bp, Zea mays
  Peptide Sequence Number=SeqID_82939
atgaagctttggaaatccaacactcttggattaggtgcttataatttttgccccagtgcagtcgcgaatgcatcccaaaatctcttcgtcgaccccgtcgaagagtatggatccgggctgaacggccccgctggtcagttgcttcgtcgtccttccgccgtctcttcaccgaagtcacctccggccatcgcctccgtcctcccctctgccacctcgccgcacagggaagttcggcaccgctccgtcctccccccccttgaccagcgtcctcgccggtaccgctccgccgtagcgtcccctcggcggcgctgtgcggcattaatggccgcactgtga

SEQ ID NO: 39565 - DNA, 684 bp, Zea mays
  Peptide Sequence Number=SeqID_82940
atggccaccgaggaagtcgccaagccgtccccgatcccgccctaccccgagatgatcctggcggcgatcgaggacttaggcgacaagagcgggtcgaacaagtcggccatctccaggtacatcgagggcaagtacgacggcgacctgccgcccgcgcacgcgtcgctgctggccgcgcacctggcgcgcatgaaggagtcgggtgagctggtcttcgtcaagaacaactacttccgcgccgacgcgcccgacgcgccgccgaagcgcgggcgcgggcggcccccgaaggcgcgggaccccggcgcgccggtgtcgccgccatcggggcgcgggcgcgggcgcccgcccaagcccaaggacccgctggacgccgccgtgaagcaggccaccgcgggcatgcccagggcccgcggccgcccgcccaagaaggccaagaccgagggcggcgcgtccccggcccccgccggcgacggctccacccccgtcaagcgcggccgcggccgcccccccaaggcacaacgtcaacagtcactcactatagcgtggcgtggcgtcctgggtgggtttgctttggtttgtcgtgtagctggcagcccgcgcctgtattcaaacgagccgcagggcgaacagcaatggaccttttctcagaagttggttgtgaatagaatctggtcgcagagataa

SEQ ID NO: 39566 - DNA, 822 bp, Zea mays
  Peptide Sequence Number=SeqID_82941
atggcggtgctctctgcgacagtgtggacagtccacgacctagggtcggatggtttgcgacctggcgtagaggtgggtcttccatgcgttgaagccagacagtccgcgtttggtagccggacagtccactcgtgtacagggatggcggcgttcgccaacagcacctggatcttactcccgggagggatccgtaggggaggagagatcctaggcccgagccagggggtcgggcgaggcggaagtcgtccggccgaggccagggcggagtccgagccctggggtcgggcgaggcggagtttcgtcgtcttccgggtcttagcccgagtccgagccctggggtcgggcggagtggagttcgccgtcttccgggtcttagcccgagtccgagccctggggtcgggcggagcggagttcgccgtcttccgggtcttatcccgagtccgagccctggggtcgggcggagcggagttcgccgtcttccgggtcttagcccgagtccgagccctggggtcgggcggagcggagttcgccgtcttccgggtcttagcccgagtccgagccctggggtcgggcggagcggagttcgccgtcttccgggtcttagcccgagtccgagccctggggtcgggcggagcggagttcgccgtcttccgggtcctagcccgagtccgagccctggggtcgggcggagcggagttcgccgtggcgcctttggcaaggcctaattgcctgtcagactcactctgtcgagtggcactgcagtcggagtggcgcaggcggcgctgtccttctgtcagactggccagtggagcggtggagtga

SEQ ID NO: 39567 - DNA, 492 bp, Zea mays
  Peptide Sequence Number=SeqID_82942
atggccggctctggagagtcgccggcgatggaaggagatggcgttcatcttgatccagagacagagggaggagttggtggtaactcactggtcacaccacctcctgctctactgggtcctgagatcgccgagatgagcataggggaagaaggagaacaaatggttcgacctcctatgtccaatattagctccagggagatggatacgccacaaatactgcattcacatgcaaaaaccattgatccaactatagtgccaacggtagggatgactttcaaggatgttgatgatgcatataaattctataaaagccgagtgccgcagcattgcatagttgattttatatcagaaatgcatgatgggccggagaacgtaccggtaactgctcaagatctgaaaaacatgagggcagccaggagaagagaaaactgcgcaaatgatgtagccaaacttttggctttctttagagaatgcaagaaacagaatccataa

SEQ ID NO: 39568 - DNA, 228 bp, Zea mays
  Peptide Sequence Number=SeqID_82943
atggcgacttatgtggagctgcggcgcgagtccgctggatccacaatgaatcaccgtgggactcgctcgggccacgataccgcatgggtcgtgatctctcggcggcataaagctcttcccaaccccacaaccgatctcgccttgcgtcctttgccctatagagcgaaccgcggtgtgcttccgctgctctgggtgtgtgccgccgtgtcgtgcgcagggaggtggtaa

SEQ ID NO: 39569 - DNA, 474 bp, Zea mays
  Peptide Sequence Number=SeqID_82944
atggcaggatttggcaactgggccgaaaggaatgaaattagcccaagcgcagaacttgatccgcttgtgattgggagcaccaacttcgaagccgaaggtgccacagcttggttgccttgcgaagccattgccgcaatcatggaagtgagttcaccggaggtgggcgccaatgttggtcactcgttctcaaatgttctgatgatagatttggcatttgtcaatgttgcttcaacgcgaggtcttcgccttgaggacctttggcagaggaagggaagacttctgtatcattttgtcgaaggtgtttgtgtcttgaggaccttcggtggggaagaagacccccaacacctccctctggaaggcctgcttgtccccaagcaggagcaaagggaaagcattattgaagtgcttcgagatcctcccatgttgtcaattcagatggaagcccggaccacgacaccaggacttgttgcatga

SEQ ID NO: 39570 - DNA, 204 bp, Zea mays
  Peptide Sequence Number=SeqID_82945
atgaagctgctgaagagatacgtcatcttactcaagatgaccagggccgaagacctccacaaagagagcttcgtcaggacaattcctacaatgatgatgattgaactacaggctaccatatggcccccatcatacaagccacctcagctatctcttatggcactcagatccgaagcagttctaatagctaacgaatcaagctga

SEQ ID NO: 39571 - DNA, 252 bp, Zea mays
  Peptide Sequence Number=SeqID_82946
atggagatcagcctaggagactgttttgtttgttctgtggcgaagacaaaggccacaccacaagaacgtgccaagtcacgattcagaggcagaaagagattgccgaagctgaagcacggcagaatcagccgaagcagggacctttggacatgggataaagttgtacatgatatgaagagcacagttcaggagaaggatgaaccaatgccgaagctacccgtggaaaagcttcggctcagtagtggaaaatga

SEQ ID NO: 39572 - DNA, 144 bp, Zea mays
  Peptide Sequence Number=SeqID_82947
atggagtttgttcaccactcctcaaatgtttatcaagaaccgaaggtctgtgtggatctcacattggatctaggcccttattgggaaaagttttccgacaaggattctattggccgaaggcagctttggatgcagcagaattag

SEQ ID NO: 39573 - DNA, 2847 bp, Zea mays
  Peptide Sequence Number=SeqID_82948
atgccttcccatggtgggaagcttgtgcgaagtcccgccttcgcgctggatctgcatagccgcaatccagccgcctttgtgcgtgaggcggaggatggggcggtgcggatcgtcggtcgagttttcgagttgaaccgtctgccgtatggcggttatcccagccaagacgatgtggatcgtcgcgggaagaaaccggtggtagagactggagacgaccccgcgccggcggccgccccgtcctctaagaagaggaaattaggtattgctatgggaggtctgggggtttctgatggttttactagggagtttatgaagacatgcgtggccccggggggaaggatgtcttttctcgagctccgggagtcttcggcgcggatgctgagggttaccaggggttggtggcctaagaatgttcctatcccccgcgcggccagcgaagacttttttacatctcgcatggttcgtgcttggaaagtgtttccttacgggcggaatatcgctgctgttgtgtcggcagtgatggacaaggatcgtcagggagctgcgcagaagcgccaggcggttgtcaggcttcatgaggccaggccgaagaggcaacggggggctgcgaaggctgctgctcccggcggaggccagctgccgctggcgacgaagtcagccgtccctgcatccagcagggcgccggaggctgcgaaggcggctgccgccggtggttccaagtctgtgaaggccgcccctgcgtccagcagggcgccggaggctgcgaaggcggcccgagagttgccaccgggcaagcgcgtcgctgacttcgccaccgacattagtgtggaagattatcttgttgggtcagacgaaggccagcttgttgttgttccgcctgccgtggcgaccgcggcggctgccgtggtgcccccggcgaagggcagtgctcttagtgccggcggcgagataccggcactcactgccgtcagggacgaggcgggtgctgtgtcccgccggctgaaggagatgcaggaggcactaagtcaggcggctgacttcgcagaccgcgcggcgtcgggggccctgacggcagttgtgtctgccgaagtagagagacttcggacgcaacatgctgacgctgtccgggaaaagtcggccgccgacagtaagtgccgcaagcttgcggataaggtggccgcgctggagggtgagaaaactgacctccggcgccaactgtcagaggaaaggaaggaggctaacgaggccctcgccaaggcgcaggctgcgcaggcggaggccaatttggcgcgggcggagggcagtcttgccaggcagcgcgccaagcagttggaggagcgactcagcgctctgcagagccgtgtggagagggctgaggcctcgacgcgctcggaggctgagcggacgcgcaaacagcttatggattcataccatgagctgggcgcgcggaccgctgactttgatgtgccggaccgagagcccggacttcgctgcctcgagtggatacaggaggagctgctggcgcttcccgccatcgtggaggggtttatgtcctatgcctccctggtcacctgcgagggggcgatgaacgcgctctctcgcgaagggtgcctgcactatgaggtcttcgaccaagctgatgagggtttcgagcgcgtgctgacgccgtccgggaaaagtcggccgccgacaggtgagaaaactgacctccggcgccaactggcggaggaaaggaaggaggctaacgaggccctcgccaaggcgcaggctgcgcaggcggaggccaatttggcgcgagcggagggcagtcttgccaggcagcgcgccgagcagttggaggagcagctcaacgctctacaaagccgtgtggagagggtcgaggcctcgacgcgctcggaggctgagcgaacgcgcaaacagcttatggattcataccatgagctaggcacgcggaccgctgacttcgaagtgccagaccgagagcccggacttcgctgcctcgagtggatacaggaggagctgctggcgcttcccgccatcgtggaggggtttatgtcctatgcctccctggtcacctgcgagggggcgatgaacgcgctctctcgcgaagggtgccggcactatgaggtcttcgaccaagctgatgaggattttgagcgcgatatctacaaggttgaggaccctgtggtgaagaaatccgcgggggccctctacgaccggatgtggggcccccacggtcgggaggtggtcagggagcgggccgagacgacgaggggtcaggcggcgcgtggcgagagggtggatgactttggggctttgaacagcgcgctgcctgacccggagccgaacccggcgacggctgtgtccgatgccgccctggagccgcccccggaaaccgccgaaggcgttcctgatgcccccgcagccactgcagccagcggaggcccgtcgccaactgctgcgccaagggctgaggatcctgtgaaggtggcggcggagccgacggcggaggatccccgcgacggttgggtcttcgcaggttcaagattttgggcctgcgcacggaaaccgctactactaattttttggcggcttcgaccgtggatgatgttttctgattttggtgactctgagagctcggttgagtggactgaggagtcgtcggatgaggatttggactacttcgcggccttggatgtggcggcggcggaggcttcgccgcatgctgcggatgttgaagttgtgcctggtcctagtactgggcgtaggcggcgaagggcggttgccaagcgtagagtttttgcgggggatttttcgcttgtatattacatgactccgcctcgttaa

SEQ ID NO: 39574 - DNA, 564 bp, Zea mays
  Peptide Sequence Number=SeqID_82949
atggatttggttacgctacccgtgaggggccgatctagtgctctggctttgccacccgtgagggaccggtctggtgctccggctttgccacccatgagggaccggtctggtgctccggctttgggaccgatctggtgctccggctttggtaagttcttaatctggtgccctgtgctctgtgatatgtgcttgatggccgacgacgacaccgtggctggccaaactggtggcggtgaggctgttgttccttcaacggagcccatcaacatagatcttgacactgttgtggccgatgctgaggagacagacacaacaactagttctcggcctttcactttcagttttgttatggatctaaggtcaagtttgaacattgatacgttcatcgacttgctcaatgagaaattttcaaaacgtcctgacatccctgctagtacaagacatgtcttattcgatggactttctcctgccaatcatcgacatgaggatgtccccgttcatctccattttctgagtccgcaacctctattcccatatctgtatcctcctctgtatccatactga

SEQ ID NO: 39575 - DNA, 339 bp, Zea mays
  Peptide Sequence Number=SeqID_82950
atgcccggcataccgagggatgtcgccaaacactcgctggatatccgggccagagcccgatccgtcaggcagcctctgcgcctcggtcatcaaggaagggtcggcctcgccttgacagagcccgaccctccctcgggggctaaaaaagggggaacccctctgcgtcaagatcgggcatacttctccgtgtcaaaaattttcaatcaaaaaaggggcctcttgcgttctcccggctacgttctcccggctatgtcagaagcagggtctcgagaagcgaacgcgggtacatgtaaatggcaaggccgactgagccgaggagctcctgtgcctccgggttag

SEQ ID NO: 39576 - DNA, 366 bp, Zea mays
  Peptide Sequence Number=SeqID_82951
atgggcatagattcacatttaagcacttgtgttggcattcaatcaccaaagttacccccaacgtgcttgggacaaaaaggctttgttgttgttgttgttgtaatgaagccttacgatgttgtggacaaggcaattgagatgatgcagtgcactgcaaagaatctgaagcttgtctgcaacgagaagcttgactcagggaagcccctgaacgtctttgagctgaaggaactaaaagtgatgcttgaaaacattgccgattttctagaccaagactcaatgtattgccaggaggctctggatgttcataaaactgaagatgatttcgatgatgacttggagacggaattgaatgtgatgtggccatag

SEQ ID NO: 39577 - DNA, 555 bp, Zea mays
  Peptide Sequence Number=SeqID_82952
atggaaattcttagcatacataatgatgagctaactaataaagtagaaaacattggtagcaccccagaagtatctttggttgaaatgcctgaaattattaagaaagatgcttctacttcttgctttgatttaattgatgattctaacccctgcaatcaagttcttgttaaaaatgttgttatagaaacatgttcggatgagattgcaatggataatgagcaattaaagcaagaggtggctcgccttggcaaggccttgctatacgacaaggaaggccataagtcttaccaatgcaatgcgaagattggggataagcaaaggcaaaagatcaagcaaaagccaacaagcaaaatctccaacacctacatcaacaaggtggataaaaaggctaccacaccatacttaatcaagaagacagagaatggaaatgtgatagcaatcaaggccaacaaacaagccaacaaagggaaagggaccaaatgcatctcggtgccaaaggaaattatttcaaccatgaaaagcaccatgaaggtttggatccaaagagggaagtga

SEQ ID NO: 39578 - DNA, 492 bp, Zea mays
  Peptide Sequence Number=SeqID_82953
atgcgagcgtgggcgctccctggcaggcggggcccacggggtcggcgactcggaccaacggaggaaacgacagggggtctgacaaacagggccgcaggggggtcgggcccgctaatcagtggtggagggcacgcgcagggcgtgacaccatgggcgcgtgctgacagacggggccctccagacagtgacccaagaatggggaaagaaaggaggaggctaacgggcgggtccctccttgtcaggaccgccgtctacctcgggcagcgcgcacgggcgcgagcgccatggccagagccggcaactccgcgcaggcgaaaaaggcatggggcgaccacggttggcagggcggtctcggttcgacggcgtgggaccggtaccgacgatcaccggcgactaatcgatggaatagagaagatgggggatagagaagagaaggtccggcgaggaaattcacctcaggtggagcagggacgagggcggggctgggcgtga

SEQ ID NO: 39579 - DNA, 183 bp, Zea mays
  Peptide Sequence Number=SeqID_82954
atgagccgcccgtggtcgcactcgcagctatatatggaagcattaaacaagcggcgggagaagatcaaccagcacttcatcgagctctccactgtcatccccgacctcaagaaggagctccaagaaaagctcaaggtgcttgaagacggtggcaatggtaatgaccagggcatcaaatcctag

SEQ ID NO: 39580 - DNA, 993 bp, Zea mays
  Peptide Sequence Number=SeqID_82955
atgaacgtatgtgagctcactcttgctgtctcacacccccccacaggtcaagagcagagaacgtcggaggagctatactactatattaaggctgcaagggtgaactcgccaatggtgtttaagctgggcttcactctggtttttggcccatctacagtagcccgcccctccaaaaaccctcccagccaccaggacccctcccagccgccagaaaccctactcctctcctctgtcctctctagtttctgccgacgtctctgctccagcctccaagtgctccagccagcagaaagattacatcgacaaaaactgattttcgacgaagggaaggcgtgcagcgagctcgtgagcttttctgattccagtggctcttcacagcgcaagggtactagatgtgattggatggaggatatcattatgtatgtgaattcgccaggagggtcagtgacagctggaatggctatatttgtgaacataaaaattagtaatctggagaggcctcttgacaacttatgtctcagtaggatggctcccactagaattcatgtaacatgtgcattagtttatgggccttcaccaacaggaaggatccaccaaggagtttgttcaacatggatgaaggaaaggttagcattgaaacaatctggggcagaattgggcacttcaatccttttctttggatgcaggaaccgtaatatggactacatatatgaagatgagttgcaaactttccttgaggagggggcgctttctgagctaattgttgcattctctcgggaagggccaacaaaagaatatgtgcagcataagatggtggaaaaggccacaaaaatttggaacgtcatctcaaatggtggttacttatatgtttgcggtgatgccaagggaatggctacagatgtacacaaaatgcttcgtacaatagtccaagagcagctgacactggtcacccaggagcacgagatgagcgcgttgatgtacttagtactgtga

SEQ ID NO: 39581 - DNA, 627 bp, Zea mays
  Peptide Sequence Number=SeqID_82956
atgatgaccgcctcaaaaaagggattgagaaaagggggatatttcgaaaggatccttctcagcgaaggaagcgggccccgagccctcctattgatcagaggttcgaaggttgcgccctgcggggttcggcaaccgctccagagcactcgggctccgagccctttactgatcaggggttcgaaggctggcccctcagaagggttcgacagacgcccgagagcacgcagagtcagggatgaccctgggtacttccgttacatggccaaggctcgggctacgctcccaaggtaccctaggacatttccgagaccagcaggaatgatttgtaatggaatcccaccggagggaggcgccgagccctcgaaccctatcaaatgggtccgggcctcggcctcagcctcggccacgggagaaggtctccgcctcgcccaaccccaggcctcggcctcagcctcggcctcgggagaaggtctccgcctcgcccgacctcgggcctcggcctcggcctcggaaggagtcacatcctcgcccgaccttagcctcggcctcaggagaagtctccgcctggcccgacctcggcctcggaccgactacgccactgcggatacatcattaccctacccctag

SEQ ID NO: 39582 - DNA, 525 bp, Zea mays
  Peptide Sequence Number=SeqID_82957
atgccacgcagcgcgcagagccggacccggggtagagctgcggctgcgacgcggctagccggtgtgggggagggcgccgacttggggaagtgggaagagcagaggagctgcggtccgtggagaggaggtgctggagcttgcggtagccatggcgagcagcaggttgccgggctaggcatcccggcgggggtggagccgagggcgctagggccacggcttggaggaagccagggagaaggcaactccaggggggtgagggacctgctggcgcacgggtataaaaggagggggcgagcttcagccattggaggatatgggcggcatgctgcagagctctgggcttgtgagcctgctgagagttatagacccacgcaattggggtttgtcagtgggttagaaatcagtggaaacttgcgaaaattagaggttgacacaaagagattctgtgggagaatgcggattcagattaagtatttggacgtagaccgactatcaagaaagcagattcggacaccgattggataa

SEQ ID NO: 39583 - DNA, 795 bp, Zea mays
  Peptide Sequence Number=SeqID_82958
atggtggtggccccctgggtgaagtaccttagccaagaatacgaccccatgttaacgtgggctgccagcacctaccgctccccctcttgcccatctttcaggggaggcagggacggcctcgggtcgtcgaacggagcaggggatgacgtcgaggcggccacgggcgtcacgacgagctgcttgccggcgacaaagaacagaggcggcgacgagcagaggaccggcaggggtcagccgcggtcgagttcgtcgggcagggctcggccaaggcagcagaggaggtcgccgacgcggggaaaggtcgacggcgctcaaggggaggacggggaacgacgtcgagggcgcggcatcggtcgagctcggacgctcgccgagtgtggtcgcggcgtcgcgcagtcggcttcggctcgggctgcctgcgcgctcggcgaggctgggcgttcggcgctgggcggcacgctcggccagcgcttggagctgctggcgcgacacggggccctccagacagtgaccaagagtggggaaagaaagggggaggctgacgggcgggtcctccttgtcaggaccgtcgtctacctcggcaacgcgcacggcacgagtgccatggccggagccggtgactccacgcgggcgaaaaaggcacggggcggccgcggttggcagggtggtctcggttcgacggcgcggaaccagtaccgacgatcaccgagcacgatcgcggacagtggtcgagctctaccagcgacagaatcgggcgcagggggcctggcgatggggaagctccggcgaacttga

SEQ ID NO: 39584 - DNA, 486 bp, Zea mays
  Peptide Sequence Number=SeqID_82959
atgatgctggtagactacacaacggtactcgatggaccaagtgtgtcggtcgaaggcccgacgcagcaaggtgtcgagagtgtcgtggaagtgacacccgcgagcggcgtcacgagtgatgggtctagcgatccatccctccggcttcggctcctccgagagctccgtgccgtggctcgaactgccaccggcattgtcgttgtctccgtctccgtcaggggggcatctctggctgaggtgcaggttaaggaggcctctcagactccacctcctgctgaggcgagggggaagagtcatgctgctcctggtcctgctcctgcttctggtcctgctcctgctcctggcgtcggcgctcctgctcctcgtgcaggcgacgatacagtctttccaggtgactggacttacctggcaccgtgcgacacagtggacgctccaccaggtgagaaggcaaaaagggaatcacagacttacgtgcagtgcacctaa

SEQ ID NO: 39585 - DNA, 579 bp, Zea mays
  Peptide Sequence Number=SeqID_82960
atggaaggcgatgaggcctcggcgccgcctcctccgccgtggatgcagaacaagtcggtcgtggccatcaaggcctcgtcgggcccgctttccgccgcagcctcccgcctctccgcctgctcccgtgcgctcccctcgtcccgcgacttccacttctacaacaacttcccggcattcaaatccccagtcggcgctgcagccgccaaggccgacgcgtccctcggcgtgatcggcggggcttcgattctcccgacgcggcagcagctgttccccatgggccgcgacctcgacgacgcgcacgactggctcgtcgccctcaacgacgacctgctcgagcggttcggcgccttcacggacgagttcaaggccctacgacagaaggaggagactttctggcggagggcggcgccgcaggctggggacgggttccaagtggattgcgagcgtgcggctggtggcgaacgggtgcaggtctgcgtcgagggacggcgatgcatggatggtttcggggcgcaatggcttcggggctggtgggcaggatcggagagtgggaattttgtgtgggatcggacggcttag

SEQ ID NO: 39586 - DNA, 576 bp, Zea mays
  Peptide Sequence Number=SeqID_82961
atgaggcctcggcgccgcctcctccgccgaccgccgtggatgcagaacaagtcggtcgtggccatcaaggcctcgtcgggcccgctttccgccgcagcctcccgcctctccgcctgctcccgtgcgctcccctcgtcccgcgacttccacttctacaacaacttcccggcattcaaatccccagtcggcgctgcagccgccaaggccgacgcgtccctcggcgtgatcggcggggcttcgattctcccgacgcggcagcagctgttccccatgggccgcgacctcgacgacgcgcacgactggctcgtcgccctcaacgacgacctgctcgagcggttcggcgccttcacggacgagttcaaggccctacgacagaaggaggagactttctggcggagggcggcgccgcaagctggggacgggttcgaagtggattgcgagcgtgcggctggtggcgaacgcgtgcaggtctgcgtcgagggacgacgatgcatggatggtttcggggcgcaatggcttcggggctggtgggcaggatcggagagtgggaattttgtgtgggatcggacggcttag

SEQ ID NO: 39587 - DNA, 297 bp, Zea mays
  Peptide Sequence Number=SeqID_82962
atggaggcatctgttatggctcctatatcttcactcagggatctatgtacgggcatcatcccatggctttttcgtgagggcagaggtataggtttggtacgtcagatggtctctatggaaatggtggcatctgttatggctcttatatcctcgctcagggatctaggtatgggcatcgtcccacgactttttcatgagggcagaggtgataatgaggatgatggttttgattatgattatggtttatgtattctttccgtttggaaagggtacttttgggttaacaacttgggttaa

SEQ ID NO: 39588 - DNA, 1767 bp, Zea mays
  Peptide Sequence Number=SeqID_82963
atgcctcgacttggctcaacgacgacaacactggctgaagctattttagtgccatcattatatgagaaaaacgggtttagtagggtcattcttaaagcattgaagggccttgctctcttccaccaaagggttatagcgttacctcttccacatcggccactctttcctggattttacatgccgatctatgtaaaggaccaaaagctgttgcaagccctaatagaaaatcgcaaaagatcagctccgtatgctggtgcctttctcgtgaaagatgaagaagattcagagaaaagcattggtgatctcaaagggaaagacttgctgaagcgtcttcatgaagttgggacgcttgctcagattacaagcattcaaggggatcaggtagttctacttggtcacagacgtttacagataactgagatggtcgaagaggatccactcacagttaaagttgatcatctaaaggaaaagccctacaacaaggatgatgatgttataaaagctacctcattcgaagttatatcaactttaagggaagttctaaggacaagttccctttggaaggatcatgtgcaaacctacacacagcacattggtgacttcaactaccaacggctagcagattttggtgctgctatctctggtgccaacaagttgctttgccaggaggtgcttgaggaattagatgtatacaagcgtctgaagttcactcttgagttagtaaaaaaggagatggagattagtaagctacagcaatccatagcaaaagcaattgaagaaaagattagtggagatcagcgacgttatttgttgaatgaacaacttaaggcaatcaagaaggagctcggtttggagactgatgataaaacagcattatctgcaaaatttagggaacgtatagaatcaaagaaggacagatgtccttctcatgttttacaagtcattgaagaagagcttaccaagcttcagcttttagaagccagctctagtgagttcagtgtaactcgtaattatttggactggctgacagtattgccatggggaaattatagtgatgaaaactttgatgtccaccgtgctcagaaaattctcgatgaagaccattatggtttgagtgacgtgaaagagaggatactggaattcatagcagttgggaagttaagagggacttcacaaggcaagatcatatgtctttctgggccaccaggagttgggaaaactagtattggtcgttcaattgcacgtgcactgaaccgccagttctacaggttttctgttggaggtttggctgatgtggctgaaatcaagggccatcggcgcacgtatgttggtgcgatgccagggaagatggtgcagtgtcttaaatcagttggaacagcaaatcctctagtattgatagatgagattgacaagcttgggaagggtcattctggggatccagctagtgcattgttggaactccttgatcctgagcagaatgttaatttcttagatcactaccttgatgttcctattgacctatccaaggttctattcgtttgcacagcaaatgtaatagagacgataccaaatccgttattggataggatggagatcattgctatagctgggtatataactgatgagaagatgcatattgctcgggactatttagagaagaatacaagacaagcctgtggcattaagcctgaacagatatccttgacaaatccgtcaagttgcattaggtactctgcgattaaggcaaggataagcctgagggtttga

SEQ ID NO: 39589 - DNA, 420 bp, Zea mays
  Peptide Sequence Number=SeqID_82964
atggaattaccactagacgcgcagagcagtggaagacgtctcgatgtagacgaacgcgtcgagcagtgccgtgcagtcgccggcgtccttcacgtcctcgcacggttcgtccaagtgctccagatgcagcacctccgagtgttcctgtctgaggctcactttggtgtcgcggacggtccgcgcttagtctgtttttccaaaaagtttctcctgtccataataatctacggtattccggacagtcgatttagaatagttgtagatgcacttacgcacctgtggaatgatcaactagacaaactgggggtcgagccggaggtcgctgagacttctggctacattgggcaggtcactcatcaagggagacggggcttccgaggccctcgtcgtctctcctttttcgttgacgacgaaatctag

SEQ ID NO: 39590 - DNA, 960 bp, Zea mays
  Peptide Sequence Number=SeqID_82965
atggacggaagcaatggtggcggcagcatcaagtcggagtggggggaggaggagaagaaggttgaagttacagatgctgcccttcttgctcttattgaaaattattgtcgagaagctggagtgaggaaccttcaaaagcatattgagaaaatttaccgtaagattgctctccagcttgttcgccaaggagtatcgaatgagccagaccaggagtctctcggtgtcactgtaaatgaggaatctaatagtggtgatagcatcacagcaaaagatgagattgtgaaggatcctgctgtagaagatgcttcagtcgccaacaatgttacaaatcctgcctctgaggaagctaatgaagtaaatttgacaactgaagcaccaaaagaagacagcacatctaagggcaacaagaaaacagatggagtagcagaagatgcagcagacaaggcaactgagaaggttgtggtagattcatcaaaccttggtgattttgttgggaaacctgtgttccaggctgagcgtatatatgagcagactcctgttggagtggtcatgggtttagcttggactgctatgggtggttctactttgtacatcgaaacaacaaaagtggaggaaagggaagggaaagggtccaccccaaaggatggccctagtgctggatgcaccatgataacgtctatgctgtcgttagctatgggaaagcctgtcaagaaggacctcgcaatgacgggtgaagtaacattaactggaagaatcctcccaattggcggggtgaaagagaagacgattgcggcaaggagaagtgcgataaagacgctcatatttccggcagcgaataaaagggactttgacgagcttgcttctaatgtgaaggaaggactggaagttcattttgttgacacatacagtgaaatatatgatttggctttccagagtgacgccgggactgagatgatttag

SEQ ID NO: 39591 - DNA, 1134 bp, Zea mays
  Peptide Sequence Number=SeqID_82966
atggcgtccagagatgcgggcgccagccccagatccgcgccgcatcgccctggagcggtggcgcccaaggacggcgccgacctgctcagcccgcggttccgttcagccgccgcgctggccgggtgggacgaggagtccgtccttctcgccgcgatggtcgtcgaggacactcccgtccgcgagtcccgtcgcaagaggcgggcctccacctcctccgccggcggcagcgccggatccagcaccaggaagatgaggccgcgtaggcagtctccggccaagatcccgccggtggttctcgcgctcgacgatgacgacgacgacgacgcggcagatggcaaatcgatagtgaatgctgccaccaaggaggaagagaaagttgtcgttgtgggcgacaaggaggcgtccggatctggcgacaaggcggcgtccggatctggcgacaaggcggtggccacgggaaacctgccgtgcatggatcgcctccgggaggagctctcttgcgctgtacttgcacttcttttctttttctatatgctatatgagatttgcctggagatctgctttgagccgaccaccacgtcttgtgggcacagcaactcaagatcgtgcaccatcaacacagtgctctggaacaccattcagctgttgtttcccggtgaagttgaggcaagaaagaattcgacctcaccatgcgataaggacgcgagccgcagcccactcagagctaataggctatcacaaggtggcaatggtatgagaactagaactaggagcaggagcagcagcaccgaagctagaacaagaagcagctacaggagcttcatggaacccggcagtacaacaagcaccaacactggtgcgaacttcatcagcgcacaagtcaacacaagaagcaggaggggcttcgtccaggcctcgcagctgctgttgcctaggaggagcgcagtaaggttggaccaatccgaagatgctgcgttggcttacaggttgcaacaggaggagttcatgaatgcctttgaggagcctgagcaggagaggcagcagccacggaacgccgtgtccacagcacgagacactctgagagccatcgcctcccgagccgtccgcctccgtgctcgaggctggcatgtttaa

SEQ ID NO: 39592 - DNA, 429 bp, Zea mays
  Peptide Sequence Number=SeqID_82967
atgtcccaaaaatggcacttagctaatgtggaagcttgctcttcttcctatgagaagaggaagaagggcaggaggacacagcagcaaagcaagcatcgtcagcctgcctcgcgtctcgtcgaccatccaaatccactcccttctctagtccaaggagctcaggaggtcgaggaagaaggaatggcgccgtcgtaccggccctaccacgtcgccggcgaggatcagcagcgtaaggtgaaggcgggtgggaagtggttggccgcgtggagcgtgctgggtgttggcggcgacccggcggagatgaagcggcggaggcgggtggccagctacaaggcgtacgcggtggaaggcaaggtgaaggcgtccatccgccggggcatccgatgggtcaaggccaagtgcgaccgcatcgccgccattcacaactag

SEQ ID NO: 39593 - DNA, 1431 bp, Zea mays
  Peptide Sequence Number=SeqID_82968
atggcgccgccgccgccgcccccttcctccgctccgaccaagaatcgcatcaggtggctgcgaggcaacaagaaggtggtcgacaggtacctcggcgaggcgcgggcggctctcgctgcggcggcgcaggacaccgaggatgcggacgacgcggcggcggcggcgctcggcctggtgaccgtcgccctggagatgtcgccgcgggccgaggcggcgctggagctccgggcgcgggcgctcctcgcgctcaggcgctaccgcgacgtcgccgacatgctctgcgactacatccccagctgctgcgccaagtcgtgctcggccgacgacgccaccaccgcctcgtcctcctcatcctgctcgtctggctccggggcagatctcctgtcaccggaccacgaccgccccgacgctggccgcttcctgtgctgcctcgacgtgtccggcctcaagcgccgcctggtcgccaccttctccagcatccacgcccaccagtggagggcggagtccgtgtcgcagctgctggcgcacgtgaagctgctcctccgccgccgcgccgccgcggtggcggcgctggacgccggcttccccggcgaggccgtgcgccatttcaacaaggtgctcgacacgcgccgcagcgtgctgccgcaccccttcgccacggcctgcctcgtgggccgcgccgcggcgttccgctcggcggggcgccccgcggacgccatcgcggactgcaaccgcgcgctggcgctggacccggcctatatcccagcgctgcgcgcgcgtgccgacgtgctggagtcggtcggggcgcttccagactgcctccgggacctcgaccacctgaagctcctgtacgacgccgcgctccgggacggcaagctgccaggccccgtgctggcgcccgcagggcggcatccgcagctccgcggccgcgtcgccgccggcgtcgactactacgcactcctcggggtgcggcgcgggtgcacgcggtcggagctggagcgcgcgcacctggtgctgacgctgaagctgaagcccgagcggtcggtgtcgttcgcggagaggatggagctcgtggacgagcaccgggacctggaggcggtgcgcgaccaggcgcgcatgtcggcgctgtttctgtaccggatgctgcagaagggctactcgttcatcatgtcggcggtgctggaggagagaggcaaggacgccgctgccacggcagggccggaggaagaagaaaaagaggtggtggcaacagtgcaagggagtgccactgcaaacggtggcaacatgcctatggcgactgcagccacaccaccattgatcccgccgttccatggcgtgttctgccgcgacatggcggtggtgggcaccctgctgtcccgaggcgggttcgaccgtccgattccggtgaattgcgaggcaatgagctgctga

SEQ ID NO: 39594 - DNA, 651 bp, Zea mays
  Peptide Sequence Number=SeqID_82969
atggcgagctcgtcggtgctcgccgtcccctccatccctctccctctcccgggcgcctataaaaggacccgcccgagccccgtcttcaccacaccagcttcggccatctcctccgctttcccccgagccaatcgagctagcgccgccatgctcccccccgtcgatccgatggaaggcccctgggttattaggacatcctactgctcaaaggaggaaggctttcctcaccttctacgaagttgcgcgctacgcatggggatccggaagaggcccgaatatgtcttgaaggaataccgcgaaaatggagtagaaaagtgctctatggcggtctacctgggagaaagccaaaactacccaaaccaccctcccttccaagtcaccttcatcgggcatcgcttcccagacacttgccagagtgttgcccgaaaagcccttaaacagctgtgtcaaaactacagccgagagatctctgagacccccttcgatattttccacccagcaacaaaaatacccccacctggaggaaaagactccaggctctgtcaggaggagaccccacagaagatgaccccaccatcgtctacatggccggatacctccacaccctcgacaaccactacgatgatctctcctcccactgcacccacctaa

SEQ ID NO: 39595 - DNA, 249 bp, Zea mays
  Peptide Sequence Number=SeqID_82970
atggtgatcaaggtaaagttagaaaggaatcttcatatgttggtggatttgtttgagcctaaaatgggtctatatgacaattcgggaacattccttggtgctaatgaagactcaactagaacccttgcagaaatcgagaagaagattgcaagggctaccgtgttacccagaaatcatgggggagatattgcactgttcaagctagacattgatgagctgatagctgattatgccaagactaatcagtaa

SEQ ID NO: 39596 - DNA, 684 bp, Zea mays
  Peptide Sequence Number=SeqID_82971
atgaatgtttttctggaggggagagtattggggatgccggttgctaggccggagccgcaggagccccgagtgatcgcccatgtcgacatggactgcttctatgttcaagccaaccgccgtggtgcagtacaacggctggaaaggcggtggcttgattgccatcagctacgaggctcgtggatttggtccatgcgcggagatgaggccaagagggtctgttctggtattaatcttgttcaggtcccagtggcacgtggcaaggctgaccttaatctttacagaagtgctggtgctgaggttgttgcaatccttgcaagcaaagggaagtgcgagcgggcatccatcgacgaagtttatcttgaccttactgatgcagcaaaggaaatgctcttacaagctcccccagattcaccagaggggatttttatggaggcagcaaagtcaaatatcttgggccttccggctgatgatcttggggttgagactattggtgatctcctaagttttacagaggaaaaattacaagagcagtatggagtaaatactggccacgggatggtggcggccttcgcgcgggcagcgtggctcaaggagtaccacgagaaggtgctggtggagatctacggatatatcccatacctccgcgacgccacccctcttgatttttactctcttgatttttaa

SEQ ID NO: 39597 - DNA, 1068 bp, Zea mays
  Peptide Sequence Number=SeqID_82972
atggggagcactcgcgtcgctttcgtcttgctgtcgttggaggaacgcaacttcgcggaagttggtacctttcagccattgttcggcttcaaggatttttcatcaggcagcccgactgcatcccctcgccggtggtcacccaagacagtgaccaccagtttgatggtggggagaagcaagccgggctacgacctctgccccaccctcaacttcaaggatcttcatcatcttggctggggcggaggccggactgagccagagctctacctcccacgcgggttcgtgggggagagggcgctcaccggcctagcgggagggtcagacttcgacaacgcggggctggtcggcggcgagcgtcgtcagcttcagcgcgttgggcttgctggctcagctggctctggctcggctcctggtgccccctcccgtcgcgagagcggttgtcgcgccgcgcgcaccggaggaccgcccaagacgtcgcgcgctgctagggcggcgttcgtgttcttgggttgtcctacctttgcttcggtacggcgcctctgcgcggaggtcggtgctcgcccgtccgggaggatccgagtggggatctgccgaggggagatggcttccgtcgtcggcgctgaggtggtggcgactgaagaagtcctcgtcgctgacgggatcaccgccaccatccgcgctccgagcttccggctctttggctttgatggcttgtcctcgcccctcgagtggggacatgggcgagggccttgttgcagcagtgtccgccctgaggccatcgctgctgctgtttggccacctggagcggaggtcgttgtcgctgctgccggagcgggcggcgcacggacggaggcggacttggctcgaaaaaggaagcttcgtcggccggagcttggccgggccatccactggcgggaccagcgccggagtcgggttgctgaggccatgagccgggctggtgtcctcgggggacagctggctgaggcttcggggcggccggccgagtcgtctgctcgggccgggttcctggaggagaccctggcggcgatggcccgggcgcggtgctga

SEQ ID NO: 39598 - DNA, 306 bp, Zea mays
  Peptide Sequence Number=SeqID_82973
atgccgacgaggccacctccagacctcctgaatcctgaattcatgatgcctcacgcggcgccagcactgggaggtagccgttgccatgacatcggtcgccatcaggcatcaggggaggaggccggtggccgaagcaaagcaactccgatgtggccggggaggagccaggtcgcgccgacagcagcagttggaagaggatccatggggaaggaggcgacgcttgcgttcacgcccacctgggtggtggccatcatgtggcgtttctgcggttctagttcggaaaacccggcgaatgtactgatataa

SEQ ID NO: 39599 - DNA, 1785 bp, Zea mays
  Peptide Sequence Number=SeqID_82974
atggctgaaaggtaccaacttccacggagttgcgtccctccaatgatgaggcgaaaagacggcgagtaccccccatccgggggcttggaaggtggaaagacgcgacgcataagggaggaaggagacatgcgcgggggtggggtcccgcatgtcatgcaaaccggctcagagcagaagaagccaaaccgccgcgcgtggtgcacacaaccgcccagcagttacaagcgaccccccacttttgcccagaccaacgggcagaaggggcgggcagccatgcaggcggcatgcaaccgcgccaggtggacgcgcttctccgactcccaacacgccagcatggaggctcaggcccacgcgtcacgcaaccggcgcgccagatgctgcatgcaagcaactgcaccgccacttgcgccaccgccgtgcctcttcggttgcggaaccaataccgcgactcgaggcggcccagcgcacgacccagcagcgccagcctggcgcgacggctcacgtcccatccaggggcagaaagagagcctcctcccacggcgtgaagacgacgcgcccgagaagcgggcgacgcttcgccttcgccgtaataaccgcgccaaaaaaggctggccctccgaggggttcaagttcaacagtcgcctcagatcgcgtgggccctacacccactactggtcagaggttcgaaggccggccccccgaagggctccacggccgcctcaggctactcgggctccgcgcccattactgatcaggggttcgaaggctggcccccgaagggttcacagtcgcctcagacgccgagcgagggatgaccaggggtacgttcgatacataaccaaggcttgggctgcgctcccgagggctcggactcgggctaagccccggaagacggcgaactccgctccgcccgacccagggctcggactcgggctaagccccggaagacggcgaactccgctccgcccgacccagggctcggactcgggctcagcctctgaagacgacgaactccgcttcgcccgacccagggctcggactccgccctggcctctaccgaacaacctccgcctcgcccgacccaggggctcgggctcgacctcggccatgaaagacagactcgacctcggcttcggaggagcctccacgtcgcccgacctagggcacaggccagccacgtcaacaggaagcgccatcatcaccctaccccgagccgactcgggccgcagagaacaagaccgctcccttacgaaagcagggggacgtcagcaaggactcaaccgctccgacagctatccctccgccaggctccgttgctcctccgacaaccacgacatcacaccagcagggtgccaagatctctccggctgccacattggcatggccttcttagagaaggttggccgcgcggggacgaggacgggacaggcgctctcttggggccgctcgcttccctcacccgcgtggacgcttgtaaccccctactacaagcgcacccgacctgggcgcgggacgaacacgaaggccgcgggatttccacctctctcacgcccgtctccggccacctcgcttccccccttcgcgctcgcccacgcgctcgacccatctgggctggggcacgaggcacactcactcgtcggcttagggaccccccggtctcgaaacgccgacactagtcctcatagatttatttataagtcaataataaatgtaaaggattttccagggctacgcttagctcttccacctgggctcgggcagtcacctcgcaatcccaggctatag

SEQ ID NO: 39600 - DNA, 426 bp, Zea mays
  Peptide Sequence Number=SeqID_82975
atgggcaagaacaacaagcgcaagcgtgagccgactcctccatcggaggagtttggtgactcagaatactcggaggaggagttctcctccgagcccgaggggtctccgactcccgtctctcccccggcgtcgtccgatgactcagacgactcccaggggatagccgcggaggtctggacatatatccgggccgtcgagcgcgccgggctcgaaggctcggatgagtcggagtactcctcggatgaggaggactcggacggcggcgacgagggtgaagacgacgacgacgacgacgacgacgacgacgacggcgacggcagtggcaggggcggcggcgacggcagcagggacagcaccaagggcagcagcaggggcagcaccaagggcggcggcggcggcaggggcaggggcagggccagtggctag

SEQ ID NO: 39601 - DNA, 240 bp, Zea mays
  Peptide Sequence Number=SeqID_82976
atgggtggtcggatttttccccagcagccctgctctgctctcgctgccgaggcctctgcgcgaccgagcttcttccttgtccatgccgcgacgaccatctccatggccgcgcgtctttctccctcctgctctgttcgtcggccgcgtgcgataattagtcacgtgatgcggaagatgactcaagtcgaccccaagcgcgggctactccgcatggtgatgctggtgaacgaacctgcctga

SEQ ID NO: 39602 - DNA, 222 bp, Zea mays
  Peptide Sequence Number=SeqID_82977
atggggattggttgtctacgggataaaaatttgaataaggattatggtgtggtaccaaactcagctaatgcttttggcaaccaaaccccacagccaaacagctgcatgtctagaggttctctggaggaaatggttgctggagtgacttggctgtccatcttgccaccgggttggactgtcgagtgggaccctgcctcggctgaggaggagcatgaggagtga

SEQ ID NO: 39603 - DNA, 210 bp, Zea mays
  Peptide Sequence Number=SeqID_82978
atggctcgcgcacgcgcaacggccgccctgccaacaacttgcctcgtcgcattaactccgcggcgggacaggcggcgcttctggcaggagaagcgggcgatgcttcgccttcgccgtaataaccgcgccaaaaaaagggaccgggaaagggggataccccgaaaaggatccttccctgtgaaggaaccgggctccgagcccccctactga

SEQ ID NO: 39604 - DNA, 867 bp, Zea mays
  Peptide Sequence Number=SeqID_82979
atgcagcccggctgcacccctccaccggcggtcacccaagatggtgacctccagttagatggtgggggaaagcgagccgggctgcggcctctccccctccctcagcctcaaggattttcatcaccaagctgcagcgtgcccggctttcggacgcgagtggcttcggagccgctcgcggcgccggcgtctgccacggcagctggaagaagttcttccgccgacgtgatagccaagactggccacggaccgacctccaactctacggccttctgcccgtccttggcttacgagttttggcatgggcgggggcctcctagcagcagcacccgccctgaggtcagtgctgccgctgctcggccccccggagcagaagtcgtcgtcgtcgctgccgctggagcaggtgacggcgcgccgttcgtcggtcttccgttgctccgcaggccttcccctatggagtggggttgttcgtacctgcggagggggaaccggagttccgtttgtaatggcactttgaatgccaactcgcctgtcgattatctgaaccgcttcaccaagcatgagtcgccccgtgtcaaggtgacgagtgagcacgaacagaggcggagttggctcgaaaatgaaaacctggttggtcggagcctagccgggttgtccgtcagcgggaccgatgccggagttgatcagccgaggcctcggaccgggctggcgcccttggaagatggttggccgaggcccctgggaagtccctggaccgcgtcgccgtccgaggctgggtcggacctcgctgaagctgtcgtcgatgccgagggtgctacagcccccttccagcgtgaagacccgagcctgcaggatcagattgtcttgtag

SEQ ID NO: 39605 - DNA, 1218 bp, Zea mays
  Peptide Sequence Number=SeqID_82980
atggggggctcggagcccggttccttcgcggagaaggatccctttcgggcaactagcgtgccggttgctcgacgcgtgggcctgggttccaagctggcgtgtcagaagtcgaagaagcgcgtccatctggcgcggttgcatgccgcctgcatggctgcccgccccttctgcccgttggtctgggcgaaaatggggggtcgcctcgccgggtcttcccgtcttccaagcccccggatggggggtatccgccgcctttccgcctcctcgttggaggaacgcaactccatgggagttggtacctctcagccatcgttcggcttcaaggattttcatcacgcagcctggccacactccgccaccggcggtcacccgagatggccaagatggaagatgaggcgagtcggggggccgcctccgcgcgggtcggctgcccctttcttccccctgcgcccgggggtgaagggcgtccttaagccccgcggagacttcctccagccatgccaggatacgcggggcgctaggggccctgggtccccgtctccctgcctgaatggctggttctcgtcttcagcgggggggagcccttctgctgtgacacctccccccaaagccgctgctcaagctgcttcgctgtctggggcgggggtggtggtcgtcgcagttgaagcgggcggcagcgagccgtccatcgttcttcagttactccgcaggccttccccttcggagtggggttgttcgcacctgcggagggggaaacggagttccgttggtagtggcatctcgtatgccagtgtgttcgttcattgtggctgtcgaggcctgaacatgggtaaccggttgagccgcctgctcgggccggattcctggaggagcccctggacctcggcgccgcccgaggctgggtcgggctttgctgtagacgtcgtcgatgccgagggtgctacggctcccttcggcgtgaagacccgagcctgcaggatcagatcatcttgtagcgtgcgctttctgcggccgccgaggccagaagaacgcgccctcgccgcgcttgtgaagctgcgtcttttttcctcctgcttcgagcatctggactctgtcggtaacagggacaaagggacgagtgaggtatccgtatcccggaggcgtaggagtccctcggctcggtcagccttggctgcttacgtgtacctcgtcgtttccaggatccgctttccgaagtag

SEQ ID NO: 39606 - DNA, 288 bp, Zea mays
  Peptide Sequence Number=SeqID_82981
atggaccttcgtctttttactctgcagcttcagctttggcttggtcaacctgaatccagacttcaaaaaggcaacagctgtgccccgagaagctgccagggcacagaagtcgccatgcccagctataacttcgtcaagatcattaatttcaccttcaatatgctcgaaggcaccaggcaggcatttattctgaagatttgtcaaggattctttcagttccgaacttttttgaacttcggcttcaagctttgcatcaagtttcagcttttcttgttcgaaattttctga

SEQ ID NO: 39607 - DNA, 1173 bp, Zea mays
  Peptide Sequence Number=SeqID_82982
atgaattcacccacccccgccagtggaggagactctcgttttagttctgacttcctttctcgcgatggttttccttccatcttgtgggaagtgcttaactccgtcggttaccctacgccccctttgtacacggtgcagttgtatgaggagcatcgggtacctcgttgtcgggtatggctgactttggaggctcatccccttcagccgggttggcgttctcttgattctgagacgattggactcaggacggacgacaccgttgaagcagcagccatgaagactctgacgactttctgtggctaccatcccctggagatggtgatgcaccccttggtactcttccctgctgagaagaaggatgatcccatgtggtgtaaccgcgtgagccatgtgaaggatgtgtgggcgatgtatcatgacttggttgggagggtcactgttcagtgcatgagtgcgttgtaccgccttcaggcccttcagagtgatgctatggcactccttgctaacaccgctcaaactgccaagctcactctcgacagccgagaagattttgtggtcgatctatccaccgagttggtagagaaggatctgcaggtggagaggctgagccagcgcattgccaccctggagcagcaggtggagatccgagacaacactattgatgtcttggagaaccagcttcacgatgtgcagagggaactcgaggaagcgaaagaccacttggacatgcaccacctggagatggaggccaatgaagcaggaagcgagggagaagaggctcccgaggagctaggaccagcccctggtgccaatgggactacctccgcgatgcctccttcacccatggcagctaggcagcgtcacgggcataacgagcaggttcccccgccacctcctccagctcccacagtgcaggagctgatggctcagcagaatgagattctgcgacagctcttgccgcgccagccctaccctcagcagcatggtggaggccagcatcagcgaccttcggctatggcaacataccaggagttcttgagcatgcaaccgcccttgttcaccaaggcagatgtggcggaactgcccgaattattccaagttaagtgcctgagccctgccttagaggctagaccacacttaaatgggaataatccgtcaatcccttggatctag

SEQ ID NO: 39608 - DNA, 168 bp, Zea mays
  Peptide Sequence Number=SeqID_82983
atgaacgtatgtgagctcactcttgctgtctcacacccccccacaggtcaagaacagattttggtgaggcaatggggtttaagggccaagattgatcccgttttggtgcttgatgccaaagggggagaaaataaggctaaagcaacaaatggatcagctaccatttga

SEQ ID NO: 39609 - DNA, 156 bp, Zea mays
  Peptide Sequence Number=SeqID_82984
atgtgggcaccggtggatgagatgagggggagggtcccgaccgcccgtgatttatacccaagcgatgtaattgtggacattactccacaacccatcacactcaatcaaagatccaaatcagacaagtatcataagaacaaacattcaattgcatag

SEQ ID NO: 39610 - DNA, 1239 bp, Zea mays
  Peptide Sequence Number=SeqID_82985
atggagaagcagaaatccctgaagtcttggctgtcaaattgcttgccattgtcaactgtgagctcggacgggactccgaatcggcaaacaatattttgccagaagaatttctgggcagtcttcgatgttatcgtggatactgccctcgcctcgatccacttggtaaaatactcgacggcgacgaaggatttgaacgccttcggtctcggtgacacatttaagcatgggttggctgacccccttcttgtaaagctggccttcgatgagtgcgaagtcccggctttagtgtttgaggcgcttggccttgttgatatcggttggatgatagtacccctgcaggaacaaggttattggtgcccgccagtcttcggtcataatgaggttgactatgtggtggccctcgctgtcattggttatttggaggccctctgggctgcggacagctggcgtgccgatgacatggtagaatacgtcggagggcagggcctcgcctctggcggctgccttggccaatgcgtcggcctcctcattcttggttcggtccacgtgctgcaaggtgaagcctttaaattacctctcgagactgcggatagccgcgagatactgcataagtgcggggtccttcgctgcgtaatctttctcgacttggccggcgactaccttggagtctgttttgatgatgcagactccagagcaaagctgaggcgtgctgcatatctgtggttgacccctgcgggtgaagtaatgactgcagctgcgcctgcccccgcatggcaccatgtgtcgtcgcaatggatggtccacaccttctctgcggacatgtccggctacgttattggcccggtccagtcgacgatgaagtctgccaggacttgtgatttgatggctgtcctgggctcgaaggggcgtcatgttgatgatggcctggattttggtcaggttggcttcgatcccgccgtgcgacaccaggcgaagtcgtgcgtcccgcatgttcacgaacgtttctgcgaggtcagccagatggtcttccttgcttctgctggtgacgacgatgtcgtccacatatgtgaatatgtttctgccgacttggctctcgagcaccgttttggtgagtcgagagaatgtggacccagcgttcttaagtccctccagcattctgatgaagcaatacgtgccgaagggtgttatgaaactggtgctggccttgtcttcctccttcatatatatatttggtggtag

SEQ ID NO: 39611 - DNA, 753 bp, Zea mays
  Peptide Sequence Number=SeqID_82986
atgcaccgagaccgaggcgtctctgcggcagcgatacccggtgaccggaagcggatcggcgagcctatggacagatcgtctccatctacgtcgtgggggttctccggagggcgcgagaaggagcggatcggcgtgggcaagcagccggagatgcctcgctccggcggcggatccaccgccatgtccaagagcaagctctctgacgctaaagttgctgtagttcatgttcttgtggttcttggtatttctttgtcagtcataatttgtgtgctgatcgctttacagcagaatcagaaactgacagcgaagaatcagatcttaaagggcaatgaatttttctgtgaggttgatgatgactacatacaagatgatttcaacctctgtgggctaagcaaccaagttccatattatgactatgcacttgatctgatattagatgttgaatcttcccatggtgatatgttgacagaagagcaaaatgaacttattgaatcagctgctgagatgctctatggattgattcatgttcggtatattattacaagtaaagggctgtccgcaatgctggataagtacaggaacgttgagttcggcagatgccctcgagtgaattgcagcggccaaccatgccttcctgttgggcaatcggatgttcctcgttcaagtacggtgaagatttactgccctagatgtgaagacatctacactccaagatccaaatatctaagcagtatcctttcatttccgttatag

SEQ ID NO: 39612 - DNA, 645 bp, Zea mays
  Peptide Sequence Number=SeqID_82987
atggggtcgcgcccctcaaacagcagcaaaaaaggcaacacatgtgcaccccatctgggggctcggaaggtggaagggcacgatgaatgcgaagagtgtgaaggcatgactacttcccggggaatcaacccctttttaaaggcggatctcctcactcgcacccccaagcatcacgggcaaagtctccaccgacgtgctccaaggttctcaccctccgacgcgggggcggggtcccactcgtcatggaccggaaaagggggtatttcaaaaaaggatccttcccagcgaaggggttcgaaggctggcccctcggaagggttcgacagccgcctcatagcacgcagagtcaaggatgaccctgggtatgtccgttacatggccgaggctcgggctacgctcccgaggccgcatgaaggaacaacaaagccaaccgaggcatcgcaaaaagaattaagacctcggaggagtcaaaccactcctctgaggcctcgggggctacacccggcgggtgcgctcgcgcgcacccaccagaacaaagcacgaccgagaagggccggtccccttgcaaaaaatccagcagagcctccaagcgagtatccatactcccttcaaggctcgggggctactattgggtaccgtaattag

SEQ ID NO: 39613 - DNA, 348 bp, Zea mays
  Peptide Sequence Number=SeqID_82988
atgaaccctgtacaacagtcttcaacccaagaatcaccaagcattgtgatctcaggggcgagggagtggaaaatggatttgctcgcgatttggcaagggggattttatcaggtgtgtgctttgcatgggatgggaactgagggagctggtgggggaatttataggcgagcggtggtgtttggttgcggagtggcggtgatggagcaggtgacacgaggcaacaaacacgacaaggggaggggggctggtgttgccggcagtgggtgcgctgcaaaggggaagtggggcggtggtggtgcgcatggaggcgggcacacgtgcagggggcacggagaaaacctttcttaa

SEQ ID NO: 39614 - DNA, 384 bp, Zea mays
  Peptide Sequence Number=SeqID_82989
atgacccttgatgaatcgcttcttgtcactgtacaagtggccaactactgccgggagaggttccagaggctggatgatgaggtgtcaaggcaggcaagcaggcttgtccgtggcgtccatgagccatggccggtggccgccaagaacgtgggctcaaatgcggttgtcactactctggacgccacgagggccactgcagtcactgccgaggaagcgcgcactatcgccaaggagatggagaagaaggccgccactactgcaaagctagccaccatcgctatggacaaggtgggatttgtcgtcgttgctgtggccagtgtcgtcgccgaggaagccaatgcgttggattcagtggcacatcgctatttggctgtgaacttatga

SEQ ID NO: 39615 - DNA, 222 bp, Zea mays
  Peptide Sequence Number=SeqID_82990
atggcaccggtgactgcacggtcgaagaaacccgcgaggatgttggagtccatgcagccggcacccatccagttcaagcagaccttgtacgcggccaccctggccttcggcgcgacaatattttacagattccaacatgttctatctgccttggacgacgaggttctcgggagcatgctggagtccatcaaagtcgagaggggcgacaatgcaacgtcgtga

SEQ ID NO: 39616 - DNA, 1838 bp, Zea mays
  Peptide Sequence Number=SeqID_82991
atggggacatgtgcggcccccgggggaaggatgtcttcgcccgagctccgggagtcttcggcgcgaatgctggaggttaccgggggtcgatggccaaagaatcttccgatcccctgggcggagggcgaagacatgtctacgtctcgtatagctcgtggcttgaggattttcccttacggacggaatattgctgctgttgtgtcggcagtgatgaacaaggatcgtcaggacgctgcgcagaagcgccgggcggttatcaggctcgccgatcctaggcgtgaggcgaagaaagtgcggggtagcgcgaaggctgctgcccccggcagtagccagccggcgccggctgcgaaaccggtcgcgcccggttccagcaaggcatcggagagcgtgaaggctgtcatcgctggcggaaccaagcctaccccgggcgaagctgcgaaagtacgggagctgccttcgccgaggaaacgtgttgccgacttcggcacgaacattagcgtggaggactattttgttgccgctgccgtcaaggacgtggcgggctccatgtcccgccgactgagggaggcgtcgcagcagctgtcgcagcagctaagtcaaatggccgacttcgccgaccgcgtggcgtcgggtgcccttactgcagatgtggctgccaaagtcgagagactttgggcgcagcacgcggatgccgtccgggagaagtcagctacggagagcaaaaaccgtaggctggcggagaaggtgaccgccttggaggccgagaagatggacctccggcgccagctggtggaggaaaggagggaggcgaaccaggccatcgccgaggcgcaggctgcgcaggcggaggctaaagtagcgcgggcggagggaagtctcgccagccaacacgccgaggagtgggaggtgaggttcaacgccctgcgcggccgcatggacaaggccgaggcctctacgcgctcggaggttgagcggacgctcgcacagttcgtggactcataccgcgagctgggtgcgtggactgctgacttcgaggtgcccgactgggaggcgagccttcgcttcctcgaatggttgcaggaggagttgctggtactcctgaccatcgtggagggtttcatgtcctttgcctcccttgtcacctgcgagggggccatgaatgcgttgtctcgcgaggactgcagacactacgaggtcttcgaccaatcagacgagagctttgaacgtgagatcttcaaggccaaagaccctgttgtgaagcagtcagcggggcactttttgataggatgtggggggcacatgatggagcgtgccgaggacgtcgaggacctcggaggtctggtcgacgcgccgcccgaggctgcggaagtcaattcggtgttgccctcgaatgccggtgaaggccccttggtcgtgcccgtgcctgctatggccggcgaagaccctgtgtcggcccctgcgccgatggtcgaaggtgccccgaagggttttgggcctgcgcacgcaaccgctactgacaatgctaattttgtggcggcttcgaccgtggttgctgaaaatgattcagatgattccgtgtctaagttttttgagtctgatgattctgggagttcggttgtgtggacggaagagtcttcggatgaggacttggattattttgcagccttggatgtggctgcggcggaggcttctccgcgtgtgatgggtgctgaagttcttcctggtccgagtgctgggcgtaggcggcgaagggcggtggcgaagaggagaggtgaggagctgaggataatgctgttcaactacagggagatgggtatcatcccgaaggttgagacaat

SEQ ID NO: 39617 - DNA, 180 bp, Zea mays
  Peptide Sequence Number=SeqID_82992
atgcaggcggcatgcaactgcaccaaggggacgcaccctttcgacttcgacatgtccagcatgggggcccaggcccacacgtcatgtaaccggcgcgccggttacaacggaccgggaaaggggatactccgaaagggatccttctccgcgaaggaagcgggccccgagccctcctactga

SEQ ID NO: 39618 - DNA, 849 bp, Zea mays
  Peptide Sequence Number=SeqID_82993
atgggcgtgcctgacctctgcgcgcgcagcgcgcgcattaaatgcgtcgcaggccgctcttccttggagcaccggacatgtccggtgtacaccggacagtccgcattcaggggagagggcgctcactggcctagcgggggcggggcggacttcgacaacgcagggccgatcggccgcaagtgtcgtcagctccagcgtgcccggttcgctggctctggcgtagcttccggtgccacctcccaccgctgggcggagtgcggctatctgcccgccatacgggcggtcgttgcgccgcgcgcatcgggggaccgcccaagacgtcgcgcgctgctagggcggcgtttgtgttcttgggctgtcctgcccttgctccggtacgacgcctctgcgcggaggtcggtgctcgcccgtctgggaggacccgagtggggatctaccggtgggcagatggccgccgtcgtcggtgcagaggtggtggcggctgaagaagtcctcgtcgccgacgagatcgccgccgccatctgcgctccgggcctccggctctttggctttgatagcttgtcctcgcccctcgagtggggacgtgggcgagggccttgttgcagcagcgtatgccctgaggtcatcgctgctgctttttggccgcccggagcggaggtcgttgtcgctgctgccggagcgggcggcggtgagccacctgggattttgtcgccccgcaggccctccaatgtggggggttgttcgtacctgcgcgggtggaaccagagttccgtctgtaatggcaccttgagtgccagcgtctgttcattgcggctttcggggcctgaacatctgtgtatttgggcgtaa

SEQ ID NO: 39619 - DNA, 504 bp, Zea mays
  Peptide Sequence Number=SeqID_82994
atgcagctttacaacacgacgacggatcagacatcagtagggggagcagcagcaccctcggcgccgactccaccttcggcggaatccgacccgacctcggacggcgacacggtcggaggatctccacctcgaaggaaaatgtcagcaccgcgcctgggtcatcgccgccagggtctcctccagaaacccggcccaagcagacggccagaccggccgctccgtagcctcagccagccatcccccggggacaccggcccggctcatggcctcagcagcccgactccagggttggtcccgccagtggacgacccggccaggctccggccgccgctgctacgcctcctcggcctaggaaagcggccgagggtttctttaactgggcaagagaagcctcgggcggcaaggccgaccgagccgagggactcctacgcctccaggatacggatacctcactcgtcaccttccgcacagggcaactcacacttggttaatcggttcagctag

SEQ ID NO: 39620 - DNA, 543 bp, Zea mays
  Peptide Sequence Number=SeqID_82995
atggagggtctcatcaaggggttggtccacgtggccatcgacgccgtggaggacgccgtgagggagagggaccacggccgcgccgacgacgacgaggtgccgaggaggagggcggcccaaagctccgatccagatgacgacggggaggaggaacgcgacgaacgatcgcggtcgacgtgggccgaggtcgtctccgagcagaagggcagcgatccggacgagcgccgggaccatcgaagctcggggcggctgcgcgggtttcaatttctgcagtgcgagggggaggaaaggtgggatggcagtggcagccggcggcgtcagcaacagcagcaggcacaaggatacgggaatcagcatcaggaagaagaaaggataaacgatggaggctggcagaccgtcggtgagaaaaagcgccatggaagaccacagcagttttacctggaagaagccaagggaaatgtggattaccaaggttatatatttccaaggcgccgtggtgaatcggggaagacaaccgcgtcgatattggcccgtatagtgtga

SEQ ID NO: 39621 - DNA, 198 bp, Zea mays
  Peptide Sequence Number=SeqID_82996
atgactaaaaatttggcagcaaaacagtgcgatagcaatgaatgccgtggtgggaaggtgaatcggcaagatccccagcaccaagcaagcagtcacccgcactcactgaacggtaggtcgcagagtccgagaaggttgcatcctgtgcctataaataggtggacagtatcccggtactgttcacgcgatccgatttaa

SEQ ID NO: 39622 - DNA, 321 bp, Zea mays
  Peptide Sequence Number=SeqID_82997
atgcggacttcttctcgcggatgcacacggactctcgtgacgatcgcgagccggctgaacgacgcgaggcgcggagcttacggcggcgtcgtgggcgcgcgagctctgcgagggctgcgcgcagcgcgtcgtggacgcgtcgtgggacgggcgcgggagctctcaggacgcgtgcgcggcgtcgtggggccgggcgcggagctctgcgaggggctgggcggcgcggcggcgtcgtggggcccgggcgtcgtgggagctctgcacggcggcgaggggcgcgggaactctgcggcgttggcgtgcggcggcgtggcgtggtga

SEQ ID NO: 39623 - DNA, 114 bp, Zea mays
  Peptide Sequence Number=SeqID_82998
atggctgggaaatttttattatcctctagactgagcgtcaatttctggaaagtccagggcctcggtgtaaatgtttccaagacacagttcgcccagcgcaggactgcgggttaa

SEQ ID NO: 39624 - DNA, 405 bp, Zea mays
  Peptide Sequence Number=SeqID_82999
atggccgcccctgctccccttcccccgcggcggagcggctcacccccgcccctgctccctccccggcggcgcggctcgcccgtgcccttcccccgcggcggcgcggccccgcccgcccctgctccctcccgcggcggcgcgaccccgctctcccctgcccctccctccacggcggcgcggccccggccgcccccctgctctcccccgtggcggccctacccccgtcgtggcggttcccggccccccagaggcaatccccccccggcgtgcggcccccggcacggcgtcccctgccccggcgcgtggtctcggcccccgacgcggctcgcgtggcctcggcacggcatcgcgctcccccgtttaccccaacgcgttcccgcgtgcgcagacccacgcgcgcagtga

SEQ ID NO: 39625 - DNA, 228 bp, Zea mays
  Peptide Sequence Number=SeqID_83000
atgtgtgcccacaagaacccaaagagccttcacaagcacaagatcaaccatcatcttccatacaagcatcttcgccaacttaagatgaggaactggctcaagaagaagaagatcaagttcaagacaatgagccatctcaagaagagggcattggtcaaggggtatatgaagttgaacaagacaaggaggatgagcaagagattcaggctcaacgaccacctcacctaa

SEQ ID NO: 39626 - DNA, 240 bp, Zea mays
  Peptide Sequence Number=SeqID_83001
atggacgcgcggcggccggaggtggagaagatactggcgcacgtgaattcgtggcatctaccatggcagttactccgacgagccacgaagaggcacaagggttcacggcgatgcggtggaggggctgagccacgcggcgcaaggccgggaggcggctgtcgccggcgagcatatccacacccgccgtgggcaaaaaccctatactttgaaagttacaaagccccaaagtggagcctttaa

SEQ ID NO: 39627 - DNA, 582 bp, Zea mays
  Peptide Sequence Number=SeqID_83002
atgaactcaagactccccgaaacggagcaccgtcccgggccggagaggttgctggagactgcccatctggagcttgacgggaagctgttcgtcagcacgcagcaggcccctacccggcgcgccaaactgtcggcgtttcgagacaggggggtccctaagccgacgagtgagtatgctgcgtgccccagcccagatgggtcgagcgcgtgggcgagcgcgaaggggggagaggcgaggtggccggagacgggcgtgagagaggtggaagtcccgcggccttcgtgttcgtcccgcgcccaggtcgggtcgggcgacgtgggggctcctccgaagctggggtcgaatctgtcttccgtttccgaggccgagcccgagcccctgggtcgggcgaggcggaagtcgttcggcagaggccacggcggagtccgagccctggggtcgggtgaggcggagttcatcgtcttccggggccgagcccgagtccgagccctggggtcgggcggagcggagttcgccgtcttccgggtcttagcccgagtccgagccctggggtcgggcggagcggagttcgccgtcttttag

SEQ ID NO: 39628 - DNA, 243 bp, Zea mays
  Peptide Sequence Number=SeqID_83003
atggcgtttgaccgggcaaagccggatttgccgtggttttgttacaatcggcgacggagtttcgtggtaggggacagtcctgacgactggggcccaaatggcagcgatagagaggacgtacacggctgggccgcgcgtgggccaaatccaagcccactagcggttggcgagggactcgattgtgttgggttaaagggtaggtgggccagattgagggtagtcggcccagatggctcgccttag

SEQ ID NO: 39629 - DNA, 117 bp, Zea mays
  Peptide Sequence Number=SeqID_83004
atggcgggcggatttaagctcgccggagctaaggggaagtggctggccggtgaggaaaccctaggtgacactggggtgtcacagtatcagagtcgttctcttaacgaaagggactaa

SEQ ID NO: 39630 - DNA, 633 bp, Zea mays
  Peptide Sequence Number=SeqID_83005
atgaacgtatggggccgtaacaccctcggcatcgacgacgtcttcagcaaggtccgacccagcctcggacggcggcgcggtcagggacttctccgggaatccggcccgagcaggcggctcggccggttacccctggggcctcggccaaccgtcttccaagggcgccagcccgacccgaggcctcggctgatcgactccggcgtcggctccgctgacggacaacccggccaggctccggccatccaggtacgaacaaccccactccgaaggggaaggcctgcggagcgacggaaggccgacaaacggcgcgccgtcacctgctccaacagcggcgacgacgacgacttctgctccggggggccgaacagcggcaacgctgacctcaggctggatgccgccgccaggaggcccccgcccatgccaaaacttgtgaggcaaggacgggcagaaggccgagaagttggaggtcagcccgtggccggccccggctatcgcgccggcggaagaacctcttccagctgctgtggcggacgccggcgccgcgagcggctccgaagccactcgcgtctgaagaccgggcacgctgtagctgccagcgccacgggcaacacccgctcctccccccatcactga

SEQ ID NO: 39631 - DNA, 1596 bp, Zea mays
  Peptide Sequence Number=SeqID_83006
atggagtacacggtcagacatcagtgggggagcagtagcaccctcggcgtcgactccaccttcggcggaatccgacccggcctcggatggcaacacggtcggaggatctccacctcaaaggaacctgtcggcaccacgcctggaccatcgtcgcagggccagctgtcccccgaggacatcagcccggctcgtggcctcggcaacccgactccggcatcggtcccgccagtggatggcccggccaggctccggccgacgaagcttcttttcgagccatctctgcctctgtccatgctggcaccgctgcctccggctccggctcatcgtagagcggccaagggccccgacagccacaatgaacagacaccggcactcaaggtgccattacaaatggaactccggttccgcccccgcaggtacgaacaaccccccacattggagggcctgcggggcgacgaaaccccaggtggttcgccgacgcctgctccggcagcagcgacaacgacctccgctccgggtggccgaacagcagcagcgatgacctcagggcagacgctgctgcgacaaggccctcgcctgcgtccctactcgaggggcgaggacaagcagaaggccgtagagttggaggccagtccgtgggcggctccgactatctcgtcggcggagaaacctcttccggctgcctcggtgggaggtggcatcggaaacagcgccgaagccgctcaggccggagagccagacatgtggcagctgccagcggcacggacggcgaaccccctttccccccaatcactgagggaaggagcgggccaccgcccgcgcagagatgggccccaactcggcgcactcccctccccaacactgatgatgaacatccttgaagctgagggaggggcagaggccgcagccccggcttgcttctccccaccatcaaactggtggtcaccgtcttgggtgaccaccggcaaggggatgcagccgggcttcctgatgaaaatccttgaagccgagcgatggctgaaagaccagcgggtgaaaaggcggaccgccatgcaggcggcatgcaaccgtaccaagggggcgcaccctttcgactccgacgcatccagcatgcaagcccaggcccacacgtcatgtaaccggcgcaccggttactacgtgcgagaagctgcaccgccacttacgctagtaccgcgccttctcgactgcggaaccagtgccgcgactcaaggcgacccagcgcatgacccaacagtgccaaccgagcacatcgatcacggggactgggaaaggggatactccgaaagggatccttctctgcgaaggaagcgggccccaagccctcctactgatcagaggttcgaaggctggcccctcggaagggttcggcagtcgcctcagagcactcaggctccgcgcctactactaatcagaggttcgaaggctggcccctcggaagggttcgacagccgcctcagagcactcgggctccgcgcccactactggcagaggttcgaaggctggcccctcggaggggttcgacagccgcctcaagccactcgggctccgcgcccactactgatcagggattcgtag

SEQ ID NO: 39632 - DNA, 567 bp, Zea mays
  Peptide Sequence Number=SeqID_83007
atgccattacccgattttcatgtttctgaaccttttaccctcggtattgaactggaaatgcaggtggttaatccgccgggctatgacttaagccaggactcttcaatgctgattgacgcggttaaaaataagatcacggccggagaggtaaagcacgatatcaccgaaagtatgctggagctggcgacggatgtttgccgtgatatcaaccaggctgccgggcagttttcagcgatgcagaaagtcgtattgcaggcagccacagaccatcatctggaaatttgcggcggtggcacgcacccgtttcagaaatggcagcgtcaggaggcgtcatcacccgatccgcacactggagatcgtcgaccgctaacggaagataccttgcgattgctggaaaaatcgcccctttccgcacataaaattgttgcatcgagcgcgattgaggccctgcatcgccaggtcgtcagcggtctgaatgaagcgcagctaatgcgcgatttcgtcgccgatggcggctcgctgattgggctggtgaaaaagcattgtgagatctgggccggtgactaa

SEQ ID NO: 39633 - DNA, 692 bp, Zea mays
  Peptide Sequence Number=SeqID_83008
atttgagatcgtgcgaagctaagcttttcatcaagatggcacttgttgttatctatggatctatctaccccatacttccatggacaccggctgctacaactgatgccaaattggagagtagtacacagttgtgcggagcctgcttgggtagggtgaacaaagtggctttgtttatggccctttccacccctgctgttgcaaggaaacatgaacttgatggcagcaataaacctgggcaaagggagaaggcacatgactggagagcctttcttctttattttgaccagtcccagaaacaaggcttaaggtggagcaggtgcgacaacggaggaagtcgagaagtccctactcagcttgcaatgaaggttggctatggcagcgcggaagaattaaaaaataatggttgtcaggagacatatgagagccctagaaaagtggaagctaaaattgagaagatgaaatatgaacatctgacgagggaggctgctttggcaaagaaggagcttcttgaagaggagtacaagaaaaagtttgatgaggcaaagaaggaactatctctcgagaatgatctagcaggcattggtctagagagtgatctttacgccaaggcaatccccaaaacaatccccaactcaagaaatccaggattcttccaaaatccaaaggataggggaggaaacgagaatggataa

SEQ ID NO: 39634 - DNA, 390 bp, Zea mays
  Peptide Sequence Number=SeqID_83009
atggcgcctcctattgacgtggctggcctgcgccctaggttgggcgatgtggaagctcctccgaagccgaggtcgagtatgtcttccatggccgaggtcaagtccgagcccttgggtcgggcgaggcggaggtcgtcgtcttctggggctgagcccgagtccgagccctgggtcgagcggagcggacttcgccgtcttccgggacttagcccgagtccgagccctgggtcgggcggagcggagttcgccgtcttccgggacttagcccgagtccgagccctgggtcggctttatgctgatgggggttaccagctgagaattaggagtcttgagggtacccctaattatggtccccgacaaatttgcatttttaacttggacatcacatga

SEQ ID NO: 39635 - DNA, 519 bp, Zea mays
  Peptide Sequence Number=SeqID_83010
atgatagagctcggttgttgcagctgcagggttcgccgagtggaggagaggaggcctactgctatgctttgggggagcgcaaggccatgtgtcgcggctgcgcgcaaggaagttgaagcttcggcagagctcgagcagagcgcgctggaggagcacggccgccggatggagggttcccagcgccatggatctgtgtggggagggggtgcctgcaccagaagacctcgaccatggaggcttctgccccatgtgctagggaggagggactggagcttggggatggcgccctggttgctgccgtgtgggagacaagacagggagagggagagcgcagggacgctcggtcttgggcagaggagagggagccggatgaaggaggaaggaggccgactggttgatttaatcaagacaccgctggccaccattgctcaggaatgggcggcatttctcactggccggctgcaaccattggtgcagagagcgccgggccgagcgccaggtgttggcgtgcgtgtttag

SEQ ID NO: 39636 - DNA, 531 bp, Zea mays
  Peptide Sequence Number=SeqID_83011
atgatgcgcaggggctgcgcagatcgacggcgggtagcccgacctggcgagcacgacgcagcggagggcgtcgctgctgctgcttgctgcggcattacgtcgagcacgcctagggcgcgacgcggagggaatccacgtggctacacgaactggcgtcgcagctgctgcgcgaggtcgacggcgttgacgaccgtgaaggcacgagtaggggcgcgggccggccatggggatttgcgtcatggcatccatagagaggagccacagttcggccagggagggagctggggcgttcctagcgcgcatgcacaggaaaacagaggggaggagaagctgctgtcgccatgcctgaagggggaacgctggagagggaagagctgctgctcctgcggcaagggacacaggaagaaggccggcgtcgagctcctggacatgggggccgctggagcatcagcttcattccctgagcagggcatcggccattggggaagaacttcctctgcgcaaggaatagagaggaggggctggagatag

SEQ ID NO: 39637 - DNA, 471 bp, Zea mays
  Peptide Sequence Number=SeqID_83012
atgggaggaagagctcctactccctgctcggacgcccaaactgaggggcggcctagaggcgagggcctcggcgagatgcaggcgtcgcgcgtcttggtcacgagggagaagagcaccatgatagagcttggttgttgcagctgcagggtgcgccgagtggaggagaggaggcctgctgctacgctgtgggggagcgcaaggccatgtgccacggccgcgcgcagggaagttgaaggtccggcagagcttgagcagagcgcgctggaggagcacgactgccggaaggagggttcccagcgccatggatctgtgtggggagggggcgcctgcaccagaggagctcggccatggaggcttctgccccatgcgctagggaggaggggctggagcttggggatggcgccctggctgctgtcgtgtgggagacaagacagggagagggagagcgcagggacgctcggtcctaggtag

SEQ ID NO: 39638 - DNA, 321 bp, Zea mays
  Peptide Sequence Number=SeqID_83013
atggcgcctcctgttgacgtggctggcctgcgccctaggttgggcgatgtggaagctcctccgaagccgaggtcgagtctgtcttccatggccgagatcgagtccgagcccctgggtcgggcgaggcggaggttgtcgtcttctggggctgagcccgagtccgagccctgggtcgggcggagcggagttcgccgtcttccgggacttagcccgagtccgagccctgggtcgggcggagcggagttcgccgtcttccgggacttagcccgagtccgaaccctgggtcgggcggagcggagttcgccgtcttccgggacttag

SEQ ID NO: 39639 - DNA, 501 bp, Zea mays
  Peptide Sequence Number=SeqID_83014
atggccttccttttctggtttcgggcttctcttagaggatgcccttcttggtttatgtccagtggtgcaagggcagcccctggcgctattgccttcttcggcggcatgacgaaggtggttgctcgagctgttgttgaaggtggtcgtttgagttcaacggagcttcggcattcgtcatcattggtattagacaatgtctttgtctcgaggaccttagatggggaagaagatcctcatcacaacaaagcttttcttatgatgaagtgtgggggacagatatcccccgggtccactagaaggcaagaaggcctcgcgaaaggctttgggcctattatctcgcaaggtcatcccttcgtgggccaggggagaactgctggtggtatgggtcgatgcgagaaagaagtagactcaggcccaggcggctcattggatttaagcgctatccacagcgccgatccgactttcccgcgcatagcgaccttgaataacggagcgaactag

SEQ ID NO: 39640 - DNA, 102 bp, Zea mays
  Peptide Sequence Number=SeqID_83015
atgaggatgatggtttatgattatgattatggtaatggtaaagaagaatgtgtcgaggtggatctccaggagttccaggatttcgacgagtttgaggagtag

SEQ ID NO: 39641 - DNA, 444 bp, Zea mays
  Peptide Sequence Number=SeqID_83016
atgcacgtaaggctgcgccgagggcgcgtgcaagcgattcgcgggcaagccgtgggcacgccgtccacgcgtggaccgagatggtactgcataggcagcgagcaacgctggccacgcgccgtgggtgcacgcagccgcgccgggggcacagctggccacgccgggggcaacacgaccatagccgcggggctgcgcacagggctctgcgctggcagctttgggtcacgggcacctgggtggcacagtcgggggagcagggcatcgcggcgtcggtcactgggcgcggtcagcatcaggcgcgcggtgcaggacatggagcggggtcgtggcagggacgcggtgcgtcgggctcgaacgctgcaggggcgtgggcgggcgcctggtcgcggcagcggcagggcgaccggctgggcagggtcctcgcgctgtgctcctggctggtga

SEQ ID NO: 39642 - DNA, 642 bp, Zea mays
  Peptide Sequence Number=SeqID_83017
atggcggacaaccggacgagctcgcgacgcgaggacgtgctgcgcacacgacgcgaagcgacggcgaggctgccgctacgccgcgcagattacgctggggttacgcaggatgcacgtaatgctgcgttgagggcgcgcgcgagcgattcgcgggcaagccgtgggcacgccgtccacgcgcggaccgagatggtactgcgtaggcagcgagcaacgctggccacgcgccgcgggcgcacgcagccgcgccgggtgcacagctggtcgcaccgggggcaacacggccatagccgcggggctgcgcatagggctggcgcgcagggctctgccctggcggctttgggtcgcgggcacctgggtggcgcggtcgagggagcagggcgtcgcggtgtcggtcactgggcgcggtcagcatcaggcgcgcggtgcaggacatggcgcggggtcgtggtagggacgcggcgcgtcgggctcggatgctgcaggggcgcgggcgggcgcctggtcgtgacatgggcagggcgaccggctgggcagggtcctcgtgttgtcctcctggctggtgagagcagagggaggagaggaaatgaaaagaaaaagcaagaaaaagagagggtaacacctgaatttggtggatattag

SEQ ID NO: 39643 - DNA, 315 bp, Zea mays
  Peptide Sequence Number=SeqID_83018
atggcgatagtagcgtgtaccctccgtggcaagaggctggacggtgggttgtccaaggtcctcaggacaaggacaactataggtgggcctaataccatgggaggttccgtcacacctggtgaccggattgaggggcactcaattggtcttgtactggaggtgccaacctatcgaatgcagatgtttggggtgccccccaagcgaggtggatatggaggcgaaggtgtccatgcaggcacgttaggtccctaccaacctttccaattggtgaggtggtccaatcgatcttacctgcggtcgatcctgagtacgtga

SEQ ID NO: 39644 - DNA, 138 bp, Zea mays
  Peptide Sequence Number=SeqID_83019
atgtggtttttacatcagcttgggatgtttgccaaatgtgtgaaggattacggggttagtattggccctttaatgtctggtactctgagtgcatcatatgacagaatgaaatgttgtgtagtttccttagacaattag

SEQ ID NO: 39645 - DNA, 1830 bp, Zea mays
  Peptide Sequence Number=SeqID_83020
atgttgaataaagcaccactgtcgctgccacccaaacggaactttgtggatgtgaaggatattagttttgcatcagcatcgaagcgccttgcaataactgatcaaatataccaatcctctgcattccaaactcctgctcctactcgcaaaggtctgtcggtatcagttgattctcctacttcatctcattgcggttggacaaacttcaacaatgcttttactgaaaacttggacaattctcaaggcacaccaggagcattgaccaccacagcacttcctggtgtaaatgaccaacaatcaggaaatttggagcgtatgacacttgactcactggttgtacaatacctgaaacatcaacaccgccaatgtcctgccccagttacaactttgccaccactttctcttttgcaccctcatgtttgccctgagcctagtcgcagccttagtgcaccggcaaacatagctgctcgagtgggaagccgtgagataagtaggcaatttagtgggatccagatacctcgtagggatcgtcattttatatacagtaggttcaagcagtgtcgtgtttgccgtgatgaggcatcactattgacttgcttgacatttcttggagatgcagctcgagttgtggctggtaaccacacaggtgaattaaggatatttgactgcaacacggcaaatctccttgagactcaaacgtgccaccaacatcttgttacaatgatggaatcgacatacactggtggaattgagatgattctcacatccagcctaaatgaggttaagatctgggatgccttctcggtatctgcagggcctttgcacacatttgacgactgcaaatctgctaggtttaaccactatggaacttcatttgctgccctttctactgatacagctcaacgggaggttcagttgtatgatgtacagacgtatactcttgctacacggcttcctgataacactagcagttcaggttcaggccgtggttatgtacaacccattatacatttcagtccttcagatacaatgttgctttggaatggagtcctgtgggatacaaggcaaccaaatcctgttcatcagtttgaccagttcacagattactgtggtggtggattccatccagcaggaaatgaggtgatcctgaattcggaggtgtgggatctgaggaagttcaagcttttgaggagtgtcccttccctggaccagacagtaataaagtttaacggaactggtgatgttatctatgccaccctgaggcgtaatcttgatgacgtgacatcatgcatcaatgctcgtagggtcaggcatcctcttttccctgcattcagcacgattgatgcggtgacttactcggatattgcaaccgtccaaatggaccgctgtgtacttgatcttgccactgagtccaatgattctcttattggggtggttgctatggacgatcaccaggagcttttctcttctgctcgcttgttcgaagttggcaggaagcgaataactgatgatgattccgatccagaggacgcaggtgaaactgatgatgactccgatgacgacgacgacgactccgatgacggtgttcttgcgccggtgctggaagggggtacagattctgaagatatcagtagcagcagcagcgatgacggtgatgaagatggtggtgacgatgatatacccagttcggatggcattgaagatgaccggttcattgatgagagacgacgggagttcatgatggatctttttggtgacggttgggacgacgatgaggcttatatgatgggatcctttagcagtggcgacgaggagggttggatcatgtag

SEQ ID NO: 39646 - DNA, 240 bp, Zea mays
  Peptide Sequence Number=SeqID_83021
atgagatttactatcttgatcacctacatcaccccgcatctcctgataacaaatatgtttcgtagccgttcagaaacgtgttacgtcattgctccagaacggcctgtttctgccgttttcaacatatatgtgccacatatcaagcatttgattggcaacaagttccaatgtttgccctcccatcatcggccaatgtttcaatcaatgtttgatgctcatgacaaagaggtggataagtaa

SEQ ID NO: 39647 - DNA, 261 bp, Zea mays
  Peptide Sequence Number=SeqID_83022
atgggtcaggtggacgcctgggtgattcagccctttgatttggagaccgtttctcatgtggtgaagctgacttccttcgtggagatgctgcagacaagtcactcaggcaacaatcacacaaggaaaattcatggggggaggccaccggcgggggaggagcgaccggtggcgcggtggaggccgccaactggggatgtggccgatgtgccacacagtgaagaggaatgggcggtggaggccgccaacggaggaggtcgctag

SEQ ID NO: 39648 - DNA, 876 bp, Zea mays
  Peptide Sequence Number=SeqID_83023
atgacacaacaatctggtgaaatggaaatggagcacaggctgcgcatgagtctctcaaaaggagctcacacaacactatcatttgaatttggagaagaaaattccaatgtgtttgcagatttgaaagatgacaatggatccgatagtggcattaattttgattataatgatccagacatgccaaacaacatagatgttgatccagacgtttcaacatatcctgatgagattattgctgcaactcccaaaagtactcatggcacacatgatggcatagatacacatgaaagcctcgatgatgacttttgttggttacatctggattatctggtgttcccatacttgaccagatcaattagatactttagggtgacggtgatccctgctgataagctctactactattatgtgagcactgtaggcgtccacttcgcgcggtgcacgttctgccgctccgctcacgcccgtggccgaacgctcccccgcaccttccatcctccgcgcagccacagccgctattcccgccgtcccgccgcgcattccatccttcgcgcagccacagccgtgattccttccagcccgcggcagagtgctcccccgcacctgactcctctattcccagcgctggatgcgtccctcccgcagcgccccgcctcgcccgcgcatccctcccggccgccaagcccgcttcctgaggctgcatccagcgctgccggcttgcgcaagggtttccatcctgccgctcgcgcaagggtttccatcccgcggtcgcatccagcgctgctggtggccgattccatcgcgcaatctgtcggtgttttgggtccgaccacacacccggggatgcccctcaagagagttgatgtgggtggctaa

SEQ ID NO: 39649 - DNA, 159 bp, Zea mays
  Peptide Sequence Number=SeqID_83024
atggagactgtaactgatgagaagagcgagtatacaatacagttgattttgcaaactgagggaggtgctgggggagcaaaattttctcagtttggcgctgatttatcaagatcaataaagtgcaagacacactttccactaacggtagcagacacctaa

SEQ ID NO: 39650 - DNA, 456 bp, Zea mays
  Peptide Sequence Number=SeqID_83025
atggggcagttgaggcatccaaaattggtagagttgatcgtatattgctgcgaagatgaccatcggaaggtggcggtcttctgctgctgctggtttttaaggtccataacagccatccacctcgcgtgctctgcactttgtgcctatccgttcattgaagccctgtgggtgtcggccaaggagcttctcggcatcaagtctgacgacgatgaggagcagccctcggcgatgacgaagggccccacccccatccaccagttgtctcgcactagctgtgcaacaaacctctacccatctagcgagtgggagcagatgcggaaggacaactacaagacggtcaacgtggaggagagcctccacaagaagtgcttcagcgagcactttcaggacgaggaggtggtcgccgccttctgtgccgttgtcaacgcgaagcagttatctgtatgtactctctaa

SEQ ID NO: 39651 - DNA, 225 bp, Zea mays
  Peptide Sequence Number=SeqID_83026
atgctgttgcgcccagatgtgattgttgtcttgttagccactgtgcttctgctgccacgacgtggggcgcttttgttttatctaccgggaatcagctcgggcgagacggatggagtggtggtgacctcgggcgaggcggagttctgcccgaggtgggagactctcagggagaagcctcattttaagtggtacctcggctatttccctcaagggtttcgtccttag

SEQ ID NO: 39652 - DNA, 243 bp, Zea mays
  Peptide Sequence Number=SeqID_83027
atggcggtgtcggtcatgccggtggccagcggcaccatcgagttgctgtcgacaaacgggtacctctcacttccgtacgaggccaccgcggacgcgtcgctcggctacagagggagcccaattgcggcgcgaccttttgccctggcaccaagagctttgatcctgagaaacagcagtgtgcaggtaccatatgcaaatggttgggattcaccagtgtggtttagaagcatctctgtggcttag

SEQ ID NO: 39653 - DNA, 2751 bp, Zea mays
  Peptide Sequence Number=SeqID_83028
atggctgagtcggaggacgccaccgccgccgagcccgggtccgggccgccccacgaggacgaggatgcgctgctcgcccgcgcccacaccgtcatctccaggatcatcgaccgcgagctcgaccccaacccccgcctcctccacaccctcgccaccatgtgcgagctccacgaagccagatatcttgagttacgttcagctgacacaatgttcaatagcacgaacacaaggactgcatttacaattgggaagctggccaatttgctccgggacaatgacgagttttacgagttggtgttttgtaaattcttgtctgacacctcctactctgttgctgtacgagctgccactgctaggttgctcttgagctgtcaccctgcctggacgcctccgtatcctcatgtctttgaagactctatcatagataatattaagaagtgggtaacggaggatcctgaagcgtctaatgaatgcaaatggaagtatctaggaaacaataaacccacagatgctgagatgctgagaacatatgggattggtttgcttgctatggcgttgtgcagcagtgggcaattgatagaggatgtcttgactttgggggtatcagcgaagctcatgcgctatttgcgcataagagtccttggggatgcctcatcttctcagagagatgctaatcatccacaggacaccaagcatccttggggcggagacgacagtaggggtaaatcacgtctgtcccaagatggttctcgattggacggaacaagggttgggtatggaatgttaaccaacccgacagcagagaagaacaacgaaccttgtgttggaatgatgcaagcatatggagcaaggtcattggatgacagttttgcttcattggatgattctgatgtccctgaggctgattggaccaatgatagatcttatagcacacgtgtttgtgacacaaagtcaaaacatggggaaaggaattctgtgacgaggttgcttaaagatgaagaggtcagcgaaaatggtgaactgttgaagagaaagctgaatcgagccccctcccgacttagagtgaagggaaaagcaggtgacagcttgccagaatgtgaaatgacacctttatcgccaacctctggattgagaataggaggtcaggctacaagagacaggaatgtggcgagggttgatgatccaaaggaggcaactgatgtgaacaatagattgtttaacaccatttccaaagaagaatacgaagatcgattcagggattgcattattggcttgaaggatatatctgacatcgttttgaaggcagtgagagccgctgaggctgaggccagatctgcaaatgcacctgatgaagctgtgaaagcagcaggtgacgctgctgccgagcttgtgaaatttgctgctttggaggtttggaaaagcgaaaataacagtgatgcggttgtagtagtggcggagaaagctgcatctgctgttgttgaggctgcattgtcaattagtgtctcacgaagtgcaaatcaagttggtgaagagcgtgcaatggaagaagctgtccaaaccagcgaagaccaggatttggaaaattttgttatcagtgacaaagcacagctattacaacttagagaaaattatagcatccagtgtctacagattttaggagagtatgttgaagctttgggtcctgtactccatgaaaaaggtgttgatgtttgcctcacattattgcaaaggagcatgaaaaaccaggagggatgtgaccactttgctcaactccttgatgtccttaaattggtttgtgcactggctgcccatcgaaaatttgctgcactctttgttgatcgtggtggtattcagaaaatcgtctctatgcctagagttacccagacatatatgggtctttctgcctgcttattcacttttgggtctcttcagtctaccattgaacgtgtttgtgcgctttcctcagacacacttgacagtgttgttgaattagcacttctacttcttgagtgcccacaagatttagctagaaaaaatgtggccatctttttcgctgctgcttttgtgttcaaagctgttctggatctatttgatgcccggaatgggatgcaaaagcttctcgatatcctttgtggatgcgcgtctggaaggtctggtagtaattctggaggagcaggatcctccaatgtaaatcaagggaatgatcggtcgcctgctgaagttttgactgcatcagagaagcaagttgcataccatacatgtgttgctctacggcaatactttagagctcatctccttcagcttgttgattccattcggccaagcaaaagtatccgtagtattgcccggaacacttctagtgcaagagctggctgcaaaccttttgacatcagcaatgaagctatggatgccatcttttgtcagatccaacgggacagaaagttaggccttgctcttgtgagagcttgctggcttgcgttggataaatttgttgcctcaaatggtcacatgactatgctggagttgtgtaaggcacatggtgatcggtatttgcgtgacttaactcaatatgcaattggagttcttcacatcataacacttatgccacagccacatgtccgcaaatcaatagtgcaggggacattaagcaacaatcgtgctggcatggctgtcttattagacacggtgaaaagtctcgactatattgatcatgaggtacagcttcactttgaaaatatgaatatgaattaa

SEQ ID NO: 39654 - DNA, 144 bp, Zea mays
  Peptide Sequence Number=SeqID_83029
atggtgacctcgggcgaggcagagttccgctcgaggtgggagactctcagggagaagcctcggtttaagagaagtcaagggaagaagaagactcccgctgtctatgacatgtgggcccagggccaatgtgaatgtgcacactaa

SEQ ID NO: 39655 - DNA, 297 bp, Zea mays
  Peptide Sequence Number=SeqID_83030
atggcgcttcctgttgacgtggctggcctgcgccctaggttgggcgacgtggaggctcctccgaagccgaggtcgagtctgtcttccatggccgaggtcgagtccgagcccctaggtcgggcgaggcggaggtcgttcggtagaggccagggcggagtccgagccctggggtcgggcgaagcggacccgagtccgagccctgggtcgggcggaacggagttcgccgtcttccgggacttagcccgagtccgagccctgggtcgggcggagcggagttcgtcgtcttccgagacttag

SEQ ID NO: 39656 - DNA, 122 bp, Zea mays
  Peptide Sequence Number=SeqID_83031
gcgatttccgctgctccaatccagcgcagctccaatccagcgccgctccaatccagcgccgttccaatccagcttacatccttcaatctcccagcattggagcctgattcaagaagttccag

SEQ ID NO: 39657 - DNA, 987 bp, Zea mays
  Peptide Sequence Number=SeqID_83032
atggatcaggcggcggaggagtcttgtgttcccccaggcttcaggttccaccctacggaggaagaactggtgggctactaccttgccaggaaggtggcctcccagaggatcgacctcgacatcatccaggaggtggatctctacaggatagagccatgggatctgcaagagcggtgcaagccgcagcacgccggcggtgggcacgacgagcagacacaggagtggtacttcttcagctacaaggaccgcaagtaccccagcgggacgaggacgaaccgcgccacggcggccggcttctggaaggccaccggcagggacaaaccggtgctgtcgtcgtccaccaggaccaccaggtgtagcagggtcatcggcatgaggaagacgctggtgttctacaagggcagggcacccaacggcaggaagagcgactggatcatgcacgagtaccgactccaatccaacgagcacgcaccggcgcaggcaagttcattcatcttgccttgcgaggaaggctgggtggtgtgccgcgctttccagaagcctatccccaaccagcggcccttcttccccaccagctacgccggctactacgaccacaacctctcaacgacggcacggctgcacgtagacggcgaccgccatttcctggcgggctcatcagcagcagcagcagcactgctacagcagccaccagggcttgcaggcagcagcttcccgcagctgtactccgacgacgacttggagtccaagaagcagctgttgagtatcccgccgctggagagccccactgccatggcctgctgttccgacgccggcggctacgcgcagagaagcagctacgatgaacatgagatgatgatgatgatgatccagcagggaggaggaggaggagagcaagctgcagccgccatcgactggaactttctggacagcctgctgtccgcgacgtcgcaactccatgggccctcgggatccttgttgcagtga

SEQ ID NO: 39658 - DNA, 1720 bp, Zea mays
  Peptide Sequence Number=SeqID_83033
atgcaatttcataatcaaagagagcgaaaaagtagaacgaatgatgatattgaccatgagcgaacacgtgaaaattatgatttgaaaaatgataaaaatattgattacaacgaacgtgtcaaagaaattattgaatcacaaaaaacaggtacaagaaaaacgaggaaagatgctgttcttgtaaatgagttgctagtaacatctgaccgagatttttttgagcaactggatccaggagaacaaaaacgattttttgaggaaagttataaattattttccgaacgatatggcaagcaaaatattgcttatgcaacagttcataatgatgagcaaacccctcacatgcatttaggtgttgtgcctatgcgtgatggaaaactgcaaggaaaaaatgtgtttaatcgtcaagaactgttatggctacaagataaattccccgagcatatgaaaaaacagggttttgagttgaagcgtggtgaacgtggctctgaccgtaaacatattgagacagctaaatttaaaaaacaaactttggaaaaagagattgattttctagaaaaaaatttagcagttaaaaaagatgaatggactgcttatagcgataaagttaaatcagatttagaagtaccagcgaaacgacacatgaaaagtgttgaagtgccaacgggtgaaaagtccatgtttggtttgggaaaagaaataatgaaaacagaaaagaaaccaaccaaaaatgttgttatatcggagcgtgattataaaaacttagtgactgctgcgagagataacgataggttaaaacagcatgttagaaatctcatgagtactgatatggcgagagaatataaaaaattaagtaaagaacatgggcaagttaaagaaaaatatagtggtcttgtagagcgatttaatgaaaatgtaaatgattataatgagttgcttgaagaaaacaagtctttaaagtctaaaataagcgatttaaagcgtgatgtgagtttaatctatgaaagcactaaggaattccttaaggaacgtacagacggcttaaaagcctttaaaaacgtttttaaggggtttgtagacaaggatacggattttatgaccgatgatgaagaaaagaatttgaaacgtttgtctgatttggaggaaggtttacaccgtaaaagcgtattaaatgaaatggttttgaacgtctcattacctgatattgcaaatgattttaataaaccacctgcgagtacaaactgggtgaacacagcctttatgttaaccttttccattggaacagctgtatatggaaagctatctgatcaattaggcatcaaaagcgtgctgtcattcctgatatttgtaaaacatatcaggaaagtaacagatccttttgttgatcccggattagggaaaaatataccttttatgattggagttctttgtgggggaattatatttggaacagtagcagggtttgtctctatggttccttatatgatgaaagatgttcaccagctaagtactgccgaaatcggaagtgtaattattttccctggaacaatgagtgtcattattttcggctacattggtgggatacttgttgatagaagaggtgggctttcgttcaccaaaacagttatatcaacaattgtttcaagtagcttgaaacagcaggaagctggtgctggaatgagtttgcttaactttaccagctttttatcagagggaacag

SEQ ID NO: 39659 - DNA, 1284 bp, Zea mays
  Peptide Sequence Number=SeqID_83034
atggctggggagcaccgggaggataaggagggggaatattttgtctggtttggacatggtggtggcctgactccttccggtaaactgttaagccgtccggccgcccacctcactaccccagccgccactcccagtcgtcccagccttccctggaggccaggaccccagcgccccacgcgaccacgccggcacgtggcactgcggcagtcccaggcccccagccgcgcgcccctgcccaggctcccaagcggcggccaggccccaggccccagcctcgcgccctcgcccagcaggcagcagcccgcttccccgctgcccaggacgaccaccagtcggccagtctttaggcttcagcccgctgctccgctgcgacgctgccccgagcggtcgagctacgcctgcgcggctgcgaccagcgaccgtccccaagctgcgactgcgactacgagtctgcgaccgacgaccgtccccaacctgcggcgtccccgggccctaggcccgaccgacgtccccgagctgtgcctgcgcgcctgcgccgtctgccgtcggaccctcagatttatattttacagtaccatatccaccggatacccgatacccaacggacacccggtgggtacgggtccaattttttacccgattgacttggtggacccgaacacaacccgacccgctgccatccctatccgtaagaagctagagtacgtctggaaagaataccgcgagaatggaactgagaagtgctctatggcagtctacctgggagaaagccgaaactacccgaaccaccctccgttccaagtcaccttcaccggacaccgcttcccagacacttgccaaaatgttgcccgaaaagccctccgacagctatgccaaaactacagcagggaagtctttgagaccccccttcgttactttccacctagcaacaagaatacccctacctggaggaaaagacttcaggccctatcaggaagagatcctactgaagatgaccccaccatagtctatatggccggatatctccacacacttgataaccactacgacgaccttttatcccactgcacccacctaaactcctgggtggaaagcttagagcaacaggtcaaggaacttaaaaaggagaaggcgtccctccaagaaagtctcgaaatagcagaaggtgaagaggccaatacttgtgaaacctaccgaaccctgaagatggattacgataagaagttaaagaagctcgcccccactaagaagatccagaagaggactaagagccaaggatgctag

SEQ ID NO: 39660 - DNA, 1141 bp, Zea mays
  Peptide Sequence Number=SeqID_83035
atgacccccgctccggatggtcgagctgcagcagcgcaggcctcagggtgggcgctgctgcaatcttgccctcgcccacaccgacgctcgaggggcgaggacaagtgcgaagagccggaggccagaggcgcggatggtggcggtgaccccgtcggtgacggggacttctcgagccgcctccgcctcggcaccgacggcagagcccaccggctccccggcagatccccactcaaatcctcccggcgcggcagccgccctccgacaggaggggccgccaggagccaagccaacgggcccgacacgctggaggtgacgacgcccgccgtcgaccagccccgcgttgtcgaagtccgggccgcccgcagggccagtgagcgccctctcccccgaacgccgcgggaaagggtgactcgcgaacccgcgtgggaggtagagcgccggctcagcccggcccccaccccagcgaggatgatgaacatccttgaagctgagggtgggaccaagatcgcagcccggcttgcttctccccacccaggaactggcggtcaccgtcttgggcaactgcaccgccacttgcgccaccgtcgcgcctcttcggttgcggaaccaatgccgcgactcgaggcgacccagcgcacgacccagcggcgccagcctggcgcggcggtcaatgcggccgaaagtgggctggcagtaatgacggtggcaggcgagcgggagcagcggtcacgtcgtcagccaggctcacgtcccatccaggggcagcaagagagcctcctctcacggcgtgaagacggcgcacccgtgatccgtccctcgaacggctcgcgcacgcgcaacggccgccccgccaaccactcgccccgtcgcattaactccgcggcgggacaggcggcgtttctggcaggagaagcgggcgacgcttcgccttcgccggaccgggaaagggggataccccgaaaaggatccttccctgtgaaggaaccgggctccgagcccccccttactgatcagaggttcgaaggctggccctccgcggggttcaacagtcgcctcagatcgcgtgggccctacacccactactggctggcccccgaagggttcacagtcgcctcagacgccgaccgagggatgaccaggg

SEQ ID NO: 39661 - DNA, 573 bp, Zea mays
  Peptide Sequence Number=SeqID_83036
atgtcttcttcctccctcatgcgtcgcgtctttccaccttccaagccccggatggggggcatccgccgtcttttcgcctcatcgttggaggaacgcaactccgcgggagttggtacctttcagccatcgttcggcttcaaggattttcatcatgcagcccggtcgctcccccccgctggtggtcacccaagacgcttcaaggatgttcatcatcctcgctggggtgggggccgggctgagccggcgctctacctcccacgcgggttcgcgagtcaccctttcccgcggcgttcgggggagagggcgctcactggccctgcgggcggcccggacttcgacaacgcggggctggtcgacggcgggcgtcgtcacctccagcgtgtcgggcccgttggcttggctcctggcggcccctcctgtcggagggcggctgccgcgctgtgtgcacgggaggaccacccaagttgccgcgcgctgctagggcggcgttcgtgttctggggtggtcctgcctttgcaccgggatggcgccttcacgcggaggtcggtgccccactcacccgggaggatttga

SEQ ID NO: 39662 - DNA, 1254 bp, Zea mays
  Peptide Sequence Number=SeqID_83037
atggacacggaaccgtcctcccctgcgccggcagcagccgtcaatctgcctcctccgccgtaccatcactgcccagctccagctgatgaggttgcagcgacgccgcagccgaagccgaagcaatcaaccgcggggccggggctgaggacaccctcgccgccgccgtcggttcaggtgtccgggtactctctacacgacctgctgctgctgtccccgccacccccgagctcacgccgccaccggtcgagtacgcgtggggcagctgggacgagcgtggacgagagcctggagattgttgcggtggcggggacgcccacgcctccaaggcgcaggcggcgcgggggcgcggagcagtgtgtgacgcccgttctggcgtccccgaggaatgcacgacgggcgagacggaggctggagaaggacgtcgaggcggttgaggacgccggcaggagggcccgcaggaggaagtccacaagggctgcgccgaaagctgcagcggctgccgacaaggcagaggcggcgctgaacgaggaggatataaccatggctgtggtcccggcttgtcctgctgctacctgcggaactgacttcctggagcaatctgacttggaaggtctctgggaaaggatcgttgaattggtgatgtggaggaatatggctaaatcagcactttgcccaatctcagctctctgtcacctcggcgttatgatcttaggcttagctttcttcaaagattctgttcctcagaggccgcaggtggagaatgagagaaggttccggttgactgaagaagacatgcttcgtgcttctcaagctgtgcttccgtttgcaaactccatgatatcgacggcgcaagtgattttctctggtgaaccttcaatgactctcaaagtattgcctttacttctgttcggtgctaaatatgggggccttgttacagtgtggaggcttttagctgcaggatttttcatcagttttacagtcccaaagctatatagctgttattcaagtcgtattcataaaagagttgagattttgagagatcaggctctagaagcgtggaagtcttgcccacgcaaaaaacttgttgcagctattatagtaacaatgttctggaacatgttcagtgtgaagacacgcgtcatggcagcctttgtttcacttgtaatactgcgctataataagaaacaccacaaggcagcagaagttggaagttaccgagatgagcaggggcagacaatggagatggatagctaa

SEQ ID NO: 39663 - DNA, 816 bp, Zea mays
  Peptide Sequence Number=SeqID_83038
atgggggaagggtggctctcccttttaaagtggcttcctcctcccaagttaagcaaggtaatagtggaggatgtcctcatcactgacggagacggagacgacgacgacgctggtggcagttcgagccacaacatggagctctcggaggagccggagccggaggggtggatcgctagacccatcactcgcgatgccgctcgcgggtgtcacttccataatgttctcgacaccttgctgcgtcgggccttcgaccgacacacttggtctatcgagtaccgttgtgtagtctaccagcaccatcacgggttatacccggaccagtgggaggctacatgcttggtgcgccgtccggacgatgatctccagggtgcagaggccttcttagagcactattctattactgagagggatactgccgaggcagccatgcaagatgcagcacgacaggcactttctcggtattgcccgttgttcagcggggtagctgacgaccttgacatgaagtactaccctcgttgttcgaccgacagtactggaagtgtgattgtctcgcctattggtgaaggcaatcctaggctgaacagcatggtcaacctggctgccgtgctcaacacagagctggaccacgcccttgacgagttgggcaaggttcgggcggaggttgcggaattgcgtgctgagtgcgcaacacatcactatttggatggtggttctcccgcccctattgggattcaacacccttaccgttcaccggcccgtggtcgcttcgactatggtaccccagacagcaggacccggatagatttggatccatag

SEQ ID NO: 39664 - DNA, 177 bp, Zea mays
  Peptide Sequence Number=SeqID_83039
atgggcaagagggggagcggtggtgttggcagcccacgttatcatggggacgtattcttggctaagaaatttgcagatgaagatatgatgctgaactccatggatgctagtctagtgatacccccggtcatcttcctgtggatggatgtccttgtttcgctgtactttgatgaataa

SEQ ID NO: 39665 - DNA, 390 bp, Zea mays
  Peptide Sequence Number=SeqID_83040
atgaagcatggaaaaagtcaagaaataactgcaagaaaagcttgctatctttgtggacgtgaagatcattaccttcgtaattatcttgagaagagctcagtaccgaacacccccgagattaagctatctcagtctccagacgtggaatatgaacaaaaatgcatagaaacttctaccaacatcgtgaagaaaaacaaaaggaataggaaaatgtttggatacatgagtagtccacctcgaccacaagcaaaagccccaaacagaagaaccaatccagactcagctatatgggatacagacacccaatcatccctcatcacctgttggtcaagcaaagttgacccgcaaagatctcaaagcaagaggtgcttgtttctactgcaagaatga

SEQ ID NO: 39666 - DNA, 822 bp, Zea mays
  Peptide Sequence Number=SeqID_83041
atgaggcattttgtggccaacgttggggaagatgatgactttattgacgatgatgttggtggtgtcctgatcggaagagtcggaggagctctcgtcggagtcccattgcctcccgacatgcttccttttccaagcacttttagcacgccacgtctagagctgcaggctgcagctgcccactatacaaacggtggcggccttgccaagaaagcaccatcgctccagttcgcgctcatggcccccactgctgtggatcccggtcccagcgaccaccttctagcgccggcgccggctgccatggctggaggaggggatggcggtgatggacagatggaggtggtgttcaatgtgagcagcagcgacaccgactccgatgacctcggcgccggtggtggaaagaggtcgcggcccgtggcggggcaaggtggtggcagggatcgagaggacaagaaggccagaatcttggccgctgccgccacggtcccagccggattcctagagccgctttcgccggtgaggttactccccccgccggcgccgggaaggagcgtgacgaagcagttctggaaggccggagactacgtcggcaagccggatcacctgcttgccgtagtggcggctcagcattctgttgtgggcatgcaaatattttgtcatcacacctctggtctgaaagtcggtgtgtcatatgattctggaatggatcacgttcgtgtgcatcccaaatttctacattccaacgcgacaagccacaagtgggcactaggagctttcgccgagctgcttgacaactctcttgatgaagtatgtgtgcttgactga

SEQ ID NO: 39667 - DNA, 561 bp, Zea mays
  Peptide Sequence Number=SeqID_83042
atggcccaagggcacatttccctttcacagccgcgcccccttcacccaatcaacaacagcagactggtgggcgtggtggtggcggctcctttcagcaccggggcaagcggggcaagcgcggtggccgatcctccggtggcaaccgcggtgctcccaatgctggttccagccatgcttccactcccccaggcggccacaactactacaatccctggacgggatccatttacatgtggccagggtcacgaccgccagcacctcggccaccgacctcagggcctcctgctccaactcaatcgcctcaggcctttcttgctggtcctcccggccaatgggcaggctcctgggggccccctcaggcatatgggccggcccctgactacactggcgctgctccaccccctccttgttgggatctccaacaactcgccatcaatttccaagccaccactcttcaacatccccagctacgagagtggttcttcggcacagaatacacaatacaaaggcctgctaaggttttcaagtcggtgtggaggccctctgggcgaggtaccttag

SEQ ID NO: 39668 - DNA, 333 bp, Zea mays
  Peptide Sequence Number=SeqID_83043
atgaccttggccaccatgcattttggctcaataggggaacaaggaactcgaattatcatatacaatctgtgggaggatgatgaaggagagctggagcttgattttgatgctgacgcaaatgatattcagattagaggtgttaacagagatcagaacaagatcaagaaggcaaatcagtttccaaactccaaacacttctttacttatagacattctctaagggtggcagctaaggtgacaattggttttgttaaggatgcgagacaacatattgatattcaagggtttaatgtttaccacaagaatcgcctaataaaggtgtactggaagtaa

SEQ ID NO: 39669 - DNA, 453 bp, Zea mays
  Peptide Sequence Number=SeqID_83044
atgtatgactgtactttacatatatgtctaacacccgcccgcagtcgcagcgggagggtcccagacgcaaagactagatttgaactcattgaagagctatacagtaaagcctttggtcatgatgtccgcgaactgatgagaagatgggacatgaagcatgcgcacttgtccaagagcaaccttctcacggacgaagtgaatgttgatctcgatgtgcttagtgcggtggtggtgaatgggattggctaccatgtagacaacagtcacgttgtcacagtagacgaccgttgcagaagtaatcgacacgtggagttcctcaagaagctatcgcaactagcaacactcagcaacagcgtgggccacgacctggtactcagcctccatgctggaccgggagacggtagtgaaagggaaataggcttacaccttttcccaaatgattttggaggttga

SEQ ID NO: 39670 - DNA, 423 bp, Zea mays
  Peptide Sequence Number=SeqID_83045
atggcgcctcccgttgacgtggccggcccgcgccctaggttgggcgatgtggaggctcctccgaggtcgaggtcgagtccgtcttccgtggccgaggtcgagtccgagcccctaggttgggcgaggcggaggccgttggctgaggtcgagtccgagcccctaggtcgggcgaggcggaggccgttggctgaggccagggcggagttcgagtcctggggtcgggcgaagcggagttcgtcgtcttctggggctgagcccaagtccgagccttgggtcgggcggagcggaattcgtcgtcttctggggctgagcccaagttcgagccctgggtcgagcggaacgaagttcgccgtcttccggggcttagcccgagtccgagccctaggtctggcggagcggagttcgctgtcttccggggcttag

SEQ ID NO: 39671 - DNA, 378 bp, Zea mays
  Peptide Sequence Number=SeqID_83046
atggcgcctcccgttgacgtggttggcccgcgccctaggttgggcgatgtggaggctcctccgaggtcgaggtcgagtccgtcttccgtggccgaggtcgagtctgagcccctaggtcgggcgaggcggaggccgttggctgaggtcgagtcctcgcccctaggtcgtgcgaggcggaggccgttggctgaggccagggtggagttcgagtcctggggtcgggcaaagcggagttcgtcgtcttctggggctgagcccaagtccgagccctgggtcgggcggagcggaattcgttgtcttctggggctgagcccaagtccgagccctgggtcgggcggaacggagttcgccgtcttcaggggcttagcccgagtctga

SEQ ID NO: 39672 - DNA, 1455 bp, Zea mays
  Peptide Sequence Number=SeqID_83047
atggatgtggagtacgacgtgatcgtgctgggcaccgggctcaaggagtgcatcctcagcggcctcctctctgtggaccgcctcaaggtgttgcacatggacaggaatgactactacggcggagactccacatcgctcaatctcaatcagctctggaaacggttcaagggtgaagaaacaccgcctgcgcacataggagctagcagagactacaacgttgatatggttccaaagtttatgatggcaaatggtaccttggttcgtgtgctcattcatactggtgtcaccaagtacatgtccttcaaagctgtggatggaagctatgttttcaacaagggaaagatccacaaggttccttctactgacatggaagctctcaagtctcccctgatgggattgtttgagaagcgaagagctgggaaattcttcctttatgtccaagattataaggaaaatgacccaagtactcataagggttacaaccttactaaactaacgacaaaagaacttatctcaaaatatggtttggatgataatacgatagacttcattgggcatgcagtggctcttcatagagatgatagctacttgacagaacctgcaattgacactgtaaaacggatgaaggcaagtctttatagtgatatactaaaaatatcccaacacaattcaaagctttatgcagaatcagtggctcgctttcaaggaggatcaccatatatttatcccttgtatggtttaggagaactgccacagggttttgcaagacttagcgctgtttatggtgggacctacatgttgagtaagccagagtgcaaggtcgaatttgatgatgaaggcaaagtttgtggtgttacctcagaaggggagactgcaaaatgcaaaaaggttgtctgtgatccttcctacctacctgacaaggttaaaaaaattggaaaagtttttcgggcaattgctatcatgagccatcccatcccaaatactgctgaatctcactcagtacagatcatattaccacagaagcaacttggccgcagatcagacatgcaagtatttcttatatcatctcccagatttatccattatttgcttgtgtttcaccttcacatttcttgtgtttctaatgtgggaagcaatcttcatgtatgcataccaggcaaattcatcgcattcgtgtcagcacaagcggagactgataatccagagaaggaactaaagccagggatcgatcttcttgggaaggtggacgagttatttatcgacatatatgacagatatgaacctaccaatgactcatcagcagacaattgtttcatctcaacaagttatgatgccacaacacactttgagtccactgttatggatgtactttccctttacacaaagatcaccggaaagactgttgatctcagcgtggatctaagcgctgctagtgctgctgaagatgatatgtga

SEQ ID NO: 39673 - DNA, 1014 bp, Zea mays
  Peptide Sequence Number=SeqID_83048
atgcaggcggcatgcaactacaccaagggggcgcaacctttcgacttcggcgcatccagcatggacgcccaggcccacacgtcatggaccgggaaaggggatactccgaaagggatccttctccgcgaaggaagcgggccccaagcccccctactgatcagaggttcgaaggctggctcctcggaagggttcgacagccacctcagagcactcgggctccacgcctactactggtcagaggttcgaaggctggcccctcggaagggttcgacagccgcctcaggccactcgggctccatgcccactactgatcaggggttcgtaggctggccccccgatgggttcgacagtcgccccagagcacgcagagtgagggatgactctgggtacgttcgatacataaccaaggctcgggctacgctcccgaggaacggaagaccaaggcagattcacgcctcgcccgagggtctcctcaagcaatgggcgcaccttcgactcgcccgaggcccagctcgggcaggcttcacggagaagcaaccttggccagatcgcctcgccagccgaccagatcgtaggagcattcaatgcaaggatcgcctgacaccttatcctgacgcgcgctttccagtcgacaaggctgaagaatctccgcctcgcccaaccccagggctcggactcgacctcgcctcggacgacaatctccgcctcgcccgacccctgggctcggactcgacctcgccttggacgatgatctccgcctcgcccgacccccggggctcggactcagcctcaactccggaagacggtctccgcctcgcccaaccccagggctcggactcgacctcgactctggaagaaggtcttcgcctcgcccgacccctggggctcggactcagcctcgacctcggaggagtcaccaccttgctcgggccgaccacgccacaaggggaggccatcattaccctacccctagctagcccaggctacggggaacaagaccggcgtcccatctag

SEQ ID NO: 39674 - DNA, 732 bp, Zea mays
  Peptide Sequence Number=SeqID_83049
atgattttatcccgtggttcgatcaagcctcaaatgcttgcctacttcacattgtggagccccaaaggacaaggcttcacggagaagcaaccttggccagatcgcctcgccagccgaccggatcgcaggagcattcaatgcaaggatcacctgacaccttatcctgacgcgctctttccagtcgacaaggccgaagaatctccgccttgcccgaccccagggctcggactcgacctcgcctcggacgacaatctccgcctcgcccgacccctgggctcggactcgaccttgcctcggacgatgatcttcgcctcgcccgacccccggggcttggactcagcctcaactccggaagacggtctccgcctcgcccgaccccagggctcggactcgacctcgactccggaagaagttctccgcctcgcccgacccccggggctcagactgagcctcgatctcggaggagtcaccacctcgctcgggccgaccacgccacaaggggaggccatcattaccctacccctagctagcccaggctacggggaacaagaccggcgtcccatctggctcgccccggtaaaacaagtaatgatggcaccccgcgtgctccatgacaacggtggttctcagccccttacggaagcaaggatacgtcagcaaggatccgacagccccgacaactgtgcttctacagggctcaagcgctcctccgacggccacgacgccacatga

SEQ ID NO: 39675 - DNA, 243 bp, Zea mays
  Peptide Sequence Number=SeqID_83050
atggctcgccggccggcgtcgtgggagcagggcggcgacgagtacgactatctcttcaaggtcgtgctcatcggcgactctggcgtggggaagtccaacctgctctcccgcttcaccaagaacaccttcgccctcgactccaagtccaccatcggcgttgagttcgccacgcgcacactccaggtcatcctagtgaaatgtacatacatttgttctggttcctcaatcccagaccttgattga

SEQ ID NO: 39676 - DNA, 222 bp, Zea mays
  Peptide Sequence Number=SeqID_83051
atggcgccgaggtctctgttagcatttccgcttggtaacaactttgagataaaagaaatttcaccagacaatacagggaaaatggaaggaccccaaactctcctgtcgctgggggaagttctgcgggaagaaagacgagcaagaggatcattctggcctgtcaaggggctacacaaagcagttctaaggttagcatgtgtggaacgggatatgcgccgctga

SEQ ID NO: 39677 - DNA, 295 bp, Zea mays
  Peptide Sequence Number=SeqID_83052
atggacggaatgccaacaacgctcactgtcggggattccgccctgcttcgcgacaaatcgacccgctacacctgggaggaccaccacggcgaacccaaacggcaaaacgcggtccgagccggcaaaccgaggagcggcgcggcgatggttctaccggcgatgcagatttctcggcgcgagtatgcggaaggttcacaggagcgcgtgcagcacaggagaggaggaaaggtcagcacggggcacggtacactttataccgcggtgcgggtacttgccgtcggcataaaccctggag

SEQ ID NO: 39678 - DNA, 522 bp, Zea mays
  Peptide Sequence Number=SeqID_83053
atggctgtgatgggttcaacatttgaaaagatgtacctctgtcaggaccaaaccaatgtagtcttgatgatcgaggaccttttaactggccacatgcctcatcatggggagcgtgcacgagatagccaccgcattgctgagctatcagcggaggttaatcgcttgcagcagggaatcgtggaacgagacacggctatagactgggtcgtaaattcgcgctctttcgccttggattgtaaggcaaatgctctagcccgggtagcggaactaagcgcagctctggacaatctgcaagcatactgtaacactctgcaggaggaagtacatgtgttatacgaccggctgcatccgaatgtgccaccggaagttgcagcaattggagctggaacatctagagcagctagtggaggacctgatggagagttggatctttttggagcccctccttccatgaacctcacagatgaacgttctcccgaagctggcagtggagcgggagcgaccaaggacaaagataattag

SEQ ID NO: 39679 - DNA, 1014 bp, Zea mays
  Peptide Sequence Number=SeqID_83054
atggtgggtacaagtgcggtcactgcacggcggcagccggggtcagtggagcattgtaccattcaggaaatggttgatggtgtgacttggcctaccaccctgccaccgggttggacggtcgagtgggatgttgctccgatgaattcacccacccccgccagtggaggagacacccgtttcagttccgatttcctttctcgcgatggctttccttccatcttgtgggaagtgcttaactccgccggttaccctacgccccctttgtacacggtgcagttgtatgaggagcatcgggtacctcgttgtcgggtctggctgactttggaggctcatccccttcagccgggttggcgttctcttgattctgagacagttggactcaggacggacgacatcgttgaagcggcagctatgaagactctgacgactttctgtggctaccatcccctagagatggtgatgcaccccttgggactcttccctgctgagaagaaggatgatcccatgtggtgtaaccgcgtgagccatgtaaaggatgtgtgggcgatgtatccttacttggttgggagggtcaccgttcagtgcatgagtgcgctgtaccgccttcaggcccttcagagcgatgctatggcactccttgctaacaccgctcaaactgccaagctcactctcgacagtcgagaagattttgtggtcgatctatccaccgagttggtagagaaggatctgcaggtggagaggctgagccagcgcatcaccaccttggagcagcaggtggagatccgagacaacactattgatgtcttggagaaccagcttcacgatgtgcagagggaactcgaagaagagaatgaccacttggacatgcaccacctggagatggaggccaatgaagctggaagcgagggagaagaggctcccgaggagctaggactagtccctggtgcccatgggactacctccgtgatgcctccttcacccgtatccagtgtcgcttccaccgctcagggttaa

SEQ ID NO: 39680 - DNA, 561 bp, Zea mays
  Peptide Sequence Number=SeqID_83055
atgaatagtacccctgtactgttcacgctaaattggaattgcattcgcgctttcgccttcaagcaagccaaaggtgatcctgatggagatgacgatggtggaagctcaagccacagtaccgagctttccgaggagcaggagtcggaaggatggcatagtcgtgagaagtacctggaccgctgggagcctacctatctggtgcgccttccggaggacgatctccggggtgccgagtcctgctcagagcactatgccatcgctgagagggacactgcagaggcgagcatgcaggatgctgcacgacatgcgctctcacagtattgctctttgtttggtagggtggctgatggtctcaacctcaaatattaccatcgtcgttcgactggcagtacagggagtgtgattgtatcacctattggcgaatgcaatcctaggttgagcagcacaatcaacctagtcattatgctcaacactgagctggaccatgcttttgaagagctgagtagggctcgtgctgagatcgcggagttgcgggctaagcgtgcaaggcgccgtcactag

SEQ ID NO: 39681 - DNA, 207 bp, Zea mays
  Peptide Sequence Number=SeqID_83056
atggggaagcctgtcccatcactcctcatgctcctcctcagccaagatcagggttcaccgccttggcttgtcttccaaagctggggcaggcagatcctcgatggcaggctctggtgctggatcctgggctacctcctgagcaagtccgtgctccggcacgaggatgtactctccgtcagcgaggttgcaatctatcaaatgcaatga

SEQ ID NO: 39682 - DNA, 426 bp, Zea mays
  Peptide Sequence Number=SeqID_83057
atgggcaagagcaacaagcgcaagcgcgaaccgactcctccatcagaggatttcggtgactcggaatactcggaggaggagttcttctccgagtccgagaggtctccggctcccgtctctcccccggcgtcgtccgatgactcggacgactcccaggggatagccgcggaagtctggacatacatccgggccgtcgagcgctccgggctcgagggctcggatgagtcggagtactcctcggatgaggaggactcggacggcggcggcgaggacgaggacgacgacgacgacgacgacggtggcgacagcgacggcagcggcgacggcgggggcagcggcgacggcggcaggggcagcaccaaaagcggcagcagcaagggcagcaccaagggcggcggcggcagcaggggcagggccagtggctag

SEQ ID NO: 39683 - DNA, 78 bp, Zea mays
  Peptide Sequence Number=SeqID_83058
atgggcgtcgacacgtcgttggaggtgtccttgtgtagtgcggacgggctggactcgagggtcggacgagagctgtga

SEQ ID NO: 39684 - DNA, 2544 bp, Zea mays
  Peptide Sequence Number=SeqID_83059
atgccgtcctcttcttcttcctccgacaccacgccgccggccgccgcctcgtctgaggagacgttgagtagcgtgatggtggaggagttgcgcgccggcgactctgttgattttggtgtgtcacggatgacgtcagcccgcgttgaagatatgcagcggttgggctactttggcggcggagttgctcgtgctccggggacggaggaaatccccgagccggaggtggcagaggaagatgcagacgaaggggcccttcggtgcgccgccggtcagagcagtgggcgtgatttagttgaagagtttgtggcgtatggggtgtggcccttggcgcacggttgggtgctgggcgaagtgtgccctcgccagatgccttttcacggaggaagggttgtgcgaagccctgccttcgcactaaatctgcggaaccgcgacccggctgcttttgtgcgcgacgcggaggacggggtcgtgcggctcgtggggcgttacgtgccgaggacggaaggccagcgcagctttgatatccgcgggtcaaatgaccgtctgaacagggtcttcgaattaaatcaattgccgtacgatggatatcctggtcaagacgaagccgaccgccgcgggaagaaaccggcggtggagacaggagacgatcctgcgccggcggccgcccctccctcgaaaaagagaaaattaggtactgcgatgggagggattggggtgtctgatagttttgctagagatttaatgaggacgtgtgcggccccgggggaaaggatgtcttcgcccgagctccgggagtcttcggctcggatgctgagggttaccgggggttgctggcctagaaatgttcctatcccctgcgcggctgaggaggactgttttacatctcgcatggttcatcagtggagagtttttccttacgggcgaaatatcggtgctgttgtgtgggcagtgatggacaaggatcgccaaggggcggcgcagaaacgccaggcgactgtcaggattcacgaagctcggccgaaaaggcagcggggaaatgtgaaggctgcggcctccggcggaggcaagccgccgctggcggcgaaggcgggcgcctctgcgcctagcaaggcgccggaggcaacggcgggcgccggaggctccagaccgacgaaggtggtgccggcggccagcggagtggcggaggcttcgaaggcggcccgaacgtcgctgccgccgggcaaacgcgttgccgacttcggcaccgatattaatgtggacgattatcttggggggtcggacgagggccagcttgctatagttgcgcctgccgcggcgatcgcgacggctgcgcaagcgccgaaggcgaggggcgagatccttggcgccggaggcgaggtgccagccctcgcgttggtcagggacgaggcgggcgcggcgacccgccggctgaagggagtgacggaggcgctgagtcaggcgacggaggcgctgagtcaggtggctgatttcaccagccgtactgcgtcgggggcccttacggcggctttgtctgccgaagtcgagagacttcggacgcaacacgctgacgctgtccgtgagaaatcggcctccgacagcaagtgccgcaatctgacagacaaggtggccgccctggagagggagaaagttgacctccggcgccaactggcggcggagaggagggaagccaatgaagccatcgccaaggaacaggctgcgcaggcggatgccaagctggcgcggacggagggcaatcttgccaaggagctcgccgaacaactgcaagggcggctcaccgccctggagagccacgcgaaggaggccgaggccgcgatgcgtgcggaggccgaacggacgcgcacgcagcttatggatacatatcgtgagcttggtgcgcggaccggtgacttcgaggtgccggaccgagagcccgggcttcgctgtctgcagtgggcgcaggaggagctgctggaacttccaaccgttgtgggggggggggggttgatgtcgtacgcctccctggtcacctgcgagggggcgatgaacgcgctctcccgcgaagggtgccggcacttcgaggccttcgaccaggtggatgaagattttgagcgagacatctataaggtcgaagaccccgtagtgaaggagtccgtcggggccctttacgaccggatgtggggtctgtacggtcgtgaggtggtcagggagcgcgccgaggctgcgagggctcaggcggagcgcggcgagtgggtggacgacttcggggctctggacagcgcgctgccagacctggggtcgaccttcgcggaggctgtgactggggtcgccctggagccaaccccggagaccgcagcgatcgcgacggctgcccccccgtccgctgcgactggcgaaggcggcgctgacgcccccgcagccgctgcgccgagtgctgaaggttccgtggcggaggcggcggaaactgcggcggaggccgcggcggagcctatggcggagccaacggcggaggcttccgcagcgccagggccttcgcaggtggcgtag

SEQ ID NO: 39685 - DNA, 321 bp, Zea mays
  Peptide Sequence Number=SeqID_83060
atggagctaagtgggaaccgaaggccctctggtctgggatcaccggactgtccggtgtacaccggacagtgtccggtgcaccaccggacagtgtccggtgcaccagaggactccagctcaaactcgccaccttcgggaatttccagaggcgactccactataattcaccggactgtcggcctcaggaactcgccagctttgggaaactccaacggcttgtccgctaaaattcaccggactgtccggggtgcaccggactgtccggtgcgactccggagcaacgactatctccgcgccaacggctctctgccgcgcatttaa

SEQ ID NO: 39686 - DNA, 1935 bp, Zea mays
  Peptide Sequence Number=SeqID_83061
atgcccgccgtggacaccctcgaactcgttaccggctcccccaccgacattgcggccccatcagtgatctgtcccccaccaacccttccaccacgccgcggcggtataataacccggcttcctccccaattccgccactcctcagctcaggcgagcagcggagccgagcagagcctcgagatcccgcccaccatttgccctccggccgacgcggagccgatcgcttcaccggcagcgaggacgatgggttccgtcgcggaggactccaccgcggcagcggcagcagcggcgtcggtagtgttccgctccaagctacccgacatcgagatcccgcggaacctctcgctgcaggcctactgcttcgagcggctccccgaggtgtcctcccgcccctgcctcatcgacgggcagacgggcgccgtgcacacctacgccgaggtggaccgcctgtcgcgctccgcggcggcggcgctgcgcgggctcggggtgggcaggggcgacgtggtgatggcgctgctccgcaactgccccgagttcgccttggtcttcctcggcgcggcgcggctgggcgccgccaccaccacggccaacccgttctacaccccgcacgagatccaccgccaggcggccgcggcgggggccagggtggtcgtcaccgaggcctgcgccgtcgacaaggtgcgcgggttcgccgccgagcgcggcgtgccggtggtcgccgtcgacggcgccttcgacgggtgcctggagctgcgggccctggtggacgccgccgagccgctcgccgccgacgaggaggtcggccccgacgacgtcgtcgcgctgccctactcctccggcaccaccgggatgcccaagggcgtcatgctcacgcatcgcagcctcgtcaccagcgtcgcgcagcaggtggacggcgagaacccgaacctgtacttcagcaaggatgacgtggtgctgtgcgtgctgccgctgttccacatctactcgctgaactcggtgctcctggcggggctgcgcgccggctgcgccatcgtgatcatgcgcaagttcgagatcggcgcgctggtggagctggtgcgcgcgcacggcgtgaccgtggcgcccttcgtgccgcccatcgtggtggagatcgccaagagcccccgcgtgggcgccgccgacctcgcctccatccgcatggtcatgtccggcgccgcgcccatggggaaggacctccaggacgcgttcatggccaagatccccaacgccgtgctcggccagactctgggtgggcgagtcccaccacggatgccggggtacgggatgaccgaggcggggcccgtgctggccatgtgcctggccttcgccaaggagccgttcgaggtcaagtccggctcctgtggcaccgtcgtcaggaacgcggagctgaagatcgtcgacccagacaccagcgcgtcgctgggacggaaccagccaggcgagatatgcatccgcggcgaacaaatcatgaaagaggcgacaaagaacaccattgataaggacggatggctgcacaccggggacattggttatgtggacgatgacgacgagatcttcatcgttgacaggctgaaggagataatcaaatacaagggcttccaagtacctcctgcggagcttgaagcccttctcatcacacatcctgaaatcaaggatgccgctgttgtctcgatgaaagatgaagtcgccggcgaagtcccggtggcattcattatacgcagtgaaggctctgagatcagtgagaacgagatcaagcagtttgttgcaaaggaggtcgtgttctacaagaggatcaacagagttttcttcacggattctatcccgaagaatccctccggcaagattcttaggaaggacctgagagcgcggcttgccgcgggcatcccaagcagtgacaacacacagtccaaaagttga

SEQ ID NO: 39687 - DNA, 441 bp, Zea mays
  Peptide Sequence Number=SeqID_83062
atgggcaagaacaacaagcgcaagcgtgagccgactcctccatccgaggacttcggtgattcggagtactcagaggaggagttctcctctgagtccgaggggtccccggctcccattcctctgcgtgagtcgtctgatgattcagacgactcccaagggcttgcggcggaggtctggacttacatccgagccgtcgagcgctccgggctcgagggctcggatgagtcggagtactcctcggacgaggaggactcgtccgaggaggacagcggcggcgatggcgaggacgacgacgacgacgacgacgaaggcggtggcggcggtggcggtgacggcggcggcaggggcggcggcagcggcagcaaggatggcgacggcggcagcagcaggggcggcaacaggggcggcggcggtagaggtagcaacagggccagtggctag

SEQ ID NO: 39688 - DNA, 456 bp, Zea mays
  Peptide Sequence Number=SeqID_83063
atggccgattctaaagatctcaacagtgcttctccaaacagcgacacaaggctgactaatttatcggccacagagcatgaaaacttagaagatgacatgaagaagatggatgaggagatccaacgacaacaagatcagatgctcaaggtggcaaaaaagtggtacctctcgcacttcaaggtagatcgccaccagaaggtcgtaaaggagagggaaatagacgctgattacatgtcatccgtgctgcaacagctccccacgataggtgatgccaggagtaggacggtgtcgccgactgtagcaaaatggttcatgccagtggacccgggggatatctgtcccccacaagcccccgatctttgggttgattttgagaggtcggcaccatcttggcttgaaatggtgattcatggggtgcaccgaagtgtagcccccgagcttcgagtggatttttga

SEQ ID NO: 39689 - DNA, 516 bp, Zea mays
  Peptide Sequence Number=SeqID_83064
atgccgatctactttgctggtcgtccctccccaggcccacgaaagaatgaccttacgatttattgggcccttgggcctttcgtgaggtcttttactcttttagtggacccgggggatatctatcccccacacacctgggctacggccaggccacatgagggaacaaccaggccggccgaggcgtcacgaaaggcattaagacctcagaggagtcaaaccactcctccgaggcctcgggggctacacccggcgggaaactccgcctcgcccgaccttaggcctcggcctcggaaggaggtctccgcctcgcccgaccccagggctcgacctcaacctcggcatcggaaggtggtctccgcctcgcccgaccccagggctcggcctcaacctcggcctcggaaggtggtctccgcctcgcccgaccccggcctcggcctcaggaggagtctccgcctcgcccgaccttgggctcggaccgaccgcgtcacgggggatacatcattaccctacccctag

SEQ ID NO: 39690 - DNA, 712 bp, Zea mays
  Peptide Sequence Number=SeqID_83065
atggcttggttgagcactgctcaattagcacaatctagtgttggggaaaagctaaatatggtttatgaggtcggggagctgtttgagctgggaattcagctgtcttatctgctcatacttattggactgcttggagctggtacattttttgttatccgtcaggttcttgttcgtagggagcttgatctttctgccaaagagttgcaaacgccggagcacttggagcaggagcatccgccggtgaatggagcactggacgccggtggctggaggcctggagctggacgtcggcagagaggacagaggagtagggaacaagtgagaagcggtgatgcaagtgctactgagtattttgagcttggagcagtcatgctacggagaaaattttatccagctgctatcaaatatctgcagcaagcaattgacaaatgggacagagacgagcaagatcttgcgcaggtctacaatgccctgggggtcagctacaagcgagagaacaaacttgacaaggcgattcagcagtttcagaaggccgtggagctccagccaggctatgtgacagcttggaacaacctgggtgacgcatatgagcagcagaaggacctgaaatcggctctcaaggccttcgaggaggtcctcctctttgatcccaacaacaaggttgcaaggccacgcgtcgatgacctcaggccgcgcgtgagcatgtacaagg

SEQ ID NO: 39691 - DNA, 1080 bp, Zea mays
  Peptide Sequence Number=SeqID_83066
atggagttgaggaatcgactcactgaattgaagagaaaaactgccgtagacaagacagaggtcgagcaggcatcgagtgatcttaaggcaaaaactgtgccattgaatttggctcttgtcacgctaaaaaagagacgagctgatgcagtggccatgcacaccaatgccatgaaagttgctcagatgaatctcccaactcccccaccaaagcctaatcactccggcgccgtgccgcgccgcgcggacctgcctcgatccgctccagcggccgcccgccgaggcgactgtgcggtggttgcgcttgcgctttcacgcgcaggtctccgtgggtctctacgcgcagcaggacccgtccacggcggcgaggcgcgggcttcaaggcgggcgcaggcggaggggcagaattgctcgggcgatgacacggaggctcgcggccacggcttcgcatccgaggccgtgaatgggagtggcggagcgctgcgggcggcggctgcgtacatggaggctggggcaccgcccctgatttggatgattttggatctggttctcacctacgaccggattcagccagatacttggagtggagcttatctatgctgggggaaagagaacaaggaggctccattaagaaccgcatgcccacctgaatcaaacccttctgatcactcttcaaaactgaaaaggctaccgcagaacctgcaggaatctgtagaatcactttctgcagataaggttttgcatgagttaattggtgataaacttgtcacaactgctatagttatacggaagataatgtttgatctaacccgtaaatattgttgttcaaatatctacctcgagagggtgttaggagagagaacctacattgatttgcggaattgctcgggcgatgacacggaggctcgcggccgcagcgtcgcgtccgaggccgtgaatgggagtggcggggcgctgcaggcggcggttgcgtacatggaggccggggcaccaccccgcggctggcgcaaggggattcgggcggagtggtcgggaaagttcgggggggctcagcatgctctcagcggattcggtataggctga

SEQ ID NO: 39692 - DNA, 966 bp, Zea mays
  Peptide Sequence Number=SeqID_83067
atgcatcgcgcccttccaccttccgagcccccggatggggagcactcgcgtcgttttcgtcttgctctcgttggaggaacgcaacttcgcggaagttggtacctttcagccatcgttcggcttcaaggattttcatcaggcagcccggctgcatcccctcgccggtggtcacccgagacggtgaccaccagtttgatggtggggagaagcaagccgggctgcgacctcagtcccgccctcagcttcaaggatcttcatcatcctggctgggtcggaggtcgggctgagccggagctctacctcccgcgcgggttcgtgggtcaccttctccctcagcattcaagggagagggcgctcaccggcctagcgggagggtcggacttcgacaacgcggggctggccgatggcgggcgtcgtcagcttcagcgcgttgggctcgctggctcagctggctctggcccgactcccagtgccccctcccgccgcgagagcggtcgtcgcgccgcgcgcaccggaggaccgcccaagacgtcacgcgctgctagggcggcgttcgtgttcttgggttgccctgcctttgccccgatggcttccgtcgtcggcgctgaggtggtggcgactgaagaagtcctcgtcgccgacgggatcaccgccaccatccgtgctccgggcctccggctctttggctttgatagcttgtcctcgcccctcgagtggggacgtgggcgagggccttgttgcagcagcgtccgccctgaggccatcgctgctgctgtttggccacctggagcggaggtcgttgtcgctgctgccggagcgggcgtcggcgagccaccaggggttttgtcgtcccgcaggccctccaatgtggggggttgttcgtacctgcgagagtggaaccaaagttccgtttgtaatggcaccttgagtgccggtgtcttgttcattgtggctgtcggggcctga

SEQ ID NO: 39693 - DNA, 183 bp, Zea mays
  Peptide Sequence Number=SeqID_83068
atggagaagtgcaaaccaatcaagacccccatgcctacaaatggacatctcgacttagatgagggagatttcaatctaattctaagaaagctcatcttcgcgctgttaagagaattcttaggtatctcaggcacaccacaagcgttggtctgtggtatcccaaaggagctacttttgatttaa

SEQ ID NO: 39694 - DNA, 564 bp, Zea mays
  Peptide Sequence Number=SeqID_83069
atggccctcgcttacctcgacaatcagggtcatgacacttttggtagtatgctgctctctggaaatcaacaatgtaaaacactgaatctagctatgtcctcgacgaccacgtccttgttgatgttgtctcccggcgagtaccgtcgtcggatgaagggtgtggcgaactccctccacaacctcggcgagaccgtgtctggccacaccctcgtcctcaaccttctgtgtgctcttaggcggcggtatgaccatctgaaggcgctcatcaagcgaaccgtcctgttcccctccttccacgacatccgcaacgagttgttcctcgaggagcttaccatggacgatgagtccccgcgtccactacggcgcaccctctatcgacaagagttcatacgcgccctcctaccgcccccaatcctggagttcctcttcaggctcccagctctgacgacgatcgccaaccccgtaagggcggccacaggggcgatggctctacccgtggtggccctagcgatagaggctagggtcggtgcggctatcgttctacaacccctggacaagacatga

SEQ ID NO: 39695 - DNA, 381 bp, Zea mays
  Peptide Sequence Number=SeqID_83070
atgtccccattcgtgttctacggctccccgcggggcgtccaagtcaaaaggccgcagagcttcctgaggctgctgcacgtgatccgcattgatctcaagaagcaaaccgacttcaaccccaggtacaacgatatggattccaaaattcgccatcattatgaggttatccaggaggcttcgccttgccacatttactttgatcttgagtttgatacaagattgaacaagaagagagacacagatgaaatggtggatatattgattgctgttgtattcagtgctttgcgtgataaatattctattgaaggacatgaagagtggatcacagagctagactcatccactgaaggtggctcaattctctctgtttggttcaaataa

SEQ ID NO: 39696 - DNA, 507 bp, Zea mays
  Peptide Sequence Number=SeqID_83071
atggcgaaccgcccgcacgccgcaatcccgcgcgcccgcccgacacatgccgcacgcccacctagcgcgacccgtggaaccctgcagccacccccgaaccagcccaaagcgagaccggaggggcacgagcaccaccgccttgatctcgcccgctcctcttctgatcgactcgccattgtcgccgccatgcccggattcgcgccctgctcgcccagatccgaccgcgactttgatttcccaaccgacgcaggagcggtgggtctgatcggccgcgatccgtcttctcatgggcgcttgctgccaatccagtgtcgccctcgctgcctgcttcagattcagtttctagcggctcatgtcgtgcgcgcgcgtctgtcgctggatctgggtcgaggggactacaaagacaaggatggtgtcaagggcatgtgcgtcgtgggcgccatcaacaactataatataacacaagcgctcatgttcctctcgcacttcatcagagacatacactag

SEQ ID NO: 39697 - DNA, 234 bp, Zea mays
  Peptide Sequence Number=SeqID_83072
atggagagacatcacaacctgtccttgagagcctctaggaaaccagaaagatgtgttcagcttaaccgagcagggattccagtttccaccaacaggaacagctggatcaaatcaaaagagaacaggaccaagcacatggcatgggaggctcctattgcaacggagatgacacgagaagggcccaacccttcatcatcgtctctgaggaaaatcaccttgactgggagtggctga

SEQ ID NO: 39698 - DNA, 276 bp, Zea mays
  Peptide Sequence Number=SeqID_83073
atggggctcggtgtatgcggctcgctctgccaaggtggcaatgagattgatggttctggttatgactatggtgctggtaagtggtattctttccgtttggaaacggttgtcagcattgcaaccactgctcaggagaagatgaagctatggaaggagacttccaggagttccaagactacgacgagttctaggcgtgggttagcggcaacccccagtcggctgcctgtgaaggccgcgtgtatctacgtttcgttttcgcactttgatttattgtaa

SEQ ID NO: 39699 - DNA, 540 bp, Zea mays
  Peptide Sequence Number=SeqID_83074
atggcgagagatgaggacccggcgagagcagagtttgtgaggagcagtggcagcggtgttcgggtagcaagcacacccgaagacacagaggtggtcatagcgcggaggggtaccgaagagtgcctggtgaggagtgggggccggacacgcagtggaagggagacggttgaggaggtaggtagaggtgtggagggccttggcccagaaacgtgtcggaaggtgtgcctggagaagaagagtgcagatggtgtcgttggtcgtgcggatcatgcgctcagccttgccgttctgggaggaggtatacgggcaagacatccgcaactacatcccgtgggagagaaagaagtcgcgggaggtggagttatcgaactcccgaccattgtcacactgaacggccttaatggtgaggccgaactgagtggacacccaggcgaagaagtggcggagggcggggaaagtctcagacttggcacgcaaaggaaaagtccacacataatgagaaaaatcatcaagcaccacaagatagtatttgtagcctga

SEQ ID NO: 39700 - DNA, 195 bp, Zea mays
  Peptide Sequence Number=SeqID_83075
atgacgaaggttgatgctttgccgaagattgtggaacttcggcgttggttcaaccttcgttccgaccctgctttccatattgtgtacagcttcatcccaagttcgaagggtcctgtacatatattacgcttgggaaacattgttaatcatgtttttgaggaccttcggaagatgaaggcccccaacatccactaa

SEQ ID NO: 39701 - DNA, 2328 bp, Zea mays
  Peptide Sequence Number=SeqID_83076
atgcggctctacgtgtacgtgctcgaggcgcgcgggctaccggcgccgcgtcagcgccgcggcggcgtcgtgctgttctacgcgaaggtgacggtggggaagcagcggttccggacgcgggcggtggaggcgtcggatctgggcggcgcggcagtggcggcggcgtggaacgaggagttcgtgttcgcggtggggtcggacggagctgctgggggcgaggagctcgaggtcgccgtggcgcggcggggagcgagagggagggaggtggtgggcacggtcaggctgcccgtgccggccgccaccgctgctgctggtgccccgggggagaggcggtccgtgccgccgacgtggttcacgctgcagctgcagcgacggcggaagggcgttgtcggcgtcgacggtggcgacgaagccgcggcggattgcgggaaaattctcctcagcttttcactctacggagaaaacaacgtcaactctgtcgtccacaccgatgccgaagtggagagatcacttgacatggaacattcaagttgtaacaatggtggggtggttgattctcccaggagccatgacacagataactctgagcatttcacacaagaagattgcaattcaattactgaagttgatgacctagcggagactagcactacggcaacagcaaacggtgcgagtgacaccgaacgtatggtcccagatgctgctgctagcttcttcgaagaagctatggagatcatgaaatctagaagaagcacaccagaattgccacaagatctcgacggcggcatcatatttgagcacgcttatcttgtggggtcgaaagagctgaaccatcttctgttcagacctgactctcagttcttcaaagacgtgcgcgagcttcaaggtaccatggactacgaggagcagccgtggacatggaagagcgcggatcctcctagcttaactaggacatgccgatacaccacaggcgcatctaataagtttatgaaagccgtcaagaccagtgaggagcagacgtaccttagagcagacggcaagagttttgtggtcacggctcgtgtccgtactcccgaagtgcccttcgggaactgtttcgcagtcgtcctgctctacaagatagtccacaggaccggcgaagaaggcgcgcatctgactgtatcatacaacgtagacttccttcagagcaccatgatgagaagcgtgatcgaggggagtgttcgagacgggctgagagaaaatttccagggtttcgctcaagtattgtctaggcatgttgttgaagtggccggttctgtcgggatgagcaaagagcagttgctggcgccattgcaggtagaacaccgccagtcagatatcaggctcgcttacaggtacttttgcaatttcactgccgtttcgacggtgctgtttgcactgtatgttcttgtgcacatctttctgtcaggaccagcaggccttgagttcagtggtctagatctacctgactcattcggagagctgatcacagctggcgtactagtcctccaattgcagcgcttactgaatatggtgacccattttgtagaggcaaggttacagagaggaagtgatcatggggttaaagcaaatggtgacggttggctgttaactgttgccctgctagaggccacaagcttgccacctggatcggttgacccttatgttgtgctcagctgtaatggcataacaagaacaagttctgtccagcttcagactctggaacctcaatggaacgagataatggagtttggcgccatggaagaagcacctgccgtgctggacgttgaagttttcaatttcgttggtccattcggtgtggcgatttccattggacacgctgaaattaacttcctgaaacacacatcagtagagctggcagacatatgggtgccgttgcaaggaaaactcgcgcagacatgtaagagccggttacatctgagagtatttctagagaacacgaaaggaccggagacaacaatgagagaatacatgagtaagatggagaaggaggttggtaaaaagttgcatgtgcggtcgcctcacaggaattctacattccagaagctctttaatctgccacaggaagaattccttatagcggattacgcatgctctttgagaagaaagctgcctttgcaggggaggctgtttgtgtccgccagaatagttggcttctacgctaatctgtttggacacaaaacgaaattcttctttctatgggaagacgtggaggagatccaagtgctacagccatctttcacaacggacaataattggtctgtggaaatcgaaatcgtcggccgttga

SEQ ID NO: 39702 - DNA, 309 bp, Zea mays
  Peptide Sequence Number=SeqID_83077
atgttctccaagctcaagatgactagccgcgacaccaatcgacctctaggaacatcgatctgttttgggagccttgagttccccttcagcggcgaaggagaagcaataaaggcctcagaagcccgaccccctccgtccaaggggcgcgccttggtggcctgcggcaagggcggcggccaagctgaggtggccttggcggcgacggtgagacgagctggcggcggggacgtgaaaccgagagaaggggtaggcgtcgtcgcatctattggctgtgcccccctcccccgctgccctgattatgctgtttaa

SEQ ID NO: 39703 - DNA, 279 bp, Zea mays
  Peptide Sequence Number=SeqID_83078
atgtacacctatactcatgggggtgttcgacggggcagccctagagacgcggacgatgagcctggtcgggtgcctcgactactccgcgagaccgcgaccccgtgggaggtcacgaggccgggggtcctggagcggcatgtcggctacaagttcaaccggtacgtgtctatcttccgcggcgaggtggtcagcacccagctctcaagttcgcggcggcggcgggtacacgacgtcgtcaacgtccccttcggcgactgcttccggaattcgtttgggtaa

SEQ ID NO: 39704 - DNA, 1623 bp, Zea mays
  Peptide Sequence Number=SeqID_83079
atgacgttaaattacaaatgtaccttcaacttgaaggagatgagagtaaaagcgcgacgcaaaagcgaatgccaaatccgcgtgaacaaaatactgttaaatcctgtttttgaggacctttggaagccgaaggcccccaacagaaccaatggaaaaaatagcggtgatatgatgtcaattttctcccctccacacaacatctatggtccttctgagtacacaccttcgtctgttgaaggcaaatcttttgggagttcttacagaggtcttgacgccaatttcgggagcattgcacaatgcgagcatcatagatgggtacaatgttatggatgtggtgtgacacatattgttgggtctcgctacaagtctgatcttgaagatgaatatgatctgtgtgatgattgtttttctcacattgacaatggggctgaatataccagattggacagttctgcttcaagatgtgctcccgtggcaaaaacaaactctctcctcaaggatgttactgtacctgatggaacaacaatggcaccttcacacccatttaccaagatttggcgggtacgtaacaatgggtctaccaggtggccgtatggcaccaagcttgtctgggatggtggtcacttagctcccccaagtacagtcagatcaccgatttcggtaaacgggatgataaatccatgtgaagagactgacgtagctgttgacttccttgcccctgcaaggcctggtcggtacatatcttactggagattggcactaccctcaggccagagatttggtcagcgaatttgggtttatattaaggttgttactctaccattgcctgcttttggtctttgtcacattgatgcttacatttatctggtggagcaacctattcaatctagtggcggcaaacaggctgctgtgaatcaagcaaaactgaagcgcctcacacttgatattgattcaaacattttttactcagaacatttctatggatgccctggaatcccagaagcgaacagcaagcctttcacaccttatattgagacaaacaatgtgttctcagaatctttccctagatgccctggaagctttcaggaaaccatgaaacttgaggaatctaggcctgctcgtggtgatatgctctctgtcccaacaacagttgcaccggtgcaaattcctgccactgatgtttctgccgagtcttcactggattcaatacctggtggtgtgactgcatctgaagcctttgccctgcccaatcctctgcctatgctccctgttagctcctctgcgcctgtcgttgatgattatgttcacatgtgtgctccagcagctagtattgctcctgttccagcaacgcccttgcctgaacaggtcgtcaaccacatggaggggaagctgatgggtgagctggagggtctgggcttcatgcaggctgacctgaacaagcatatactccggcagaacaactacgacctggatcagtctgttgcccatctccgtgactacgatgcgtgggatgcacttgagttctttaagctggtaagatttggcgagggcgggcaggcggacccagaggatgagcagacccattggcaacagactattctgtatttctcagatcctatatag

SEQ ID NO: 39705 - DNA, 264 bp, Zea mays
  Peptide Sequence Number=SeqID_83080
atgaccagcagagacagcgcgtcagctggcaaatgggcccaatcggtcagcggcgttggcgaagttggacgcgggatgcacacggtgcggctggcaatgtgccccctcgatgtcggcgaacccagtcattctagtgcgcgcacgacagatgactggtggggcccaggtgtcggcaccacagtgcgggagcaagagctgggctgcgcgcgtggtcgcgagtcgcagcatttttcgcgcaaaattcgcgcgctacgcggttgttag

SEQ ID NO: 39706 - DNA, 504 bp, Zea mays
  Peptide Sequence Number=SeqID_83081
atggaaggcccctgggttattaggacatcctactgctcagaggaggaaggctttcctcaccttctacgaagttgcgcgctacgcatggggatccacaagaagcccgaatatgtctggaaggaataccgcgaaaatggagtggaaaagtgctctatgcaagtcaaagagcttaagcaagagaaggcatctctccaggagtgtctcgacatagcagaaggtgaggaggccaacacccgtgaggcctatcgaaccttaaagatggactatgacaagaagctaaagaagcttgctcccaagaagaaaatccagaagaagaccaccaaccgagggtgtcaaacggagaagaagaagaagaagacccctccagccccacctccccccaggatagatgattggtccgacgccgaggatatatccctagcaagccttgatgatcttctcaaggaatttggggatactttagagaaagagttcggtagtacctcagggaacgctctcgtgtag

SEQ ID NO: 39707 - DNA, 165 bp, Zea mays
  Peptide Sequence Number=SeqID_83082
atgggcgagaacgaagaagctgacaggtgggcccgagctgccagggagagggagcagcgcgagagggagggaggcgagtcgctgacgggtggggccaagctgtcagcggggcacgtggtccttacggagaggtactcaggaaacagcctgagccccctaaagtaa

SEQ ID NO: 39708 - DNA, 315 bp, Zea mays
  Peptide Sequence Number=SeqID_83083
atgcaagatgcagcacgacgggcactttctcagtattgctcgttgttcagcgtggtagctgacggccttgaccggaagtactaccctcgccgtttgaccggcagtgctggcggtgtgattgtctcgctagttggtgagggcaatcctaggctgagcagcatggtcaacctagctgccatgctcaacacagagttggaccacgcccttgacgagttgggcaaggttcgggcggagcacccttaccgttcagcgccctgtggtcgcttcgactatggtgccccagactgtaggaccctcatagatttagatccatag

SEQ ID NO: 39709 - DNA, 282 bp, Zea mays
  Peptide Sequence Number=SeqID_83084
atgctggtagactacacaacgggtctcctccagcagccaggatgccctaaggtggtgcagggggcatctctggctgaggtgcaggggaaggtggcctctcagactccacctcccactgaggcgagggggaagagtcttgctgctcttgctcctgctcctggcgtcagtgctcctgctcctcgtgcaggcgatgatgcagtctctctaggtgactggaatcacctgacaccgtgcgatgcaggggacgctccgccagtcgagaaggcaaaaaggggatcatag

SEQ ID NO: 39710 - DNA, 411 bp, Zea mays
  Peptide Sequence Number=SeqID_83085
atgaatcctacagatcctccactggttggaatcgatcaagtggttgccgcccaaatgatgccaataaaaagaccaagttttggattcaacaaaggagcaaagtgggaaccgaaggccctctggtctgggagcaccggactgtccggtgtacaccggacagtgtccggtgcaccagaggactccaacgcaaactcgccaccttcgggattttccagaggcgactccgctataattcaccggactgtccggtgtacaccggacagtgtccggtgcgccaagggaggtcagcctcaggaactcgccagcttcgggaaactccaacggctagtccgctataattcaccggactgtccggtgcgactccggagcaacggctacctccgcgccaacggctctctgccgcgcatttaa

SEQ ID NO: 39711 - DNA, 243 bp, Zea mays
  Peptide Sequence Number=SeqID_83086
atggcggcacagtaccctgagcgcggcggaggatatgccagtgaactcatacccggtgatcccgagcgcccattaccaattctactagcactaaatgaagtgtacggccatgcgaacatggagggcgggtacttaccgaaggttactgcgcagaaacttccggcgacggcgcggtgcggaatcggggcgtcgcgcgaccgacggcaagaaattggggcggagctagcgatcaatcatgggtag

SEQ ID NO: 39712 - DNA, 159 bp, Zea mays
  Peptide Sequence Number=SeqID_83087
atggcgagagtagggtgtaccctccgtggcaagagactggatggtggtgtatctgtgctctcggtgaagaagcaacaaacttttgttgcttctattcaaaggtggtaccaaaagaagaaaaccaagactaaagctgtaggaggaaaggtcctccgttaa

SEQ ID NO: 39713 - DNA, 213 bp, Zea mays
  Peptide Sequence Number=SeqID_83088
atgtccttggcgtcggtgatcgacggtctggtggccgccacggaagacaccgtccgggagagcgtccaagacgccatggagacggacctgcaggatttagcctgggaaaccaagccttatgcccggacctacaggatcacagctccaaatactagggcacctgttgcagagtggtggaggtgcaggcttagggccaacaggccgggcttatga

SEQ ID NO: 39714 - DNA, 192 bp, Zea mays
  Peptide Sequence Number=SeqID_83089
atggcgggcggaattgagctcgccggagctaaggagagggggttggccggtgaaggcgagtgcggggcgaaagaaaccctaggtgacactggggtgtcacagccttccccccttaaaggaatctcgtcccgagattcgggccagagtcctcccagggtgaagcgaagggtgagacttataggaaatgggtga

SEQ ID NO: 39715 - DNA, 216 bp, Zea mays
  Peptide Sequence Number=SeqID_83090
atggctttccttccatcttgtgggaagtgcttaactccgctggttaccctacgccccctttgtacacggtgcagttgtatgaggagcatcagccaacaggctgtttcggtctggggcaccggactgtccggtggtgcaccagacagtgtccggtgcgccaagctgcctcgacctgaagacgccgctctcgggaatttgccgacggcgtacggctaa

SEQ ID NO: 39716 - DNA, 651 bp, Zea mays
  Peptide Sequence Number=SeqID_83091
gcaggacttcccccgaagtcctgggagggggtatgcccctcaggtctcctcggccgagccccgcaccccctcgcggcctagccgtggccggtcggcaccctaccgcgcccagctccggctggcgctgttggctgcctggccggccgtgcggctacgctggcgcatgagttgtcttggacccgtgactgcttggaggacccccgctgccgtgcggccgactcccggcgcccgtgtcccatcactcgtgcgggcatcctgtgcctgctgcgttgagaagtgcttgcgtgctgctacccgtcccacgggaagccgtgctcgatacacgttgccttcgtcgagctcaccccccggggtgcggctcgtcggctcgagagcgcccgcggcgtttgcctcgtgccgccgtcggcctatggccggcggcaccgaggacacctcgctggcgcttttggtctcggatgtggctcacgctgaaggccggagacgcgttggcgtcacgcgcccaagaatcggtccgcccgaacgaacgacgtccagcccggcacgacgcctccgcgcggaggccggcgctggcccgtctgcgaggacgtgctacctggttgatcctgccagtagtcatatgcttgtctcaaagattaagccatgcatgtgcaa

SEQ ID NO: 39717 - DNA, 486 bp, Zea mays
  Peptide Sequence Number=SeqID_83092
atgccgagggctatcgacgcctgttcacccaagcagctaaccatcttctacctcttgctcacccgccgaacgatttgcgacacgccatcaacagtcgccgagatgcgcggagctccatcaacgcttcgcgtgaacgacgacatgagaacgagatccgccgccgggaagagtacgacagggatcatggcatcccaactcggagtcaagccaccggagccgaatcaacgatggcctcgactggcggaactacccggggacggtcgaggaaccacaacaactactcccctccccgggacagacatcatccccgacgataggaggacacatgtggagtgtccgcccttactccatgccttagggccattcaatggccccctaacttcaaggtatccaatgtcgataagtatgaacctaagcaggacccaggaggctggctggccgtctacaccaccgccgctcgagccgccggagcatccgaagacgtaa

SEQ ID NO: 39718 - DNA, 966 bp, Zea mays
  Peptide Sequence Number=SeqID_83093
atggggtcacgctcctccaacagcagcaagaagaaggcaatgcggcagacgagcggaagcagcggtcaaatcacccccaggctcgcgtcctttcctgaagcggcaggggagccctcgcccacgagcgagcgacacctttggcaggcgaagcgggtgacgtttcatctccgtcatgatgaccgtgtcaaaaaagggatcgggaaaggggatattttgaaaaggatccttctctgcgaaggaaacgggccctcgagccctcctagtgatcaagggttcgaaggctggcccctcggaagggctggcccctcagaagggttcgacagctgccccagagcacgcggagtgagggatgaccctaggtacgtccgttacatggccgaggctcgggctacgctcctgaggccgcatgagggaaccaccaggccgaccaaggcatcacaacaagaattaagacctcagaggagtcaaaccactcctccaaggcctcgggggctacacccggcggcctcgggcgcgattggaagctccgcctcgcccgaccttaggcctcggcctcggcctcgggaggagatctccacctcgcccgaccccagggctcggcctcagccttggcctcgggaagagtcacgtcctcgcccgaccctaggcctcggcctcagcctcgaccttggaggagccgccgcctcgcccaaccttgggctcagaggctcaaggcacttctccgacggccacgttactaccgctacagggctcaaggcacttctccgacggccacgttactacctctacagggctcaaggcgctcccccgatggccacgttattatctgtacagggctcagggcacttccctgccagccacgttagctccaagctacacccccattatacagctgggcatctccttatgtctataaaagggggtgtccagggccccacgaggggggtggcacggaaggacgagtag

SEQ ID NO: 39719 - DNA, 696 bp, Zea mays
  Peptide Sequence Number=SeqID_83094
atggctctggtcccattctcgttgctgctcttcctagtctcgctgtcggtgtgggtggccttacccttaccgttgccggtggcagcagcacatggcgggccaggagagcactgctcgccgtttctatgcggtaacgtgagcatctcctttccatttgggattatccagaaggacgccgagcagaccaactgcggcgccgggattggcttccaggttcgttgccataacaccatcccgcacctgggatactatcagaacgagatcaccttgcggatcctcagcatcttttaccacaaccgctccttgctcatcgccgatcgaccaaggtggcctacatatttcaatacgactaccagcaccgaagggtgccgcatcccgacggccaacacctcgtcccggcttgtccctccgctctcggtcagctccgacaaccagaacctcatcttctacagctgcaccaagccaccgtcgccaggcgagggactcgtggccacggtatgccacaacaacacgtttgttcgtgccgccgatgggcggcgttccgacgagtcaggcggctacgttttgcaaggttgcaccgctaccagggtgcctgtgcttggagtgtctggcaaggtgaacgctagcaactacgaccaactcgtctgggatggcttcctcgcgacatggcagttgccgccgacgccgtcaggttaa

SEQ ID NO: 39720 - DNA, 387 bp, Zea mays
  Peptide Sequence Number=SeqID_83095
atgggcaagaaacgcaagcgcgagccgactcctccgtctgaggactttggtgactcggaatacttagaggaggagttctcctctgagtccgaggggtctccagctcccgtccctcccccagcgtcgtccgatgactcggacgactctcaggggatcaccgcggaggtctggacttacatccgggccgtcgagcgctccgggctcgcgggcttggatgagtcggagtactcctcggacgaggaggactcgtccgaggaggacggtggcggcggtggcaaaggcgacgacgacgatgacgacgacggaggcgatggcggcgacgacgacggtgacggcggcgacggcggcagcaggggcggcagcaggggcagcaaggccagtggctag

SEQ ID NO: 39721 - DNA, 873 bp, Zea mays
  Peptide Sequence Number=SeqID_83096
atgggttacagggaggctgccactcatattcagctttggctccttggtgccctagtttctcactcagagtttgatgttgtggattttctcatttgtgagatcgaggacaccgtactggatgctccagaggatcctgtaccggcacctgctccagtgattgatactcaggccgaggataccacctttcaccagtttgagactcagggcgcagcagtccctgacgacgacgatgatgatgatgatgatgatgactttggggttccacctccgtctcctatgcctccacgcactcatgatcatgaggctaggagttccagtggtgctgcccctattgcccctcctgccattgaccctgctcttgcggtgatcctccagactctcactcagcagcaggctcacttggcagcgatccagcagcagatgtccgagagaatgctctcgatgtttcaggtgattcaggataggcaggatactctacaacagcagcttctccaggaccgggctgaaaacagggcattcatgactctcatgcttcagcatactggtgtattgattcccctagttcagtcagcaccacctccacctcttcaggctcctattgtgccagctattcagtcaggaccccctcttcctatagttggtccttcttcctctccgctctggccggtcaccctggttttcacgttgccggtcattggctccgtcagcactcagtcgccagtgccaccagctcctgctgttaccactaccgctgtggcggtgtctgtgacttctatggcttcggcagctcctgcagcgcagcctccgtctgagcccgtaccagctccagcttctacagtagatcctagatccgagactgactctgacccatag

SEQ ID NO: 39722 - DNA, 798 bp, Zea mays
  Peptide Sequence Number=SeqID_83097
atggagaagtgcaaaccaatcaagacacctatgccaacaaatggacatctcgacctagatgagggagtgaccttgcctgcccgtgagccgtctcctgtcctgcctggattttcacctctcgttcatccggtcaggatgccgcgcacgaagaatgtgtcggcgccaggggaggagatgacgaggatcctcctcgccccttcaggcaggcagagcaaggagctcagttgcagattccttccgatcagattgcctatcgagttcgtcgcctcgcctctcatcctcgctcctccgctcctaccactcccaccactgctaccactcctccacccacttcgcctgctcccatcactcttgtgccatccaccacttcagccataccccacctccactactccagcttccactgctcctcctcccgcttccgctcctcctatcccacctgcttgcttccgggagcacgatgagactgagttgcgaccacttgttgtggatcctaggctatttgatcttcagcgtgctacagcgacatgggtatgtcggttcagatacgtacccgtggagtcttggttacctgcacatagagaccatgcagcggcagatccattcagcaccaggattcaggagtctttctacagagcacagttgtcagctcagattgctctgcgagcgcaccggctattggatctccctgccttcctgctagcagccggtgccgactctgaggttcacctctcctatctgcctggacttctcactcttttgactaccagcggcagatatgttgaggaatgggtctga

SEQ ID NO: 39723 - DNA, 823 bp, Zea mays
  Peptide Sequence Number=SeqID_83098
atgcacgggtgccgtgttcccgccgctgggctgctgctgctctgcccagccgccatgctactgctcgctcttctactgctagccagccttcctaccaccgccgccgccgtgaacacgtcgacgttgccatgcgagccggcgcagtgcgggaacctaagcatctactacccgttctggctcacgggcacgcaccagcggcactgcggctacaaggcgttccaggtcacctgcgaggagcggaaggtgtacctgaagaactcgtactgggcgtaccaggtcctggacatctcgtacgagaacagctcgttcgtcgtcaccaacgtcaaccttccggaggacggcggctccttctgcgacctcagcctcatcggcaacgcctcctccgacctgagcgccgcgccgttcaagatcagcggcaggaaccgggagctgttcttcctcagcgattgccagggccagggccaggcacggcagccgtcccctccttcttcttgggcgcaaatgaattgtagcgactacggcgacggctcggccgccgccaagtcgttcgcgtggcttgctggcaagtacaggcccgacgacaccttgaagccgccgctgccgctgaactgcacggtgtcgtcattgatgccggtgctgggataccagggggccgggccggccgactacgaccgcctaatgaatcttgggttcctcctcgagcacaacttcacggcggaggactgcgcggcttgcgctagcaccggcgacaggtgctcggtcgaccccgacgacgaccagctggtgtgcaactgctccgacggccagtactggtttttctgcg

SEQ ID NO: 39724 - DNA, 867 bp, Zea mays
  Peptide Sequence Number=SeqID_83099
atgcctctagcacgatcttgtctgcacctgctgctcctcttctccagcatcgcagcggcggcctctgcggcgacagagcggatcccgaactccaccacgtggccgtcgtcgtgcccgtcgtaccggtgcggccacgccgtggacatccggtacccgttctggatcgacgacgccagcaacgcctcgtcgtcgtcgtcgtcgtcgtcgtcctcggactgcgggtacccgagcctgcggctggagtgccggcgcgagacgccggtgctgccgctcccgtcgggggactacgccgtgacgcgcgtcatgtacggcgaccgcaccgtgtcgctcttcgacctcggcgtgttctcgctgtccaacacctgcccgctggtgggccgcaacctgtccctccccgcggggtcgccgctgtcgctcacgccccgggacgccaacctcaccttcttcgtccactgctccttcgcgggcgtccccgcgcgccacctcgtggcgtgcctcgagggcgacggcaggcaccactcgtacgtgttctgcgacggcgacgagctcgcgccctacgcctacgcggggctgtgccagagcgtcatcgccatgcccgtgctgcggaggtccctgctcggcaccgggagcaccaccaggagcccgctggacgccatcgtgcccgcgctcaacatggggttcgagctgagctggaggcccgaggcggacggggagtgcggacagtgcgagagtgccggcggcctgtgcgggcgccgtcggctggcggggcagcacggggcctggaccttcgcgtgcttccgcgctgcggcggcggcgaacccagcgttgatttctcctaaaactccagaccctttgtttggcgcgtag

SEQ ID NO: 39725 - DNA, 282 bp, Zea mays
  Peptide Sequence Number=SeqID_83100
atgacgctggtggctctcagccccttacagcagcaaggagacgtcagcaggatccttgccgcatcgccagctgtgctcctacaggactcagtcgctcctactggtgagtccggctcccagcagcaggtgtctattggcctcgatgccagcgacctgcctctacctgccactgtcgaggcggcgccatcgggcccccaggttccgtccgccgctgccgatgcggcgccgtcaggcccccaggttctgactgctgctgccgcggcagggtcgtcgggcccctag

SEQ ID NO: 39726 - DNA, 999 bp, Zea mays
  Peptide Sequence Number=SeqID_83101
atgtcgtcgaatatgccgtcggcgatggtggaagctgcggggggtgcgcccgattccatcccaccgccagttccggaggagccggaggttattcttgggcggctccagaccggcgccgggctagaaacggcgccacctcccctccctcggctggaggaatgtaccaaggccgcgtcctgccaatttgctttggagcggtctaagcttgagcaggggcgtgaggacctcaaggaggacctgaagaaggtgctcgagcgggagcgggagaagcagcgggatgagcaggccgtgactgaagcagcactgcaaaagctacagcaggatcttgatgatagggctagcaacatctctctcaccgaggaaaatctcaaggcgaaggatgcctccctagaggagcgggcgacagatctcacccgacaggagaaggaccttgcctggagggagaagatgtggaaaaggcaggaaaagttgctggccgagcacgagctcgaggcggaggaggagaagaaactggaggagaaagagcaaacactagaggagcgggtagcccaaacggcacaggcggctccaggttcccaggcggtagaggtgatgaagaagacgctagaagatctccgggcggagcatcgcatcggggtccagcgtatcgccgcatgggccgaagaggcgagcttggctctagtgtcgttgggggtgagccccatcctagtgtcgaagcagccggtgtccatttccgacacgctcccggtgctagattccgctgctgaccgcctccgacgcctggatcagttccttggcgcccgcttggaggctgagggcagcagactctgccgagcgataatagagtacatccagacgtgctttcggagccacgacccgaccatctccttggggcccggtgatcgccggtccggtggccgataccgaagacaccgcccaggggagcgtgcaagacgtcgtagacgtggtggccaagcgattccagcgagatctcgctga

SEQ ID NO: 39727 - DNA, 201 bp, Zea mays
  Peptide Sequence Number=SeqID_83102
atgaccaaagctacctttagttgcatggcaaacaactctctgctccgccacgtggacggctccggggtcgccatgtggccagggaaggagacgtactccaagaagccaacagtggatctggacccctatggggaaagcgccggacccttgtacatgaagaacggaccccggggcaaggtccaggaccccccgcgagtgtga

SEQ ID NO: 39728 - DNA, 387 bp, Zea mays
  Peptide Sequence Number=SeqID_83103
atgaaggactcaccagtaattcccttcaccaggagctccagttcctcccaggacaggttggtgcctggcccgcgatggacccggctgaggtcgttggagccagtgaaccagcagctcaggcgtgccctcgcctacagcggcgcaatctggcgcttcaagaagtcgccgaccacgtgcatcgacgtcagaccaccggtcgctagggactcgatcctgcccaacacgggctcaaactccggtgtcaacggcggcttagcccttcattgcttcttgtcgagcctcggcccatcactcggtagtacgaggcggtcgctggcctcggtactggcaatcacccattcggcccaccagttttcccacctcacgccgctgactgaggagatatag

SEQ ID NO: 39729 - DNA, 642 bp, Zea mays
  Peptide Sequence Number=SeqID_83104
atgcctttcgaacacttttcagactgccttgcttgtacatatttgaagtttgaagattatttccttttgactttacatgggctgatattgagcaaggcattaaagaatcgaaagaatattgagggtgaggccgctcataaggagattatgaagcttcggtatgagctttctgagctttgttttgattgtgctgagaaagagaatatgcttaatgtgctaggagaagacttagtcgagagtcgaagtgaactccaaaagttaattgaagaaaagaatgtcgtcatgggacttgaaagggcgatgaatgccaaggttttagagcttgagatcatgaacttgcaacagggtgagcggcttgcggagctcgaagccaaaataagacagcaggcgagaactcatgaggttgagattgaggagctaagagccaaagttgttgaggcaaaatttaattttgagattgaaaaggtcaagaaagaagatgctatagatgagaagaatcacttggataaagttgttggtgattttcgaagcttgaaagacgagtgcttctccgtggctgctaaatgtagcaaaaaattggaaagtaccttctccttatttggagcaagatctcatgagagaatttttgttgatggtacatag

SEQ ID NO: 39730 - DNA, 462 bp, Zea mays
  Peptide Sequence Number=SeqID_83105
atgggcagagcgcgagagagggtgaagccgagcgaaatgaggcgaggggtgtgcgcagggcacttgcggggctctaagaagggaggtgggcgcgtgggcgggcgtcgtggccgagaaacccggagacgtgcgcaagtgcgcactcgccggttcacggcgagagcggggaaggtggaactgacaaggcaggtccacggcgcagagagagaaaaggggtcgtgcgggggcaacgactcggcactggtgaatcgggcccgcgagacagagagcgaacgggcgaaggaaactggcgccgacaggttggccccattgggcagcgagcgagagagggagggcgcgtgcgagggagaactgccgcttacaagcggggtccgcctgtcaggcggcgcaggcgcgcgggcgcgcggcttggctgggcttagtgggccgactgcgctgctttctccttttctttttctctag

SEQ ID NO: 39731 - DNA, 327 bp, Zea mays
  Peptide Sequence Number=SeqID_83106
atgactgttataccgttcagatcgaatctgatggtcacagtacaacgtgcgaaggggcagcggcggcggcgattctcaatccgcggcgacggcatcactggtgttcaggcgatccggggagccaggctcgatactcgttatttctttgcagaaggtggagaggaggtccagcgggtagaggcgaactcggaggaggtttgcttaccggtgaaaaatggctggcgcctgttgactatggtgtgggtacacccggcggtggacgaagcggacctcggtgagcaatccgccatggacccaagcatccatgcccccaaaatccaccagtaa

SEQ ID NO: 39732 - DNA, 306 bp, Zea mays
  Peptide Sequence Number=SeqID_83107
atgccggacacccttaaattggttagaacccggagaacggtgaagtgccttcggattcctgatcgaaccatcgatgtggtggatgttgctttggaaccagatttgacttattcagaacatcccattcaagttttggatcagaaggacaggatcactcaaaaaaggaccctcaaattctataaggttttggaagaagttaagcctacacaggcagctgactgggggtttgccactaagaaagaactagaactcgtcatattcctggaactcctcgaagtcatcgatgttgctagcatcacctcctga

SEQ ID NO: 39733 - DNA, 957 bp, Zea mays
  Peptide Sequence Number=SeqID_83108
atggttacttttatgatgatggttaataatgatgatataaaatctgatctctggtatttttcctcttttgaggagatggcccgtatcaggtgcactgcacgtaagtctgtgatcccctttttgccttctcgcctggcggagcgtccattgcgttgcacggtgtcagccagagatgcccttgcaccacctcagggcatcccggctgctagaggagaccctgacggagacgaagacggagacgatgacgacgctggtgacagttcaagccacgacatggagctttcggaggagccagagtcggagggatggatcgctagacccatcactcgtgacgccgcttgcggatgtcacttccatgacgctctcgataccttgttgcgtcgggcctttgaccaacacacttggtctatcgagtaccattgtgtagtctaccagcatcatcgcgggctatacccggaccagtgggagtctacttgcttagtgcgccgtccagacgatgatctccggggtgtagaggccttctcagagcactattctatcactgagagggatactgccgaggcagccatgcaagatgtagcacgacgggcactttctcagtattgctcgttgttcagcggggtagctgatggccttgacctgaagtactaccctcgtcgttcgaccggcagtgctggaggtgtgattgtctcaccagttggtgaggccaatcctaggctgagcagtatggtcaacttggtcgttgtgctcaacacagagttggaccacgcccttgacgagttggtcaaggttcgggtggaggttgcagaattgcgtgttgaatgcgcgacatgccactatcttgatggtggttctcccgcccctgtagggattgagcacccttaccgttcaacgccccgtggtcgcttcgactatggtaccccagaatgcaggacccgcatagatttggatccctag

SEQ ID NO: 39734 - DNA, 576 bp, Zea mays
  Peptide Sequence Number=SeqID_83109
atggcgcgcactaagactacccagcacaaatcaactggacctcatggtgtgccacgacatcagttggcctctaggcatgaaggaagtagtagtggcagtaatgacccaattgcagacctggaagcccagatggagcaactccggttagaactacgccacaggaatagggcacgtgagcgggatagccaccatattgtggagctgtcagccgaagtgagtcatctgcagtacgaaatttcagaacatgatacgaccatcgattgggtcgtcaactcgcgctctttcgcttgggactgtgaagcgaaatctctagcccgcgtgccagaacttagggcgtctctcgaaaacctgcaggcgtactgcaacactttgcacgaagaagtacatgtattgtttgatcagctacaccctgacatgccaccagacgttgctgcaatgggagtcgaaccatcgggaacagctgatgaaggacctgatggggagttggacgtttttaggccccctccttccatgaaccttgctgacaaacggtctcctgcagccgacaatggagcaacgaaggatgaagaagattag

SEQ ID NO: 39735 - DNA, 381 bp, Zea mays
  Peptide Sequence Number=SeqID_83110
atggggaagcctgtcccatcactcctcatgctcctcctcagccgaggcagggtcccactcgactgtccatcccggtggcaagatggacgaccaagtcactccagcaaccatgtcctccagagaacctataaaattatgccacaagcaaggctgagtatactaatactcagctggacttacccgcagcatggatcaagcagtctcattagttgcgagaagcagatgattcgaatcgagtttttaaaccttgcaaggtttgagattttgcctaagcataatggattaagacttggattgcctcttaaatgttttagtaggctctcaaggggtttgctggtttggttaagtctgtcctataaatttgaggtccagaataaatag

SEQ ID NO: 39736 - DNA, 492 bp, Zea mays
  Peptide Sequence Number=SeqID_83111
atggcaaggaaagacaacacatcccaatcattgagcaccgcgccgagacttcggttgactttgcggtggagggagaagctgcttcctccacaccgcaggttcccagtcgcccagcaccagtcacccctgctgtgcatgccgcacggtagcgcaaacgtcccggactccatcaagggcgtctccgggggcgttgttagcagccagggagttgttgcgacaccatccaagctccacggcttcaccaggagccatgaagtaatggcaggacgacatcgaccgactgctcagtatggcacattctacctcgaccaggtcgaagaagcggtcattcctgcgccaacacaaggcatcagcatctgtgcgctcgccctcagtaaggggcgcacataccaacgacctctgggcagagctcaaccgaaggcgtgcgggagaggacgctcgagtatccttggaaagggtgcacgagcaccgccaaaacatcgatggtcgtga

SEQ ID NO: 39737 - DNA, 690 bp, Zea mays
  Peptide Sequence Number=SeqID_83112
atgaggcgaaccgccgtgcaagaagcgtccaaccgtcccacggttgtgcgccccctcagctccgctgcaactagcggtccaactcaggggcccaggcccacatgtcatgtagccgacgcgtcggttaccagaaccagtgcagcgactcgaggcagccccgtgcatggcccaacagtgccattaagtacgatggtcacgggccagtcagccgtgggaatgggcgcggcagttggcatggccataggcgggccggcagtaattgcagcaacaggcacgcaggagaagcggtccaaccgccaatcagactctggtcccacctgcaggctcgcatcctcccctgaggcgggcccggaggccactgtcagtaccctaaatcaggggtaccctcttctacagcgtgaagacgccgcacccatacgacgtcccctagccacgcgggggacgacgcctgacctcgccgcatgggcaggccaaagggcgccacgtggcaaggaaagacaacacatcctagcagtgtcaaggtcatccagcaggcggcgcgcctgctgggtctgctggcgaacagtacgaccgtgccaggcaacacactgtactcatcatcccttctacaagaagcttcccctgcacgccaaggatacgcagatctcgggcgccagggcacaagaagattatctcgacaacagacattag

SEQ ID NO: 39738 - DNA, 474 bp, Zea mays
  Peptide Sequence Number=SeqID_83113
atgaccaagggcaatttggaggttaaagtgacagggtttggacagtgccccagactgggagacccccccaacctgcagccatgcctcagaggtagagatgctgagggtgccctgggaaggcagtctctttcatttggaagaaggactatgtggcaggataatggtctaaatacgtatgtctcattttataaatatttattgccaactggtacattgggccgacagggtctgggggagagaaatgaacaaaactcagaagagaaactcaacataaaagatgtgatcatggagaatctccagcatcaaactaaaacccctggacataattctactggtaatcaagagccactggaagttttgaagcaggagaacctcagtgagaaacatcgcttcaagaaaatgaatcagacagtatacatgaaagactgctgcagactggaggaggaaggatcaatttgttcgcatctgcaataa

SEQ ID NO: 39739 - DNA, 834 bp, Zea mays
  Peptide Sequence Number=SeqID_83114
atgacgaacataaaatcgatgactgaccaagatacgattggtgagttgagcgactccgacaatttgacggccacagacgcctccgggataactaaaaatactacaacagctaagaatcaactcggagacgacgaccgacgacaaaggaaacaggggcgcgcgagctgccccaaacgagctgggcaccggcgcgcgcaggaaagaacagaggcgctagagctgccgaacgatgacgaggttacgaccgagctccaaagagcagtatgcgcggcgcgcggcaaccatggcgaacaggttgagcgcgtgcgcacggagcagacgcggctgcgcgcgacggggaagaaacagcttcgctgctgcgacagaggaagcaagcacgtacgcgcaggggaagtagggacgcgcggccgaggaaactctctgtcgcgccgagaagaacaaggagcagggagcagcgagggcacgacgagcagcacagcaagggaaaggggcgagctgccgcagggaagccgcgcgccggaagctccacggctgggcatggcggccatgggcagggaactcgtggaagagggagcagcggcgtgcagaagctcagcgcacagggggatccgagctgaagctgagcacgcgccatggggaactcgccggcagggcagagagagctggaggcgtggcttgctgggagatggagagaaggaaatgagctcggctggctggggttggggctcggcaggggagccgccatgggagcaggcaaagggcgagcaggacgcgccacgggagagctggaaggagcagagacgcccgcggaagatgaccaggcaggatatttga

SEQ ID NO: 39740 - DNA, 258 bp, Zea mays
  Peptide Sequence Number=SeqID_83115
atgcccagccgtggagcttccggcgcgcggcttccctgcggcagctcgcccctttcccttgctgtgctgctcgtcgtgccctcgctgctccctgctccttgttcttctcggcgcgacagagagtttcctcggccgcgcgtccctacttcccctgcgcgtacgtttattgactgcgtgatgtggaagacaacccaagtcgaccccaagcgcgggctaatccgcaagatgatgttgatggacgaaccggaagatggataa

SEQ ID NO: 39741 - DNA, 609 bp, Zea mays
  Peptide Sequence Number=SeqID_83116
atgtcttcgcgctcccttacgcatcgtgtctttccaccttccaagcccccggatgggggatacccgtcgtctttctgccttgtcgtcgggggaacgcaactccgcaggatttggtacctttcggccatcattcggcttcaaggattttcatcagccagcccggctgtaccctcctgccggcggtcacccaagacggtgaccaccagcccctgggtggggagaagcaagccgggctgcgatcttggtcccaccctcagcttcaaggatgttcatcatcctcgctggggtggaggccaggctgagccggagctctacctcccgcgcgggttcgtgggtcaccctctcctgcggcgttcgagggagagggcgctcgctggccctgcgggcgggtcggacttcgacaacgcggggctggccgacggcgggcgtcgtcagccccagcgcgtcgagctcgccggcttggctcccggtgccccctcctgccggaaggcggctgccgcgccgtgtgcatgggaggaccgcccaagatgtcgcgcgctgctagggcggcgttcgtgttctggggcggtcctgcctttgcactggtatggcgcctccgcgcggaggtag

SEQ ID NO: 39742 - DNA, 363 bp, Zea mays
  Peptide Sequence Number=SeqID_83117
atggccgccccgccaaccactcgccccgtcgcattaactccgcggcgggacaggcggcgcctctggcaggagaagcgggcgacgcttcgccttcaccataatgaccgcatcagtaaaggaaccaggctccgagcctccctactaatcagaggtttgaaggctggcccctcgaaagggttcgacagccgcctcaggtcgcgtgggccctacacccactactggtcagaggttcgaaggccggcccctcggaagggttcaacggccgcctcaggctactcgggctccgcgcccactactgatcaggggttcgaaggctggcccccgaagggttcacagccgcctcagacacagagcgagggatga

SEQ ID NO: 39743 - DNA, 291 bp, Zea mays
  Peptide Sequence Number=SeqID_83118
atggatcctaagggaaagggaatggtggtcaacgacaaggagaaggagtccctcttcaacgagcccagagacgtgtcggggaccataattaggggtacccccaagactcctaaactcggctgggtgaggctgacagccgccgagtccagcctcaggcgccataggaagctccgcctcgcccgaccccggggctcggcccccgcctcgacctcggaagacggtctctgcctcgcccgaccccagggctcggactcagcctcgacctcggaagacggtctccgcctcgcctga

SEQ ID NO: 39744 - DNA, 78 bp, Zea mays
  Peptide Sequence Number=SeqID_83119
atggcggccgagaaatggcctaagaaatcattcaaaaaagcgaaaaaggcatccacgacgctaggaagaatctactga

SEQ ID NO: 39745 - DNA, 1062 bp, Zea mays
  Peptide Sequence Number=SeqID_83120
atgtcttcgcgctcccttatgcatcgtgtcattccaccttccgagccctcggatgggggatgcccgcagtccttccgccttgtcgttggaggaatgcaactccgtgggagttggtacctttcaaccatcgttcggcttcaaggattttcatcagccagcccggctgcatcccctcgccggtggtcacccgagacggtgaccaccaggccctgggtggggatgagcaagccgggctgcgatcttggtcccaccctcagcttcaaggatgttcaccatcctcgctggggtggaggccgggctgagacggagctctacttcccgcacggtttcgtgggtcagcctctccttcagcgttcgagggagagggcgctcactggccctgcgagaggggcggacttcgacaacgcggggctggtcgacggcgggcgtcgtcagcctcagtgcgttgggctcgccagcttggctcccggtgccccctcctgccgcgaaggcggttgtcgcgccgtgcgctcgggaggaccgcccaagatgtcgcgcgctgccagggcgacgttcgtgttctggggcggtcctgcctttgcaccggagtccctcggctcggtcggccttgctgtccgaggcttctcttgcttagttaaaggaacccctcggccgctcttcgatgagccggagccaggggtagcggtgtcagcgtggacagaggcagagttggctcgaaaagaagacttggttggtcggagcctggccgggtcgtccgttagcgggaccgacgccggagtcgatctgccgaggcctcgggccgggctgatgtcttcgggggacagctggccgaggcctcggggtgaccagccgagccacctgctcgagtcggattcttggaggagacctaggcggcgatggcccgggcgtgatgttgaagtcgtccttcagggtggagatcctcggaccgcgtcgccgtccgaggctaggtcggacctcgccgaaggtgtagtcgatgccgagggtgctgctgctcccttcaactgtcaagatccgggcctgcaggatcggatcatcttgtag

SEQ ID NO: 39746 - DNA, 309 bp, Zea mays
  Peptide Sequence Number=SeqID_83121
atggcgagcggaaacaagctcgccggagctaaggaaagggggctggccggtgaggagatatggagccaggaaatctggtctgtctccctgcccaaacccgaggcaaatccaagaaaaaccctgggtgacactggggtgtcacagccttccctccttaaaggaatctcgtcccgagattcgggccagagtcctcccggggtgaagcgaagggtgagagtgataggaaaaagggtgatgattgttatcattagggcaaaactgctcttcgaatgtcattctctttgcaacttcagaaggaagaccttttaa

SEQ ID NO: 39747 - DNA, 966 bp, Zea mays
  Peptide Sequence Number=SeqID_83122
atgaacgcgctctctcgcgaagggtgccggcactttgaggtcttcgaccaagctgatgaagattttgagcgagatatctacaaggttgaggaccccatagtgaaggaatccaccggagccatgtacgaccggatgtggggtccgcacggtcgcgaggtggtcagggagcgggtcgagacggcgagggctcaggcggcgcgtggcgagagggtggatgacttcggggcgttgaacagcgcgttgcctgacctggagccgatcccggtggaggccgtgtccggggccgctctggagccgcccctggagactgcggaaggcgctccggatgcccccacagctgctgcggccagcggagacccgcccccagagaccgccgaaggcgcgcctaatgcccccgcagccgctgcgccgagggctgaagatcctgcgacggtggcggcggaggcgacagcggaggcaacgacggaggctcccgcgacggctgggtcttcgcaggttcaagattttgggcctgcgcacgcaaccgccactactaattttttggcggcttcgaccgtggatggtggtaataaatatgatggttctgcatctgagttttctgattttgctgactctgggagctcggttgagtggactgaggagtcgtcggaggaggacttggactactttgcggccttggatgtggcagcggcggaggcttcaccgcacgctgcggacacagaagatgtgcctggtccgagtaccaggcgtcggaggcgaagggcggttgcgaagcgtagagtgagtgaggcggagggaggtcggcttcgtgtgagtagggctggccggcaggaactgttgtctttgccagccgccgcgagtacaggtgaaggggaattgcgaagtctttttgcgggtgaggagcttaggataatgttatttaactatagggagatgggaattattcctaaggttgagcccatgtag

SEQ ID NO: 39748 - DNA, 156 bp, Zea mays
  Peptide Sequence Number=SeqID_83123
atggccatgatggattcaacatcggaaaagatgtacctctgccaggtgaggaagcgacaaatttttgttgcttctgctccaaggtggttcctaaggaagagaagcaagagtgaagctgcgggaggacttggtcctccatatagaacttttgtttaa

SEQ ID NO: 39749 - DNA, 1560 bp, Zea mays
  Peptide Sequence Number=SeqID_83124
atgtctacgtctcgtatagctcgtggcttgaggattttcccttatggacggaatattgttgctgttgtgtcggcagtgatgaacaaggatcgtcaggacgctgcgcagaagcgccgggcggttatcaggctcgccgatcctaggcgtgaggcgaagaaagcgcggggtagcgcgaaggctgctgcccccggcagtagccagccggcgccggctgtgaaaccggccgtgcccggatccagcaaggcgtcggagagcgcgaaggctgtcgttgctggcggaaccaagcctaccccgggcgatgctgcgaaagtacgggagctgccttcgccggggaagcgcgttgccgacttcggcacgaacattagcgtggaggactattttgttgggtcgggcgaggggcaaattggtcgttgtcccgcctgcggtggcaaccacggcgtcaactgcggtggttggggtgaagggtgccactttctgcacgagcggcgagattctgtcagccgctgccgtcaagggacgtggcgggctccatgtccccgccggctgaagggagggcgtcgcagcagcttgtcgcagcagcttgtcgcaacagctaaagtcaagcggcagactttcaccgaccgcgtggcgtcgtgtgcccttactgcagatgtggctgccgaagttgagagacttcgggcgcagcacgcggatgccatccgggagaagtcagctacggagagcaaaaaccgcaggctggcagagaaggtggccgccttggaggccgagaagacggacctccggcaccagctggtggacgaaaggagggaggcggaggccaaagtggcacgggcggagggaattctcgccagccaacgcgccgaggagtgggaggtgaggttcaacgccctgcgcggccgcgtggacaaggccgaggcctctacgctctcggaggttgagcggatgctcccacagttcgtggactcgtaccgtgagctgggtgcgcggactgctgacttcgaggtgcccgaccgggaggcgggccttcgcttcctcgaatggttgcaggaggagttgctggtactcccgactatcgtggagggtttcatgtcctttgcctccctcgtcacctgcgatggggccatgaatgcattgtctcgcgagggctgcagacactatgaggtcttcgaccaatcagacgagagctttgagtgcgagatcttcaaggccgaagaccctattgtgaagtcagcgggggcactttttgataggatgtggggggcgcatggtcgggaggctgtcagggagcgatccgatcgggcgagagagcagatggagcatgccgaggacgtcgaggaccttggaggtctggtcggcgcgccgcccgaggctgcggaggtcaatccggtgctgccctcggatgccggtgaaggcccctcggccgtgcccgtgcctgctatggccgacgaagaccctgtgtcggcccctgcgccgacggtcgaaggtgccccggaggtggtggctgagccgatagtcgaagaccccacggccacggccgtgccttcgcaggtggctaagtag

SEQ ID NO: 39750 - DNA, 621 bp, Zea mays
  Peptide Sequence Number=SeqID_83125
atgcgccaagggccataccccatacccgacaaattcctcaacaagatcgcgcccgctactcatgcaggcagcgcaccgaagggctccttcgtcttcatcatcctccgctacctaaaactacggggaaccaactccacgacttccatcgaagtcttgccggtcttcggcggccaccacgacattcggcgtcagctggtggacctggacctcgaatctccagaggacctccgccacgaatcatgcgcaggtagacgaaggccaacggtgaaaaaagcctcaaaaacgaccaactcgccttctggctcggggacctcctccacccccgggacacgccccactccgccgccaaaatatccaagctgttgcatgtcttgcacgcgggccgaggacatccgcgacacgcgaaattccactgtatcaccaggatgcaactccttcgccgccatgttgctcagtgtgtccttggacgatgcgccggccggcggtgtatcggcagcagaagaggaagaggacgacatggctacgcaccgtcggtggcggcgggcgatctgcttcacgcgggccagatctccgatgagcaggagcaaggagggcaggcgagcgatcaaacagtttcaatag

SEQ ID NO: 39751 - DNA, 423 bp, Zea mays
  Peptide Sequence Number=SeqID_83126
atggccggagcgagcacgaccgagggagatcgagctggggccgagcaagggatgacggggagctgccgacggtcggccctgctgtcaccggcgagcgatgctagggagggcgagctggatcagggaccaggggcgcggtctgagctgggcaagatggagcagagaaggagcgctccatgggagatggggcgagctagagggagcgccggccatggagggacgtcgagggacgagcatggcgcgatggagcttgtggccggcccgacagcgagcaggggcaccagggagcagcgacggccagcagaggagctcgcgcacgcaggagctccacggctgggagagcgcttcaccatggatggagctggagggagcaccgcgagggagatggagcagagggagctacgtgccatgggagagagatga

SEQ ID NO: 39752 - DNA, 207 bp, Zea mays
  Peptide Sequence Number=SeqID_83127
atggtcacagaatttttagaacccaaactgccttatatgactgtccgtgatgcatttaactctgcattggatgaagagatgtctgctgatccttctgtttttttatgggagaagaggttggagagtatcaagatttctaagggctcgcttgacaagtatggtcccgatagggttcttgacacacctatcacagagttgtactattaa

SEQ ID NO: 39753 - DNA, 267 bp, Zea mays
  Peptide Sequence Number=SeqID_83128
atggctaagtcgaaggaccacatggcacataaccagtcatacaaggcgcacatgaacgacatcaagaaacccaagcgccaccgccagacctccaccaagggggttcttaacaaagctcatgatgatgctcggagtagtgctcaaaatagcttgtctgaaagcaataattcgaaggctacggtcactgcagactcaaaaggcaatttcactagcatttcattaatatccatgctcactgcattcccaatccacattgggtctggctag

SEQ ID NO: 39754 - DNA, 1155 bp, Zea mays
  Peptide Sequence Number=SeqID_83129
atgcccccgccacactcccacacgtggcgcctccatcacgccatcgccagccttctccacgcgatctccttctcaagccctgcgccaccatcccgccttcaatgccgctcgagccccgccacacttcccacgcgttgtgccaccatgctgccatcaaattcgtcaactccactgcgtggtgttacttcgacgccacccgagtccccgccacactccccacgcgttgcggcgttcgagccatcgctgcccttcccaagccatgtgcaaccatcccgccttcaacgtcgcccgagccatcctcaccccaactgccttcaccccacccgcaagtcatctcccgagcatgagatccgcttgcccgcctgcccccatccccatggcgcctcatggccgctcaagcgggggatccacccgccgggcatctccttgacctacggcagtagaggacacgacatggacgcgagggccacaggcggtgctacaggagctcatggagtggtgacacgctgggagcgcgtctatgctagggcggcgtcagcggccggagatccttgctccgtggtgctgcaatgctacgggcagcagaggcgaggacgagggggaggcgatccccgcccgagaaagaggcggaggggcgacaagttcatccccgtcgagctgctcggcgacgtcccagcctccagcatcccgtacgctgccttcggactccggtggagcgaggcacccgaggcaccgccagaggccgcgcaaccgccgcccgtgacgaggccgcctgtgcacttggcgcgcagaaacgagctgctgcacaaaaaaggtgcaaattttaatagcaatgttgcattgtccgaggtagatgacgacgatgaggaggaggccatggtggaacgttaccgagcacgccgcaatttcggtgcctccaggaagcacttagcctctcggagcacgcttacctcggtacatgatgaaccatatagtaatcaccacaggaaggaagtaaagcttatgcattactatgaggaagacaatgaggaagaagaggaaaaagaagatatttttcactgtaccaaagaattggtgtatggggacattgtgtgggcaaagcttggcaaacgccagccgatgtggccaggagtggtggtcaacccaactcagtag

SEQ ID NO: 39755 - DNA, 777 bp, Zea mays
  Peptide Sequence Number=SeqID_83130
atggattcttcctccgaagcccctggtcatctcagagaatttgtaagcttcctcccttctttggaggaagtcgttgtcagcccggatatattcatccatcttctggagcagcttctccaaagtttgtggaggcttcctggcgaagtattgagtcgcaggtcctggctgaagacccttgatcatggcctcaatgacaatttcattgggcactgtgggcgcctgtgccctcagtcgcaagaaccttcagacataagcatgaaggtattcctcatggtcttgtgtgcactggaacaaggcatgagctgtgactggcttcgtttgaaagccttggaagctgcctctcggagagaaagagtctcctggtttgtgtccaatggctacagtgcagtagcccctggcgctgttgtcttcttcggcggcataacgaaggctggtttgccgaaggttgtgaaaatggttcgcactcttcaaaccacccgagtcaacaccaactacgcccctccgccacgacaagttcctgtctacccagtggtagttgaggaaatccctgtggatctccctcgcattcgagtggagcgtggagtcatcttggaggacagcttggaggaacttctgcctacgcccaccccattggcagagtcactggccttcgcagctagatcatcaacctcagtactgcctgcaccagcagttcaagcttctgcacccggaggcgacgacctggacgactctggggacgatgatgaagatgacgacgaagaagaagatgacgattag

SEQ ID NO: 39756 - DNA, 210 bp, Zea mays
  Peptide Sequence Number=SeqID_83131
atgcacgacttcctcctggcactggcgtggcttggttattctggttggttgctggggcaggaagacgggctgccaggttgctctgacgcaggtattgatttcctcccttctggttattctgacggtactgctgctgctgctgaggaaactgcctctggtactgctactgctagttctgacgctaatgctggtgctggtgaccttggttga

SEQ ID NO: 39757 - DNA, 291 bp, Zea mays
  Peptide Sequence Number=SeqID_83132
atgggagtgcatgtgcttcccgagccaacgatggttcatgatggcactgtcctcgcgtatgacgccaatgcacaaccgtatgacacggtctcaagcggcacactgtgcaagccctgtgcatgcaccagacctatccctgagcctacatcaggtcccaaggccagcgatcctgtcaaacgtgttcggtcccatggggccaacggcttagttccttaccacgtggttaaagctaaccacaccggtctctactttgacacagtagaagtgggtaccctagttacggggtgctga

SEQ ID NO: 39758 - DNA, 1689 bp, Zea mays
  Peptide Sequence Number=SeqID_83133
atggccatgccgggggccggatctgggggaggaggccgcagctgctgcagaggaggagctcggtggaggagttcgagcgccacgcagggtcggaggccaggcccaagccgccggggccgggggccggggcccggccgcgcccgcgccgccgtgcgggaccgccaggactggcgaggagagaagctcgaggccgccctgcgcccgcgtcgggcagccgtgccgctgaggatccgccgagcgggggagcacgcccgcgccgtgcgacgtggctgggtcgccacgcccgcaccgtgcgccatggccccgtgccgtgcgccgccggggtcgggcgggtggggaagacggtgcagggtcgccccgcgcaggggaacgcgcgcccgcgccggggccgctcgccgtggccgccgcctggagattgaaggcggacggggtgggggtgcggctggctggatggaggtggaagaacgctgggaggaaggaggccgcccccgggagggaaggttgggcctcccgggggcagcgatgggaggcggcggctgggtgattattgccaaagttgttgagacatatctgcctggtgctattgttcttcaatgtggggctgattcattggcgagggatcgtttaggctgcttcaatctctctattgaaggtcatgctgaatgtgtaaagtttgtcaagaaattcaatattccccttctggtaactggaggtggtggatacaccaaggagaatgtagcacggtgttgggctgttgaaactggggtccttttagacacagaactcccaaatgagattccaaaaaatgaatatattgagtactttgctccagattatacattgaaagttccaaatttgaacatgccgatggccctgatcccacgccgccgtcccctgggcttccctcacccccactgctgctccccttcccccacgccagccaagacaggagcaggcgccctctctccccatggcgctgttgcctccatggaggagctcaagccccctgttcccctgccgtctctcggccagctatccgtcgtggccctgggcacaagcactgccgcgaccagcgcgtgtctgggcacagtcgtcgccaccatgggcagggatctggccgtcggcgtcgtgggtcgcgccattgccgccgccatggccgtagatctgaccgtcgtctccctcttcgccgcgaccttctccgtcgaccagcgacccctcctcatcggcgcgggcgctgccggtcggctcaccgcagccgcgaccttcaccagccagcacgaccacctctcctgtcgccgcagttgccgcggctctataggcagccgtcgtgcgcacaggcgcaacgcaccccgccgccgccgcctccctagcggggtccccccgggtctccttccctgcatcagcctattcgcgggcacgggcgtccccgacaacgtggctgcggttgtcgtcggtcagagacccctactgcgcaagtcggactatcgacttttcggagtccacaccggtctctactccagccgcaacattcgcacccttacgacgctgcgagtgcggggagatatcaacccgtcggttcctagcttcagcttctactccagtctcatcatgtacgacagacagtttcctccatttgaatcttcagatactacatttgtggctctatttggcgtagctactgcttgttga

SEQ ID NO: 39759 - DNA, 333 bp, Zea mays
  Peptide Sequence Number=SeqID_83134
atgtacgacaagctccggcgcagctgccgcttggacgcagtgcagagcggctgcttcgcgctgtccatcgtcaagcagggggacctcatggtcgtcgccaacgtcggcgactctcgggggtactaccttgctgatgagcccagggtgcacttcgttttacagctcagccaagagtcatcagtactcggtatgtcgcgcgcgttcgacgactactatatcgaggactgtggtgtcatcttggcgctagaggtgacacagaggaggaccgacaacaatgtccagttcgtcatcctcgccaccgttggggtagcttttgtgccggcttgcctttaa

SEQ ID NO: 39760 - DNA, 585 bp, Zea mays
  Peptide Sequence Number=SeqID_83135
atggtaccgatctggggagggagaaccgcgctgcctgtagaggccgcgatctccgtctactcggtcgccgccgccgggagcaccgccggcgcgtctatgcccgtctgggctgccgccgcgtgcgcccccgcctggagcgccgtcagcgcgttggcgcctatccgggctgccgccacgcgcgcccccatggggatgcgcggctgcccactgtgccgcctgctctcgcgctgcttccctcgccagcctgagctcttcgtcggtgttgtcgtcgacagaagcagagctgccagctctactgccacgcagaacctcgagctctgttgccgccgcacgtgcagcatccgccgcctccgctgcttctacttccgctctcgccgctgccagttctgccgctgcccaaccgtgctgccctcgccgctgtcgctgcagccgctgctgctgctcgctcgcgttcttgtgccgcggcgacctcggcctcctgctgacgccgcgcactcgaagtggccgagcgtagggacatggtgggctagtgaggggtcgctgcgtgtggaagaggctgtctcagacgaaaggctgctcgtctga

SEQ ID NO: 39761 - DNA, 1077 bp, Zea mays
  Peptide Sequence Number=SeqID_83136
atggcgtcgttcgctgtgtccggcgcgaggctcggggtcgtgcggcccggcggctcggcgcgatctggtggggagcggaggagtgcggtggacttgccgtcggtgctcttcaggaggaaggacgctttctctccctgcaaattggtggtttcttggttcttatcagtggagctcgctttggaatttgcaggcaccgttctgagctgcgctggtgctcctggaaaggtactggtgcctggaggtggcagtgatgacttgctttcctccgcagagccggtcgtggacactcaacctgaagaactacagatacctgaagcagaactgactgtggagaagacatcctcctcaccaactcaaacaacatcagcagtggctgaagcaagctcaggagttgaggctgaggagaggcctgagctctcagaagtgattggagttggaggtactggtggaaccaaaattgatggtgcaggcatcaaagccaaagcaccactcgtggaggagaaaccacgagttatcccaccaccaggagatggccaacgaatatatgagattgacccaatgttggaagggtttcggggtcaccttgactaccgatacagtgaatataagagattacgtgcggctattgatcaacatgaaggtggtttggatgcattttcacgcggttacgaaaagcttggatttactcgcagcgctgaaggtatcacttacagagaatgggctcctggagcatactctgcagcattagtaggtgacttcaacaactggaacccaaatgctgatgctatggccagaaatgagtacggcgtttgggagattttcctgcctaacaatgctgatggttcccctgctattcctcatggctcacgtgtaaagatacggatggacacaccatctggtgttaaggattccattcctgcctggatcaagttttctgtgcaggctccaggtgaaataccatacaacggtatatattatgacccacctgaagaggagaaatatgtattcaaacaccctcaacctaagcggcccaagtcactgcggatatatgaatcacatgttggaatgagtagcccg

SEQ ID NO: 39762 - DNA, 357 bp, Zea mays
  Peptide Sequence Number=SeqID_83137
atggagggcagctgcaatgggaggagagggggcggccagccaagggaaaagggtggccacctagggattacagatgataggttactgacacgtgcccatctagagacatcctcgaagctggtttttggttgcttggttgcttgctacatcaagcttgacgatgttgttattgttctaagacttgtatcttggtatcttcggactcaagtcagcatcacagcagaccagaataatacgaaggttgatacagcgccgaaggtgaacagtacccccgtactgttcacgctgatttggcattcacttttgcgtcacgcttttactctcatctccttcaagttgaaggtatatccttcataa

SEQ ID NO: 39763 - DNA, 390 bp, Zea mays
  Peptide Sequence Number=SeqID_83138
atggagtccctcaaggggtactccgtaaacacagtatttgaaaggactcgtgaagttgcgcgggcggccagccagccgctgccgcgggcggcgcacgcgcagccgtccagcctgctgccttggtcggccaggcaggcgttgccttgggcggctcacgcgcaagcagcagccaggcgctcgctgccttgggcggcgcaggcagccaggcgctcgctgccttgggcggctcacgcgcaggcagccaggcgctcgctgctgcgggcggctcacacgcaggcggccagcctggcgtccccgcggtcggcgcacgcccaggatttcagccaggggcggaccgtccgcaccaggagggcggaccgtccgcgctcagcagaaaggcccaacggctag

SEQ ID NO: 39764 - DNA, 1542 bp, Zea mays
  Peptide Sequence Number=SeqID_83139
atggaagagcagcgctgccgccacatggctcgcctcgtcctcacgcggccccacggccagcaagccaccaccgagtggtgggcgtcggaccctttgctcggtgtcatagtttatggcgccgagctctccacacgtcctgcttctccgatgccactccaggtccaccccctcctcctgctcctcttggtcagctcgcttccctcctgcgccatctcctccggttcctcctcttgcgccggccgcgacgacgcggccatcgtcgccgccgcgttccggcacgtgcgcaacttccgggccccgaggacgaaagcatgccagccggtcagagcgctccgcctcccgtcgcggaacctcaccggcgcggtgtcgtgggcggcgctggcaaacctgtccgcgctcgccgcggttgacctctcgggcaacgcgctccagggcgccatcccgggcgggttctggcgcgcgccatcgctccgcgcggttgacgtctcccgcaaccagctcggtggcgcgctccgggtggagcccaacccgcagctccagtcgctcaacgtatccggcaaccgcttcaccggcgtcgacggggtggaagggctctcggggctcgtcgcgcttgacgtgtcaacgaacaggatccgggcggtgccgcggggtctgcggcgtctgacacggttgaagcggctcgacctgtcctcgaacgggatgcgggggtggttccccggcgacttgccgccgctcggtggggtgcgttcgttgaacgtctcgtacaacaagttctccggcgtggtggacacgggcgccgtcacgaagttcggccactcggcgttcgttcacgccggcaatgcgtcgctggtgttctcgggccactcgacagagccacggcggccacggccatcacctcctcatggaaaaagcaaaaagaacggtggttcggccgggacgtcgacggagagcaaggcgacgaggagtagcaagaagaggaagcatctgagcatcgtggcggtggcggtgatctgcggggtggtgtccctggccatgctgctctgcctggtcgggtgcgtggcgtgcggcgtgctgaagtccaggcagaagggaggaaaagacgacgacgagaagaagccacaatggggcgagaagggcgaggaggagaaggaggaggacgtggtggtcgcggcggccaggggtgcatcggcagcgcccgtggtgctgttcgagcggccgctgatgcagctcacgctggccaacctggccgcggccacgtcgggcttcggccgcgagtcgcagctcgcggagcgcggcggccgcagcggcgcagcgtacagggccgtgctccccggcgaccagcacgtcgtcgtgcgcgtcgtggagggcgccatggccgggctcggcgaggacgacaacccggcggccgctgccaccgcattccgggagctcgcgcgcctccgccaccccaacattcttccgctccttggctactgcattgcaggcaagctcagttcgatcctggaatatgaatatttttttttgctgattgatattgattaa

SEQ ID NO: 39765 - DNA, 525 bp, Zea mays
  Peptide Sequence Number=SeqID_83140
atgtccttcctctacttaaacagtgcccgcggcggaggaaagggcggaggggcttaccggcagcgagatttcttcggtgaggtggccaagggtgtaggggaggtcgtgacggtcacgccgatgtgcggatcgtttcctgggatggtcggagtaggccggtccacatgcgcaggcgggggaggttgtcggcggcgagggctccggcctatccagggcggtagagttcaattaaactggtcagtgagcttcactaggtgcaagggaaggagttggtgcgagaaattgaactacagcttactgagctcgccggagctaagtgctgggtctggggagttaggtgaggcgcggagggagtacgaccgaggcttccctgctctttataggcataggcgcggtgcacgggcgggcttggaccagcgtggcacacaggcgcgcatggcttggcgcgggtgcgcgggctggcgtgcactgggcatgtcagccgcgatcgagcacgtggcaccattgcttctgcccgtgttctaa

SEQ ID NO: 39766 - DNA, 387 bp, Zea mays
  Peptide Sequence Number=SeqID_83141
atggcgagagtagcgtgtaccctccgtggtaagaggctggacggtggtgtatttgtgctctcggttgggttgtccgaggttcgatggacaaggacaactataggtgggcctaatgacttgggaggttccgtcacacctcatttcacttcttactcgatgcagtacaaggggtcaagcagtctcattagctgcgagaagcagacgactcaaatcgagtttttaaaccttgcaagggctcaccgccttgtcatacaatgctccactgaccccagctgccgccatgcagtgaccgcacttgtacccaccatagctagcatgggagacctagtctcaggacaagtgaggaggaaagtccgcgcccggcttcactcagtgaaagtttattaa

SEQ ID NO: 39767 - DNA, 312 bp, Zea mays
  Peptide Sequence Number=SeqID_83142
atggcgacaatctctaaaaagcgaaagcttgacacaacgccctcttctgagccgaaggtagatgagacagaagaagaagctcctccgacgccctctgccgctgaagtagccaaaattctaaagaggaaaggacagccttcggctacaaaggagaaagttgaagaacaaaagaagcgacgaattgtaaatgtaatggaagcaattgaacaaacaccaccctcagcttcacgaccaaaacaacgattcatgcagatgccgaagctgaagctgaaggtgctgccaaagccaaagatgctaatgaagccgaaatga

SEQ ID NO: 39768 - DNA, 339 bp, Zea mays
  Peptide Sequence Number=SeqID_83143
atgaggcgatcgggtcttgttgtgccagaggaggctattgtcgaaggtacctccactgttgaagctgaacagatcgtggctaaaggaggaagtgagaacgaaggtgaggaggacaacaccattctgagcccaatgaaacctagccatattgaatttggtaaatctactatgacgacagacgacatggttatgatgaaaaaattgggctactttgggaagccgagagcaagcttgtccggtttgccggggaagaggtggttccgcagccaagggaggatgaagtcgttgtttttaagagcttcttcagggcagggcttcaattccctctacatgagatga

SEQ ID NO: 39769 - DNA, 396 bp, Zea mays
  Peptide Sequence Number=SeqID_83144
atggggcaggggagcgagtccgagtgcgggcggggctcaaaagggagctggagtgcgtgggaaggcgacgtggtcggggatctcagcgtgcgtgcgcgctggtccacggtggttcgtggggaaggcggagctgacagggcggtcccactatgcagcgagggagagagcgagcacgcggcgaaacggttcagcgcgctgataggacgggctcgtgaggcagagagggtaaagggcacgcgaacgagggcgattggtgctgacagaatggccccactgggtagagggagaggggaagggagcgcgcgcggagagaaaactgccgctgacaggtggaacacacctgtcaggcggcggacgcgcgacctggcttggccgagctgggccggtttgggctga

SEQ ID NO: 39770 - DNA, 360 bp, Zea mays
  Peptide Sequence Number=SeqID_83145
atggcgagagtagcgtgtagcctccatggcaagaggttgtatggtggtgtatctgttctctcggtgaggaaacagttaagttttgttgtttctgctcgaaggtggtaccaaaggaggagccaaattagagatcttgtgtgcgggaggatgtttgcctcccagtttgaaaacaatatggcgcgcactaagactacccagtgcaaatcgactggacctcaaggtgtgcctcaacatcagctagcctcccggcatgaaggaagcagtagtggcggtaatgacccaattggagacatggaagcctgggtggaacaacttcgctcagaactacgtcacaggaatagggcgcgtgagcaggtgtaa

SEQ ID NO: 39771 - DNA, 414 bp, Zea mays
  Peptide Sequence Number=SeqID_83146
atgtggctcagggtggtaaagatcgtcgtgtggatgaacttaagctcctgttcactccggccaaagtatcccgccgcgaacgatcgcgttggcaccaccggcgttcgccattatccggctaggctaggttcctcgacgctttaccacatcacgtgtcgtggactgcaggatgtgaagaaatcaaagtgcgggggtgtatttgtaaagcgttacatgagcattcatgattatatatggctatatctagagaacgagaaggaaataaaagttgaagaagtgaggactacaccaccaccaccacctgaagaacctcaggcaggaaactgcttttactttgatatatgtggagcagagccgattcacctatcacacaaggcaagccccagtgcattttccacctccttgttattttga

SEQ ID NO: 39772 - DNA, 249 bp, Zea mays
  Peptide Sequence Number=SeqID_83147
atggggcttggtgtatgcagctcgctttgccaagggtggtttgcctcttggagaggagtgcgagatactttgatcagagatgtttggtttacaggtggtgatgaggatgatggttatgattatgcttatggtaatggtgcacgagaaacagtagacaatggtgtacaggttcgggccgctttgagatgcgtaacaccctacatcgtggcgagaatgctttatgtggtggattacaagggagctctctaa

SEQ ID NO: 39773 - DNA, 144 bp, Zea mays
  Peptide Sequence Number=SeqID_83148
atggctagagaaacaagagaaaccttaagattgaaagagctccaagtttccctctcaccgaagcttgaagaatacattccagagttgaaggacacgctgaccaagcttgaagtggtacataagatagtagatggaatttgttga

SEQ ID NO: 39774 - DNA, 645 bp, Zea mays
  Peptide Sequence Number=SeqID_83149
atgaatgatgtcgatcgtcttgaaggggtgcccctgggccttatatactcgaccgtggggcgttacatccgactcatcctcgctcagttccggtgtacagggcccctgcgcgggaaggtcgggtcactgttgcgatcactgcttgaatttgttgggccgtccgggcttacgccgacctggccttgtgctaatccgttctaccggccgctcctcccaggcccacgaggggatgaccttacgaattatggggcccttggacctttcgtgaggtcttttatccttctagtggacccgggggatatctgtccccgacaagcccccgatctttgggctgattttggaataaacgacccaaagatcctagacgactcccaggggatcgccgcggaggtatggactttcatccaggccgtcgagcgcgctgggctcgagggcttggatgagtcggagtactcctcggacgaggagaattcctccgactcgtccgaggagggtggcggcgacgacgacgacgacaacggaggcaacggtgatggcggcggcgacagcggcgagggtggtgacggcagcgacaagggtggcagcggcgacggcagcggcggcagcaagggcagcagcaagggcagcaacaaggccagtggctag

SEQ ID NO: 39775 - DNA, 657 bp, Zea mays
  Peptide Sequence Number=SeqID_83150
atgcctggtgggagtcagggaagagagctggtggccacgagctccttgttctgggcggctggcggcgacagcacagcagatgggggctgttcgtgctctagaacacgaagtgggcttgtaaggaaaaaagacacatttgctctcagtagatcttcatgttcaagaactcgaagtggacttctaagagtaaagagctctgtggattccagtgatgtttcgagttccagaactcgaagtggccttctaaggataaagagctttctggattcccatgatggttcattttcgaggtcacaaagtgaccatgtaggaggtagccctcctattgttgaggctgtaaccaaggacaagtcaggcatgaggacacttctcgatggatgtttgagtgaagatatgccttctagaacacggagtggacttgtcagaagaagccctactgttaagactctaagcaaggacaaatcagtcattaaggggctggcagatgggtgtctgaaagaagacaagcctcttggaacacgaagtggccttgttccaatcaaggctgaagtactcacaaaggggcagcatgatagatggctgaaaaatgacaaggctgctgcaatgcggagtgaccatggtggcagaagattggctgccaaggcaagcagtttctaa

SEQ ID NO: 39776 - DNA, 2007 bp, Zea mays
  Peptide Sequence Number=SeqID_83151
atggaaccggcctggtcgatatcgtttctggctcggtactacattgatccagtcagtggatatgaattccgctctttgaaggatgtgcacaactatcttgaaactggagatattagccaatgcgctgtgacaccaaagaagagcaccatctgcgaagatataacagaaagtcaaactcatactagtacatcaccgcagcacatgaggcctggtactgcgaataagggtattcagtgtgaaatattaacttcggatggtatcatggcgccatgggaggataatggaaatgatactgaacataccatgttaccagagcctgagagcttgaaagcaactcaagggtatggcaacaagcttgaaacttcagaacccacgagggttcaaccggtttctccacataatggttcaagacaaaccaaatctgttaaaaggaaagaatcaaatgcagaggtcaaatccaagaagcgtaaaaccagttctgctgtgactcgtgttcgagcgtcgccccgcttagctgcattaaatgctcatcttgatgtaagcatcgaacatgaagatgacatggttagcacaaatcatgtggactgggtacagactattgaagagagagccatcgatcaggcacagaaaagccaatcaggctcttttgatcagatacatggtaatctggaaagcactttcagtcagttacagttgagccaagcagaccctgctaatggaatgcaggttatacaggcaaacactaccattcattcacaaccaagccaattggatactctgagtcctacacagaaaaaacaggaaaacagttccaaacagttacaatctgtggtcacagattcttcgattccaaaacgaaccacacagaaatgcactatagatcagccaagccagccagacataaatcatatacgcacagatcaggaattcactgggaatcagttcccctcgagcctaccagttgacactgttatttcattaggggatactgaagaattcacagcgggtcactcacagccaagaaatagtgacactgcaggacaaattcaggccaatgaggaaaatactgccgatcaagtacagttgagcctggcagagacagtcattctggtaccggctattcaagaatatgctgctggttattcactgctgagcaaagctgacactactgatcaaacacaggccaatcaggaatacattgctgatcaagtacaatcgtgcctaacagacgcactcattccagtaaaagctattgaggaatacacaactgattattcacatattagtaaagctgacattacaaatcaaatacaggtcaatcaggaaagcactgatgatcacttatatttacgtcaagtagactgtctcgctgaaatgcagataattgagcaaaatttgtccaagcaacctcagctgagccaaccagacactggggatcaaatacgaattgatctggaaagcactaccaatcacttgcaaccaaactacgatgaaaattctatgctgcaatctggtttctcttgggctcctgaacagaacagaggagcccctactacagatttctggaaaaatgttgaaagtcaggcgtcatcggtttccatgccaataaatggagcgcctctttcaagctttccagcaaatgtcagattccaaaatgcagcagcagcagcagcagcagcagaacctgctttgccaccacaggttgctccaaccgaaacaggttccgatcagtctgggttggccttccaatcccttttcggaaacatctggtcagatccttgcatcgagtttgctttcaagacccttacaggcgacattcctgttctcgacgacacaacggctgtcacagactacttcccagagcaacaagacttgaataaagacccagcgccaaactgtgcaggctctgtgtttgacagttcaagaaaccacacacaagtcgacgtcaaccttccaccgcctgctccggatggtttctacgatggcagctggttccctccccaatga

SEQ ID NO: 39777 - DNA, 534 bp, Zea mays
  Peptide Sequence Number=SeqID_83152
atggggtttatactggttcgggttcgcaccaaactccagtgtagtgctgatcgtagtgttgcaatgagtgtgttacaacaaatgtgctcgtgtgggaagaaggagggggctctactcttttatatctcaagggtaggaccttacagaggagatctgttttctgctagggagagagagattggctcccctgagttgtcgtgttgtgttggactcagatctttggctcgccgggttgctcgacggtgggttggtcagccggagctgattggtggagagttggtcattggagttggtcatcgaggagttggtcagccgacttggtcgacagagttggttatcggagagttggtcagccggcccgcctcgcagagttggtcgacagagttggttatcggagagttggtcagccggtccgcctcgcagggttggtcggcggacttggttatcggagagttggtcagtcggtccgcctcacagagttggtcggcggagttggtcgtcggagagttggtcggcggagttggtcatttttaa

SEQ ID NO: 39778 - DNA, 222 bp, Zea mays
  Peptide Sequence Number=SeqID_83153
atgtgccaaatcaccattcagaagcagaaggagatcgcagaagccgaagctcggcagaatcagccgaagcagacttacgaagctcaaaaactgtcgaagctcaaaaagtcgttcctaagggaatgcagagctaaaaatcgccgaaactacaaaaagtcgttcctaagggagcgcagtttgtgtggcaagttcacggccatgttgagtgagcatggtgcttga

SEQ ID NO: 39779 - DNA, 345 bp, Zea mays
  Peptide Sequence Number=SeqID_83154
atgcaccttgtttgtatggatactctattaattctattaagccttgggccaggacatcaccatcccaggggccaggatatcacactcatgatctttggcgggactgaagcctacgacgacaagcgccgccttaaggaggcccacttcgaggtgcgcgcggcggaacctgacgtcccgcaatatctcatatgctcagagttctcgatagtcttcgaccgacgtgaccacctagacaggatcacgcttggcgcaaccgttgaaggagtagggggagttatgtctagcacctccccctcacggtgccctgaaggcaccaagggtgctgaaggttgcgacaccgcttga

SEQ ID NO: 39780 - DNA, 759 bp, Zea mays
  Peptide Sequence Number=SeqID_83155
atgatgaccgcgtcaaaaaaaagggaccgggaaaggggatactccgaaagggatccttctccgcgaaggaagagggccccgagccccctactgatcagaggttcgaaggctggcccctcggaagggttcgacagccgcctcagagcactcgggctccgcgcccactactggtcagaggttcgaaggctggcccctcggaagggttcgacagccgcctcaggccactcgggctccgcgcccactactgatcaggggtttgtaggctggcccccgaagggttcgacagccgcctcagagcacgcagagcgagggatgactctgggtacgtccgatacatggccgaggctcgggctacgctcccgaggtaccctaggacatttccgagaccagcaggagcgattctgtaacagaatcccatcagagggaggcatcgagccctcagaccctatcaaacgggaccgggtccggcaaatcacctgcagggtgaggctgacagcagccaagtccagcctcgggcgccataggaagctccgcctcgcccgaccccagggctcggactcaacctcgactccggaagacggtctccgcttcgcctcaccccagggctcggactcaacctcgacttcggaagacggtctccgcctcgcccgaccccagggctcggactcaacctcgacctcggaagacggtctccgtctcgcccgaccccagggctcggactcaaccttgactccggaagacggtctccgcctcgcctaa

SEQ ID NO: 39781 - DNA, 1482 bp, Zea mays
  Peptide Sequence Number=SeqID_83156
atgacggagatggtggtggcggctcggacgccggcccccgcggcggggaggtggggcgcggcgccgccgcaggagctgctggagaggctcaaggactacggccaggagggtgccttcgccttctgggacgagctcgcgcccgaggagcgcgaccgcctcatccgggacattgagagcctagatcttcctagaattgatcggattgtccgatgctcgcttagatcacaaggtgctcctataccaacctttgagcctgttcctgagtcaagtgtctcgacagtggatgacagaactcctgaggacaaagaaaggtggtggaggaggggcttgagagccatttcagaggggaagttggctgttgttttattggctggtggccaggggactaggcttggcagttctgaccccaagggatgtttcagtatcgggctcccatctaggaagtcacttttccaactacaagctgaacggattttatgtattcagaagctggctgcacagtgcactgatgccccaggtagcacagtgcaaattcactggtatataatgacgagtccttttaccgatgaagtgacccgaaagttctttgaaacccacagatattttggtttggagcctaatcaagtgacatttttccaacagggtactattccatgtgtatctcatgatggaagatttattatggagacaccatataaggtagcaaaggctcccgatggcaatggcggagtatatgctgctctaaaatctaaaaggttgctcgatgatatggctgcaaaaggtgttaagtatgtagattgctatggagttgataatgtattggtccgtgttgcagatccaacattcctaggatacttcattgacagaggtgtatctgctgctgctaaggttgtcaggaaggcatatccacaagagaaagttggagtatttgttcagcgtggaaagggtggacccctctctgtagttgaatacagtgaaatggatgcagctatgacaactgaaatcaatcaaactactggccgccttcgttattgctggagcaatatctgcttgcatatgtttactttggattttctgaaccaagtgacaaacagtcttgaaaaggatagcatttaccatctagccgagaagagaattccttcagtccatgggtacacatcaggattaaagcttgaacaatttatatttgatgtattcaactattctccttcaacagctctttttgaggttttgcgtgaggaggaatttgcgccagtgaagaatgctaatggtgcaacttatgacactcctgacagtgccagattaatgctgcttcggctacatagccgctgggtggttgctgcaggtggcttcttgactcattctgtgcccttgtatatgacaggagttgaagtttctccgctttgctcttatgctggagagaatctagaagctatatgcagtggaagaacattccatgcaccaagtgagatttcattctag

SEQ ID NO: 39782 - DNA, 444 bp, Zea mays
  Peptide Sequence Number=SeqID_83157
atggagatggggagccctctatctctcgggctgaattgcatcacatggtcgactcactcgtggaggccatgggaaggacgtttgatgaacgtctgcccgcaagaggacggaggctacatcatcgtgatccagaagaatttaactgagaagaatccagagatgagaattctggtcttggccatggatttgatcgcttcagcaatggccgtggaggttatggtggtggttgccacgctaatttcgataatccacgtggaagatgactatgtgcttagtgcggctgtgttcaacaggattatccgccaaacggattgcactctcattattgcattggagtgggactttgctcagattggagccaaagtcctggagggtttgcctcatccaaagcagttgcgcgcaacaccgtcctgcgacaacatactcgacctcaacggtggatag

SEQ ID NO: 39783 - DNA, 801 bp, Zea mays
  Peptide Sequence Number=SeqID_83158
atggaggcccaggcccacgcgtcatgcaaccggcacgccggttgctacgtgcgagcaactgcaccgccactcgcaccactaccacgcctcctcgactgcggaaccagcgggcaggagcagcggtcacgtcgtcagccaagcttacgtcccatccaggggcggcgagagaaccctctctcacggcatgaagacagcgtgcccgtgttctgttcctcgaacggctcgcgcacgtgcaacggccgcctcgtgaaccactcgcccgtcgcattaactccgcggcgggacaggcggcgcctcaggcaggagaagcaagcgacgcttcaccttcgccataatgaccgcgtcaaaaaaggaaacaggccccgagcctccctactgatcagaggttcaaaggctggcccctcagaggggttcaacggccgcctcagagcgcttgggttccgcgcccactactggtcagaggttcgaaggtcggcccctcggaagggttcaacggccgcctcaggccactcgggctctgcgcccactactgatcaggggttcgtaggctggccctcgaaggttcacagccgcctcagacacagagcgagggatgaccctgggtacgttcgatacataaccaaggctcgggctacgctcccgagaggctcgggggctgctctcgcaaacccggctccggccaaaccgttgacagcgtcaacataccagcccgagaacttgggacccgaccgtgcacccgggctatggccagctcgcatgagggaacaaccagaccagctgaagtgttgcgaaatgcattaa

SEQ ID NO: 39784 - DNA, 1875 bp, Zea mays
  Peptide Sequence Number=SeqID_83159
atgggcaacagcatcggcgggcggcgcaagggcgccaaggtgatgcagctggacgggacggcgttccgcgtgaagcctccggcgtccgcgggcgcggtgctgcgcgaccacccggggttccagctgctcgagtccgaggaggtgggcgcgcgggagcggctggagtcgctcatgctcacgcgccgctccacctccgacctctccctgccggcctccgcggccacggccacggccacggcgccgccgtccccgctctccgagtctgagggcgggcctgtccggctccggatgcgcttgcccaaggcgcaggtcgagaggctcatggccgagagccgcgacggcgccgaggccgccgcccggatcatgcagctctgcgccgccgctaataaccccgccagcggcgccgccacgcccgagagggggatcttgcggacgcccgagcggaggagcccgcggttcgtgcccactccggactggggcgtcggcgtcggcgccaccgccgcctcgtccccgcagacgcccgagcggagccccaggttcgcggcgatgacgcccgactgggggactgatgggttcatggtgccggcgggcgttgcgacggcgcccaggacgccggagaggtggcccgcgctgccccgcaccccggagtacgcgtcgcccgacgtcagggccagccggaaagagctcctgctcgatgaaatggcgctgatggaggctcgaatcactgatgcgattgagggccgctcctcgctctctgatacggaggtcacggtcggcagccacgcccgcaacatccccgacagcgtcgtcgcggacctcgccgccgaccacctcttcggcggggcgttcggcctggacaacctgacccccatggccgcccaagctccatctgccaaggaggtcccgcagccaaaagcggaggtggtggcatcgtccgagtcagagcccgcgacctacgccgagctcgcggccgcgctcagcaagtgttcgacgatagacctcaatcgcggcatctactccgtccccaacccggtcctccatcgtcaacacctactccgggactgcgacgacaaccaagtcggagtcgacgtcgacatccttcctacctccgagttcgacgagggtcccatcttcgacgaggagccctgcttccaccgcagcctcctggattcagatccagactctccctacgacttgttcgtccccgtcctgtcctcgccctgcgacgacgagcgcatcatcgcgctctcgtctgactgcaccgccaccaactccttccgcgtcggctcctgtgacgacaacctcgtcagagtcaagcagtcgtccgtggacacccagtctctacgcacggcatcctccgcaggagagttcgaggcgccataccgcgaccggtgcgagcagccacgcaggaacgaggccctcgacgtcgtctgcgaactgtaccgcgaccggcacgagcagacgcacgggtacgagacccccgatgcgccgtcgttctcgtcaggcatcgatgacgacatcgacgtcgtggaggagctccacatcccggtgagagcccaccagaaggagcaagcgcatgagttcgagcgcgccgaggacactgcgccacccagtcatgctctgtgctacgacccgcaccgcgccgatgtccccacggtgcactccgcgctcaaagtgttcgaccaaatgtctagccgtggctcggacgccagcccaggctttcgggatctggttttccttgtcgcgtctgcctcctcgtcctgcagcgtggaggatgagcgccccaaggtgccttcctccatcggcaacgacatgcacttggtctccaggttcctgtcctcaaggctcgatggcggcgtgaagaagccgtcgtag

SEQ ID NO: 39785 - DNA, 228 bp, Zea mays
  Peptide Sequence Number=SeqID_83160
atgaggggtctgcgaatgttcccaggcacgctgattggtggattcgagggatatgacccccatctttatcctaagaggcccgcaacggtccgagaaagggggaatgatgatcggttttggagctcagctagcgcgaaggtcgcgggcagcttgggcgggtcgtactgccgcgaggaatcggggaagaagatccacagggctgcggtcgcggggagcaagaagaggtga

SEQ ID NO: 39786 - DNA, 240 bp, Zea mays
  Peptide Sequence Number=SeqID_83161
atggggtggatgcccgagggaatagtgacgcccgatcttatacccgcgagggcaccgcaacggtccgagaaagggggaatgatgatcgggttcggagctcagctagcgcgaaggtcggcgggcagctcgggcgggtcgttactgccgcgaggaatcggggaagaagatccacagggctgcggtcgcggggagcaagaagaggtgaacagcataggcttcagccgcggctggtatcagtag

SEQ ID NO: 39787 - DNA, 501 bp, Zea mays
  Peptide Sequence Number=SeqID_83162
atggaggcaaatccaatggagtcgtaccccagtaaagaggtggagaacttgagggagaagctggttgaagaaaatttctacctaatcactgagctaggtgaacaaggacgagtctctgtacttctgctgaagcttgacgaccccatccctagaagaaaaccagctatcgtgttcttgcacagctcttacaagtgcaaagagtggctgcgcccactgcttgaggtcttcctgtctttgagatttgatggagatattggaaaagatgagattgaggagaaagaggtaaaccaaagaggaataaacattggcaaaaatgaggaggttccaaagcaattgccagttagtaataagaagaaaaccagacatgaactgatctcaaaagctagacaagaggttgatgcagatcttagagcaatttccttctctcttgatccgaaggagagaaaagggataaaaaagaaacaatttctgctctgtttgagacttactttcgcattctga

SEQ ID NO: 39788 - DNA, 498 bp, Zea mays
  Peptide Sequence Number=SeqID_83163
atggctggggagcaccgggaggataaggagggggaattttttgttcggtttgggcatggtggtggcctgactccttccggtataaccgttaagatggaggttcgttgccaaaccagcttttgccagaatgaagatggtttccccaagttgctgagagcatgcacagttcgcctcggaatcaggagccagccagagtatgatggtcgtgaattcgtcgagcatggcacagagaagatgcgtgcattggaagagcagcagctgcttgaggacgaccccacagtcgtgtacctcaccgcatacctgctcaccctggatgcacagtatgatttcttggctcggcaccaccgtcagatgattgcccgagcagaagatgcagagaagcacaactgtaagctccatgtggatctcaccacagcacaagcctgtgtagctgccttagaaagtcatgaagtcattgttgttgaagccctaaagcaagccaaggatgagcacgtctag

SEQ ID NO: 39789 - DNA, 207 bp, Zea mays
  Peptide Sequence Number=SeqID_83164
atggagctagcacttacccagcccccgagggtgtcgcgggggatgatccggctcggatgggtagcgagccgccgacgacccccgccgcctgtgctcgtggccagggtagctccgaccacctccgacaccgacccgcacaccggcgtgaccgtcgcgacctcccggacgtcactgaccaccccgccgaagctctactgccgccgatag

SEQ ID NO: 39790 - DNA, 216 bp, Zea mays
  Peptide Sequence Number=SeqID_83165
atgacgaggataaaggacaacaccctggcaggctttgctatcggacctaaggcacatgacgacttgactgctaatgttgggcctagaaggactcatctctgcttctccaaagtgaaccactttgtagcattcaacgaggcccctggcagggcgcaacatgacgagccacgccaagccccaggctatgaaggccaggggttggcgtcgcttgaatga

SEQ ID NO: 39791 - DNA, 687 bp, Zea mays
  Peptide Sequence Number=SeqID_83166
atggatcgtgatctgtcgccttatttcgtcagcctcagaaggcggggccggctcgcgcctctccctccatccgcgtggggcgaggctgaggccaccaagggcctctcagattgtgtcagtgctctggggcggaggagggcgggtgccgctttgaccgtattgctcttctggttgatgatgaaatcaaggttctcgaagcagatgaccgctctagtggtgtatttgatgcgagggtcgctagcggtactcgcgatcatggtgagattcctcggtggaggaggtcaggcttcctgggccctgatcgctttgcctttgccgtcgaaggagaagtcgaggctgtcgaaacagatcgctatttcagcagaccgattggcatcatggctggccatcctaagcttaaagaacttcgtcgtgaatgtgcaagcccttcctagtttcagtgtttcgaacctcgcttcgacaagtaaatttgttgtgcgcgttctgggcttcaaacggtgtgcgtggtgggcacaagatttatactggttcaggcataatgttcctacttccagtcattggtggcttgtgctaccgacaccattgatgatcaaagctcatagtaggggttacaagcgggcgatagagggaggagaggctccaaaggctcttattcatggtggtggtggttacaagatggaatattag

SEQ ID NO: 39792 - DNA, 306 bp, Zea mays
  Peptide Sequence Number=SeqID_83167
atgtcctactatggtagctccagcatcagcccccacgccttcccgcctcaactgtgtcatgccccagtagtgatcatcgctctagtggtccgcgaccatatccccacctttgacgacttggagttcgtagggatggtcgatggccgtgggtacctaatcttcaacacactctatacggactcaaacttagatcttagcccccctaagagcagtgaagaagaaccctccagcggccaggagaataaagactgcctgaccgctgtgctgcgaacacaaggctggcttatcccatgtggttcaggttga

SEQ ID NO: 39793 - DNA, 576 bp, Zea mays
  Peptide Sequence Number=SeqID_83168
atgacgaccacgtcaaaaagggttcggcaaccgcctcagagcactcggcctccgagcccattactgatcaggggttcgaaggctggcccctcgaaagggttcgacagccgccctagagcacgccgaatcagggatgaccctgggaacgtccgttacatgggcgaggctcgggctacgctcccgagtcggcaaggtcgaagagaccgcagtcacttcgcccctttactgaccgatctgacgggaaaccagcgctattcaccccgttccgactgctgtgccaaccaccagggtaaaactgagtcgcgatcttccacgagttcggcctcgggcgcaacagggagctacgcctcgcccgacctcaggcctcggcctcagcctcggcctcgggagaaggtctccgcctcgcccgacctcaggcctcggcctcagcactcggcctcgggagaaggtctccacctcgcccgaccccaggcctcggcctcagcctcggcctcaggagaaggctcaaggcacttctctgacagccaccttagctcgtgtacagggctcaaggcgcttctccgccagccacgttag

SEQ ID NO: 39794 - DNA, 1614 bp, Zea mays
  Peptide Sequence Number=SeqID_83169
atgactaccagccttgtggtggagagaagcgagccgggctgcggcctcccctgccctcagcttcaaggatgttcatcatccgcgctggggaggagggcgagccgagtcggggctccgccttccgcgtgggctggcggcccgcttcttcctccagcattcgggggagaagcgcgttctccagccttgcgaaggaggcgaacttcggctacacggggtcggccgtctgaggcaccgtcagctgcctcgtgtctggctcctcggcctgggtggctttggtgccgcctccggtgctgcctcctgccgcttggacggggcgtgcatgtccgtccaccgcacgggcaacggtcgcgtcttgcgcaggtcggccacatccacggcttctcccgcgccgccggccgccccggagggtcgtacaagacgtcgtacgccgcgggggcggcggcgaggtggtcgctgccgttggaggggctgatgtggtcgccaccgctggtgaggctgcccactgcagaggtggttgcctccgctggtgagaccgtcagtgccacctaccgccggaccctcggctctttggctttaatggcctcattgtcgccccccgtaggaagacggggccgaggaccctttcgcaacgacgtacatgctgagatgatcgccgctgcttggcgagtcgttggtgcagaggtggccgccaccgtcggtgctgatgtggtcacctctgctggcgagccgctcggagctagctatcccgtggcccttactggtgtggaggtagttcatacctgcagagtagaaatggaactagggctccacttgaaaatagatgtaatactttcgctttttgtaagggcggtggagcgtgcaggcccacggtacgggaccaggctgagcggctgcatgggctctggaccaccccaggagactaatgcccattctctagctccgatcccaaggcccatggtacgggaccaggctgagcggctacacgggctccggaccatcccatggaacggggtcccattctctagagccggcccccaggctatcggacctcccaactttcgtatcaggggccctaaactgcaagcctggctgctcaattcggatgtcgccatgtcagacaaatgggaaccgtacggaccaataggctgggtttatggggacagaccccaccgggttgtcgtacacggtcctacccagctgggggagagttacggagcccttcttggtttggtacttgccgtagggctaggtcccgaccctgggtccccacctgcatttgacacaggagcccttgtctctggttgtggtcacttccgcgtgtacctgttggttgcctggatccatgggggaatccagaaggctgtcttcaccagagtaagagcctccgatgaagacatccttcaggtccccttcgggcgactgatacccgaggtcccgctcagccgcggccacctcgccatcgtccaccttttctttgccagattggcggcgaggtggagagccgtctttggaagactgctcacgctgctcactgacgcgtttcgcgagtttcacaagatgcgaagagaattggaccaaggcaatgaggatgcaacacctcaaaagaagacataa

SEQ ID NO: 39795 - DNA, 561 bp, Zea mays
  Peptide Sequence Number=SeqID_83170
atggtcacgggccagtcagccgtgggaataggcgtggcagacggcatgaccataggcgagtcatcagcaattacatcaacaggcgcgcaggtgcagcaggccaaccaccaatcagactctggccccgcctgcagactcacatcctcctctgaggtgggcccgggggccactgtcggtaccctgaatcaggggtaccctcttctacagtatgaaggcgctgcacccgtacgacacctccaggtcacacggagagcggcacccgaccccaccacatggacagacctaaggataccacatggcaagaaaggacaatacgtcccaagaagcactgattgggtccggacctccgcagaagaacaccggacacctgtgagtacgagcccggagctcccaaggagacatgtccggtccccccgagtgaggtccgggccttggcagggtcctgggatggagaagaccctgacacaagcaagggtccggtgccgacacgtgtccaagtcttgccctacgctccccgctcaggcggaaacccaccgcgtccgcatggcttgtggcccataa

SEQ ID NO: 39796 - DNA, 336 bp, Zea mays
  Peptide Sequence Number=SeqID_83171
atggcggaagaatgccaatccccatggggttgcactcctctaacaaaaacaagaggaagacaagatcggcggcgccaccacgagcgtgagctcttcggcaataagatcgccggaggagacgaccctgacgcggatccctctagagaacaccagtgcaccccatctggaggcctagaaggtggaagggcgtggtggatgcaagtggagcgaggaatggctactacctgggagatcgaccgcattcttaaaggcagatctccccactcgtgcctagagatggcaatgggtaaatacccaccgggtattactaccccatacccatacccatacccatga

SEQ ID NO: 39797 - DNA, 597 bp, Zea mays
  Peptide Sequence Number=SeqID_83172
atgacccagacgactctggtgatgatgatgacgatgaagaagaataagaagagattgtcaacgagaaagccaatggtgaacagcaggatcacttcgtggggatatggcatgacgttctgcatgcgttgggatcctatgtccgacccctgtgatagagggttcaagactctatcagctcatgagtctctagcgctgctatccacctacactgcttcggtcagcgatgctgctaggcgaactctatggtccctcagccacacttaccggcagcagttgcacaacatgaagtacaggcatcttcctctgtgtcttcgtggagaaagccagaccagcattgttctaggtagagctggagaagatcgtctcaacaccctagtttgtgtggtggtaggtcttaacaccgacctagatagtgctaccctggacctctccagggtacacttagagctggaggatgcacacgcaaggattgcagccctggaagctcaactagaaggaagggatccccctgaagctcaagtccctggcatggcgttgtcccctccccgcaagaggatcctctatggagaaccaggatccatcaccaggttgttatag

SEQ ID NO: 39798 - DNA, 4348 bp, Zea mays
  Peptide Sequence Number=SeqID_83173
cattgatcagttctttgaatgttttgaggaattgaggaactcccagtcaagtttaggaaacagtggtatatgggactggacgtgttcagtattcaatgccataagttttgcatccactttagcttctggatctgatcaagttcctaaagaaccagttgtcgagaggaccttacgagcctccatcaccgagatatctgttcttcttttgttcagtgatgacacagatataaaaaattccagtgttcctatcagtgcattggatgatatgagacattctgaaatgttttcgagctgcctttcctctgagcattttgagaaatcaattatatctcctgctacagcttccagcttaaatatgcatcatctcaaagccaagtgtgagaacattcatcttgatctacagacttatccaaaaaatgtaaggctcaaggcatcaattgcccaaattaaacttgatgaatactaccacgccggaaacaatatttcagatgattcaaaccttggtaatcacttcttgaacaataacttgcggcaaggagttcaagcttccctccctcagtgcctgtttgctgttggagatcattcggtggaaacctatgaattttgtggcaatagttcaactgaattgactagagttgaattgctaaaaacttttggcgagtgcacattctgttatgatgtcagtaccaaagatcaagatggcaatttagtgagctcaacttccatgtcgatctatttggctcctttgcttttatgggtgcactttcatacaatatacatgctactgagttttgtaagtaatgttgagtctgatttgtcacatggagagcataaaattcaaaagcatggtgacgaaaagggaagcagattgactaccagcacaaccatgtcctcaagtggaagtctaaaagttcagatatccctagcacaggcaagaattgtcctgtgctttccatctgagttttcatgggatttgagccacccatctgtcctggataagttcctggtgatcgaccatacttcatgtctgaacatggtagaaactgcatcacaccctcaaaacgaaatgcaaaatgaggttcatcttagcaagtcgtgtacctcaatacatttggctgtaggggacatagatgtatatttggttaagccagtcaataatgtattggttggtagaatctgttcttcaagtaggcaaactttctctgcaatgaaaattctttctgttactggatccagttataatgactctggcatcacactgatcaggagaaatatattggaaatttgcactgaattgaatgaaacagtggaagttggtcctttattacaggcagaactaaaaggatcctggaactctgttaagttgaatgtttcaaaattttgtcttttctcctgttcaaatgttggaggcctcaacaatgccagttttctttgggtgaatcatggtgaaggtgagctttggggttctgttagtgctaagaatgataaaatccctggagaaagtaaagattttcttatagtggcttgcaaggactctgcctgcaggcggggtgatggtgaaggtactaatgtgctgtctattggtgctgctggctgttctgtgacccacatcaggaacccaaagctaaaagagaattacacttctgttgatgttcgttctggcacaattgtagcacctggtggccgtatggattggatcaatgcgatatgcctgctgttcagttcaggctcagatagaactgaaaagtcagatgatagtaacacaccaaatagctatcagtctggtgaaccttattcatcatctttatttatcgagttggctgatgttgctgttagctatgaacctcattttaaacattccactctcagtgctggagcagccgaccgcaagtttttctcatgccttttagctgcatcatcatttaaactccataataaatctgcatcagcctctgcagctactgattttgatatccaattacgtgatcttggagtcctcatttctcaatcatctggttcaacaaatggtacttgcagttatggtgtagattaccttcgtcaagcaggttatactaaggttgtccagaacacattcattgaagcttctctaagattagattcttccttttggaagcttgaaatatctgattcccaatttgacattggtacatgtcatgacacaacttatggtcttattggtttgggatctcaactccagcagctatatggtccagatatgcaggatgctttagatcatctgcagtctaggtggaatagtgttcagcaagcaaacaagcaaaatatggctgctgatgcatcagacaagtctgagagcagtttggagattttggtcgattctggggattaccagtcagatggacttcttgatgatattattgagaatgcttttaacacagaggattgcatggacaccaatttttgggagaacaattaccatcacttatttagtagcagtgagacggatgatggatttgagctgaatgcggccacttcacatgtatttcctatatctactccagaaggcaatgttactcaaatatcactagaacagaacgtctgtcctgatcaaatcattgattcatattgtgtgcctgaatttcatcaatcattatcaactctatgtgatgaagagcataaatgtacatctggtgacaattctcatagaaccctggaaagtgaagatgctggatggtataacaatgttcccttaacaatagttgagaatcatgttttgaaaaagaaaaacgagcaagtacttcaacacaaagtgtcttctgtttgcagtttgaatcctgatgaatattgtaatctgaaaggaaaggttcatattcatgatatagatgtaaagtggcggatgtatgctggagatgactggttattacctcagaaagatttgactagcttaacatgcacagatggaagaaataggagctcttcactggaatttactgtgagagggctcaatatccaagttgacatgtatccaaatggggatgtttctatatctaggctatctgtagctgctgaggacataactctttgtgatcaaagtatccatgctccatggaaactggttcttggatgttacaactcaaaggattacccaagagagtcatgctccagtgcattcaggttagaattggagtctgtgaggccggagccacaggctcctttggaagactacaggctccatcttgagattttgcctctacagttgcatcttgatcaagagcaacttaacttcctaataaatttcttcaagaatgattcatgtaacaatgatcctcatttgcattgcgaaaatgatactgttgatgtgaagagcacaagcaatggaagcaatatggttgtggatgaggcattacttcctttctttcagaaatttgacgtaaagccacttattctgcacattaattatataccccgtcagtttgacccgattgccctaagcaagggaaattacgcagaacttctcaacattcttccatggaagggaattgatttgaagcttaagcatgtttctgcaatgggcatttacggatggaacagcataggtgatacggtagcagcggaatggttggaagacatttctaaaaatcaggtgcacaaattgctaaaagggcttcctccaataagatcactagttgctgttggttcagggaccagaaagttggtctcgttgcccatcaaaagctacaagaaggatcggaaattgctcaagggaatgcaaagaggcgcagttgcttttattagaagtgttaccattgaggcagtagggcttggagtccatttggctgcaggagctcatgatatgcttgtgaagacagaatgcgcccttacaactgttccaccacctttagcctcatgtgaagtgaaacgaacaaagcacaacattagagctaaccaacctgaaagtgcacagcaaggaatgaaacaggcatatgaaagtttaactgacgggtttggaagaacttcctctgctatcattggcaatcctattaaagtttataaccgaggggctggtgtcggatcagttctggctactgcaatctgtggagcaccagctgctgcagtagctccaatctcagcatctgctcgtgctttacattatgcacttcttgggctaaggaacaggttgaagctgtgtttagaagcggcaccaataagttgccttgaaggttacctgcaaacaagaattgggggggacgatttattgaaaaccacaccattcctacttaaccaaatagcccaacaaattgccgatgcaacggttaatagtgtacagatcgtaagacagattatatttggcatcaaagccacacactaa

SEQ ID NO: 39799 - DNA, 1233 bp, Zea mays
  Peptide Sequence Number=SeqID_83174
atggggttcttggacggcttccgtcccgacacgctgctaaagcgcgtctgcaagtcgctgctcaagaagcggctgggggatctgatcctcggcgacctggacctcgatcagttcgacatccagcttggccacggcacgctgcagctcaacgacctcgctctcaacgctgagttcatcaaccgtaagttatcaggatcccctattacgctgaaagaaggatcaataaaatccttgctagtaagattcgctgctagctgcgagattgttgttgaagaattggagcttgtgctttctccatctgttgcaagtgaagttgatgatgtgcatactgaatgctctgtctctggtagtactagtgacacacacactttagtcaagatccaaagaaatgaatccgatagtaatcagtgttccacttctgtatctcgagatgtggatgatggtgtaaagagaattgccaatgccgtcaaacggtttctgacaagctttaatatcaagttaaagaatgcctatgtcatatttgatcctcaaaccagtttgagtagtagatttccagaaactagtcgatctctagttttccgaattaaagagttggaatttggaacccaacttggtctatttaaactggacaactttttaactttccgtgaggcagtcattgagtttttgaagatggatgatgtcgacacactgcttcaaaatgatctaaatagaggaacagctgacatttcagcacatcatagtactaccgcagtcttaaccggtcccattggtggattctcagggaaactcaatttaagcatcccatggaataagggttgcttgagctttgagaaaattgatgcagatgtatcagttgattcattagaattacgtttacaattcagcagcatccggtggatcatgaatgtatgggattctctccaaagaaagccagtagacgaacagagttgtgttcataatattgcagatatctctattagtgcttcgagctctgcctactgtccacctgcttcaagctctttgaagccatgttcagattctgtgatagccagtgactacatggcacagagcacattttctcaaaacaggcaggataaagttcaggattctttccttacaagcgcacacgtgataacagactggatggagcctgttgctcgtaaggatctgtgtgaccctgattcagattgtgatgaaaggtttgtttctgccctgcatttcattccttga

SEQ ID NO: 39800 - DNA, 432 bp, Zea mays
  Peptide Sequence Number=SeqID_83175
atggatatagaagtagcattttacatcccggacaatattcacctagaaggttgtagaagcaggctctccccctctttcggctcaggaggattttctaggctaaggcagaatagtgaaggacagacgtcgaggagccccgccagggaggccgacagcagcgtacgcgtctgcaccggtcatagagtccgtgcccgcggcagaatagaaggggaacgacggatccgaccgggaaggccacgacagcgacggatccagccgggaagacgcgatccggccaaaggaaacgacggatcgagccgggaaggtcgcagctacgtggatccggccgagaaggccgcggcagccatggatccaacgaaggcgatgaaggggtgggcggcggggcgggtccagccaggcaggggcctgcgccggacctggcaaggggtgtga

SEQ ID NO: 39801 - DNA, 1005 bp, Zea mays
  Peptide Sequence Number=SeqID_83176
atggcgcacgcggacgccgccgagctggtcaggggcaagcttgtcgccgtggttggcgccggcaagtcggccatggacatcgtcgcacagtgcgccgaggccaacggtagcagatacccgtgcacaatggtctacagaagcgcccattggatggtggatcctaaagttgctcggcgtgtgaaattcttcaccttcacctcggctcgatggaccgagttgatggttcacaagcccggagaggggttcctgctcagccttctcgccacgacactgactccactgagatggcttatctcgaagttggccgaagtctactacaagaggagcatcccgatgcagaagcacgggatggtcccggactgcagcttctcgcaggggagcctgggctggcggctaggcatactcccggagggattctacgacagggtggacgacggcagcgtggagctccggaggtgccgcggcaccattgccttctgcgcggacggcctcgtcctggacggcggcgccgtggtgggcgccgacgtggtcatcctctccacgggcttccacatcgaccagccgctgcgggacgtgctggcttctccctggttcggcgacatgatagtcgcggcggacgacggcagcgcggcagtgctccccctctacaggcactgcgtgcacccgcgggtcccgcagatggccgtcgtcgggtacgccgagagcggctccagcatctacccgtacgagatgatggccaagtgggtggcgcacctgctcgacggcgcggtccgcctgcccgccgtccgcgacatggagcgtggcgtggcggagtgggcgcggtggggccgctgggcgaggcgggcgtgcgggggcttcttcctcaagtcgtgcatcgcctccgtcaccacgtggtaccacgaccagctctgccgggacatggggcaccgccccaggaggaaggccggcctcctggcggagtgcctgcagccgtacggcccaacggactacgccggcatccagtga

SEQ ID NO: 39802 - DNA, 414 bp, Zea mays
  Peptide Sequence Number=SeqID_83177
atggctccagttttatactttgagatgcgtgagaaatctagggagggagcaatgaccgaggttggcgcgtgcattcttcatggtgttcggtttggtgaggaagatagacctaatagggtgggaccacatgtctgtgtcatgagcatgccgagccaaggtggtgtggggctgaccgagtgtccccacgcgtcggtggaagccaggtcgggtgcgtggtgtgtggctgtcctgttgggcccgcatgtcggcgctggggacagcggtgttgggtggagtgggccgcgcgatgctactgggtcgggtgagcgggaggagaaacaggtcccacggggatgcttgcttgaggaggagcagattgggtttgttgaggctgttgtccgagactgccatgagctggtgtgccttgaggtgtag

SEQ ID NO: 39803 - DNA, 1083 bp, Zea mays
  Peptide Sequence Number=SeqID_83178
atggcaccacgcagtaggccttcgtctaaaaggcctctctggttcatcgtgttggttgcatttgtctgtgcagtagccattggagcctacctttatactccacggcattacacagcatgttatctggtaccatcagaagcctgcaattctcggcctcctccagaacctgctagggtatacactgatgatgagatcgctgctcgtgctatcatgagagacatcatccgggcacggccagtgcagtcaaagaatccaaaaattgctttcatgttcttgacgcccagttcattgccatttgagaaactgtgggaaaaattcttcatgggacatgaagaccgatacaccatatatgtgcatgcatcaagagatagaccaattcatgcaagtccagtattctctggcagggatattcgaagtgaaaaggtgatctggggcacaatttctatggttgatgctgaaaagcggctcttggcccatgccctacaagaccctgaaaaccagcattttgtcttgctttctgagagttatctcatggagacaaacgtcagttttgttgactgttttgatgatcctggtccacatggagcaggtagatattctgaccatatgttacctgaaattgtgaagaaagattggagaaagggtgcacagtggtttacagtgaaacggcagcatgcagttcttattcttgctgacaccctttactatgggaagttcaagcgttactgtaagccaggaaatgagtggcataactgctattcagatgagcactacttgccaactctcttcaatatggctgacccgactggaattgcaaactggtcagtgacgcacgtagattggtccgaagggaaatggcatcccaaagtctacagggctgtggatacgagcttcgagctgctcaagaacatctcgtccattgatgagagcgtccatgtcagcagcaacgcgaagcatgtagcgcagaggaggccgtgcgtgtggaacggcatgaagcggccctgctacctgttcgcgcgcaagttctaccccgaggcgcttggcaacctgatgaacatattctcgaacttcaccgtcatctga

SEQ ID NO: 39804 - DNA, 2469 bp, Zea mays
  Peptide Sequence Number=SeqID_83179
atgaggaggatcaggcttgcctgtttgcttgttatctttgtgcaagtgcaatgggcggcccttggaacgcatgatgtgtacatcgtgaccatggaaggggatccggtcgttagctacagaggcggtgtccaaggatttccagcaaccgctgtggattcggacgaggaaattgatctaaccagcgaggctgtcaaatcgtatgccctccacctccgaggacaccatgacaagctgctagactcgcttttagtagaaggaacttacgagaagctttatagctaccatcatctcatcaatggcttcgcagttcacatgtcgccactgcaggctgagttcttgaagaaagccccaggagttaagcatgttgagagagacatgaaggtacagaaattgactacacacacacctcagtttcttggattgccaactggggtatggtcaacaggaggtgggcttgatagagctggtgaagatgttgtgatcggtttcgtggattctggaatttaccctgaacatccgagcttcgctgcgcacaagactgatccatatggacctgcccctcgttataaagggaaatgtgagatggatccagtaacacaaagaagtttctgtaatgggaagatagttggggctcagcattttgcaaaagctgcaatggctgctggcgcgtttaatcccgatgttgaatttgcatctccattagatggtgatggtcatggaagtcacacagctgcaattgctgctggaaacaatggggtcccagtgcgaatgcatggtcacgaatttggcaaggcaagtggtatggccccacgtgctagggtagctgtctacaaggttctttacaggctttttggtggttacatagctgatgttgtggcagctattgatcaggctgttcaggatggtgttgacattctcaacctttctgttgggcccaatagcccaccaacagctacacggactacttttttgaatccttttgacgctgcacttctttctgctgtgaaagctggggtatttgttgcccaagctgcaggaaatggtggaccatttccaaaaacactggtgtctttcagcccatggataactactgttgctgctggagttgatgaccgcagatacaagaatcatttaacactaggaaatggaaaacttctctctgggcttggagtatcacctgcaacacatgggaatatgtcgttcagcttgatttctgcagctgatgctctattgggttcatctgcaaccaagtacagtgcattagattgccagaggcctgaactattgaataagaggaaagttcaggggagaattcttttgtgtggctattcgttcaattacatttctgggacagcttcaataaagaaagtgtctcagacggccaggaatcttggagcagctggctttgttgttgctgtggagaataattacccaggaacaaaatttgaccctgtaccattcagcatccctggaattctcatcacagatgtcagcaaaacggaggatcttatagactactacaattcttccaccataagagattgggctggaagggctacagccttcaaagcaacagcaggtattgcagatggtttggcaccaacactatacaattctgccccccaggttgcactgttctcttctcgaggacccgatgttaaagattttagctttcaagatgctgatgtccttaaaccagacatacttgctcctggcaatctcatatgggctgcatgggcgcctaatggaacggatgaatcaaactatgctggtgaaggatttgcaatggtttctggaactagcatggccgcaccgcatatcgctggcattgcggcactgataaagcagaagaacccaaagtggagcccctcagcaataaaatctgccatgatgacaacggccaatacactggacaaagggagccgtcctctcagagcgcagcagtacactgcatcggaaatgatgacactttctcgggccacaccgtttgattgtggtagtggcgctgttaacccaaaagctgcccttgatcctggtcttgttctagatgcaacccacgaagagtacatcgcatttttgtgctcgatccctgacgtcaaccagagcgaagtgtcaaacatcgccggttcagcttgcaactccagctccaaggggcgtcaacgccccttcgacctcaacctcccctcgatcgccatctctcagcttcgaggcaccgtgacggtgacgcggaccgtcacaagcgtgtccgaggagaccgagacctacaccatcatgacgagaatgccgccggaggttgccctggaggtgacgcctccggcggtgacggtgctgcccggagcatcgagagagctagctgtgaccctgacggcgaggtccgtgaccggcacctacagtttcggagagatcgccatgaaaggcgaccgcggccacctcgtcagaatcccagtggtagctatgggattcaagtag

SEQ ID NO: 39805 - DNA, 2523 bp, Zea mays
  Peptide Sequence Number=SeqID_83180
atggccgcactccgcctccccgcccagccggtggcgaggtggccccaccttccttccgcctacgccgccgccgccgccgcgcgtcgggtctcggcccctcgcggccatctcgcggcgcggcgggccaagggggaggagccgccggagccgccggtgaggacgctgctgatcgacaactatgacagctacacctacaacatcttccaggagctgtcggtcgtcaacggcggggtatgtctgcgcatacttttggagtgtggagatatacccatcttgggtgtctgccttggccaccaggccctgggatttgtacatggtgctgagattgttcatgctccagaagctatacacgggcgactcaggcaaggccttgaattcattgaaattgagcacgatggatgccacctctttaatcgtgtcccctcaggtagaaattctggcttcaaggtagtgaggtatcattcccttgtaatagaatctggttctctacctgatgatcttacatcgatagcgtggactgcttctccaaatttgctttcttaccttgaaagtgatcgaaccaatgttagtaccttcttgggaacattggataacaatttaatgagaaaccctctagagtacagtaacaatggtggggaactatccaacataggacatgcttgtgagtcagatgatagccgagttatcatgggcatcaggcactctagcaggcctcattatggagtgcaggtcaattctgcaagtcatcatgattctattcctaaggacttgttgcatactgaaagaatggaactttcagagtctgtacttggaaagagagggattgggaagaagtgtttacgattacaatggaagaagattgaaaattttgtctgtcccacagtaggctctgaagacatatttgcggtgctttttggccatcaaagcggtgaagacacattttggttggatagctcatcagttgaccagaacagggcacgtttttcattcatgggtggtaaaggtgggtccctgtggaagcaaatgtcattccacctatctggtcaaagagccaattgtggaggaatgcttagtatccaagatgcttatggatttactgccaaaaaatttatcaaagacggcttcttggagttccttaacaaggagattgagtccattcaatacaatgagaaggattacgaaggactgccctttgaattccatggtggcttcgttggatatcttgggtatggtcttaaagtggagtgtgatgcatcatcgaacaaggccaaatcaagtactcctgatgcatgcttcgtctttgctgataacactgtggtggttgatcacagcaatggtgatgtgtatattttgtcactgcatgatgaattttattctagtaatggagatgggatatgcaaaaattcaacgcatacttcatggttagtggagactgagaagaagcttctcaggttgggtggtatgccctcaggatcaccaattatccgaaagacacatgctagatcatccagtgtgcataagcaggcaggatcaccaattaatggaaagacatatgttagatcatccagtgcgctgaagcagagttttgttgtagagaaatcaaaggaccaatatgttagagacgttcagaattgcttggattatatcagggacggagaaagctatgagttgtgcttaactactcagatgaagagaagagcagactgtataaatgcactccaactctaccttaaactgagaaaacaaaatccagcgccttatgcggcctggcttaacttctcctcagaaaacttgagcatatgttgctcttctccagaaaggtttctacgactagaccgagctggagttctagaagcgaaaccaattaaaggtactatagcacgtggcagaacaccagaggaagatgaatgcttacgtctgcagttgagatacaggcaacgctcatatgctactgctatattttcccttttgcatgtgctcaactccaccagcgaaaaagaccaggccgagaacctgatgattgtcgacctcttaagaaacgatctcggcaaggtctgcgagccagggagcgtgcatgtcccacgcctcatggacgttgaatcatacagaagtgttcacaccatggtgagtaccgtctgcggaacaaagaagccagatctaagccccgttgattgtgtgaaagcggcctttccaggcggttcgatgaccggggctccaaaagtcagatcaatggagatccttgattcacttgagacaagcccaagaggagtgtactcaggatcgatcgggttcttctcgtacaaccacacattcgacctgaacattgtgatccgaactgttatcctgcacgacggagaagcctcggtcggggcgggtggggcgatcgtagcgctgtcgagcccagaagcagagtacgacgaaatgctgctgaaagcgaaagccccgactgaggtggttgaggatctcgttcagacgatctacagctcagaccggtcggattccatgcagacaactatcagctag

SEQ ID NO: 39806 - DNA, 396 bp, Zea mays
  Peptide Sequence Number=SeqID_83181
atggaccgaaggtccatgaaacctggtatcagaggtaggttatcctcaccaccaccagccgcccatccctcaccaccaccagcagccacccatccctcaccaccaccagccgccgcaacgccctcccacccgccctctccagctccagatgcattcactcggctcgaagagagttttggccgtttcgcagagcagtgggatcagttcgttgtgatgttccaccgctacaaggagaagacagagaaggaactccaagcagcggtgcggcttcaggcggcagcgcgagggttcctggcacgccgccaggtgccaaaggttcacaataagccaataaaaagaccaagaaatggttcaaacaaagagagcaaaagacaacccaaaggcaccctggtctag

SEQ ID NO: 39807 - DNA, 112 bp, Zea mays
  Peptide Sequence Number=SeqID_83182
atgtggatggggagtgttaggagaaggggcgagagaaatgcagcccacaatgagatagagccgcacgcggcgaagaactcccaggaggcccagctcatcgactcgatgagag

SEQ ID NO: 39808 - DNA, 258 bp, Zea mays
  Peptide Sequence Number=SeqID_83183
atgccgagaaatattggtaaatcggtaagcctagtacctgatttgaaccttgccagcggacatatccccctcacgcgacctgagacgtggtctccccatttccggttatggtggggtacaagtgcggtcactgcacgacggccagtcgggggttctctggaggacatggttgctggagtgacttggccgtccaccttaccaccgggatggactgtcgagtgggaccctgcctcggctgaggaggagcatgaggagtga

SEQ ID NO: 39809 - DNA, 369 bp, Zea mays
  Peptide Sequence Number=SeqID_83184
atggtgccgccggggcgctggtacgtgacatgccataagatgtcagcgacagtggctgttgttgcggaggaagaagggcggcaccaatgtcacctgcatggttgccacggatcgcgtgagctcttggacagctggtgccaaggactcaagcgtgagggaggaggaggtgccgtggatgaggatgtggcgggtctaggcagcgatggtgtggagattggcagtgtggcggaggagggcgacgaccggatggtggtggatggagggcttgccatatccgataccagattattatggtcagcgtttggggatgatgttatgtggtttctaggatcacaagtattgttcgctggatggggctgcgatggttag

SEQ ID NO: 39810 - DNA, 294 bp, Zea mays
  Peptide Sequence Number=SeqID_83185
atgcagcgatgttgtctgctcctcgtcgccatcctcttcctccttcatcagtcatcaccaccacgccaccagcgtcaccgacacggacacgctggccgcgtcgctcaagagaaactggaagttggtgtccacaccgaccgcgccaagtacgtgttggcattcttcgcaccgaacccgaatgacatgggatgcacgtaccttgagatatggttcaacaacattcccgtgcgtaccgtcgggtgggtgaccaaccgtcagagccccatcctgggcggcgtggatgctggtccttga

SEQ ID NO: 39811 - DNA, 849 bp, Zea mays
  Peptide Sequence Number=SeqID_83186
atgccattcctgcctctgctgcatgcctacctgatggtcttcttcttgcctcgcctaatctctgttagatctgtctccccagggaatgtcattgcgctcttcctcttcctgtcgcctgttgtcaccttctggagggtcatcaggaagcggtcgacggaggacttctccggcgtgccctacaacatgacgctgctcaactgcctcctatcggcttggtacggcctgccgttcgtgtccccgaacaacatcctggtgtcgacgatcaacgggacggggtcggtgatcgaggccatctacgtggtgatcttcctcatcttcgcggtggaccggcgggccaggctcagcatgctgggcctcctgggcatcgtcgcctccatcttcaccaccgtggtgctcgtctcgctgctggccctccacggcaacgcccgcaaggtcttctgcggcctcgccgccaccatcttctccatctgcatgtacgcctcgccgctctccatcatgaggctggtgatcaagacgaagagcgtggagttcatgccgttcctgctctccctggccgtgttcctgtgcggcacctcctggttcatctacggcctcctcggccgcgaccccttcattattatcccgaacgggtgcgggagcttcctgggcctgatgcagctcatcctgtacgccatctaccggaaaaacaagggccccgccgcgccggccggcaagggagaggccgccgccgccgccgcggaggtggaggacaccaagaaggtggccgctgccgtggagctggccgatgccacgaccaacaaggcagcggacgccgtcggcggcgacggcaaggtcgccagccaggtgtag

SEQ ID NO: 39812 - DNA, 1470 bp, Zea mays
  Peptide Sequence Number=SeqID_83187
atgaacaaaacactggcattcaagatgccattacaaacggaaccccggttccacctccgcaggtacgaacaaccccacacgattggggggcctgcggagcaacagaaggccgacggacggctcaccgtcgcccgctccagcagcagcgacaacgacccccgctacgggtggccgaactgcagcagcgatggcctcagggcgaacgccgctgcaaccttgccctggcccacgccgatgctcgaggggcgaggacaagagccgtcagccctccggcagatccccactcagatcctcccggacgagtggagcaccgacctccgcgcggaggcgccgtaccagtgcaaaggcaggaccgccccagaacacgaacgccaccctagcagcgcgcgacgtcttgggcggtcctcccgtgcgcgcggcgcgacaaccgcccttgtggcaggagggggcaccgagagccaagccggcgagcccaacgcgctgaagctgacgacgcccgccgtcgaccagccccgcgttgtcgaagtccgcccctctcgcagggccagtgagcgccctctccctcgaatgctgaaggagaggctgacccacgaacccgcgcgggaggtagagctccggctcagcccggcctccgccccagcgaggatgatgaacatccttgaagctgagggcgggaccaagatcgcagcccgacttgcttctccccacccaggggctggtgccgtcgtggaccgagtcttctccaacacgctccaaggtcctcccctatggcgcgggggctgggtcccacgcgtcatacaagctggcccagggcagaagaagccaaaccaccgcgcgtggtgcatgcaaccgcccagcggttacaagcgtccctctgctttcgcccagaccagcgggcccacgcgtcatgcaaccggcgcgccggttgctatgtgcgagcaactgcaccgccactcgcgccactaccacgcctcctcgactgcggaaccagcgggcaggagcagcggtcacgtcgtcagccaagcttacgtcccatctaggggcagcgagagaaccctctctcacggcgtgaagacggcgcgcccgtgttccgttcctcgaatggctcgcgcacgcacaacggccgcctcgcgaaccactcgccccgtcgcattaactccgcggcgggacaggcggcgcctctggcaggggaagcaagcgacgcttcgccttcgccataatgaccgcgtcaaaaaaggaaacaggccccgagccaccctactgatcagagtttcaaaggctggcccctcggaggggtttaacagccgcctcagagcgtgtgggctccacacccgctactggttagaggttcgaaggccggcccctcggaagggttcaacggccgcctcaagccactcgggctccgcgcccactactgatcaggggttcgtaggctggccctcgaagggttcacagccgcctcagacatag

SEQ ID NO: 39813 - DNA, 240 bp, Zea mays
  Peptide Sequence Number=SeqID_83188
atggcgcaccggacagtccggtgcacaccggacatgtccggtgccccagccacgtcaccagtgccgttggaatctgaccgttggagttctgacttctgggcccgcctcgaagtctggtggcgcaccggacatgaactgttcagtgtccggtgcgccggtagccgttggcgcgaagcagccgttgctccgaggatgcaccggacagtccggtgcacaccggacatgtccggtgaattatag

SEQ ID NO: 39814 - DNA, 456 bp, Zea mays
  Peptide Sequence Number=SeqID_83189
atgaacaaacacactggcattcgaagtgccattacgaacggaactccggttccccctccgcagcgaagcagcttaggcagcagctttggggcaggtgtcacgacaggagggctctcccccgctgaggacgagaaccagccattcaggcaggcagatggagacccaggaccaccggcgccctacctatcccggcatggctggaggaagtccccgtgggactcgaggacgccattccccccaggtgcggggggaagaaaaaggcagccgacccacgcgggggcggcccctcgactcgcctcatcttccatcttggcctggatgacgaaaatccttgaggccgagggaggagtagaggccgcggcctggcccgctttccccactgtcgaactagaggtcaccattttgggtgaccgccggttgagggaagcaaccaggccgcgtgatgaaaatccttga

SEQ ID NO: 39815 - DNA, 1008 bp, Zea mays
  Peptide Sequence Number=SeqID_83190
atgtcgaggggactaagaaatgaaagtacttctaagcttgaaatggttgaagttgtctcgacttcatcttttggtgcagatgttgatcctagggctatagatcttgccatgagaatcaccgaaagtatgttcctcaaaatgaaggaagatgaggcgaagaacaagattaaaggagaagaaaatgatcgatggagaccaaacgacgaatccaccacttcacaaggttcgtctttcaaatccacttctcatatgtgctttgttgctaatgggagtgacagtgaaagcgaaagtgaggatgaggaggagcatgaaagtgatagtgaagatgaggatgatcttcaacaattcttcgctcaactaagcaagaaaaatcggatgagcttgctcaaactcatgaaaagagcagaagaacaaaaagaagtgcttcataagcaagaagatttcctcatcagaaaaattgaagatttagagaacttgaccaaagagcatgagaagctaaagtgctctcatgatgatttggtccaaagagtgaaaaaggttgagaaggggacaaccgtagcatgcacaaaaccccttcgaaagaataccaagctttctaagaaggacatgagcaagactcaaggtgataaaattaatgctcatattatttgctctaacaatgtacctatgtgcttcaacaaagaaagatcaaagagaagcgataggaggtgctatggatgcaaggagaagggtcatgaaattggttcatgtccccgcatgaagaaccaagaccttgcacgatcaagaaagatgaccatcaagaaagatgaaagcaaaaggcaaatgcattgcaaggacaagcaccgcatttgctacaattgctgtgaaagaggtcatttattcaagccacataggaaaaatggagcacttaagaatgaccttaaaggaatttaccttgctttggaaaagatccaattatatggtagattgcacattcattttcatattatggcaatctacatgctttaa

SEQ ID NO: 39816 - DNA, 606 bp, Zea mays
  Peptide Sequence Number=SeqID_83191
atgaagttcgatgctgatgctgtggattacctgttccccatgttcggcgatgtgatggaggcgcaccgcggggccgggtcggccgtcggcggggggtggggtgggtgcgagcgtgtgaagccgcggcggccttccgcggccgccgggtgcagggacgtggagctggagtacgacgacgcggtggcattggcgaagtcgatgtcggtgttgatcgcggcggcggcggcggccccggagcccaagacggcacggtgggggaggctcatcccatggaagatcaaggcgctgcggaaccgccccgccggcgatcggcgagacagcgtacctgagcgcccagcgccttgtgttaaggacgcgtgtgccctcagctacccagatcgcacgtgggcctccgaactggacggggccgcacggtgggaggacctcgtcgccggccttcgtctgatgtcgtaccgagcgaagggtgtccctgcccgttttgtctccgtcggaccagcgactgcggcgaagacttcgagcggagggtggcggctttgccttcgccccaacatttgccctccgagggaccagttcgacaaagtcacctggtgccgaagacgtcgctaa

SEQ ID NO: 39817 - DNA, 327 bp, Zea mays
  Peptide Sequence Number=SeqID_83192
atgacggtggcaggcgcacgggagcagcggtcacgtcgtcagccaagctcacgtcccatccgagggcagcaagagaaccccctctcacggcgtgaagacaacgcgcccgtgatccgttcctcgaacggctcgcgcacgcgcaacggccgccccgccagctactcgccccgttgcattaactccgcggctggacaggcggcgcttctggcaggagcagcaggcgacgcttcgccgaaacaaccgcgccaaaaaagggaccgggaaagggggataccccgaaagggatccttccccgtgaaggaaccaggctccgagcctccttactga

SEQ ID NO: 39818 - DNA, 678 bp, Zea mays
  Peptide Sequence Number=SeqID_83193
atgatgggcgctagctctccccccgctagacacgtagcactctgctacacccccattgtacacctggatcctctccttacgcctataaaaggaaggaccagggccttcttagagaaggttggccgcgcggggacgaggacggggcaggcgctctcttggggccgctcgcttccctcacccgcgtggacgcttgtaaccccctactgcaagcgcacccgacctgggcgcgggacgaacacgaaggccgcgggatttccacctctctcaagcccgtctccggccacctcgcttccccccttcgcgctcgcccacgcgctcgacccatctgggctggggcacgcggcacactcactcgtcggcctgagggaccccccggtctcgagacgccgacaggtacagtccgtgaatggctgcttcgaacttattgatggagccgcggcccatgatggcattgtaaggatataccatgtccacgatatcaaaggttatttgctcacttcgggcattgggtgctacaccgaaggagagaggcagctctattttgccgacggggaaggtgcccttgccgccgaagccatacaacgggttgtccgaaggcttaagcaggctgtggattatgcccatgcgatcgaaggcgtgaaggaagatgatgtccgcctgactgccgttgtcaactag

SEQ ID NO: 39819 - DNA, 1803 bp, Zea mays
  Peptide Sequence Number=SeqID_83194
atgcagatgcagctgcaggagcgggccgacgcggccgccggtggaggggtgctgaagaggagcctcggcgagctggagaggtggcagcaccagcagcagcacgtggcggcgcagcaggcgctgtacctgcgcgccgtgaggcagcgcacggctgcggcggttgatatcgccgccttgctgggagggatcccgtctcaggttgtccccgggtccagctttggaggggggctagcgtcgccttcgtcgacgttatcgtcgctcaccaccgcgtccagggcggcggtgccgctgatgcagccgcagccgcagaggcaggggccgctcatgacgtcctcaccgcagacgcaggccttcgggttatcgagggcgccgctgcctcagccgtcggtttcgagcgatctgttcattctacaggagctcgagaagcagctgctggacgacgacgacgacgacaacgagccggtggcggcgatgagcggcaccggttccgcggtcaccaactccgagtgggaggagacgatacaacaactcagctccatcgcagccgcgccgtcgcccgggccccctgcagcggcgaccccaaccaacaacaacaacaataacgtggggatgacgaggtcaccttcaaactcctcctcctccaccgcgtcttcatccgcgtcctgctcgccgccgacccccggggccgcgtcgaggcagctattgtctgaagccgcggtcgctatcgcggacggcaaccatgacgcggcggccagccatctggccgccctgaagcgcgcggccaaccagcacggcgacgcggagcagcggctgattgccatgatggtggccgcgctgtcctcccgcattgtccctgccgcctccgccccagctcaacacctcgccgagctctgcggtttcgagcagcgcgctgggtcccaactcctccaggacatctcgccgtgcttccgcgtcgccctccacgccgccagcgtcgccatcgtcgatgcggtcggcgaccaccgtgccatccacctcgtcgacttcgacgtcagcctcccgcagcacgcggctctcatccagtacctcgccgaccaacccgtgcagggaaggtccctgaaggtcaccgccgtcaccgacccgagctcaccgttcacgcagtctctaactgcgtcgctacccgccatcggggagcgcctgaagaagctcgcggagcgagctggcgtggagtaccgctttaaagtggtcagctgcagagcagcagagctggatgcgtccaggctgtgctgcgagcccggggaggcggtggcagtcaacctcgccttcgcactctcccacgtgcccgacgagagcgtctctccggccaacccccgcgacgagctgctccggcgcgtgcgcgcgctgggcccgcaggtggtgaccctcgtcgagcaggaactgaacaccaacacggccccgctggcggcgcgcttcacggacgcgtgcgcgcactacggcgccatcctcgagtcgctggacgcgacgctggggcgggagactgcggagaaggccagggccgaggcggccctgtcgaggaaggcggcgaacgcggtcggccgggatggccccgaccggctggagcggtgcgaggtcttcggcaagtggcgcgccaggttcggcatggcgggcttccgcccggtgtcgctcggctcgagcattgcggaacagatggtcgccccccgcgtcggcccggtgcctcccgggttcacagtcaaggcggagaacggcgtgctccgcctctgttggatggggcgcgtggtgaccgtcgcctccgcgtggcgctag

SEQ ID NO: 39820 - DNA, 171 bp, Zea mays
  Peptide Sequence Number=SeqID_83195
atgggattgggtgtgagatatggattcacccaatccatatccggattaagtccaaggctggttcttacactggtggacgctactgatgacgtggccaagccgattgtcaacactgacttgccaatctctgagtatctccaagaaactctttatttttggctctctatttga

SEQ ID NO: 39821 - DNA, 270 bp, Zea mays
  Peptide Sequence Number=SeqID_83196
atggcttggggtgggaagagaggaggcccttgcccctctatttatagccatggtggggggattcgggggagggatgagaggattagtgggaggatgagaggattagtgggaggtatttctcaggaagaaaatacttggagatatattggtggaatatttgggcaatatttctggaaagaacttgaagggattactcgggaaatatctgggcagtatttctggaaagaatttgaaggggatcattggggaattatttgtaggatattttga

SEQ ID NO: 39822 - DNA, 1908 bp, Zea mays
  Peptide Sequence Number=SeqID_83197
atgccatcctcttcttcttccgccgacgccacgccgccggccgccgcctcgtctgaggagacgttgagtgacgtgatggtggaggagttgcgcgccggcgactctgttgaatttggtgtgtcacggatgacgtcagcccgtattgaagatatgcagcggttgggctactttggcggcggagtcgctcgtgctccggggacggaggaagtccccgagccggagggcgagttggttgttttcgaggcgttcttcgtcgccggactccgcttgcctgcgcaccgggtcttcgaattaaatcaactgccgtacgacggctaccccggtcaagacgaagcggaccgccgtgggaagaaaccggcggtggagactggaggcgaccctgcgctggtggccgccgcctcctcgaaaaagagaaaattaggtactgcgatgggaagacttgggcggggaacggcgaaggctgaggcctccggcggaggcaagccgccgctgccggcgaaggtgggcgcctctgcgcccggcaaggcgcgggaggtgacggtgggcgccggaggccccaagctgacgaaggtggtgccgtccgtcagcggagtggcggaggctgcgaaggcggcccgaacgttaccgccgcccggcagacgcgttgccgacttcggcaccgagattaatgtggaggactatcttggggggtcgaacgagggcccgcttgctctagttgtgcctggcgcggcgatcacgacggctgcgccagcgccgaaggcggggggagagacccttggcgccggaggcgaggtgtctgccctcgcgctggtcagggacgaggcgggcgtggcgacccgccggctgaagggagcgactgaggcgttgagtcgagcgacggaggcgctgagtcaggtggctgacttcaccagccgcaccgcgtcgggggcccttacggcagctttatctgccgaggtcgagagacttcggacgcagcatgctgacgctgtccgtgagaagtcggcctccgacagcaagtgccgcaaactggcggagaaggtggccgccctggagaaggagaaggctgacctccgtcgccagctggcgggggagaggagggaggccaacgaagccgtcgccaaagagcaggctgctcaggcggaggccaggctggcgcgggcggaaggcaatatcgccaaggagctcgccggagagctgcagcggcggcttactgccctggagagccgcgcggagggggccgaggccgcggcgcgagcggaggccgagcggacgcgcacgcagctcatgactgcatatcgcgagctgggtgtgcggacgggtgacttcgaggaggaactgcaggagctccccactgtcttggcggggttgatgtcgttcacctccctggtcacctgcgaggcagcgatgaacgcgctctctcgcgaaggctgccggcactttgaggccctcgaccaggcagatgaggattttgggcgagatatctttgaggtcgaagaccccgtggtgaaggaatccgccggggccctctatgaccggatgtggggttcatatggttgtgaggtggtccgggcgcgggccgaagctgcgagggctcaggcggagcgcggcgagcgggtggacgacttcggggcgctgaacagcgcgctgcctgacccggagacgacccctgcggaggccgcgactggagtcgccccgggaccgaccccggagaccgcggaagatgcaccatgcgcccctgcacctgctgcggccggcgaagaccttcccccaaaggtggccgaaggcgcgcccgatgcccccgcagctgctgtgccgagcgctgaagatccagcggaggtgggggcgggggcagcggcggaggcctcggcggaggctcccgcagcggcagggccttcgcaggtggcatag

SEQ ID NO: 39823 - DNA, 279 bp, Zea mays
  Peptide Sequence Number=SeqID_83198
atggacggcggggatcgggtggccggccttgtcctcccctacggtcgggacaggggcaccagaggggggcggtccacggcgaagcggctcggcggcggcgctaagggactccggcgtgcaattaagcgcagcagagagccaaagaggggaagagagagggcagaggaggttccttacctcaaggcgaaccccagggactcctcggtggcggcaatggcgcgacgacggcccgggtcgacggtggcggacctcggcggctgcacggaggacggctggtga

SEQ ID NO: 39824 - DNA, 285 bp, Zea mays
  Peptide Sequence Number=SeqID_83199
atggtgcccgtggcgcgctgccttgcacgcgcgcagtgccaggcacggcgcgtagtgccccgacagtgttatgaaattgatatatcagccgtgctcgcggttatgagcggccaagggagctccattgatttgagatacttgatcagagatggttggtttacaggtggcgacgaggatgatggttatgataatggtaatggttgtccatgttgcaaccactactcaggagaagatgaagtcgtggaggaagacttccaggagttccaagagtacgacgagttttag

SEQ ID NO: 39825 - DNA, 267 bp, Zea mays
  Peptide Sequence Number=SeqID_83200
atgcctagatggcgctcccttgactttgagactgtcgggttcagggcggacgacaccactgaggccgcagcgctggaagccctgacaaccttctgtgggtatcatcctctggagatgatgatgcacccactaggactcttccccgccgagaagagggatgaccccatgtggtgcaacagaaggtggtacaactttacccacaagccgtgtatcccatctagccttgggttgtacggacccttaaacactggcgaggtgaatggctag

SEQ ID NO: 39826 - DNA, 780 bp, Zea mays
  Peptide Sequence Number=SeqID_83201
atgacttcccacggatcctcagacgacgggaatacactgtcccacactgacgggcttgcacgagagggctttccccgtattttgtgggaggtacttcagggggctgaatacacgacacctcctcagtacgcggtgcagcagttcgagaagcaccgagtgccccgttgtagggtgaggatgaccttggagcctcatcccctgcagccaggctgtcgttcgctggactctgagtcctttggataccgggctgaggacacgatcgaggcgattgctctgcacgggttgaccactttctgcggattccatcccttggagctgtccacccaccccattggcttgttccccgcggagagggaggacgacgcaatgtggaaggatcgggtggagcatgccaaggacatctgggctatctacccaggtcagacttgctcacttgacagtacggtgcatgaatgccctgtaccgtctgcaagtgatgcgcgatggtggaaaaagaacttgcaggtggagcagctgtccaatgagatccaagagctggaggaattagtggggaccagggagaacaccatcgaggttctcgaggatcagcttatcaacactcagcagcagcttgctgaggctaatgagcacctggatatgcatcaccaggagatccaggacatggaggccaacgaggacgttgacattgagggaggagaggagcctgcctccagcttggacactgctggctcagggagaccaccttcccccgagtcgagtgttgcctcgttcgctcactag

SEQ ID NO: 39827 - DNA, 576 bp, Zea mays
  Peptide Sequence Number=SeqID_83202
atgcagttgtttgaggagcatggagtgcctcgctgtaaggtgtggctagtcttggagccccaccccttgcagcccgagtggcgttcgttggattctgagacccttggtttccgcgcccacgacaccaccgaggtcgtagccatgcacacgctgactaccttctgcgcatttcaccccttggagatggcaacacacccccttgggttattccccgctgcaaaggaggatgatctgatgtggcaagactgggtggaccacgccaaggtggacctacaacgtgaagccgtgtcagagctaatgggcttggctcagtatgtcaagatcaccatcgctgaccaggatgttctggtggcggatctatccactgagttggtggagaaggaccttcaaactgagcaaatgagtgctcgaattcgtgatcttgaagaacaggagatgcaacaggacatggaagaagacgaggacatggatatcgaggggaggatcccgagccagcatctagcgtggacaccgctagcacagctcgctccggggccaccttatccagattctagcttcgcctcgcatgcccgctag

SEQ ID NO: 39828 - DNA, 132 bp, Zea mays
  Peptide Sequence Number=SeqID_83203
atggcggtggcaatgggagttgaggccaggaagcttgtgaatgacttgccgaagcaacagaagttgcaggttgattacccacgtattctgctggctgcctctgtcatcactctgattggagttgtggattga

SEQ ID NO: 39829 - DNA, 144 bp, Zea mays
  Peptide Sequence Number=SeqID_83204
atggctcaccggatagctctgtctacgcgcggtggcaagcggtcgaagtccggcgatggtgattctgctcctccgcacttgagtggatttgatctcggattcacgagatacgaggaggcgaagttgggtttgtcgcttggctga

SEQ ID NO: 39830 - DNA, 777 bp, Zea mays
  Peptide Sequence Number=SeqID_83205
atgcccctacaccaccacagggcatcccgactgctggaggggaccctgacggagacggagacgacgacgctaccggtggcagttcgagccatagcacagagctctctaaggagcaggaaccggagggttggatcgctagacacatcactcatgacatcgcgcgcgggtgtcacttccacgacgctctcgacaccttgctgcatcgggccttcgaccgacacacttggtctatatagtacctttgtggtttacgagcattgtcgcgagttatacccggaccagtgggaggctacttgcttggtgcgctgtccggacaatgatctccggggtgcagaggccttcttagagcattattatatcactaagagggatactgctgaggcagccatgcaagatgccacacggcgtgcgctttcacagtactgctcgctgttcagcgaggtagctgacggcctcgacctaaagtactaccctcgccgttcgaccgatagtgctgggggtgtgattgtctcgcccattggtgagggcaatcctagactgaacagcatggtcaacctggtcgccgtgttcaacaccgagttggaccacacccttgacgagttgggcaaggttcaggcggaggttgcggaattacgtgctgagcgtgcaacacgccactatcaagatggtggttcccccgctcctgtcgggattcagcacccttaccgctcaccgccccgtggtcgctttgcttatggcacccgtgattgtaggacccagatagatttggagccataa

SEQ ID NO: 39831 - DNA, 282 bp, Zea mays
  Peptide Sequence Number=SeqID_83206
atgaaggcaggaaccaggcacatcgtcgccaggatcctgggcgccggctctgggagaccgatcctgtgccatggaggagatttgaacgacaccgaagacttggtggattttcctatcggttccaaggctagtgctcgggccatcacaacatttgggttccgtgcaacggtggtcatcggagcggcggtggtccagggctcggtcaagccgccgccgcggttggggcaaggcatcgcccagctcggactgaggaagaagatgcataaggacagtaggatctag

SEQ ID NO: 39832 - DNA, 696 bp, Zea mays
  Peptide Sequence Number=SeqID_83207
atggctaaaaattttggcagcaaaacagtgcaaatagcaatgaatgctgtggtaacttcacacctactcgtctgtttatatagtactgcaggttcaactgttattcggccatggatccatctatctgtggagaaaaaaacatggaaagatgatgaagataagtcaagccagttgttggagatgcctcaggaagatattaatccactgaatcaggctcagatgcatggtggaagcactaagaaatcggcacctgatctatccccgaccaaacagaagaagcaacaagcagttcaagaaaggaaaaggaagcaacagtcaaagaggggaaaaaagtggctggatttccttgcgttcaagggacacatcactcctttactagcgaggttttcttatggggaaaactgtgtatatacagctgaaggtgaatccctgaaaataccccaaacaaattttgaatcggagaatcaacctcataatgatgatgtcaacattgagaaacagacaattacgagtagcacaccttcaccaaatggtgccaaggagcaaaagagagctcaaaggagaaaccagcccaaaaaaaggaatcaaagaaaaatccttggaggtctttactttttcacattctatacttttaaagttgttttcagaaggatactgatggcctacgtttctattctcatggacttctatccttag

SEQ ID NO: 39833 - DNA, 932 bp, Zea mays
  Peptide Sequence Number=SeqID_83208
atgggagagtcgagcaaggagctcctggacctgccctccgaccccaggcctcccgcctccttcatcgagtcgcttctcgctggcagggagcagcagcagcaggataaggagggaaagcgtaagttgggggcgtccactgatcccctgcccaaaagccaaggtactgttgaactagctcttcagcttgtggatctgtgcagtgtgcccactgcccactgcctagccatagcgtcagctagcccaagcagtgaggcctgtggaagaggaggtgaggtctcgaggggtgaggggcagagggtcgatggtgaggccgggaggtaccaccgcaccagcgtgaaggagaacagatacggagtggaggggaggcttctcgctcggcactcagagaggtgggcagctgccaattcagctagggtggctggagtccttttgtgggctgttcttggattacacagaagagttgtagtggaatttttctgggctcgccccaggctgcagccacccccagccctggggcctgaatccgcctctggctcgtacattatcgggaaagtgaaggatttcttgggggagattgcaagggccaaccagaagttgcagcttgatgcacagaacaagcctcctgtggagtacgatattgaagcccttactgggaacgaggaggaatacattgagatggatctgcttctaggtgtcgctgatcttcattcagagcaggctgtggaggcagctgaagcaacaataaacggacgccagacttcagaaatctcatctgactcggaagatgatagtgatgacagcgatgaagatgctgatgacaaacctctcacgtctgacaaagataataaatgtaaaagtcctgatgatgcggagatgggtccagcgaaaggaaagaagcccaataaaagacagaaaattgttgttctcaacta

SEQ ID NO: 39834 - DNA, 295 bp, Zea mays
  Peptide Sequence Number=SeqID_83209
atgaggatgagggtgaggacaactgaaccatctgggttgccgacaacgcttaagaagaaggggaatgcaaggatggcagcagggggccacaacatgtcagatgaacctgagaagggaaggattcaggtggcctgcagaggtaggggaaaagcggacctggaggaggagaaaagtgatgaagaagttgttgaggtgcctattcaaaatgaggtgcccctagccagtttgcagctagggtcaaagccagaggcacaatcgaagcctaaatcgtcctttaagggcacacctcgaaagg

SEQ ID NO: 39835 - DNA, 135 bp, Zea mays
  Peptide Sequence Number=SeqID_83210
atggccaccaggccacgcaaggccgccaaaaacatggccaccagatacactttcggggtactgctatgtacatggttttctggtaggtatttaagagtggccctctcttcatatcatcgacagtttaggaattag

SEQ ID NO: 39836 - DNA, 644 bp, Zea mays
  Peptide Sequence Number=SeqID_83211
atgtcgatgccgccgcatccaaatccgctgctgccggcggcggaggagccattccacgtgttcgtggggtacgacccgcgggagcacgagctagcggtcttcgtcgactacgacttcctctacctcgtggacctggctgacctcctcgccatcgccggccgcattggcgtggctagcgtcaagcacgatgtgaggaatccagcattcctcgattgggaggtcaaagagcagctccagaacataaaatctgaaatagctgatgtgtctgctaatcctcaaggtctacttttagaggcccttcattcggttggatattctggggcactggcaaaacctttgatggcttcagaatctgctgtaaaccggttggatgttagcagcttggaggaatttgttgctgaacattacactgctcccaggatggttcttgcagcatcaggagttgatcatgatgcgctgatttcagttgtagaaccacttttgtctgaccttccgtgcgtgaaacgtcctgaagagccaaaatctgtgtacgtgggaggcgactatcgctgccaagcagattctcaaaacacacacatcgcacttgcttttgaggtgccaggtggttggaatcaagagaaaaccgcaatggttgtgagcttcag

SEQ ID NO: 39837 - DNA, 399 bp, Zea mays
  Peptide Sequence Number=SeqID_83212
atggccgggattgctcgctggagtaacctcgacccacccggagcgccccctctgccattccctcgtcccgagtcccgttctcacagccggaaccccaccatcgagttcgtcgggccccccacacgggtcttggccaattccggcaaccccataccccccagaggccgtgcctgccttggctgcggcggcttcgctgccgcgggcggaacaacgtcggctgccatcgttaaccccctggcgcccgatcccaaccgcccgctcctgatccaacagctcggattctcggataccgacaacgagcagtctgaggttcccaagtgtgttgcaggagacttccctgagcagcaacctggagaaggcaagtgtcctctgacccattatgtcctacttactttataa

SEQ ID NO: 39838 - DNA, 174 bp, Zea mays
  Peptide Sequence Number=SeqID_83213
atggagagtcatgatctccgggcagaacgggaatcacggcttgtgggtggttatgagattgatggttttggttatgactatggtgctggttgtcagcattgcaaccactgctcaggcgaagatgaagctgtggaaggggacttccaggagttccaagactacgacgagttctag

SEQ ID NO: 39839 - DNA, 1139 bp, Zea mays
  Peptide Sequence Number=SeqID_83214
atgaaggcgaaccgccgcacaaggagcgtgctaccgccccacggtagtgcgccccctcgtcttcgccgcaaccagcggtccaacctctggcatgggggcctaggcccacatgtcatgcacctggcgtgccggttccagggtgcagagaagccgaaccgccgctcgtgccaataccgcgcctcctcgggaccgccgcagaagaaggagaagttaaattttcaaaaccaatgcagcggtctcgaggaaccccgcgcatggcccaacaaagacattaagtgcggaagtgacgggctcgttccctcccctgaggcgagcccgggggccactgtcggtaccctaaatcaggggtaccccttactacagtatggagacacggtgcccacgataccatcagtaggtccggacctcctcgagaaagcaccggacccctgtactcacgacccggatctccgagtatggtccagggctcccatgcaagcaagccggaccccttgggtgaggctttatcctgtgcgcttgtgctccctgctcaggcggagacccgatgctgccacgtggcttgttgcccatgacgcgatgtgccgcctcagcatttattgtgacctatctactcagctggcaggcgacgtccaggccatcctgcaggcagcgtgcctgtctagtccatcaccaaataggtgcaagaagattgctccagcaactccaagtatgacatccattatatttctgggcccacatgtcggggctcagcacccttggcgggggaaatacgacagcaccatcgcggaggtgaagagctactacacgtcggcgggtacagggaagataaaaaaagaaaggtatatcttcatgccggtgagcgagtacaggggtgacaaaaaaagaaagaacaacccgagagtcgtcgacattggcgacaaccatgaggcccccctgcttaacgatggacagcgcggtgcagctgctctggaccatgtccaagcggtggcttcgcgggagcttgtcgtacacagtggcgcatgcgaccacgtaggactgcttctagaggtcgaactgacagtcgctaagcttcttctcgtcatcgatgagcgacgccaacgcgagtgcctcctgctcatggtgtttgttcggggtttcaa

SEQ ID NO: 39840 - DNA, 417 bp, Zea mays
  Peptide Sequence Number=SeqID_83215
atggcgggcggaaaggagctcgccggagctaaggaggggtgtctggctggcgatgcctctcccccggcgtcgtctgatgactcagacgactcccaggggatcgccccagaggtgtggacctatatccgggccatcgagcgcgccgggctcgagggctcggatgagtcggagtactcctcggacgaggagaactcctcggacgaggagaattcctcggactcgtccgaggagggcggcggcggcgatggcggtgacagcgacgacgacggaggcgatggtgacggcggcggtgactgtggcaagggcggtgacggcggcggcaaaggtggcagcggcgacggcggcgatggcagcaagggcagcagcaggggcagcaacaagggcagcagcaagggcagcaacaaggccagtggctag

SEQ ID NO: 39841 - DNA, 777 bp, Zea mays
  Peptide Sequence Number=SeqID_83216
atgcggaaaggaggcgcggtattggcacgagcggcggttcggcttctctgcaccctggaacctgtgcccaaggagggtgactcgtgggcccgggcccccgtgtcagagtctgggccactggttttggcggaggcgaagaggcgcactaccgcaggtcatggcgtgctcttcacgcgtcggttcgccttctccgcacacagaaaccggcacgccaggtgcatgacatgtgggcctaggcccccatgccagaggttggaccgctggttgcggcgaagacgagggggcgcactaccgtggggcggtagcacgctccttgtgcggcggttcgccttcatgaccgttggtcgcggcgaagatgaagggggcgcactaccgcgaggcggtagcacgctccttatgtggcggttcgccttctgcgcactcgaagaccagcgtgccagctgtatgacttgtgggactgggccccgtgtcatagggtgtcggtgttttgggtccgaccgtgcacccggggttgcccctcaaggtgctttttggagtaggacggtgttactgactttagctcgatggttcgtgccagatgcacgagaaacaatggacaattgtgtacagttgacccatcctcgctcggttccgatgtacggggttcctgcacgggaagaagttagccttgtcttagtttcactctatgctttagaggttagcattctgcctctcggggtagatgattcattgggtgcaccgaaggtgcacccaatgggtgtagcccccgagctttga

SEQ ID NO: 39842 - DNA, 255 bp, Zea mays
  Peptide Sequence Number=SeqID_83217
atgggcaagagcaagaagggtggtagttcttcgcatcactccggctataagcggaagcgtgagccgactcctcccttggaggacttcggcgactcggagtactcggaggaggagttctcctccgagtccgagggctcaccggtccatgcctctgtggcggaaccacccgaattattccagcttaagtgcctgagtcacgcctcaggggccgcaacacacttaaatcggaataacccgtcagtccctcagatctag

SEQ ID NO: 39843 - DNA, 1080 bp, Zea mays
  Peptide Sequence Number=SeqID_83218
atggcaagctcgccggtgctcgccacctctcctcccttccccctccccggccacctaaaaaaggaccgccccgagccccttgttccaccacaccaggcctcaaccactcaacctccatccctcaggcccaatcgagctcggcgccgtcgtccctcccctctccgggtgagctccgccctcctctctctggtggcttatggtcaaattgctttagctcttaagctccgcctctctgtcgcaaacctagcacacaccttctcttcgcttattgcgcccggaagcctcgacggcgacttcaccgccgcgagcgcccgccaccgtgccatggaccggccaccccaggcaccctccggccaaattggacctacccccatgatcccctacccccgcccatgcttcgccaccactcccccatcgcagaactggagccccggtggagaaccgccgcggggcttcaccggcggttgggccccggccggttcgccccccccgtcaccgctcgacgccgtcagccccccttcctctggcacatgggcccacgcccacggcaccgtccccgcgccgttcccccactggcgggcctgcaacaaaaatacccccacctggaggaaaagacttcaggccctgtcaaggagagatcctaccgaggatgaccccaccatcgtctacatggccggatatctccacactctcgataaccactacgatgacctttcctcccactgcacccacctaaactctcaggaacttaaaaaggagaaggcgtccctccaagagtgtctcgatatagcagagggcaaagaggccaacactcgtgaagcctaccgaaccctgaagatggattacgataagaagctaaagaagctcgcccccatgaagaaaatccaaaagaagaccaagagccaaggatgccagactgagcggaagaagaaagcccctccagcaccacctccctccaggatagagaatttgtccgacgtcgaggatatgtccctagctatccttgatgaccttctcaaggaatttggggacactttagaacaggagttcggaagtacctcagaaagcgctcgcgtgtag

SEQ ID NO: 39844 - DNA, 795 bp, Zea mays
  Peptide Sequence Number=SeqID_83219
atggcttcccacggatcctcggacgaagggaatgcactgtcccacactgacgggcttgcacgagagggttttccccgtattttgtgggaggtacttcagggggtcggttacacgacgcctcctcagtacgcggtgcagcagttcgagaagcaccgagtgccccgctgtagggtgaggatgaccctggagcctcatcccctgcagctaggctggcgttcgctggactctgagtcctttggataccgggctgaggatacgatcgaggcgattgctcttcacggactgaccactttctgtggattccaccccttggagctgtccacccaccccattggcttgttccccgctgagaaggaggacgacccaatgtggaaggaccgagtggagcatgccaaggacatatgggctatctacccaggtcagactgctcacttgacaatatggtgcatgaatgccctgtaccgtctgcaagtgatgcgtggtgaggcaatgtcccatctgatggcattgttggaggcaactaagattaccttggataaccgagaggagcttgtggttgacttgttcactaagatggtggaaaaagacttgcaggtggagcaactatcaaatgagatccaagagcttgaggaaccggttggaacaagggagaacaccatcgaggagatacaggacatggaggccaacgaggaggtcgacatcgagggaggagaggagcctgcctccagcttggacactgcgggctcagggagaccgccttcccccgagtcgagtgttgccttgtttgctcactag

SEQ ID NO: 39845 - DNA, 579 bp, Zea mays
  Peptide Sequence Number=SeqID_83220
atggcagatgaacacctccacgtgttcgacgcgttctgcgcgcgccagagcacgcccgcgcccgaccccgcgcgctccgcgccacgccaagccgtgcccgcgtcacctgctcgcgcctgcgcctataaatcaccctcaggcatcgatcgtactcctccgcgcacgctcgacctcaccgaagcccgaaaccaccagcgtttgccccgcgcatggcgtgcccgcggccacccgagcccctgccaccgtagaccggcaaacagagcccttcccagccacgccttactcttggaagagaccgtgcatgcctcggtgaagctccccgagcaaggaatcagactttgcttcgccggagaagccagtccacggtcgccggacttcacccgaccgctggtgaacgtagaccggccggaacacccaccaccgacgagatcacccgcctgcgtacgtggaccggtcgatttcggccacctccgccgtcgagtcgtacaccgctgtgaccgccaggacctcccggagctaaccccgcccctcgccggacctctctcgctgcagggaatagtagcgcaggggtataactga

SEQ ID NO: 39846 - DNA, 1107 bp, Zea mays
  Peptide Sequence Number=SeqID_83221
atggagtttactttcgaggatgcagcggaactgtgcgcgctcgtttcgaatcagcaatcccacgtcgacgagaagcggaggtacttgcctgagtcatatatcaggagtgatgactggggaccattttttcagagatcttgtgataaagtgagaggtaacattaaaaggatttggagttcagagtgcaatggctatacccatcacttagttctggagggcctccagctttttgacttccagaagaaggaaaatgaaccacttggaccagaatatcttggtgtcatgcaggacacaatcagcaaattgacctatgaaacacttcagtcagtggcttgtgttgtcagtcatgacaaggttacttttgataagactaggtctgtaatggaaaaaattgtaaattctcaccttccaagttacttggccagcttggatcagaatgatattgcatgccagctattcaatatttttagaaatccatgcagctatcgatctggttctgtgaggcttgtcacacctgtgtcaccacaacttttgtcttctattaagcatgcgttggatgagcttgatggaatgccaatgcagggtcttgttgcaatgaataggaagattaaaggaaaatcatgtgccccaaaatttggattaactgctagcttttccaaaagaatgcatataatcaaaatgataagaaaaaggtgcaacaagattttaacagaacttgaggaaggtaattacctgccaaaggaattagcaaaggcaatgtcagtggtgaacttatatcagaagcagaagctgaaaaatgtgagtatttcacaatcagagtttttcccctttgcaaaagaaactatttctttgcagaatgatatcctgaatgccctttggtcacttccaaatctcaagcatgcgaagctgaaattgctgcacaccatactggatcatgattctaaatttgaaaggaagcacttagcaactttgaggaactacttgacagaatgtttgtttggatgtgatgatggtctaccagatgtggccctccaagccatagcctctataaatcagatttctagatgtcagcatgttgtgttaacggaagagagggaggatgctgag

SEQ ID NO: 39847 - DNA, 519 bp, Zea mays
  Peptide Sequence Number=SeqID_83222
atggtcacgggccagtcagccgtgggaataggcgtggcagtcggcatgaccataggcgggctgacggtgattgagccaacgggcgcacaggagcagcaagccaaccgcaaatcagactctggccccacctacaggctcgcatcctcccctgaggcgggcccgggggccactgtcggtaccctgaatcaggggtaccctcttctacagttgaagacgctgcacccgtacgacacctccagcaaaacgcctaagcccctcctcatcttaggatttagggcggatgcactccgctacccggccggagatttgctctccgacaagtacaatggatcaagcagtctcattagctatgagaagcagacgattcgaatcgggtttttattcttgcaagtgaccgcacttgtacccaccataaccggaatgggagaccacgtctcaggtcgtgtgaggagggcaatctgcgggcaggttcactcaggtatccgtacgttaatccttattccaatttccgtctcgtag

SEQ ID NO: 39848 - DNA, 717 bp, Zea mays
  Peptide Sequence Number=SeqID_83223
atgaacaaaaacggagacttgcataatggagttgggattcagatgggtcagattcaagcgatagaaatcaaggagaccacggaagaaaggagaaatgggaagagcaaggccgcggatgagaaaaggaacgtaaatgatggattcgtgggtgtcttctgtcggaacagtgaccccacgacagatccgccaagaacagagttccttcggaggaagaactccgatggatacgagatggagaaggtcggattcagagacaacagacatgtggttacctgcgaaaggcaactgactgttgggatcgatagaaggaatgatcgcgacagacgaacttggagtcttccgcttgggcgccatctcaatcttgctggcgagcggagcggaagcaatattgcaagggagcagagaaggcctggatctagaaaagcaaaactagggcatagaatgcagaggcatgcgacagtgcagtacatatggggttttcccaggccagacgccatttctaaaaagcgcccaatcatcacccagctgttatttctaaaacgctggcgtgccatgtcatcactcggtattgggtgccttcagtatttaagtgtttcttcattacttctcatactttttggagtaggacggtatttaagtgtttcttcattatttgttgtgctgatgaaggtatttaaggtcctcaaaaacatgattttgccttctttcaagccgaag

SEQ ID NO: 39849 - DNA, 372 bp, Zea mays
  Peptide Sequence Number=SeqID_83224
atggtggcgaagctccggctgcgcaagaaccactccggtgagcgcggaccggatataccagagaggggggcacaccgaagggtgtcccgagtagctgacgacaaggcgaagctcactgtggcactagacggggtacgggcgcaacggcggccacggaacaggcggtggacgtcagcgggcggtggcggaggttctcggttcgcgtgggcagagcgagagagagcgagagagctgggcagagagcgcaaatggaagaggggaggtgggcgagcagggcgtggggttcaaacggggcgcgggggctcggacgtggccggagaacgcgcggacgtgggcgcgtccatggcggggagatcgtgggcgagaggttag

SEQ ID NO: 39850 - DNA, 792 bp, Zea mays
  Peptide Sequence Number=SeqID_83225
atgcagcccggtcgcaacttccggccggtggtcatccacaatgataactaccagccttgtggtggagaagcgagccggactgcagcctccccctgccctcagcttcaaggatgttcatcatccgcgctggggaggagggcgagccaagtcggggttccgccttccgcatgggctggcggcccgcttcttcctccaacattcgggggagaagggcgttcaccagccttgcaaaggaggcgaacttcggctacgcggggtcggccgtctgaggcgccgtcagctgccgcgtgcctggctcctcggcctgggtggctttggtgcagcctccggcgctgcctcctgtcgcttggacggggcgtggctgtccgtccaccgcacgggcgatggttgcgtcgtgcgcaggtcggccacatccacggcttctcccgcgccaccggccgcaccagggggtcgtacaagacgtcgtacgctgcgggggcggcggcggcgttcttggatggtcttgtcctcactcccgtagtgaggacgggagcgaggacctcttcgctcgtgctggggcagccgccgcccattggtgtggaggtggtcgctgctgctggtggggctgaggcagtcgccgctgctgaggtggccaccaccgtcggtgctgatgtggtcgcctccactgacgagccgctcggagctagctatcccgcggcccttactagtgtggagggcggtggagcgtgcaggcccacggtacgggaccaggctgagcggctgcacgggctccggaccaccccaggagactaa

SEQ ID NO: 39851 - DNA, 432 bp, Zea mays
  Peptide Sequence Number=SeqID_83226
atggaatgtcgcgagatcattgacctcacgaaacgtgtcagtgagtggcgcgagcagtcttccaaagacggctctccacctcgccgccgacctggcaaagaaaaggtggacgatggcgaggtggtcgcggctgagcgggatctcgggtaccagtcgcccgagggggacctgaaggatgtcttcgccggaggttcctactccggtatgaactacctccacactagtaagggccgcgggatagctagctccgagcggctcgtcagtggaggcgaccacatcagcaccgacggtggtggccacctctgcaccgacaactcgccagcagcgtcgatcacctcagcatgtatgccgctgtggaaaggtcctcgccctcgtcttcctacggggggtgacaacgaggccattaaagccaaagagccgaaggtccggtag

SEQ ID NO: 39852 - DNA, 861 bp, Zea mays
  Peptide Sequence Number=SeqID_83227
atggcgcgcacgctgaggtggtcaccaccgctggggaggctacccggagcagaggtggttgccaccgctggtgaggctgcccggtgtagaggtggtcgcctccgctggcgagccgctcggagcagaggtggccgctgccgctgccgctggcgagccatcggtgtagaggtggtcgccgctactggcgagccgctcaaagctagctacccacgcgaccctactggtgtggaggcagttcatacctgtagagtagagatggagctaggactccgcttgaaggcggataccagcatacctaagaaagagttggcaatggcccccaggaggcccacgatactggaccaggctgagcggctacacggctccggaccaccccaggagacaagtgtccattctctaattccggaccccagggacgacgcccttcctcctatcctctgcgcagggcacccctatttccctgctccatggctgcccagcagcgacgctcttctccccctcggctccagcttcctcgacgccccctgctcattctccctcgcgcagcagcagcagggcgcccctcttccccagcacgccgaagcaccccctgctgtcccctatgccctgcatttttcccccatggaaagcagcaggatcaatgccgcccaggcccctgctcctcccctcttccccacaaaacagcagccgcagcgagcccgccgtcgtccatggcgagcagcctcccccccccgacgcgcaggagctcttttccctcctagggacagcgcccctaattcactctcccggcagcgcagcagccctcccgttcgttctccactcccctcgtcgcgtgtcatcactctcgtgctcgctgcgtag

SEQ ID NO: 39853 - DNA, 375 bp, Zea mays
  Peptide Sequence Number=SeqID_83228
atggcggacgttgacgacgccactatagcccgacgcgccaaggaggagatcgtgcgtcgtgcaaaggaggcccgcctccgtactgccaccctcgatgaatatgagtgcgtccacgaagctctctggacgcaggccacaaccgtcgtcaacatcaaggcgctcatcctcgtcatcctcgttcaggccacgaacacctacaccaagtggcgcaacatgttcctcactattctcgacaaatatgctctgacccgccacattctccaggatgaggccttcccatcaattgttccattgaatttgttcgtttggcctttctgtgaaggatctacacgccaggaccatgatcgccaggcgtgtcttcctctagtttactag

SEQ ID NO: 39854 - DNA, 474 bp, Zea mays
  Peptide Sequence Number=SeqID_83229
atggctgatcggcgaagtcttcctgctttggagcatgggggatgttttgatgttgctggtgtggtggtgggggtgggggaggtacgatttgtacttcctgatggtgttggtaagcgtggtgcggtggatgcggggcgggggcgtggatatatggtggagggggttgctgtcttcgccgtggaagaggcagtagaatcggcgcggcggctgcgcacgcccccgacccctaccgcgagttccatttccgcggccctaggggggatactcctggcgacgaggggcgtcagcagcggggtgctggttggcgatgttatgcacttgctgttggttgcggccgtctcgaccgaagtccggctgcggagtcctcgtccacgtgcggctggactgtggagcatcttttggcttcctttgagactcaaccttgcgctggtggagctcttcggatttggcgtatttttcaaacagttgatataa

SEQ ID NO: 39855 - DNA, 264 bp, Zea mays
  Peptide Sequence Number=SeqID_83230
atgacgtcaaccggaaaccatcgtcgtgcttgcgactatcgcgtcgaattagtcagggtgatgcttcagtgggtgggaatgttttcaaaaataaaacttgatggtggatctgtcaaaggcctttatgggttcaacatcgaaaaagatgtacctctgccaggttatagttttgtgctgctgatgatggtgttaagtgccggtgggctcgaccttcttataagtctaagtaacccttctatattcttattgaggatggtcacttga

SEQ ID NO: 39856 - DNA, 723 bp, Zea mays
  Peptide Sequence Number=SeqID_83231
atgcccggcgcccgaccccgcgtgccccgtgtcgcgctaagccgagcccgtgccattgcctgcgcccgcgcctataaagccagccaagacttcaaccgtacacccccgctcgctctcgacctcgccggagtgcaagatcaccggcgtttgccctgcacacggcgtgccagcggccgcccgagaacccactaccgtagaccggccaaccgagcctttcccagccccgtccgacccacgagagagactctacttgcctcggtgaagctcccagagcgaggaatcgagctctgcctcgccgaagacaccagatcaaggtcaccagacttcacccgaccgccggcgagcgccggagcacccgccgccgatgagctcgcccgcctgcgcacgtggaccagccgattccgggccatcaccgtcgtcgagccgtacctcgtcccgcaaggacttcccggagccaaccctgtcctttgccggacctccctcgccgcctgtaagccgcaccaccctatttacttctgcgggtactgttcaaaaggggggagggacctcggggaagaaggaaaggaagtcaggggggtttttgaattgtcagagactcagatgaatagttgcgcaggggagcaaagagttgttcaggaggtagcccaggatccagcactagagcctgccatcgaggacctgcctgccccaactttggaaggcaagccccggttttatgcataa

SEQ ID NO: 39857 - DNA, 801 bp, Zea mays
  Peptide Sequence Number=SeqID_83232
atggcgagggctcaggcggcgcgtggcgagagggtggatgactttcgggcgttgaacagcgcactgcctgacccggagccgaccccggcggaggccgtgtccggggccgccccggagccgcccccggagactgcggaaggcgctccggatgcccccgcatccgctgcggccggcggagacctgcccccagagaccgccgaaggcgtgcctgatgcccccgcagccgctgcgccgagtgctgaagatcctgcgacggtggcggcggaggcgacaggggaggcaacggcggaggcaacggcggaggcaacggcagaggctcccgcaacggcagggtcttcgcaggttcaagattttgggcctgcgcacgcaaccgccactactaaatttttggcggcttcgaccgtggatggtggtaataaatgtgatgggtctgcatctgagttttctgattttgctgactctgggagctcggttgagtcgtcggaggaggacttggactacttcgcggccttggatgtggctgcggcggaggcttcaccgcacgccgcagacacagaagatgtgcctggtcctagcaccgggcgccggcggcgaagggcggttgcgaagcgtagagtgagtggggcagagggaggtcggcttcgtgtgagtagggctggccggcaggaactgttgtctttgccagccgccgcgagtacaggtgaaggggaattgcgaagtctttttgcgggtgaggagcttagaataatgttatttaattatagggagatgggaattattcctaaggttgagccgatgtag

SEQ ID NO: 39858 - DNA, 990 bp, Zea mays
  Peptide Sequence Number=SeqID_83233
atgacttcacccacccccgccaatggaggagacactcgtttcagttccgatttcctttctcacaagggttttctttccatcttgtgggaggcacacccccttcagcagggttggcgttcccttgactccgagactattggatttaagacggacgacaccaccaaggcagcagctatgaagactctaacgactttctgcggctaccatcccttggagatggtgatgcacccactgggactcttcccctctgagaagagggatgaccccatgtggtgcaaccgtgtgagccatgtgaaggacatgtgggctatgtatcccaacttagttgggaggatcactattcagtgcatgagcacactgtaccgcctacaggacctgcagagcgacgctatggtacatcttgctaacctcgctcagaccactaagctcaccctcgacaaccgagaggacttcgtggttgacctgtcctcagagttggtggaaaaggacctacaggtggaacggttgagccagcgcattgccaccctggagcagctggtggagatccgggataacaccattgatgtcctagaaaaccagctccatgatgtgcagcaggagcttgaggaagctaacgaccaccttgacatgcaccacctggagatggaggccaacgaggccggaagcgagggagaggaggctcccgaggagttagtactagcccctggtaccaatgtgactgcctccgagatgcccccttcgcccatggcagctaggcagcgtcgcaggcagaacgagcaagttcccccgccacctcctccagctcccacagtgcaggagctgatggctcagcagaacgaaattctgcgacagttcttgcagcgccagccccaccctcagcagcatgaggatccgttggacgccgatgtgtggctacgcgtcgtggagtccaagtttcccctcctcacgggagactgccctgatgataccaaggctcgcttcgccgcgtag

SEQ ID NO: 39859 - DNA, 795 bp, Zea mays
  Peptide Sequence Number=SeqID_83234
atgaagcttctccaagcaaggaccgaagccctgcctcaccggaacagtgagatcatcgtcgctggacttcggtcgcccgccacagtgcgtagaccaagctatctggataggccagagccctcgccgctgacgagctcccccgcctacgcacgtggatcggcctactctgaccattcccggagacgatccgcacatcggcgtgaccatcacgacctcccctacaccctcggccacctcaccggagttatctcgccgccggacccagcccccatccctacgccccttccaacctcgacgcttctttcattgacggcacccatggcccaccatgcctcgccacccgtcttcggcgccctcgcctcgccctctttctccccacgccgccgctactggctacccccgcccacaacaccgccatcttcttcctcgctcgtgcccaccgctggtagcaccgcccgctcccttatcctcgccttcgtggatgcgcggagatggcctgctaccgccgtatttgtccacatgacgccaccactggctctgcacctctccctgcttggttccacggcgttgtggaagccgacctggccggatgtcctcgccgcgccacggatgccacatcccacttcttgctcggcgaccgtcgagcatcaacacccactccctctaggcgagacagagtcccgtgcctcatccggtcgtggtcgagatccggaagcggggtgtggagcacaagaaggggtgcggattactcgccgcttcgtttctgattcggcgttccctggctggctgacatag

SEQ ID NO: 39860 - DNA, 528 bp, Zea mays
  Peptide Sequence Number=SeqID_83235
atggcgaggacgcaaggaggctttgggtcgatggcggcggagctccggttgcacggtgaaaaggccgatgagcgtggaccgggcaaaacagaggggctaggggcaaaccagagggtgtctcgcgttgctggcgaggaggcggagttcagcgaggcaacggatgtgactgaagctcaacggcggagcaccatgggcgtgcgcatggtgcaagagagaggagtgaggccgaccgttggcagacttggagccgttggcacaccggacatgtccggtgcacaccggacagtccggtgcccccttctagccgttggctcggccacgtgtcccgcgcagatcgcgcgggccggccgttggctcgggccgaccgttggctcaccagacagtccggtgcacaccgggacagtcccggtgaattataagtcgtacgtcaccggtgaaattcccgagagcggtcagttcgctcgaaccagcttggcgcaccggacactgtccggtgcaccaccggacagtccggtgctcccagactga

SEQ ID NO: 39861 - DNA, 1011 bp, Zea mays
  Peptide Sequence Number=SeqID_83236
atgggggtgggcctgtggagcaacagaagaccgacgagcggcttgccgccgcccgctctgactacgacgacaatgacccccgctccggatggtcgagctgcagcagcgcaggcctcagggtgggcgctgctgcaatcttgccctcgcccacaccgacgctcgaggggcgaggacaagtgcgaagagccggaggccagaggcgcggatggtggcggtgaccccgtcggtgacggggacttctcgagccgcctccgcctcggcaccgacggcagagcccaccggctccccggcagatccccactcaaatcctcccggcgcggcagccgccctccgacaggaggggccgccgggagccaagccaacgggcccgacacgctggaggtgacgacgcccgccgtcgaccagccccgcgttgtcgaagtccgggccgcccgcagggccagtgagcgccctctcccccgaacgccgtgggaaagggtgactcgcgaacccgcgtgggaggtagagcgccggctcagtccggcccccaccccagcgaggatgatgaacatccttgaagctaagggtgggaccaagatcgcagcccggcttgcttctccccacccaggaactggcggtcaccgtcttgggcaactgcaccgccacttgcgccaccgtcgcgcctcttcggttgcggaaccaatgctgcgactcgaggcgacccagcggtgccagcctggtgcgacggtcaatgcggccgaaagtgggccggcagtaatgacggtggcaggcgggcgggagcagcggtcacgtcgtcagccaggctcacgtcccatccaggggcagcaagagagcctcctctcacggcgtgaagacggcgcacccgtgatccgtccctcagatctgggccggccttcggagggcacgcgcaacggccgccccgccaaccactcgccccgtcgcattaactccgcgacgggacaggcggcgtttctggcaggagaagcgggcgacgcttcgccttcgccgtaa

SEQ ID NO: 39862 - DNA, 1434 bp, Zea mays
  Peptide Sequence Number=SeqID_83237
atgaacaaaagacaccggcattcaaagtgccatcacaaacggaactccggttccgtccccgcgggtatggacaacctccacaccgggggagcctgcggggcgacaagttccggtcgactcgccagcgacctctgcagcagcagctatggtcccgggacgggcgcggccaccggaaggctctcgttcgcgtccccgctcaagggacgtgaaccagacatcaaagccaaagagccggaggccggccccctcaacggtggggaagcttcccccggctgccaccacgtcagcaccgacggcggcgtccgcctctccaccaacgccgcaccggcgaacgcggaccgctccaaagcgcaccggcaggtcctcgcccccgtcctcgccacgaaagcgaggaagaggacggaatgttgcatcctagctgggcagcaacagttcgccttccccggcatggctggaggacgcctcctccgcagagctggaggatgtttccaccaccagaagctagaagaggaggtggccagccgacccgtgcgggaggtagagccccggctcgcctcgctctccgccccagcaaggatgaacatccttgaagctgagggcgggaccaagattgcagcccggcttgcttctccccacccaggggctggtggtcaccgtcttgggtgttccccatccgggggctcggaaggtggaaagacacggtgcataagggagcgcgaagacatggtcgcctttcaaggaggtcaccctccttttaaaggcgactctccctacttgcgtccccagccgtcgcgggctgagtcttctccaacacgctccaagatcctccccctacggcgtgggggctgggtcccacgcgtcatgcaagctggcctggagcagaagaagccaaaccgccgcgcgcggtgcatgcaactgcccagcggttacgagcattcctccactttcgcccagaccagcgggcccacgcgtcaggcaaccggcgcgccggttgctacgtgcgagcaactgcaccgccactcgcaccactaccatgcctcctcgactgcggaaccagcgggcaggagcaacggtcacgtcgtcagccaagcttacgacccatctagggacaacgagagaaccctctctcacggcgtgaagacgacgcgcccgtgttccgttcctcgaacgacccgcgcacgcgcaaaggctgccccgcgaaccactcgccccgtcgcattaactccgcggcgggagaggcggcgcctcagacaggagaagcaagcgacgcttcgccttcgccataatgaccacgtcaaaaaagaggggttcaacagccgcctcagagcgcttgggttccgcgcccactactggtcagaggttcgaaggccgacccctcggaagggttcaacggccgcctcaggccagtcgggctccgtgcccactactgattag

SEQ ID NO: 39863 - DNA, 942 bp, Zea mays
  Peptide Sequence Number=SeqID_83238
atgggtcgagcgcgtgggcgagcgcgaaggggggagagcgaggtggccagagacgggcatgagagaggtggaaatcccgcggccttcgtgttcgtcccgcgcccaggtcgggtcgggcgacatgggggctcctccgaagctggggtcgagtctgtcttccgttgccgaggccgagcccgagcccctgggccgggcgaggcggaggttgttcggcagaggccagggcggagtccgagccctggggtcgggcgaagcggagttcgtcgtcttccgggtcttagcccgagtccgagccctggggtcgggcggagcggagttcgccgtcttccgggtcttagcccgagtccgagccctggggtcgggcggagcggagttcgccgtcttccgggtcttagcctgagtccgagccctggggtcgggcggagcggagttcgccgtcttccgggtcttagcccgagtccgagccctggggtcgggcggagcggagttcaccgtcttccgggtcttagcccgagtccgagccctggggtcgggcggagcggagttcgccgtcttccgggtcttagcccgagtccgagccctggggtcaggcggagcggagttcgccgtctttcgggtcttagctcgagtccgagccctagggtcgggcggagcggagttcgccgtcttccgggtcttagcccgagtccgagccctggggtcgggcggagcggagttcgccgtcttccgggtcttagcccgagtccgagccctgggtcggccggagcggagcttcctatggcgcctttggtagggcctgactgcctgtcagtctcactctgtcaagtggcactgcagtcggagtggcgacaggcggcgctgtccttctgtcagaccggtcagtggtgcggcgaaagtgacggcggtcacttcggctctgccggggggcgcgcgtcaggataa

SEQ ID NO: 39864 - DNA, 762 bp, Zea mays
  Peptide Sequence Number=SeqID_83239
atgggtcggcgcgagacggagcgtgaaggggggaggaagccggagggagacgggcgtgagaggtggaatcctgtggccttcgtgtttgtcccgcgcccaggttgggcgaggtggaggctcctccgaggtcgaggtcgagtctgtcttctgaggccgaggtcgagtctgagcccctgggtcgggcgaggcagagactgtcggctgagggccagggctgagttcgagccctggggtcgggcgaagcggagttcgtcgtcttccggggctgagcccaagttcgagccctggggtcgggcgaagcggagttcgtcgtcttccggggctgagcccgagtctgagccctggggtcgggagaagcggagttcgtcgtcttccggggctgagcccgagtccgagccctggggtcgggcgaagcggagttcatcgtcttccggggctgagctcgagtccgagccctggggtcgggcgaagcggagttcgtcgtcttccggggctgagcccgagtccgagccctgggattgggtgaagcggagttcgtcgtcttccggggctgagcccgagtccgagccctggggtcgggcgaagtggagtttcctatggcgcctgaggccggacttggctgctgtcagcctcactctgtcgagtggcacagcagtcggagcagcgcaggcggcgctgtcctcttgtcagaccggtcagtggagcggcgaagtgactgcggtcacttcggctctgtcgactggagggcgtgcgtcaggataa

SEQ ID NO: 39865 - DNA, 339 bp, Zea mays
  Peptide Sequence Number=SeqID_83240
atggagtatgatttccccaccgaacaaaggctccgacccaggctatttattgagatcccgaccaccgccccgaccatctcagaaacgcagggtgctgccgccgatgaacttgcgctgggccaatgccgggaccccggcgtgctgctcggaggtttgccaggggtcaagaagggtgtcttcatgaaggctgatgcgttggagtgccctgtggtggcttatttcctcaccgggcttggtgtccaccgtggaaccgcgctccaccgcagcggggactccttgcgccaccatctctggtatgatcctatgtcgttgattcgcttcactctgtacttcgcttag

SEQ ID NO: 39866 - DNA, 366 bp, Zea mays
  Peptide Sequence Number=SeqID_83241
atgaggaattgggcaaggcctggcccactactcctcctgctcctctcctgttggagcagcatcccgctcgaccgtccaacctggtggcagggtggtaggccaagtcacaccatcaaccatgtcctgaagcgtacctgcaaaaattgtgccacaagcaagactgagtatactaatactcagctagacttacccgattacaagaagtcaagcagtctcattagctgcgagaagcagacgattcgaatcgagtttttaaaccttgcaagggcttgcattcaaatgctggggctgcgggcagatcttctgtggcaggctcaggagctggctcctggtcttcctcgtggacagctccttgctcgggaatga

SEQ ID NO: 39867 - DNA, 549 bp, Zea mays
  Peptide Sequence Number=SeqID_83242
atgagtttgcggtatggccgtatttatacgctcggtgcgttgaaagctaaaagaccccacttgtcattgaatgttgctattctagcaaagggaaggtaccctcggactaaagtcggcattgcagtagaccggaataatacgaaggttgacacagagccgaaggctcaaaaaatcatgcttatagctgcaactgttgcaacagccaccaaaggtagtgctgccactggtgttaatcctccaatggttggccttgtcgagaagactgttgtcttgtttacaaaagatggtgatcaacacaataatcttcatgacatgtggttcatgtggtatcagcttgcttctggggagagctattactgtcaaggtgatcttggccaggccctaaaaaatttcttggcagttgaaaaacattacgctgatatgactgaagatcaatttgacttcttttcatattgcttgcggaaaatgacacttcgagcatatgtttctatgcttaagtttcaagatcgtttgcatgctcatgaatacttccacaaggttgctgcttga

SEQ ID NO: 39868 - DNA, 723 bp, Zea mays
  Peptide Sequence Number=SeqID_83243
atgtcttcttcctcccttatgtgtcgcgtctttccatcttccaagcccccggatggggggtatccgccgtctttccgtctccttgttggaggaacgcaactccgtgggagttggtacctttcagccatcgttcggcttcaaggattttcatcagccggcccggctgcacccccacgccggcggtcacccaagatggtgaccaccagttcttgggtggggaagagcaagccgggctgcgatcttggtcccaccctcagcttcaaggatgttcatcatcctcgctggggtggggtccaggctgagccggcgctctacctcccgcgcgggtctgcgggtcaccctctcccgcggcgttcgagggaggaggcgctcactggccctgcgggcggcgcggacttagacaacgtggggctgatcgacggcgggcgtcgtcacctccagcgtgtcggagtcgtcggcttggctcccggcggcccctcctgccggagggcggccgccgcgccaggccggtgccccactcgtctgggaggatttgagtggggatctgccggggggctggtggcccccgccatcagcgtcgaggcggaggcggctcgagaagtccccgtcgccgacgggatcactgccaccatccgcgccccgggcctccggttcttcgtacttgtcctcgcccctcgagcgtcggcgtgggcgagggcaagattgcagcagcgcccaccctga

SEQ ID NO: 39869 - DNA, 120 bp, Zea mays
  Peptide Sequence Number=SeqID_83244
atgagggtggaatggggtggttatgagatcgatgatggttttgattatgactatgatgctggcgaagatgaagctgtggaaggagacttccaggagttccaagactacgacgagttctag

SEQ ID NO: 39870 - DNA, 1071 bp, Zea mays
  Peptide Sequence Number=SeqID_83245
atgggggacacccgcagtccttccgcctggtcgttggaggaacgcaactccgtgggagttggtacctttcagccatcgttcggcttcaaggattttcatcacgcggcccggctgcatcccctcgccggtggtcacccgagatgggagagggcgctcactggccctgcgggaggggcgaacttcgacaacgcggggctggtcgacggcgggcgtcgtcagcttcagcgcgttgggctcgccggcttggctcccggcgccccctcctgccgcaagggcggttatcgcgccgcgcgcacgggaggaccgcccaagacgtcgcgcgctgccagggcggcgttcgtgttctggggcggccctacctttgcaccggtacggcgcctccgcgcggaggtcggtgccccgctcgtctgggaggatccgagtggggatctgccgggttgcagcggtgttcgccctgaggccatcgctgctgcagttcggccacccgtagagggggtcgttgtcgctactgctggagcgggcgacgactcgcctgttggttgtttgaaccgcttcaccaagcgtgagtcgccccgtgcaaaggtgacgagtgaggagtccctcggctcggtcggccttgctgtccgaggcttctcttgcttagttaaaggaacccctcggccgctcttcgatgagccgaagccaggggtagcggtgtcagcatggacagaggcagagttggctcaaaaagaagacttgatcggccggagcctggccgggtcgtccgttagcgggaccgacgccggagttgatctgccaaggcctcgggccgggctgatgtcttcaggggacaactggccgaggcctcggggtgaccagccgagccgcctgctcgagccggattcttggaggagacccaggcggcgatggcccgggcgagatgatgaagccgtccttcagagtggagatcctcggaccgcgtcgccgtccgaggctaggccggacctcgccgaaggtgtagttgacgccgagggtgctgctgctcccttcaaccgtcaagatccgagcctgcaggatcggattatcttgtag

SEQ ID NO: 39871 - DNA, 1714 bp, Zea mays
  Peptide Sequence Number=SeqID_83246
gagtgcttcagcgttgacataccgcgtgctcccggcggggactgttagacccgagacaaggcatgctgctgatgaggatgatgactttatgccattatccaagaagcgtaaattggacgacagccctgggaaagttttgaagaagatattaaatgacagacagcaacaagcaattgcacgtaggggattttctagtattcttgatatgagactggacgcactcggcagtagatcacacttagcttggctgatggaaaagctcgaccacaatgacatgacaattcgagctggccctggaaaggagctgaaaattacaaaggatacggtgcacctaattttgggtttaccgaatgctgggggaggaactgcattgggcatcgatgaagctgttgttgccaacaatttgagagctgaacttgggctatcgaaagaagattttggggttacagctctacaagatcgtttgaggaaaggttctgacgatgatttaagcatcagatgctttttcttgatattgttcaataggttgttgttccctactgccagctggggaataacgaaccatgaggttcttttaaccgagcagatggatcgtttccaccagattgactggtgccagcttattttcaatgatttatgccaagctgccaagaagtggcataacaggagcgttactaacgtttctacaaccatctatggatgttccatcgttattcttctgtattatttggatcatttgcatgactcagcggcaccccagaacaaacgtggaacaccacgaatcaaatactttgataggaatattattcaagccctgacaagagctgacaagggcaagatacgcaaaggagaagaagcatttggacattgctcgcataagaccaggaccaacacttttgatgttcctcgtcctgacccatctggacagcactcaattcacatcgaactcccgctcatcagggatttgatatcaagcaagcttaatcagcttccatcccgccaccgcatgggtttcatagagaagctgtcacattttgatgcggaggttggtaaagcgtgtacagttattaaacagactcttcagcagattgttgagaaacaattcaatctatctgatgtttttggcgagttaattgatgaggtcctccgtgccgaggcgggtgacaacgaagatgcttatgatgtgcagaaaaccacatcaaaatcagatgatattcttccccagacagctgtttatcagctggatacgcagtttacagacacacagggtaaacatggtgacggtggcaagaacatgccgaccaatacaaacgtcactcctaaagcaacaccacacatggatcctgacgcgccgatatttgatgcgactccgcaaatcaagtgtttcatccaatgtgttattcatgatgcaaaaaatcagcagacttccatgagttcgaacagtttggttcttgatgttaatgttgggtcaatactcaactttgaggaacaggaacgacacagtcgcaatcctcaaccttttgatgaatctgtactccacacacttctagacaattcattgcctgagacagatgagttggaccaatgcaaagcgatcatggtccccatgggcaacaccagtgagatacggtctcttgcgctgcattacatcacattccacccgaagaacaaagcattatcgctgctccaagacatccaaagattcaaggtctaa

SEQ ID NO: 39872 - DNA, 777 bp, Zea mays
  Peptide Sequence Number=SeqID_83247
atgacctggacctccgaatacgacccgagacctcctcgttcccctgaatgggacccggacacctctaagcgcgtctccgctccccgctcaggcggggacccggtgctgccacgtggcgtacgacccgtgaccggtcatcatgacttgtacgatgccgaggaaccttctgctgcacgccaatccaacccaagcggcggatgttggggcacaaggagatatcacaagggcgggtgcactccgccacccggccggagaattccctctccgacagtctcctacaacactacaacactctcatcctcgcactacgaggccggccacatcgacactgctttgcgggtctaccaagacatgatcgtgtctgcgcccttcctcccctctgtcttcaccttccgccacctcaccaagggtctcgtcactgctggccgcatcggcgacgcctgggacagggccttcgagctcttcaacgagctcgcagagaggctccgcttccaacgggcccccatccccatccctcctccatgcccaaccaccatcctccacctgctcttcacgcaccccaccgacccactgagatgggaggatattatgtgcccactcgtgctcttccacgactaccccgtgctcctcgcaaccgtgacccgcttccgcggcccttgccactacctgcttctatatcgcctagcacgctgtcgtgccgggaccgttgggtcgctcctctgctgcctcttcgtgctccatgacatgctgccgctgctctactacgacgacgactag

SEQ ID NO: 39873 - DNA, 180 bp, Zea mays
  Peptide Sequence Number=SeqID_83248
atggcgcacgatttccgggcggactctggcgggttgaggaatcgggctgaagtttgtgccgagtttgtggaaagggtggacctggacatcgggtcccacaggcgaggtcgggtgctgggcaggcactcgctaggggtccacctctcagtagctgagagggcgctaggaggggcccacagg

SEQ ID NO: 39874 - DNA, 729 bp, Zea mays
  Peptide Sequence Number=SeqID_83249
atgactcagcatgtttccatgatttcaattacactgtcccccagagagctggacaagcacactcccgggtaccaagctccagtgtatgttgaacaaccaaggcaacagcaggtgccaccaccacatcgccaaccacgcagaccaccagcacaattccagcagctggagtatgaagattcttatgcacggggtcgaggaagaggcgtgggcgtggaaggggctggggtagaggtggctacggtggctatggtggatatggaaacaaccaaggtggctatcatcagggtggtgggtattatgacaatcaaggtggagataatggctatgataatcaagacagatatagtggctatgataatcaaagtgggtatggtggtggatatggctataaccaaggcagatatgggaactatcaaggcaatgacacatcttgataagttgatccagaaaatggtggatataaccgagacacaggaagtggtatgcgaggaagaggcaattggggttaccgaggagagtgttgtcgtcgactgtatctccaaaattcctttcgacaccattcaattgccttcctccgactacattgtgatcattgaccaccattgttctctgtactatgacaggggtgaaccaagcacaaaaacatcagctcatgctcatgtggggtggaaacagagctttcaatgcatgctggaggtgcgcgatgtgatcgatattatccatgcttga

SEQ ID NO: 39875 - DNA, 459 bp, Zea mays
  Peptide Sequence Number=SeqID_83250
atgatggccgtgtctctgcagctgcgcccaatccctcgtctccctccgtcgagaaatcgctgcgcaggcacaagtccgcggatggccgccttgagctgcagatacaaccagatccatgttaggcatactgttgttgagaatttcctcgtttacatgacctggacctcccctaccaatgtgcaagggcgaacaaggctcacaagccacataacacgcagagatgccctgtcgttcatgtcatccggcgtgctggccgcattcgtgctcgtggtggccagtccggcagaagctagaccttcgagattggagaacaaaaggaaagccctggagaagcttgagaagctccgggagaaggcgttaggcccgaaggagaagagcggagccaccggtaacggtaaggagatgccccctccggcgaacttgctaatccctcctgccgccgtggaggctttcttgtga

SEQ ID NO: 39876 - DNA, 753 bp, Zea mays
  Peptide Sequence Number=SeqID_83251
atggcggggatgtactattgcgcgcgcgcctgcctcaactggaggatgcaaccaccggcccgcaccgccatgcggaccttcttttcccccgtcgtcaaggcaaaaggctccgcggagaagagatgggtccacagatcccagtggggggtcaatccccaaaaagccttcacaaaccgccgcgaagatggccgcttgcgtgatggagttggggttgagattgtgcagctccaccccgtagtaatgcaggagcgcccgcatgaaacggcttgcaggcactccgaacccccgctcatggaaggagacgaaactcagcacataccccggcggcggggtcgagccggtcccgctcggagggaccatccactctggctgcgggccaccggagaggggacggagcaagccatcggcgacaagggcctccagatcgtccaccgtgacggtggagaaaggccacgggtcgcgcggcggaacgacggttacccggtcggccatcaccaagtgaagggggtggcggcggagcggacaagggaccgggaaaggggatactccgaaagggatccttctccgcgaaggaagcgggcctcgagccctcctactgatcaggggttcgaaggctggcccctcggaagggttcgacaaccgccccagagcactcgggcttcaggctcattactgatcagaggttcgaaggctggcccctcggaagggttcgacagccgcctcagagcactcgggctccgcgcccactactga

SEQ ID NO: 39877 - DNA, 1161 bp, Zea mays
  Peptide Sequence Number=SeqID_83252
atgcaggaagctctcgtatctccggccaatgccggccgccttcgctcggccttggagctcaagccgttcgccttcggggaccagcgcctcgcctcgccgcgctacctcaacctcgcctccgtcgccggcggcggcggcggcgacgacgcgctgttccgctgctcctcgccgttcagccccagcttcggcttctcctcgccgtcgccgctcgccacctcctccaccatctcgctctcaccgtcctcctcctcctccctcgtcggcgactgcgactgcgacgacgacgccgacgccgacgccgccacgggccacaggctccagctcgcccgcctcgcgctgcagtaccaggaggtggccgaccgctacgagctctgcctcgcccgcctcgccgacgccgcggacgaggcggcggcgctccgccgcgagaacgccgagctccgcgtcgccaacggcgacctcacgcgccgcctcgcgctcctcagcggcattggcaagcaggccgccgccgccgcgatcgccgacgaggtccgccggctgcgcttcggggagcagaaggccgccaaggagcgcgctcccgagaagcctgccgtgctgcccaagagcatttccgtccgctccaacgactacctcaagatgaaccagccgcaacaggtacaggcccccgccacgccggccgaagacaaccgcaagcctcgcgcgtcgaacccgaccaccaaccgaagctcggtgagctcccccagttcacgatcacgcctcgccaacctcacaccccgctcgttggcatccgacattgttgcatgcaccttgctgatgcgatgcatggatcagcagcgcgtgtacaagggcaatggcggcgacaagagaagcgaggaacccaaggagcatcgcacggcgggcggcgtggagctggaggtgtacaaccagggcatgttaaagacggagctgtgcaacaagtgggaggagacgggggcgtgcccctacggcgaccagtgccagttcgctcacggcgtcgccgagctccgccctgtcatccgccatccgcgctacaagacccaggtctgccgcatggtcctcgccggcgaggtctgcccctacggccaccgctgccacttccgccatacgctcacccccgccgaacgcctccacctgccccgcccttaa

SEQ ID NO: 39878 - DNA, 501 bp, Zea mays
  Peptide Sequence Number=SeqID_83253
atggaagccgaggcgttcccgatccggttcacgaagggcatcaggtcctactggcgccggcgcgcggacggcagcggcgcggcgggccgcggcaggcgccgtcacgggctggtgcgcctcggggatggcagcgggcccaagccgtgggccgcgaggatcggcggcatgttccgggcgcgccgcgtcagggctacggcgccggcggcaccgtctcgagcggcgaccgtcgccaaggtgcccatgcgcgtgctcgggcggatacgggacgcctacgtcgacgtgatgctgggcgctgccaagacgcggccggccgcggcgcgggcgctgcccagcgcgcccgaggcgctgtggcagaagcgggtgcccgtgcgccggtccagcagcagccaggccgggcggaagcccgatgagctcggccagaggctcgtcatggagatgtacaagtccgtgctcgcgtccaggaacatctccggcatgctccaagcgtcggtggcgcgatag

SEQ ID NO: 39879 - DNA, 303 bp, Zea mays
  Peptide Sequence Number=SeqID_83254
atgggagcacgggctggaccaacgacggcggtgggttgtcggagcgcgggctggacgagagtcggcgacgggagcgcgagcgggctggacgagaggcggcagtggattggacagggcgacggtagattggacagggcgacggtcagccggagcgcaggacggacacgcaacggcggcggtcagccggagcgggcgagccaaagagcaggacggacacgcagcggcggtcagccggagtgcgaccggagagcaggacagcgcgtcagcgccgacagtggtgaagactgcagcgaaggagaatag

SEQ ID NO: 39880 - DNA, 438 bp, Zea mays
  Peptide Sequence Number=SeqID_83255
atgtgtgcaagaggtttaatgtggcctctcattgccaagaagaaggggagttggtactgtttgcatctggcttattctggtggtatcctctcatggggtttaatgtggcctctcattgccaagaagaaggggagttggtacccagctaacctggaagactcaagtttacatgggttgcaggcttacagggttttcatttccatcgctttgatccttggagacggtttatacaacttcattaaggtgctaatccgcacaattgcgggtttcatatcaatggtgcagcaaaattcaaaaagcatgcttcctgtttgggggaaactgaacctactatcctcaaatatagtactcagaatagattacttcgacatagtattcagaatagaatacaaaaatatagtactcagaatagattacgaaaatcatgattgcatatag

SEQ ID NO: 39881 - DNA, 414 bp, Zea mays
  Peptide Sequence Number=SeqID_83256
atggcgccgcacaccactgctggaggcgagggcggggccggggccgaggatgaggtgtccgaggcggcgactgcatcccccgcgctgcggcaccgccacgcgggcaagggcgagggcgaggggctgggcggcaatggcgtcgctgggggcgacgaccaggcgtatgtggagcgggtgttcgcggacaaggcggtgccgtcgtggcaggagcagctcacgctgcgggcattcgtcgtcagcgcgctgctggccgtcatgttcagcgtcatagtcatgaagctcaaccttaccacggggatcatcccctccctcaatgtctccgctgggctgctcggcttcttcttcgtccgcatgtggaccgccgccgccgagaggatgggcttcctccgccagcccttcaccaggcaggcctaa

SEQ ID NO: 39882 - DNA, 249 bp, Zea mays
  Peptide Sequence Number=SeqID_83257
atggcgcctgaggctggactcggctgctgtcagcctcaccctggcgggtggcacagcagtcggagcagggcaggcgacgctgttttcctgtcagaagcgttgaaaactcaaggtgggcaacttattatccctgtcactctgcttcatgttgctgcatttgctcttgggtactggttatcgagattatctacctttggggaatcaacctctaggaccatctcaattgaatgtgggatgcaggttgcttaa

SEQ ID NO: 39883 - DNA, 216 bp, Zea mays
  Peptide Sequence Number=SeqID_83258
atgcagagctacaatgtcacccggaaggtgacgaagctacaaaagtcgttcctatgggagcatagagtaagatccgaagctacaaaagacgttcctaagggagtgcagaatgcttcatctcagacaagaagactagaatacaaaggcactttgtacaatgaaaaaatgcttcgatgtgaacgaaaagaagggaaagtgttttttgccttcggctaa

SEQ ID NO: 39884 - DNA, 1965 bp, Zea mays
  Peptide Sequence Number=SeqID_83259
atggacaaggatcgccaaggggcagcgcaaaaacgccaggcggctgtcaggcctcatgaagctaggccgaaaaggcagcgggggactgcgaaggctgcggcctccggcggaggcaagccgccgctggcggcgaagtcgggcgcctctgcatctagcaaggcgccggaggctccaaatcgacgaaggtggtgccgccggcgtgttgccgacttcggcaccgatattaatgtggacgactatcttggtgggtcggacgaaggaaaacttgctatagttgcgcctgccgcggcgatcgcgacggctgccatagtgccgaaggcgaggggcgaggctcttggcgccggaggcgaggtgtcggccctcgcggttgtcagggacgaggcgggcgcagcgacccgccggctgaaggaggtgacggaggcgctgagtcaggtggctgacttcgccagccgtactgcgtcgggggccctcacggcagctgtgtctgccgaagtcgagagacttcggacgcaacatgctgacgctgtccgtgaaaaatcggcctccgacagcaagtgccgtaaactgacggacaaggtagcggcactggagaaggagaaggctgacctccggcgccaactggcgggggagaggagggaggccaacgaggccatcgccaaggagcaggctgcgcaggcggaggccaaactggcgcgggcggaaggcaatcttgccaaggagctcgccgaacatctgcaggagcggctcaccgccctggagagccgcgtgaagggggccgaggccgcgatgcgtgcggaggccgaacggacgcgcacacagcttatggatacatatcgtgagctgggtgcgcggaccggtgacttcgaggtgccggaccgagagcccgggcttcgctgtctggaatgggtgcaggaagagctgcaggaactccccactgtcttgggggggtttatgtcgtacgcctccctggtcacctgcgagggggcgatgaacgcactctcccgcgaagggtgccggcacttcgaggtcttcgaccaggcagatgaagattttgagcgagatgtctataaggtcgaagaccccgtagtgaaggaatccgccggggccctctatgaccggatgtggggtccgcacggtcgtgaggtggtcagggagcgggccgaggctgcgagggctcaggcggcgcgtggcgagcgggtggacgacttcggggcattgaacagcgcgctgcctgacccggagccgacccctgcggaggccgtgtctggggtcgcatgggagccaaccccgaagtccgcggaagacgcaccggatgcccccacatctgctgcggccggcgaagacctgcccccaaaggtggccgaaggcgcacctgatgcccccgcagctgctgtgccgagtgctgaagatcccgcggcggtggcggcggaaacaacggcggaagcagcggcggagccaacggcggaggctcccgcagcgttagggccttcgcaggttcaagattttgggcctgcgcacgcaaccgctactactgaatttttggcggcttcgaccgcggaaggtggtaatgaatatggtggatctgcatctgagttttttgattttactgactctgggagctcggttgagtggactgaggagtcgtcggaggaggacatggattattttgcggccttggacgtggctgcggcggaggcttcgccacacgccgcggacgcgcaagacgtgccaggtcctagcaccgggcgccgacgacgaagggcggttgcaaagcgtagggttagtacggaggaaggggctcggcttcgtgtgagtagggctggtcggcaggaactgttgtctttgccggccgccgcgagtacaggggaaggggaactgcgaagtctttttgcgggtgaggagcttaggataatgttgtttaattatagggagatgggaattattcctaaggttgagccgatgtag

SEQ ID NO: 39885 - DNA, 855 bp, Zea mays
  Peptide Sequence Number=SeqID_83260
atgagtctcggtgtagtgtctccgtctgagtcgattaaggaccgtgtcgatgtaggcttgctgaccgaggaccctttaactggtcacatgcctcatcatgggatccactttagtaagcatttctgcaaaacagagtctttgattattgaaaagccttaccttgactcccttaaccagcatacccttgagagtcttttctttagtcgagtaagaaagaagatactgaacttgtcaagtggttcaggggcacctacagggttgtctgagaaaatgccgccgcgcacaaggagaacagcgcgcaaacatactggaccgattggtgtgccgagtcaccagctggccccaaggcatgataatagtagtagcggaagcaatgatcctataggggatctcgaagctgaagtaagtcggctccaagtggaactccgccgtaggacggctatatgggtcgtagatggcgaccgcataaatgagttgagaagagatgttcgccatctgcgagatcagctcgcggaccgagatttggcactcgactgggttgttcaatcccgttcgcttgcatgggacaaggagcaaaaagctcaagctcgagtagccgagctcaacttggccgttgatgacctccagacatattgcaataccttacatgaagaagttcatgtattatattcgcaactgcatcccagtgatcctacgaatcctgtcgagtcggaagccgaaccctcgcatgttgcgggacaagcgcttggtggtgagttagacctttttcagccccctccttctatgaggctggtcgacgaatggtctcccacacccgacgacgaggctgccaaaagcaacgggaagcaggaataa

SEQ ID NO: 39886 - DNA, 450 bp, Zea mays
  Peptide Sequence Number=SeqID_83261
atgtggtcaatagtgcggtcgcggcggcttccttttcttccaccggcgaacgctcatgagcttctcccactccctctctctctgcttggtgcatctatatggctgagggggtcgccatgggctccatttatacccggaggtcatagaccgaggggtattgtcggtgtcgtaacaatggtagaggctgacccgggcttcctagaacagtccgtgtatcgaggtggccaacaggagatgaacctgacaactagggcccacacaccaatgaaagcgacaagcgcaggcgttgtggccacgatggcgcgagggtctggcatcacaggcccaccaactagtgagaaagactcagtcactcacgcggtggaagactgggcagtggccccatttgtcagcctccgcagacggcgccctgcgcgtgaccagagctggcaagtggggtcagagacctag

SEQ ID NO: 39887 - DNA, 372 bp, Zea mays
  Peptide Sequence Number=SeqID_83262
atggagacaggggcgacgtcggctggacaccctagggcggcagcgggagaggaccaggggcggcggcgggagaggacctggggcggcggcgggtatggatccaggggcggcggcgacgggaggggatccaaggggcggatccaggggcgacggcaggagtctcctccgacggatgcacgcgctggctggctggctggaaggaaacaacgctcaggacaaaaagaaatgaagcgttatgtttgtaaagagtggcagtgcggctctctggtaattaatatatggagtatgagccctacttcatgtagaaaagttaaataccatttgaaggagagtttggcatggagctgtgtcagtgtaacacctgggttttag

SEQ ID NO: 39888 - DNA, 654 bp, Zea mays
  Peptide Sequence Number=SeqID_83263
atgggccccgatggtcagtctccccttccctttgctttcctttcttgcttacacgtgggccagccatgtcagccgtctcgccctgctcgaatccattgcgacatcgccggatttggctcctccgcatcgtgcgtgccgcgattacggggggtggggttccccgaacgattcgtcaaggttgttgcagctacgcaccatgcaccaccgacttcgttggattctgggcctataaaactgtgcgcaagtcgtgaccgggagggaagagaagagagaaaccgagatgagaacgctgcggcaacctctcaccgccactaccgctcagggtcagtcaattgggttgggggagcttcggccgtgcctgggaaggttgggatggcatcacggttgttgaagggtccgcggggtgccctgaattgctcaccggtgcgagcagatcaccgccgctcgccgtggccagggttgtacatgttaccatccccgaattgtgcagggacagcgctattcggcaaaggcgccgccgcgcgggcgggcacgccgccgtcttcgtcatgtgggaggaagaggtactgtggggcgttgatctcgcggccagcggcttggattaacccgggaatactgcttggtgggattggatcaccgccgtggattcagtaa

SEQ ID NO: 39889 - DNA, 348 bp, Zea mays
  Peptide Sequence Number=SeqID_83264
atgggcctacccgacagccagcaatcaaaaaggaaaagacaaggggcgcaaatgggctggccaaggctattttggcccagtcgcagaaggaggaagggcagggtcgagatgggctggactgcattcggcccagtgcacaacaagtcttacccgtccaaggaaaaagactctcaaggatatgctggcctttgggaatcaagggtacacgctactctcgccatctctccacttccattgcatggtggcctatctggtattggtccgaccaaggcaaagcttacccatgatgagaggtatttcttttcatatgttgaacccatcacgcccgtgatggatccaccatcataa

SEQ ID NO: 39890 - DNA, 153 bp, Zea mays
  Peptide Sequence Number=SeqID_83265
atggtttgtttacagatcatgaggaggaggatggttatgattatgcttatggtaatggttgcctttggtgcaacctatgctcaggtaaagaagaaggtgtcgatcggatctccaggagttccaggacttcgatcagttcgaggattaggctag

SEQ ID NO: 39891 - DNA, 189 bp, Zea mays
  Peptide Sequence Number=SeqID_83266
atggctgttagccagttggggccggaagatccgaggagaagtggttgcggtcacagcggcgtcatcttcgcggttcggttgaaggagaagaagacccgccctgacctgcgggacccaccaggaagtgacaccggatattcattaggtcaggtacggttatggcaaggagaggttgtggcaagggtataa

SEQ ID NO: 39892 - DNA, 77 bp, Zea mays
  Peptide Sequence Number=SeqID_83267
atgaccgatctaataggcatcgacgacaccaacgacgcgatcgtcatggcatgggtggtcgacctccacgacgtgag

SEQ ID NO: 39893 - DNA, 441 bp, Zea mays
  Peptide Sequence Number=SeqID_83268
atgtgggtcctctttcaccgggtcgtctccctcgcgagaaattcgcgccgtgggcggagccaatggcccgagcgcagagcgcggaactccttccccttctcccggaactgcaaggccacgaccccgactccgtgggctcggtggataaaagccgagcgcacgcgctccttctcccctatcccctcttttagcccgatttctcatcgccaccagaacgccgccgcgcgccgtgtgaggggattcggtccgccgtcgtcgaccggtcgatttctcagcgataggaccgaagtctggggtgcgggagctacgcctggtgcggtgggtcacggctgtaaccttgcattggcgcatcgcgcggcgaacttcggggaattcctcgccgtggctgaagactctcggtcggaccgcctaacgccgtgggcagagcttcttcgcgggtga

SEQ ID NO: 39894 - DNA, 153 bp, Zea mays
  Peptide Sequence Number=SeqID_83269
atggccaggacgactctgaccaccactgatcgccacccgaccatcgacgagttcgccaggacccccccgatctctgtgaccacttcaccggagttagaccgccgcatgggtaacgacttccactttataccccaaattttgaaaaaagcttaa

SEQ ID NO: 39895 - DNA, 354 bp, Zea mays
  Peptide Sequence Number=SeqID_83270
agatgctttcgtgtggaacttgaggctcaagagcatgcagatcgagtattagagaaaattgtgaagaaggtaactcttctatggatggaacactggtcgcaggcttacaaggctttgagacttacgggcaggagatggttaggaagtatggagaagactgattggcgaggagcgcctaccatcgacgctgaagttgtgcattctattggaggaaagtcccatggacgatattctatgtttaccggtgtgatcgattcgacggagttgcagtctcgtggcggttcttcgtcgcaggcgggttgtggtagcagccgtagtcggcactcgagcatggaagaggctacgagggagtag

SEQ ID NO: 39896 - DNA, 777 bp, Zea mays
  Peptide Sequence Number=SeqID_83271
atggagcagcggatggtcaacggcgacggcgcaaacactcctcccgtgtggagatttcagaacggtggggcaccccgcgcctgcgcgaattccacgcccacgacgcgcccgccattctcgcggaggctgttggaacaaagagagctgacacgggggtccacccgccagtgtaacggacgcaagggaaccttttcggagcacatcgacaccttccagatcgagtatagatcagcaacacattctggcacgcccggtgggaccatctacgtcaacatctatgacattagttgcccagatgccgacctcatcggctctttcgagagcacccgcaaccatgacatctggtggaaggggttctcgcccgagggcactcttgacgaggttgacctctcgttaccttcggaacaacacactagggtgttacgtcaagaagtcaactacatggtcgctcattcactccatcgtcactccaagagcctgatgaatgcatttgaacctatggttgttatcattgttcaagagatcatgaagcatctgtactctccaacaggctcggtactgggaagtcacaaaggggagattcctttccagaccaggccacctataccgtattcagttgctgccctagaaacacaattggcctcttcatcggcatacgttgtgtacaagacttgtggaggtcctgaggattgccagttcttcaatgagcagcctaaccacatcccacacaaatattcatgcatgtatgtgccagactatgccacaacggtgcagtag

SEQ ID NO: 39897 - DNA, 753 bp, Zea mays
  Peptide Sequence Number=SeqID_83272
atgccccctgcaccaccacatggcatcccggctgttggaggagaccttgacagagacggaggcgacgacgacgccggtggaagtttgagccacggcacggagcgctcggaggagccggagccggagctggaggggtggattgctagacccatcactcgtgacactgctcgcgggtgtcacttccatgacgctctcgataccatgttgcgtcgggccttataccgacatacctggtctatcgagtaccgttgtgtagtctaccagcatcgtcgcggcctatacctggaccagtgggaggctacctgcttggtgcgccgtccggacgatgatctccggggtgcagatgccttctcagagcactattctatcactgagagggacactgccgaggcagccatgcacgatgcagcacgacgagcactttctcagtattgcttgttgttcagcggggtagcagacggccttgacctgaagtactaccctcgccgttcgaccggtagtgctggaggtgtgattgtctcgtcagttggtgagggcaatcctaggctgagcagcttggtcaacctggccgccgtgctcaacacagagttagaccacgtcgttgacgagttgggcaaggttcgggcggaggttgcagaattgcgtgctgaatgcgcggcacgccactatcttgatggtggttctcccgcccctgtcgagattcagcacccttaccatttaccgcccgtggtcgcttcgactatggtaccctag

SEQ ID NO: 39898 - DNA, 717 bp, Zea mays
  Peptide Sequence Number=SeqID_83273
atgaaatccccggtggcggaaactccctacactgctccctcacgcaacagcggtggcaagggtaatggcattcggcccaagtcggcccatttagacagctcgcgcgcccgcgcgtcccctgtgtctgactggcgggtcccgcctgtcggcgccgaccagcacgctcactcctctccctctctctctgtcccgtgggccagacctgtcggcgctggttctctcgcgcgcacccgctctccctctctccgtcccaccgtccccacctgtcagcccatctctaacctctcgcccacgatctccccaccgtggatgcacccacgaccgcgcgttctccagccacatccgagcccccgcgtcccttttgagcccagcgccctgctcgcccacctcccctctctcatttgcgccttctgtccagctccctcgccctctctctcagtttgcctgcacgaaccgagagctccgccaccgcccgccgatgcccaccgcctgttccgtggccgccgttgcgctcgtgccctgtctagtgccacggtgagcttcgccttaccgtcaactactcgggacacccttcggtgtgccctctccctccctgttgcgtccggtctgcgctcaccggagcgttttcttgcgcagccggagtccgccaccgtcaccccgtcgagcccctacgcctccgccgtcgtttcgcgacgccagcgcttctgctcgaggtaa

SEQ ID NO: 39899 - DNA, 183 bp, Zea mays
  Peptide Sequence Number=SeqID_83274
atggggagtcatgatccccgggcaaaatgggaatcacggctcatgggtaaaagatacttgatcagagatggttggtttacaggtggtgacaaggatgatggttatgactatggtaatggtaaagaagaaggcgtcgaggcgaatctccaggagttccaggacttcgacgagttcgaggattag

SEQ ID NO: 39900 - DNA, 354 bp, Zea mays
  Peptide Sequence Number=SeqID_83275
atggcgaggtgctccgacgagggcatgagcgacatcgggtcgagctcgcgacggaagccgaacgcagatgagctgtgcaacgccgacgaacggcggtccctaggcgctgtgctcaagcaagggcgagagtcgggagagagaaaggagtggagaggagcattattggatgctgagaataacaactggagagcatatttgagttgttcacctccaggtgcaatgaagaggatccctgcgcctgccccctgcagcttcagcgagccatcgaaatacatcctccatacttctgcagtctcctggttatctggtacttgttgctcggtctactctgatacgaagtcaactagtgcttga

SEQ ID NO: 39901 - DNA, 111 bp, Zea mays
  Peptide Sequence Number=SeqID_83276
atggagtccaggcacagtgcttgctctgccgaggctgagtgccgaggtaaagaagaaggcgtcgaggcggatctccaggagttccaggacttcgatgagttcgaggattag

SEQ ID NO: 39902 - DNA, 240 bp, Zea mays
  Peptide Sequence Number=SeqID_83277
atggtcgtcggcgagtccgctggctgtctggagaccggcccctcatccctggtatgcgcaaggaagactgagaaggacgtcgtggagttacagccatggaagagaaagagatacttgatcagagatggttggtttacaggtggtgacaaggatgatggttatgactatggtaatggtaaagaagaaggcgtcgaggcgaatctccaggagttccaggacttcgacgagttcgaggattag

SEQ ID NO: 39903 - DNA, 465 bp, Zea mays
  Peptide Sequence Number=SeqID_83278
atgcgctcagccccgcaccgtgccaaccccgcatccacgctcgcgtccgcgtctataaaggccactccaggatcgctcgtacacccccgcgcgtcactgacccaacccgagctcaagttcgccggagtttgccccgtgagcgaggtaccagcggccgtgcaggccacggccaccgtaggccagccaaatcagccactcccgtcccgcccgaccctcgggttagcttctacggatcccagtgaagctcccagagaagggattggactctacctcatcggaaacgccggatcgacgtcgccggacttcaaccggccgccgtcgcacgtagaacgagctccacaagagtacatccttgttccggagcaaggagttgctcaggaggtagtccaggagccagcaccagagcctaccatcgaggatctgcctgccccagcttttgaaggcaagccccggctttatgcataa

SEQ ID NO: 39904 - DNA, 630 bp, Zea mays
  Peptide Sequence Number=SeqID_83279
atggacggacttgcacgagagggttttccccatattttgtgggaggtactgcagggagccggttatgccacgcctccgcagtacgcggtgcagctgttcgaggagcactgggtacccgctgtagaacgaagaaggaactctacatcgcatagcggatccgcaagcgagaaaaccttcctcgataatctccgggaaagccggaacaaagcaggaaatagcacaacctccagcgctctgagcgaagactacctcctccaagccaggagcggaaaattcattcacccgaagaaccccgttgtccacctcatccatagaagaatggacacggattacaaggaaaaaaagaaacaaagacccgtcaagctgcccttctggtgcctccgccctcaaaggagaacagaaagaagcatgtcgtcacgacaactccgttctaccccgatgttctctttatctgggagagagtggaatcgtcccccatctccgacgacgaagcaaccgtgcctggagaagaaccacctcagtgggaagctcgtcgatgaagtaaccgacgccgtaacgcccgacgacatcatgaagccagagaacaagacccggcgcaacctgtgtcatgagacgagatctcaaaggtag

SEQ ID NO: 39905 - DNA, 156 bp, Zea mays
  Peptide Sequence Number=SeqID_83280
atggggctcggtgtatgcggctcgttctgccaaggtggtgacgaggatgatgtttatgactatggtaatggttgtctgtgttgcaaccactgcttaggtgaagatgaagtcgtggaggaggacttccaggagtttcaagagtacgacaagttctag

SEQ ID NO: 39906 - DNA, 936 bp, Zea mays
  Peptide Sequence Number=SeqID_83281
atggctgaaaggtaccaacttccccgaagttgcgttcctccaacgacaaggcggaaggattgcgggtgtcccccatccgggggctcggaaggtggaaagacacgatgcataagggagcgcgaagacatggtcgcctttcaagggggtcaccctccttttaaaggcgactctccctacctgcgtccccagccgtcgtgggctgagtcttctccaacacgctccaaggtcctccccctacggcgcaggggctgggtcccacacgtcatgcaagctggcccagggcagaagaagccaaatttttctcgcgtggtgcatgcaaccgtccagcggttacaagcgcccctccactttcgcccagaccagcggacgaaagggcgagcagccatgcaggcggcatgcaaccacgccaagtgggcgcacctctccgacttccaacacgcccagcatggaggcccacgcccacgcgtcatgcaaccggcgcgccggtcgctacgtgcaagtaacttcaccgccacttgcaccactaccgcgcctcctcgactacggaaccagtaccgcgactcgaggcgacccagcgcacgacccagcagcgccagcctggcgcggcggagaagcaagcgatgcttcgccttcgccataatgaccgcgttaaaaaagggaccgggaaagggggataccccgaaaaggatccttctccgtgaaggaaacaggctccgagcctccctactgatcagaggttcgaaggctggcccctcggaggggtttaacagccgcctcagagcgcgtgggctccacacccactactggtcagaggttcgaaggccggcccctcggaagggttcaacggccgcctcaggccactcgggctccgcgcccactactgatcaggggttcgaaggctggccctcgaagggttcacagccgcctcagacatag

SEQ ID NO: 39907 - DNA, 390 bp, Zea mays
  Peptide Sequence Number=SeqID_83282
atggggggtagggaggaaaatctgcttgtggttgctgccgtgcgcgcgatagaactcaagggagggagacgcagggagctcgggcttgagccgagctgctgggcgccggccatggagcaggggcttgcccagaggttgttcgtcatgggaggagcaaagagctcgcagggagaaacggcgaccggaaggggagctcggctggcgtccagcttggaggaaggagctcgccgcaagggaaggccagcggccatgggactcctgcgcgctggtggctgttgctgtggagcagggaggaagaagggcgccggcttgctgctcgccatggagggaagcgcgcagagctgctgcgtgagggagaagaaggcaggggaaaaaggaagtggcggctag

SEQ ID NO: 39908 - DNA, 108 bp, Zea mays
  Peptide Sequence Number=SeqID_83283
atgggggggaggaagaagggcgccggcttgctgctcgccatggagggaagcgcgcagagctgctgcgtgagggagaagaaggcaggggaaaaaggaagtagcggctag

SEQ ID NO: 39909 - DNA, 264 bp, Zea mays
  Peptide Sequence Number=SeqID_83284
atgtcccaactaatgggaatagtggagtctaccaagatcaccctagataatagggaggaccttgtggtagacctgtctactgagctggtggaaaaggacctccaggtggagcagatggaaattcaagacatggaggcagaaggggccgatgaggatgtcgacatcgagggaggagaggagccggagcctgcgtccagcttggacactgctggctcagggagaccaccttcccctgagtctagcgttgcctcgtttgcccattag

SEQ ID NO: 39910 - DNA, 420 bp, Zea mays
  Peptide Sequence Number=SeqID_83285
atggcggctctcagcccccttacggaagcaggaggacgtcagcaaggactcgacagccccgacagctgtccctccgccaggctccagcgctcctccgactaccacgacgccacacgaaccaggaaggaccagggccctcttagagaaggttggccgcacgggaggacggggcgacgcgtaaagtccctcgctctctcccacgtggacgcttgtaaccccctactgcaagcgcacccgacctgggcgcaggacaacacgaaggccgcgggtttcccctttttgcctgtctccctcctttggttccccccttcgtgctccgtctcgcgccgacccatctgggctggggcacgcggcgacatttcactcgtcggcccagggaccccccggtctcgaaacgccgacagttggcgcaccaggtag

SEQ ID NO: 39911 - DNA, 93 bp, Zea mays
  Peptide Sequence Number=SeqID_83286
atggcgcctcctgatgacgtggtcggtccgtgccctaggttgggcgatgtggaggctcctccgaggttgaggaagcgcatggtggtggtttga

SEQ ID NO: 39912 - DNA, 240 bp, Zea mays
  Peptide Sequence Number=SeqID_83287
atggccggaaggagggatggccgcgtggcagtcggagctagtgccctccaccgcggcggtcttatccggagcaaagaggtcttcgcggggagatgcttgccgcccgatcacctcgaccccggcgcaaatcgcggcgcggataggtcgtcggcgtcatctgacagccaggatttagggcagatttactccggatttttaatggcaaccagtggatcagctaatgacaaagttgttgtctga

SEQ ID NO: 39913 - DNA, 435 bp, Zea mays
  Peptide Sequence Number=SeqID_83288
atgggcaagagcaagaagggcggaagttcatcgcgtcactccggcgataagcagaaacgcaagccaagtccaccctcggaggactttggtgactccgagtactcagaggaggagttttcctctgagtctgaggggtcgctggcctacacctctcccccggtgtggacgtacatccgggtcgtcaagcgctccgggctcgagggctcggatgagtcgaagatctccttggacaaggaggactcctctgactcgtccgaggaggggagcggtggtgacggcgacgacgagggcgacagcggcgatggaggcgacgacgatggtggaggcgacggcaacggcagcaagggcgatggcggcagcggcaagggcgacggcgacatcgacaagggcgacgacggcagcggcagggccagtggcaaagcaccactggcttaa

SEQ ID NO: 39914 - DNA, 489 bp, Zea mays
  Peptide Sequence Number=SeqID_83289
atgggcaagagcaagaagggtggtagttcttcgcatcactccggcgacaagcggaagcgcgagccgactcctccgtcggaggacttcagcgactcggagtacttggaggaggagttctcctctaagtccgagggctcaccggtccatgcctctcccccggtgtcgtctgatgactcagacgactcccaggggctcaccgcagaggtgtggacctatatccgggccatcgagcgcgccgggctcgagggctcggatgagtcggagtactcctcggatgaggagaactcctcggactcgtctgaggagggcggcggcggcgatggcggtgacggcaacgacgacggaggcgatggtgacggcggcggcgacggcaacggcggtgatggtggcggcaaaggtggcagcggcgacggcgtcgatggtagcaagggcagcagcaggggcagcaacaagggcagcagcaagagcagcaacagggccagtggctag

SEQ ID NO: 39915 - DNA, 309 bp, Zea mays
  Peptide Sequence Number=SeqID_83290
atggcgcagtcgctggagctgatgctaatccagttttttatggggagctggttgatccaggccgtgctttgttccattggttacatgataatgcattatggtcagattatggtaactgatactgtgatactattatctgatgaccttccatttctggttacttgtggtctagacctaaatctgcttagttcttgttcatggcacatcttcgatcacaacccacaacttaagcttttgcagaacttcctttgtaaagagctaaaacatggaatagccgccatgtggaagcaaacgacaaatgtcttgtga

SEQ ID NO: 39916 - DNA, 1491 bp, Zea mays
  Peptide Sequence Number=SeqID_83291
atggatccctccccagccccagccccagccccggctccggctccggtcccggcccctacggtggtcgagtggcccgagggcggcgcactgacgcgggactgggtggcggggctggcgtccacgctggactggtgctcgcggcacctccccgcggaccgcctcccggcggtgctcccgcccgcgctggtccagcgcctggtcctggccgccgccgccatcctgcaccgcgagcccaacctcgtccgcgtcgacccgcgccccggccaggccgtcgtcgtcgtcggggacgtccacgggcagctccacgacgtcatcttcctgctccgcgacgccgggttcccgtccgaggaccgcatcttcgtcttcaacggcgattacgtcgaccgcggcgcctggggcctcgagaccttcctcctgctcctcgcctggaagattcatgggcgtagattgatgcatgtcaaggcagtcaataaattttccagaggcggtacaaactggctgagttgttttcgtggcagtggcagtggcagcgcagaggcgcagaccgtggcgaataatggtctctcctttgtttggattggacctaagaacaagtataggtgctactcccaaactgtgtgttccttctccggggaaaccacgaatccaagtactgcacgtcaagtatatggtttcgagaaggaggtaatgactaaatacaaagatcagggccctcaaatttaccggaagtttttaagatgttttgaggaccttcctctggcgacaataatagcaggatgtgtgtacactgcacacggcggtatcttccgtggaacaattgtagtgccatcaaagaaatcaaaaaagggaaagaagggtcacaaatacaaggcgaattttactgttgatctgacttccatgaaacttggatccttggatgagttattgaaagcaaggagaactgttctcgaccctccttgggaaggctcaaatttgatccctggggatgtgctgtggtctgacccttccttgcagatgggtctttctccgaataaagaacgaggcataggtttgctttggggtcctgatatcactcagcagtttctgaggacaaatcatttgaagctaatcatcaggtcacatgaaggtccagacgcgagagacaagcgacacgatctcttaggaatggataaaggatatacgattgatcatgaagtagaatgtgggaaactaattactctcttcagtgctccggactacccacagtttcagtattatggtattaactctttgtttctggacctggtaaaggcttcagaggagcgatacaacaatcgtggagcatatattgtccttagtccacctgattttgctacccctgttttccatagcttcggagctgtaaagcctcgacctgcggcccatccgttctatgattttgaacaagtgatcgactcagatgaagaattggatttaatcgccatggacagcggcacgtcgagcctgtcatga

SEQ ID NO: 39917 - DNA, 1653 bp, Zea mays
  Peptide Sequence Number=SeqID_83292
atggcgtcccgggacgacgggtggggaggcggcgaagacggcagctcgctcttcgagggcatggtcctcttcgcgccagagcccaccgccgccgaggactcggtccctgcccctgcccctgcccccgcccccgccgaggactcggtccctgtccccgccgctgtccctgagctgccatccgccgcccgccacgacgccgacgcggcctcgtccgtgccaccaccgctggacgaggatctcttctccgatctcaccctcttcgccccgccgcaggagccgctctcgctggagcagacacccccgcccctgctcccgcaaggcgaggatcggagccacgcggcacttgccccccgcgccgctagcccctactccggggctctctcggcagccgtccacctcgtcgctgcgcaagaagaagagggcccgtgcgcatcggctgctgctgcgatctccgctagtactatagccttcctggacgcttcgccgtatccggccgctactcgtaccctcgaccagctccctgatcggcaactcgatgtccatgtcaacggctacgaggcgcacgcggaggcggtggatgttgataccaattcaccgcatgtggtggaggcggtggatgtggataccaattcgccgcgtgtggaggaggaggaggcaaaggaggacgatgacgggaaagaggatgaagatgctggagtggcagccttgggggtcaaggagaggctaggtctcctcagatctcaaatctcgggcaagctcgactccatccagcagagggctgctgctgtggctgccaagaggaggcttctggctggccggcggaggaaggtggcggaggaggcgacctccgtggcatccaggcacaaggatttggagagggagctggaggtggcctgcgaggctgaggactttgagagggcagagagtatcagcgactccctcgctgccctcgagaaggagaaggatgggctgttgacggcgctgcgtgatgctgagcttgactacgattcagtggattcggagttgcaggaggtgcttgagtcccgtattgctgccgaggaggaagctgctatccttctggagcaatttgcaaaggatgcaaatgaacatgctatttcagagagcaaacaagcacaagaattatcgtcgaaagaaatagaagggtggcaaacatcaatggagttactagaaacaaagaagttggaaatggaggttgaaacacagttggttttagaagcacgttctgggttggaagggtcaatagagcatttggttgaagaagacaaactagaggaaggtacacttagtataaaaggagaagtcctcaccaaggagttagctgaccttctagagttggtgaggttgaaagaagcagagatagctgagaacaatgcccggatccatgaagttcaagaaagaataagtgcagtggtctccagattccatggctctcagtcagatgttgatttgaagctcaattccttgaaggaagcccaatgtaaactggatctagagactgaagcacttgtgttgaaaaaaaatgaaattgataatttcatttctttaacagagcaaaaagattcagagttgagggaaatttattggtgcttgttttctctgaagcaaaaacttgccaacaatcagttgaaataa

SEQ ID NO: 39918 - DNA, 78 bp, Zea mays
  Peptide Sequence Number=SeqID_83293
atgaccaggatcgaaggcctcagcacagggagcttcgtcaagagagctcattcaaggaagaagaatggagagctgtag

SEQ ID NO: 39919 - DNA, 324 bp, Zea mays
  Peptide Sequence Number=SeqID_83294
atggtggaggctcatcggagaagacgaccctcgccggagccgaacacaaaatcatcgattggggatgaactgttggtcggatcgacgaatcaaaggtaccagggcaaagctctcgatgaggcgaatgctacggtaccctcggattctatcaacgacgcacggatcgaaagtaattgctcgccggatttgttgccagagttggaaccacctccgaacttctgcgatcgatttcgggagtttcaaattgaatatgagggcagggtttcgaattttggaaagggctcgacgagaggattccagccacatataccatacatatattga

SEQ ID NO: 39920 - DNA, 528 bp, Zea mays
  Peptide Sequence Number=SeqID_83295
atgaccgtgaactttggaatctccagctggcataaccacgccaatggctctgtcgcctcacctatgtgtgatataaatccgtaccccatgcctcttggctcctcatcaatgagcatcgtgcgttccacctgcatcaccgagagggatagaacgaagaaggattcgccatgggggcgtgctcatggccttctcggacacggggaactaccagactcgttgggatttcacggccctacctcgccaatctgtgtttcctgggcggccgcagtgcgtcaccatgagggatacccactcaccgaggattttggccctaataagtgggcatacacaatgatcagatgctaccgcgtgtgccgagctcacattagatcagggttggaccaccgggcaccaggatggatcacgtcgcggcccaagcgcatggataccccttcggccatgggacaattgcatatgagcccagtcattttgtacaatcaacccgcattccactttagcgtaaagatcatcttagattggtccttttaa

SEQ ID NO: 39921 - DNA, 717 bp, Zea mays
  Peptide Sequence Number=SeqID_83296
atgaactcaagactcccgaaacggagcaccgtcccggggctagaaaggttgctggagactacccatctggagcttgacgggaagctgttcgtcaacacgcagcaggcccctacctggcgcgccaactgtcagcgtttcgaccccggggggtccctggaccgacgagtaaattgtcgccgcgtgccccagcccagatgggtcggcacgagacggagcgcgaaggggggaaaccggagggagacaggcgtaaaggggaaacccgcggccttcgtgctgtcccgtgcccaggtcggccctgggtcgggcgaggcggaggctcctccgaggtcgaggtcgagtctgtcttccgtggtcgaggtcgggcccgagccctggggtcaggcgaggacggagtctgtcgtcttccggggccgaggccaagtccgagccctggggtcgggcgaggcggagttcgtcgtcttccggggccaaggtcgagtccgagccctggggtcgggcgaggcggagttcgtcgtcttccggggccgagcccgagtccgagccctagggtcgggcgaggcggagcttcttatggcgcccgagatcggacttggccgctgtcagcctcactctgtcgagtggcacagcagtcggagcgacgcgggcggcgctgtcttcttgtcaggctggtcagtggagcggcgaagtgactgcggtcacttcggctcagtcgactga

SEQ ID NO: 39922 - DNA, 987 bp, Zea mays
  Peptide Sequence Number=SeqID_83297
atgaccgcgtcaaaaaaggtgtgccacgtcattcgatttcgtatccttttccacttcctctttctctctcttgccacagggatcgggaaaggggatacttcgaaagggatccttctccacgaaggaagcgggccccgagcccccttactgatcagaggttcgaaggctggcccctcgaagggttcaacagccgcctcagagcactcgggctccgcgcccactactagtcaaagccgcctcagagcacgcacaacgagggatgaccctgggtacgttcgatacataaccaaggctcgggctatgctcccgaggaagctccgcctcgcccgaccccagggttcggcccccgtctcggcctcggaagatggacttcgcctcgcccgaccccagggctcagacacagcctcggctccggaagacgacggtctccgcctcgcccgacccagggctcggactcgacctcgacgctggacaacgggactccgcctcgccccgaccctagggctcggacacaagcctcgggcctcgaaagacggtctccgcctcgcccgacctagggctcggactcgacctcgacgctggacgatggactccgcctcgcccgacccccagggctcggacacaacctcggcctcggaaagacggtctccgcctcgcccgacccagggctcggactcgacctcgacgctggacgacggactccgcctcgcccgaccccagggctcggacacagcctcagcctcggaagacggtctccgcctcgcccgacccagggctcggactcgacctcgacctcggaagacggactccgcctcacccaaccccaggggtcggactcaacctcggcctcggaagacggactccgcctcgcccgaccccaggggtcggactcaacctcgacctcaacctcggaggagcctccacctcgcccaaactcgggctcggaccgaccacgtcacaggggggccatcattaccctacccctag

SEQ ID NO: 39923 - DNA, 1020 bp, Zea mays
  Peptide Sequence Number=SeqID_83298
atgctggacgcgtcgaagtcgaaagggtgtgcccccttggtgcggttgcatgccgcctgcatggcggtccgccctttcacccgctcgtctgggcgaaagtgggggaatgctagaaagcaacttcgtgaaagttggtacctttcagccatcgttcggcttcaaggattttcatcaggtagcccggctgcatcccctcgccggtggttacccaagacggtgaccaccagctcctgggtggggagaagcaagccgggctacgatctctgccccgtcctcaacttcaaggatcttcatcaccctggctggggcggaggccgggctgagccggagctctacctccctcgcgggttcgtgggtcatcttctccctcagcattcaagggagagggcgctcaccggcctagcgggagggtcggacttcgacaacgcggggctggtcggcggcaagcgtccgctgaggtggtggcggctgaagaagtcctcgtcgtcgacgggatcactgccaccatccacgctccgggcctccggctctttggctttgatagcttgtcctcgcccctcgagtggagacgtgggcgagggcattgttgcagcggcgtccgcccttaggccatcgccgctgcagtttggccacctggagccttatcgccccgcgggccctccgatgtggggggttgactcgcctgtcggctatctaaaccgcttcaccaagcgtgagttgcctcgtgcgaaggtgacgagtgagaggcagagttggctcgaaaagaagacttcgttggccgggccgtccactggcgggaccagcgctggagttgagttgccgaggccacgagccgagctgatgtccacgggggacagctggctgaggcttcgggccggccgagccatctgctcgggccggattcctggaggggaccctggcggcaatggtccgggcgcggtgctgatgtcgtccttcggggcagagatcctccgaccgcgttgccgtccgaggctcggttggacttcgccgaaggtgtag

SEQ ID NO: 39924 - DNA, 477 bp, Zea mays
  Peptide Sequence Number=SeqID_83299
atgggtgctactggtatattatgtgactctacccatgatgcagtcacaaaagaatgcgttgctccattatcaaataagacatttgcagaatggtactcgattgaaaacgtacctagtgccactcctggagtctactggattgtgtcagcctccaagtggttcaactttccatactgggcacgagggcattgggagctgcctgctgctgagctgctttctttgggcaatgattcacccaatggccttgttccccacagtgaaaacacgcacgacttcctccttgcgctggtgctgcttggttgctctggttggttgttgaggcaggaagacgggctgcctggttgctctgacgctggtattgatttcctccttgctggttgttctgatggtactgctgctgttgctaaggaaactgtctctggtggtgctgctgctgctggttctgatgctggtgctggtgctggtgaccttgcttga

SEQ ID NO: 39925 - DNA, 390 bp, Zea mays
  Peptide Sequence Number=SeqID_83300
atggttaaaaattttggcagcaaaacagtgcaaatagcaatgaatgctgtggtaacttcacaactacttgtcagtttatatagtgctgcagtggaccgcaaggatcaaacagtaactctgcaaggtgggaccgacacgcgctcggaagtcggatcgtatctccgcaacgagctcagggaaggtgttttttggaccttcggcttcccgaagctgaagaggcttttttcacgggtcaagctcgttacgaagaacgatctagcaccgcgaaaggggctattgttgggtttgtgcttcggtgcgccgaaggtctcacacgaagaaacagcttcggctgaagtcgtctccaagagatggccgaaggtcccttttcatggagcttcggcgttttaa

SEQ ID NO: 39926 - DNA, 264 bp, Zea mays
  Peptide Sequence Number=SeqID_83301
atgcatgacccagacggccagactcctctacaatgcatccgttcatatgtctgctgcatcaagttactactactactacgacggaacgagcagcaagatgcccggatccatctatcagcggaggcgctcgcgttggcgtcgctcatcgacgacgagaagaagcttggcgactgccagttcgacctctggaagcagtactacgtggtcgcatgcgtcgctctgttcggcaagctccggcgcagccgccgcttggacgtggcctga

SEQ ID NO: 39927 - DNA, 162 bp, Zea mays
  Peptide Sequence Number=SeqID_83302
atggccgccacgcaaaccgctcgccccgtcgcattaactccgcggcgggataggcggcgcctctggcaggagaagcgagcgacgcttcaccttcgccatgatgaccgcgtcaaaaaagagaccgggaaagggggataccccaaaaaggacccttctccgtga

SEQ ID NO: 39928 - DNA, 615 bp, Zea mays
  Peptide Sequence Number=SeqID_83303
atgagcaagcgacaaccgggtgtcctcggcgacatccaggacgacgacccgctccacctcgcccaccggctcttccccgtttacactgccgcggacccaccgccgacgtcgtccctgtgggcgctcgggataggccccgcctatgcgccgccgccaccatcgccgcggctctggtggtgggccgccatcccgatcccgttacacgccttgccgccagtcgctcctcctccggccaatcccggccctgggaacgacgagaacgacgacggcaagaaccggagcgccacattgccggtcgctctcgctcctctggtcggtaccggtggcggcgccgtcggccggcgccgatccgtgccacgccggaggaacaggcaggcctacagggtgtgcagccactgccagacgtcggagacgccgcagtggcgcgagagtccggacgggtcagtcaccctgtgcaacgcgtgcgggctacgctacaagaagcgggggctgctgcctgagtaccggccgacgactgctcctagcttccaagccgggcagcactccaatcggcaccagaggataatgaagatgagggagcagaagaacgggtcatcaagctcatcaagaagctag

SEQ ID NO: 39929 - DNA, 1419 bp, Zea mays
  Peptide Sequence Number=SeqID_83304
atgagcaatcaaccacctcacgcctcgctgcaggatgacctcccggactgcgacggcgacgacccgctcgcccttgccatccggctcttccccgcccacaccaccggcgcgggtctatcgccggcggcgctcggcataggccgcgtcgccgagccgccccgtcgggagcaggagccactggctaatagcacgtatggcgtacgcggagccgggccggatccttggggcctgcgcctgtccaggtccgttcttgggggcctcgacggatttgacgtggacacattctttgctgacgacgcgctggacggcggcggcgaggcgaccgaaggcgactcgccgccggcgcacgtgacagccgccgcgcgcggctcgttggccaacgacgacgcgtcgccgttgcccgcggccatgccagccgtcgcccttgaagcgtacgacgcgtgcagtgcacctgtgccagcagcatgcggtggcgcgccgcccgtccttgtcgccaacaacagcatgccgccagctagctgtctcggcgcgcgcggtgcactttacattgtctccaaacgcacacgcacgcatgcgccgccgccactagcggcggaatccatgacaccggcagtcgctcctcctccagccatgcccgacggtgggaacggtggcaataaccggagcgccgccttacctgtcgctctcgctcctccgtccgggagtaccggtggcgccgtccgccggcgccgtcccgtgccacgcccgcggaacagggaagtccagaggacgtgcagccactgccagtcgtcaaagacgccgcagtggcgcgagggcccggacgggcgaagaaccctgtgcaacgcgtgcgggctacgctacaagtcgcataggctggtgcctgagtaccgggccgcagaatccatgacaccacgcgatctccacccaaacgctgggctggtcggcgcgtcttcaggtccgagcagccgcccgtcgtcgtcatctacaacgacgccatcgcagtcgcagatcgacttcccatcccacgccttgccggcagtcgctcctcctccagccatgcccgatcccgacggtgggaacggtggcaataaccggagcgccgccttgcctgtcgctctcgctcctccgtcggggagtaccggtggcgccgtccgccggcgccgtcccgtgccatgcccgcggaacaggcaagttcagaggacgtgcagccactgccagtcgtcggaaacgccgcagtggcgcgagggcccggacgggcgaagaaccctgtgcaacgcgtgcgggctacgctacaggtcgcataggctgctgcctgagtaccggccgacgacgtctcctagcttccagatcgggcagcactctaatcgccatcggaggattatgcagatcagggagcagaacggaacagctgggtcatga

SEQ ID NO: 39930 - DNA, 324 bp, Zea mays
  Peptide Sequence Number=SeqID_83305
atgaacgagtacaacgacgacggcaatcacgccgccttgcctgtcgctctcgctctcgctcctccgatcggtactggtgctgacgacagtgccggtggcggcgccgtccgccggaggaagaggaacagggaaacctcgaggcgcaccctgtgcaacgcgtgcgggatacgctacaagcagcgggggctgctgcctgagtaccggtcgacgacggctcctagcttccaggtcaggcagcactccaataggcaccggaggataatgaagacgagggagcagaagcagaacgaaacatccgggtcatcaagctcatcagggagctag

SEQ ID NO: 39931 - DNA, 483 bp, Zea mays
  Peptide Sequence Number=SeqID_83306
atggggcattactgtaccagtactacttatgtgaagtatggctatgacgagcagaaaagacaattactagatgctcctataatcttctatttgtcagacaaagaatcaaagatggatgcttctcaggcatctaatggggagctccacactagcgtgctcaaccactatgctatcaacgtttgcaccatagtaggacctcagtacccattttatggaggaggagctggcaggaacaagacctcaacccaagcagtcacaccagtagtctgctcctcaggttttgctggtctcacgcttcttatcataggtgacgagagcaaagtcaagaaagaaatacttggccccttgccccctcccctctcaagaattgttgcggtagatgaaactgaagagggtcttcaagttcttaaattcactaagatttttatggttcattcacagtcatggttcactaaaaaatcaaaaagaattatgtggatttag

SEQ ID NO: 39932 - DNA, 588 bp, Zea mays
  Peptide Sequence Number=SeqID_83307
atggccatcttgacgcgctacgtagttgttatctcgagttttgctgcccccaaatggatatctaatcaaaataatttaagaactcccagagcagcttccaagctgaattcaataggcgcagttgtggtaattctatatttgaaaaatcatatatttctccccacgcactgctttctccccactaacgacgcccttccccaacggctgcgaacgcccttccccaatgtctccttctacgcgcgtcttcctccccacgcgctgctctggccgagatgccgccttctacgacgcgaacgccaacagagccggagcccgagcccatcccgccttcaacgccggatctcgccccaaatcctcgccagccttcaacaccggcagccgctccccaaattcctccccaccaacgacgcccttccccaaacccctccctgccttcaacgcagacagctcacccaaatcctcgcccacttcccatcgatggagaaaggggtgttacttaaggaccatgccacccccaagacagataggcgttgccaacaatcccatccgggtacatctctgcaatccatgaaccaggactctgaatga

SEQ ID NO: 39933 - DNA, 1974 bp, Zea mays
  Peptide Sequence Number=SeqID_83308
atgggtattaccagcaacgacgcggcccctcgtgccgtcctcctccgcttcttgtttctgctctgcataggctgcaaatgcctggcatcagaggtagaggccacccagacggcgaccctcgcggtggacgcctcgccgcagcttgctcggaagatccctgatacactgttcgggatcttctttgaggagatcaaccatgcaggggctggtggcatatgggctgaacttgttagtaacagagggtttgaagctggaggcctccatactccatcaaacattgacccatggtccatcattggagacgactcctctgtatttgtggagaccgatcgcacatcatgtttcagtcgaaacatcgttgctctcaggatggaggtcctttgcgataactgtcctactggtggtgttggtgtttacaacccagggttctggggcatggttctgatattagccatgtttaagaacatagaagaaggaaaggtctacaatcttgttatgtttgttaagtcaccagaaacaactgacttgacagtttcactaacaagctctaacgggttgcaaaatctggcttcagctacagtaacagtttccggcgaatcaaactggataaaagtggagcaaaagttggttgctaaaggaaccaatagaacctcaaggcttcaaataacaactaacaagaaaggagttgtctggtttgatcaagtatcactcatgcctgaagacacatacaagggacatggctttcgcacagaacttatatccatgattttggatttaaaaccacgattcttgagatttcctggaggctgctttgtagaaggtggctggttaagaaatgcctttaggtggagagaatctattggtccatgggaagagagacctggacacttcggggatgtttggcattactggactgatgatggccttggatactatgaatttcttcagaaagttccctcttgtaactcaggagtcagccacaatgatgaagttgatactgttgctattgctccttttgtaaaggatgtattggacagtatagaatttgcaagggggagtgcaaattcaacatggggctctgttagggctgcaatgggccaccctgaaccattcccagtgaaatatgttgcaataggaaatgaagattgtgggaaaaaattttaccgcggtaactacctcaagttctacaatgctataagacaggcctatccagacattcaaatgatttcaaactgcgatggttcatctacaccacttgatcatcctgctgatttatacgacttccatgtctataatgattctaagactttgttcaacatgaagagcacatttgacagaacatctcgtagtggacccaaggcttttgtaagtgagtacgctgtttggagaggtgatgcaggtagaggaagtcttcttgcttcattggcagaagctgctttccttactggactggagaagaatagtgacattgtttccatggcaagttacgcgccactattcgtaaacgacaatgaccagacgtggaacccagacgcaatcgtcttcaactcctggcagcattacggcactcccagttactggatgcagacgcttttccgcgagtctagtggtgctatgttccatccaacgacaatcagctccagctactcaggttcacttgcagcgtctgcgattacctggcaggactccgagaacagcttcctaagagtcataaacttcgggtcagatgctgtgaccctgacaatctccacaagtgggctccaggccagtatcaacgctctgggatcaaccgccactgttctcacatcagcagatgtgatggatgaaaactccttcagcaacccaaccaaggttgtgccggtaaagagcgatctgagcaatgctgcagagcagatgcaggtcacgctggctcctcgctccttcagctcgttcgatctcgccctggctcagtccaagcttgtagcggagatgtga

SEQ ID NO: 39934 - DNA, 306 bp, Zea mays
  Peptide Sequence Number=SeqID_83309
atgggcgtgcctgacttctgcgcgcgctggcgcgcaattaatgcgtccgcagtggagcagccgttgcaaattcccgaggctgccatgttccagagccgcgtcctcttggagcaccggacactgtccggtgtacaccggacatgtccggtgaattatagcgcgtcggctctgaaaattcccgaggctgaggagttcagcgcgaagtcccctggtgcaccggacactgtccggtggcacaccggacagtccggtgaagagcaggtgctagccgaggaggaatactacgacgagttcgacgatgtctag

SEQ ID NO: 39935 - DNA, 642 bp, Zea mays
  Peptide Sequence Number=SeqID_83310
atgtcgcgtgcgttcaacgactactatatcgaggattgtggcgccatcttggcgccggaggtgacacagaggaggatcgacaacagtgaccagttcgtcatcctcgccaccgtcagggtccacacctgggtgggtgatgtggatagtggggtccgacgcgacaaggctcttgctggagttaggcgagatgatcctgcccccgcaattggtgccaccagagaagagcttttctcggatgaatccgcgatgcggacggtgtcgttgactgtgactcgacggtacgtgcatgagcacatcagatcacatgaaggtctatacatgtttgggaaagatgatcggggtgttgaagatgatggtcatggggtcgtcgtggatcaatgtcgcaccccctacttggcgcgccagctgtcggtgtttacggtccgactacgcaccacatggttcccatgtgatgcttttgagcaggacgacatcgttgactgtgactcgatgcatgtgttcctacttatctggagttcggtcgcttcctctgccgagtttaacgccgagagtttagcccttcaggtgtgcacaacctcttcgcgcgagatatcaacgtttcagtctgcgcataactcggacatccagtcttcgtcttcttag

SEQ ID NO: 39936 - DNA, 204 bp, Zea mays
  Peptide Sequence Number=SeqID_83311
atgtccagagatgaaccccgcacgttcattgttcacgtgcagtcgcataagagccacatgttcgcatttgagaacaagtccccaacattggcgcccacctccggtgaaccctttttcgaccaccttcggcaagcactgaccttcgtcatgccaccgaagaaagtttcagcgccaaagaagggaggaagcatacaggttctctga

SEQ ID NO: 39937 - DNA, 614 bp, Zea mays
  Peptide Sequence Number=SeqID_83312
atggcgcctcctattgacgtggtcggtccgcgccctaggttgggcgatgtggaggctcctccgaggtcgaggtcgagtctgtcttccgtggccgaggtcgagtccgagcccttgggtcgggcgaggcagagaccgtcggctgaggccagggctgagtccgagccctggggtcgggcgaagcggagttcgtcgtcttccggggctgagcccgagtccgagccctggggtcgggcggagcggagttcgccgtcttccggggctgagcccaagtccgagccctgggtcgggcggagcggagttcgccgtcttccggggctgagcccgagttcgagccctgggtcgggcggagcagacagtcggagcggtgcaggcggcgctgtccttctgtcaggtcggtcagtggagcggcgaagtgactgcggtcacttcggctctgtcgactggaggacctttgtgctgatgggggttaccagcggagaattaggagccttgagggggcgtgtcgccggtgcatggtactaccacccctccacgacacgcccttcgatgccgtcggccgcgcaccagcagtaccacggcgtgctcctgttctaccccgctgccgccacctacgg

SEQ ID NO: 39938 - DNA, 279 bp, Zea mays
  Peptide Sequence Number=SeqID_83313
atgggaatcggtgggtacctcttggtcgacgggcggtgggcgaagtcacgtcagggactgactgcaccgtcgtctcaggggaaggagtatcatgtcgtagctgccgtcgagggacatgaactcaagactcccgaaacggagtaccgtcccgggctagaaaggttgctggagactgcccatctggagcttgacgggaagctgttcgtcagcacgcagcaggcccctacctggcgcgccaactgtcggcgtttcgagaccggggggtccctgggccgatga

SEQ ID NO: 39939 - DNA, 264 bp, Zea mays
  Peptide Sequence Number=SeqID_83314
atgaagtgtgggcgcggcagcccccgcccccggctgctcgggcttggcccctcacagcgcgggcccccggccactgcggcgtggacgcgtgacccccggcgcgagggtcttcacgccggcacggcccggcgcgcgctggcgaggcccctccgacgactgcgcgcggctgctatctccggctacggccacggtgcgggagcagcgaccccagcaccggcgagggctcgtgtcaaggccatgaaagagatgaacactgcagtctga

SEQ ID NO: 39940 - DNA, 696 bp, Zea mays
  Peptide Sequence Number=SeqID_83315
atggaaacaagaagagcttcgaggtaccgagtgcacggtagaaggtcaaggaggctgaggaacccaaagccaaggcgaggcatagtggagaaggcgaggagcatggcgcgcaaactagagatcccccagtggaagcacgacggccttccgtcgccgacgagcccgctggaccgcgcgtcgccccgtgggtggcgccaccgcgacgccgtcggaggcgtcgggctcgggatcctggcggcgctggaggccgagggcccgctgcccggcgccggcgccgccgccgcgccgcgggtgtccatcccgcggcgcgcggcgcggctggaggtatcggagctcgcgtgcagcgggcggtgcgccaccagtctgtgcggcggcccggtgtccggccgggccggcggcggcggtggagcggcgttccgcgtggcggagttcctctcgtgctgcgacatgtgccgccgggcgctggacgggaaggacgtcttcatgtaccgcggggagcgcgccttctgcagcatggagtgccggtaccacgccatcgtgagcgacgagttccgggaggcggaggaggagaaggagcggaagcgccgcgcggcggccgccgacgtgcccaggaagtcggccgctgagatggtggccggctcgccgtgcagcggcggcgggcagatcttcttcaccaccggcatcgtcgtcgcatga

SEQ ID NO: 39941 - DNA, 394 bp, Zea mays
  Peptide Sequence Number=SeqID_83316
atggtgagtccgtcaggatcatcctcctcgagcaccaacctttttgttgatcccgctccaccctctgcctcctctctggtgatgctcaacatccgaagccatgcctccatcgtcctctctaccgatgcaggcaacttccgtcagtggcgttcgtattttgaactcaccttccacaaattcggcctcctcgatcatatcgacggcacggtggatgccgccgctaagttcgacgaccccgaatgccttcaagttgacgcctggcatcgtctcctggctttacaacacgatctccacggagatctgggaacgacgtcaaccgccccaacacctgcgcctactccgcctggactgcgatcaacaaccagttcctcgacaacagccttcagcccgccgt

SEQ ID NO: 39942 - DNA, 753 bp, Zea mays
  Peptide Sequence Number=SeqID_83317
atggcacctgcggaatccggggagaaggcgaccagcttcgccatggcctgcagcctgctcagccgctacgtcaggcagaacggtgccgccgctgccgatctcggcctcgctatcagaggtgaagcctcttctcttgttgaggaaaaatttggggtctcgaggagagtgctctatcctgtttcagctgaatccgatgcaaagaggacgtcgacggacatggaaaagggggagacggggaaggagaccatggatctcttcccccagatcgctggattcggctcggaggccgccacgaaggaagcccctgatgcgagggagccagagaagcgccagctgactatcttctatggcgggaaggtccttgtgttcgatgacttccctgctgagaaggcaaaagacctgatgcaaatggccagcaagggttcacccgtagcccagaaccctggcctgctgcctccctccacagctgcaaccgttactgacagcaccaagatcgcagcagtgccagccgcaccaattgctgtggccaacgcccagaagagtgcagcagatataccgcaggctcccaaggcatctcttcgcaggttccttgagaagagaaaggatcgccttactgcgaaagcaccatacccgggttccccttcagatgttacacctgtgaagaaggagatgtcggatggtcagccatggcttgggctgggacctcagatcgccaaccctgatctgagcttgtccaaggaggcgagccagtga

SEQ ID NO: 39943 - DNA, 828 bp, Zea mays
  Peptide Sequence Number=SeqID_83318
atgtcttcttcctcccttatgcgttgtgtctttccatcttccaagcccccggatggggggtacccgccgtctttccgcctcatcgttggaggaacgcaactccgtgggagttggtacctttcagccatcgttcggcttcaaggattttcatcatgcagcccggttgtatccccccgccgatggtcacccaagacggtgaccaccagttcctgggtggggagaagcaagccgggctgcgatcttggtcccaccctcagcttcaaggatgttcatcatcctcgctggggtgggggccgggctaagccggcgctctacctcccgcgcgggtccgtgggtctccttctcccgcggcgttcgggggaggggtcgctcactggccctgcgggcggcccggacttcgacaacgcggggccggtcgacggcgggcgtcgtcacctccagcgtgtcgggctcgtcggcttggctcccggcggcccctcccgccggagggcggctgccgcgccgtccgggttgtccgtcagcgggaccgacgccggagttgatcagccgaggcctcggaccgggctggcgcccttggaagatggtcagccgaggcccctgggactttttgtcggtaacagggatgtttgtgcgagcgagagttgcttctcgcggaaggtgatgagtgagaaggtgatgagtgaggagttcctgaccttcggcgatggagatgcatcgctggaggatgcccgaggggctgcggtggtagagctcctcctcatcgcccagcaagacgaacgacttggcgtgtcgcgctacccgccgagcctcggcttggtcgaggggtag

SEQ ID NO: 39944 - DNA, 903 bp, Zea mays
  Peptide Sequence Number=SeqID_83319
atgcaggcggcatgcaaccgcgccaggtggacgcgcttctccgactccccaacacgccagcatggaggcccaggcccacgcgtcacgcaaccggggcgccagatgctgcatgcaagcaactgcaccgccacttgcgccaccaccgcgcctcttcagtcgcggaaccaataccgcgactcgaggcggcccagcgcacgacccagcagcgccagcctggcgcgacggagaagcgggcgacgcttcgccttcgccgtaataaccgcgtcaacaaagggaccgggaaagggggatacctcgaaaaggatccttccctgtgaaggaaccgggttccgagccccccctactgatcagaggttcgaaggctggccctccgaagggttcaacagtcgcctcagatcgcgtgggccctacacccactactggtcagaggttcgaaggccggccccccgaagggctccacggccgcctcaggctactcgggctccgtgcccattactgatcaggggttcgaaggctggcccccgaagggttcacagtcgcctcagacgccgagcgagggatgaccaggggtacgttcgatacataaccgaggctcgggctgcgctcccgagctcaccggagacaccatgttcggtgcccatcgagggtaacatggcgctctcccccctcctccttgcggagaggcgacgtaggggcgtatgtaaaaaagccgagtctgtccctgatcgtcctctcgccctgtgcggaggctcgggggctgctctcgcaaaaccggccccggccgaaccgttgacagcgtcaacataccagcccgagagcttgggccccgaccgtgcacccgggctacggccagttcgcatgagggaacaaccagaccagccgaagcattacgcaaggcattaa

SEQ ID NO: 39945 - DNA, 99 bp, Zea mays
  Peptide Sequence Number=SeqID_83320
atgacgggggagaaaaacatgttcacttcctatgtcaagaacaaggattctcatgacatgatcctctttggagatgggaatcaaggcaagaataagtga

SEQ ID NO: 39946 - DNA, 306 bp, Zea mays
  Peptide Sequence Number=SeqID_83321
atggccttcacgctggcgcaggggcaccagagagcgcagaccactgcggggcaagctaacggcggcgtggggttactccggaacaacaagtgcaagatcaaccttcttcctccacaatggtgtagccctaaactcaagatgaggaacaagtacatcaagacgatggcatggatcaagggggagcacaagaacaatagggaagggaggaggaaggagtgccataggcacctccaacccaagtttgcactaacattcaaagagatcatccggtggatcaaattcttggtgacattagcaagggagtaa

SEQ ID NO: 39947 - DNA, 342 bp, Zea mays
  Peptide Sequence Number=SeqID_83322
atgtcgagcttctctttccccctgctactcgccactctctctccacgccaagtgacgagcccacgttgcgtcttctcgccttcgtgttgtgcatcacgttgcggcaacgccactgccgctccactaccatttctcctcccccactttgctgcgcccgtccctcttcctcccccgtgctctctttcgctgtccacacagacacaaccacgtagccgctatggtctgtgtgctgatttggttgctcctgccgtcagcgacaccctcctcagctacatgcgccatcctctgactgcccgcctctacgtgccgttgctggagctgctgctcatgccttgccactag

SEQ ID NO: 39948 - DNA, 150 bp, Zea mays
  Peptide Sequence Number=SeqID_83323
atggcagacaatgtaggatatccgaagcttgaactaggcttatctgcaatgacaaagaaccagctcgcagataacctttcctataacagtctgaaggttattatactaaggaatgaagcccttgaaaaatacaaaatactgctctattaa

SEQ ID NO: 39949 - DNA, 258 bp, Zea mays
  Peptide Sequence Number=SeqID_83324
atggggttatccactggatcaacggcgaagccaaagcttttgaagaagttctcagcgacagaggagatttctgtgctttcgctggtgcccgcggggcgatctgagctgtctccccctccagagccatacgatcctgaagttgacccatctctgaagggggcgcttgacataattaagatagctaatgaagctgttgacgaagctgtcaacagactcttggaagaagctgccgataaagttttaaaagaggacgactag

SEQ ID NO: 39950 - DNA, 312 bp, Zea mays
  Peptide Sequence Number=SeqID_83325
atggcggtgttccggtttcacggcgtctgcccggctgttgtagtgaaaagatcaagagatggctgggttcttgagattatagcagggataactatgagcatgccagagagtgcatgggggtgtagtcgtggctcaaccttgaaggcccacagtggttcacagagcacaaccagtcaaggtgaagtttatccatggcaaagggaggggggtctactaagtttctacaggtttcttagacccaaacctcctagattacaaattatagtatccaaaaatcagctgcaaaacatggttaccaattattctgcttga

SEQ ID NO: 39951 - DNA, 1374 bp, Zea mays
  Peptide Sequence Number=SeqID_83326
atgcggcgccaccaccacctcttcgttatcctccgccgcgcggtcgcctcctctgcctcccagcgcgcgcagccccttcccttgctccactccgttgcgctccgaaatggcgcagctggttccttctccccgtgcttcttctcctcccgcgcccgttcctcggtcggcgccgcgaagagccttgtggaagacgaggcggagctcagcgactggattagcgacctcaaaactgactcgttccacctcggtctcagcagcggagacgaaggcgatgcgccgtccacccgcaggtcctcggtcggctcatccaggggcggccgaggtgggtcggactccaggggttcgttcccgaggtcaagtacggccggcggtgagttcagtggagacagacgcggcggcttcgagcagagggggaggatgattagtagtggactggatgatgctgattccggctttggttcctccaggggaaggcggggacggggtgagaggacgtcggggttcgtgagaagaggagggagggggaatggatttgatgaggaggccacatttaggtctcctagggagcagcgaagccagcgagggagggcttcaggtgtggcgagaaggggagggaggtacagtgactttgaccaagatgatggtgacactggatttgggtcttcaaggggaagacacggtgccagtggtcaactgtctgtatcctcacacagaagaggaagggtgagtgatttagatgacgatgaggatagtgatgatgatttggttgggtttggggatcttgatggaaagcagcatcatggtcgcaggaaagggggaagggaaaacacagttgggctgggccgaggtcggggcaggagggatttgggtctgtcacgaaagggagggagttacaatgattttggtgattatgatgacggaaggagaaggacgtccgatcttttgcagagaacagggagaggaagcgatttagatgacgatgaagatgatgatgctggtccagttgggtttgatggttacagtgtaaggcagcaaggtggcaggagaggcaaaatggcgaagagtgttggaccacatcggggtgggaggggcagcgatacggactttggtcaccgacagccaaggggtctgaaaaaaattgactttggcttgtcagaggatgatgatgaggcgggggaagttgatgaggaagatgagccatcggggttcgaagatgatctttttgaagacgagggtgataaggaggatgtgggacatataataggtaataagtctggctcatctatgttacccgaagatgagccagctaaaaatgaaagtgtacagggcagaagtgctgggggtggtgattcttatctgagccagaagaggtag

SEQ ID NO: 39952 - DNA, 393 bp, Zea mays
  Peptide Sequence Number=SeqID_83327
atgggtaccgactggaaccaagtaatagcacaatatggcagtttcctatacgaggaagatggcactcagtttcagaacactggttttgctcctcctcaacctgatataccagcacatgggtcaccagctgcacctctagtgaagaagggtcctcaacgcacaaagctagcaaatttcacgtctgaggaggatatgaggaggcatacaactctcgaagaggatcaatgcagagaggtctacgaaatctctgatgagcagacttctcttgcagctactcggtttgctgctgttgaaaagaggcccttccattttatcggtaccctgaaacaggggtaccccttactacagtatgaagacgcagtccccacgcggctatctctagtcgcgtggtaa

SEQ ID NO: 39953 - DNA, 585 bp, Zea mays
  Peptide Sequence Number=SeqID_83328
atggtctacatcgtcgagcaccatgatttcatgcccaaggatttcccgatggaggaagaggccgtgtcttccacaccacgggccaccaaccgccctgcgcctggtgctgctgttgtgcactctgtgcggcagcacactcctgcgcaaacgtctagagcgtcaagggctgagcctggggcactgtctgcggccagagaattgctacgccaccctcctagctccacgacctcgccgggggctatgaagcagtggcgtgacgatgtcgactgtctgctcggcatggtgcattctggcttagccaggcccaggcctcggtcgtcccgacatcaacatgaggcgtcggcgtcagtgcgctcaccctcggtgagggccgcaccgactgaggacctacgggcggagctcaaccgcaagcatgcaggagaggacgctccagtctgtctggagaggtctaatgacctacgggcagaactcaaccgcaggcgtgcgggcgaggatgcccgcgtctctctggagagggcgcatgagcgccgacagaacgtcgagggtcacaacctcgactacgacttcgctgcggtcgcaccgtag

SEQ ID NO: 39954 - DNA, 945 bp, Zea mays
  Peptide Sequence Number=SeqID_83329
atggggaagcctgtcccatcactcctcatgctcctcctcagccgaggcaggtacaatggatcaagcagtctcattagctgcgagaagcagacgattcgaatcgagtttttatccttgcaagtgaccgcacttgtacccaccataaccggaatgggagaccacgtctcaggtcgcgtgaggggatatgtctgcgggcaggttcactcaggtttgaactacgacagtggtttaataatttccaaaaattttataaaaattatatccttcccccaatgtaaacagtaccgcgggaaagaaaagggtggcgcggcttaccggtggcgagataggtccggcgatgggcagggttggctcggggaggctctggcggtcacagcgaggtgcggcttgacggcgaggatggccggaatcgcccggtccacgtgcgcatgcgggtgttctcgtcggcggcgagtgtaccggccaaaccacggcgatctggttcaatccaagggcacgttgagagctccggcgaccgtggactggcctctccggcgaagcaggcttcgattcctcactcggggagcttcactgagtggtgcacactcgtctctgagggttggatggggctggggcaagctggactggccggtctacggcggcagtggcttgggtggccgcggacacaccgcgcacgggcaaacagcggtgaactggactccggtgaggcttgagcatgcgcggaagagtgtaaccgacgcctgggagggctttataggcgcgggcgcgggacagggcgccggttggccgttggcgcgacgcggggcgcgcgcgggcgtgctctggcaagctcagggcgcgtcgaacacgtggagcttacaatctgcccgtgttccacagctcacccaagtcgcaaacgtgcgaatcttggcaaaaatccggcgcgagtcttttcctggcacctag

SEQ ID NO: 39955 - DNA, 357 bp, Zea mays
  Peptide Sequence Number=SeqID_83330
atgtattttatcttctggctcttgcattcgcctgaaagcatttgcaaagatgatgtccgctgcgctgcctgtgtcaaccaagacattgtggaccagaaatcccttgatgacacaagatataaccattgcatcattgtgaggttaatctttgagctgaagatcttcctaagagaagagctggaaccacctgcgattgggagcaccagcttcgtgaccgaaggtgctacaacttggttgttgtgcgaagccatcgtcacaaccgtggaagtgagttcaccggaggtgggcgccaatgttggtcacttgttctcaaatgctataaatcaagaacaaggcaacatgattgttaatggttaa

SEQ ID NO: 39956 - DNA, 729 bp, Zea mays
  Peptide Sequence Number=SeqID_83331
atgtcggcgtttgcgcagagaaagtcgacgagcactgcttcctatttgggatcgagctcggagctgatccggatctgcttggaggcgtcgctgctggggtcgaggggcggatttaaccgtctccgctggctcgaagttgccggcgtggcgcttcacgtctggcacctccttcgagaggctctccaggtcggcgatgagggcctcggattcggcgagggcctcggcgtactccacgcactccacgtcgcattcgaacgcgtgtcggtacgtggggccgacgatgatgaccccgttgggtctcgacatcttgagcttgaggtaggtgtagttggggacggccatgaacttcgcgtagcattgcctccccagtactgcgtggtaggttcctcagaacccgaccacctcgaacgtgatggtctcccttcagaagttggagggtgtcccaaagcagacgggaagatcgagttgtccgaggggttggacgcgtttcccggggatgatcccatggaaaggcgcagcgcctgctcggaccgaggacagatcaacacgcaggagcccgagggtctcggcgtagatgatgttgaggctgctgcctccgtccatgaggaccttggtgagcctgacgtcgccgatgatggggtcgacgacgagcgggtatttccccgggctcggcacgcggtcggggtggtcggcttggtcgaaggtgatgggcttgtcggaccagtctag

SEQ ID NO: 39957 - DNA, 228 bp, Zea mays
  Peptide Sequence Number=SeqID_83332
atggaggggcgtgtggcacgtgcggcgggggtgaaggcgcgagtggaaaattccaaagggattgcactgatcttgtcgtcgactcgcatcgcatgcagcaggcggcaggtaggcgtcctcctctcgctctcacgctttcgacgtgcacgtgggccatcccgggccgaaggggacacggagggcccaccacggagatgctgcttcccgcggtcgacaagcgtcatgtga

SEQ ID NO: 39958 - DNA, 168 bp, Zea mays
  Peptide Sequence Number=SeqID_83333
atgaagcacaagataaagatacagataaagataaaggaagatcgagaaggaggaggagacggaccttcactgcaagacgtcgtcgcaatgatggataggaacaacatcgacgacacggattggtattctagggacgtaggagttgatcctaagcaccaaagattctaa

SEQ ID NO: 39959 - DNA, 270 bp, Zea mays
  Peptide Sequence Number=SeqID_83334
atgtccggtgcgccaaccacgtcaccaggccgttgggattcgaccgttggagcttctgacttctgggcccgcctggctgtccggtgtacaccggacaagtactgtagattgtccggtgcaccgtcccgcgcgtgccagacttctgcgcgcttctggcgcgcattaaatgcgcctgcagcaagggtgagctcacatacgttcaacgctcaacaagttgtggggaacaatgtgcatgaactcaccaaatgtgggagctcatgtgaagtgtaa

SEQ ID NO: 39960 - DNA, 333 bp, Zea mays
  Peptide Sequence Number=SeqID_83335
atgaacaaaacaccggcattcaagatgccattacaaacggaaccccggttccacctccgcaggtacgaacaaccccacacgattggggggcctgcggagcaacagaagaccgacaggtggctcgccgtcgcccgctccggcagcagcgatgacctcggagcggatgctgctgccatgaggccctcgcccatgccctcactcgagaggcaaggacgggcagaaggccgtagagttggaggcagccgactgggggttgccactaacccacacctagaactcgtcgtagtcttggaactcctggaagtctccttccacggcttcatcttcgcctga

SEQ ID NO: 39961 - DNA, 528 bp, Zea mays
  Peptide Sequence Number=SeqID_83336
atggtgtgtttgggcctcggcggccgcagaaaacacacgctacaagataatccgatcctgcaggctcggatcttgacagttgaagggagcagcagcaccctcggcgtcaactacaccttcggcgaggacgacatcatcaccacgcccaggccttcgccgccagggtcttctcaaggaatccggctcgagcagacggctcggccggtcaccccgaggcctcggccagctgtccccgaagacatcagcccggcccgaggcctcgacaactcaattccggcgtcggccccaccagtggacgacccggctagactctggtcgaccaagcattcttttcgagccaactctgcctctgtccgtgctgacaccgctacccctggcttcggctcatcgaagagcggccgaggggttcctttaactaaggaagagaagcctcggaccgcaaggccgaccgagccgagggactcctacgcctccgggatacggatacctcactcgtcacctttgcacggggcgactcacgcttggtga

SEQ ID NO: 39962 - DNA, 315 bp, Zea mays
  Peptide Sequence Number=SeqID_83337
atgggggcccaggcccacgcgtcatgcaaccggcgcgccggttgctacgtgcgagcaactgcaccgccactcgcaccactaccacgcctcctcgactgcggagccagtaccgcgactcgagtcaaccctgcgtacaacccagcagtgccagctaggcgcgacggtcaatacggccaaaaatgggtcggcagtaatggcggtggctggtggcgcctctggcgggagaagcaggcgacgcttcgccttcgccataatgaccgcgtcaaaaaagggaccgggaaagggggataccccgaaaaggatccttctccgtga

SEQ ID NO: 39963 - DNA, 603 bp, Zea mays
  Peptide Sequence Number=SeqID_83338
atggcgatcacctcagcacgtgcgcaattgcgaaaaggtcctcgcccccgtcttcttacggggggcgacaacgaggccattaaagccaaagagtcagaggcccggcggcaggtggcactgacggtctcgccagcggaggcaaccacctctgtagtggggagcctcactagcggcggcgaccacctcagcaccgacgacagcggccacctacgcaccagtgccataccggcgaatggcggccgccccagcgcgcgcaaagaggtccttgctcccgtcctcactgcaggagtgaggacaagaccatccaagaacgcgaacgccgcccccacggcgtacgacgtcttgtatgaccccccgatctccccactcgcgccccgaagcgtcacgggcaaagtttcccccgacgtgcaccagggttaccgccctatgacacggggccaggccccacatgtcatacagactgacccgaagcacgaagaaggcgaaacaccgcataaggagcgtgcaactgccccgcagttatgcgccccttcattttcggagcaaccagcggtcaggaaggcgaaccgccgcataaggagcatgcaaccgcccctcggttaa

SEQ ID NO: 39964 - DNA, 228 bp, Zea mays
  Peptide Sequence Number=SeqID_83339
atgttcggattacaggtggtgaagagaatgatggttttgattatgattatgatgctggttgtcagcattgcaaccactgctcaggcgaagatgaagctgtggaaggagacttccaggagttccaagattacgacgagttctaggtgtgggttagcggcaacccccagtcggctgcctgtgaaggccgcgtttatctacgtttcttttccgcactttgatttattgtaa

SEQ ID NO: 39965 - DNA, 1884 bp, Zea mays
  Peptide Sequence Number=SeqID_83340
atggagaaaagcaaaccaatcaagacccccatgccaacaaatggacatctcgacttagatgagggagaccccctcgccggcgaccaccctgcgtccaccgtctccggtcgtgctccagcgacctccgacctcctgcgctcatcccttctccctctggtcaggatgccgcgcacgaagaatgtgtcggcgccagggggagccgatgatgaggatcctcgtcgccccttcaggcaggtcaagggcaagacagtatacttggagcagcaggaaggccgcaagaagcgacgtacggacagagcagctcgtgcagcggcagcagcagcagccgctgcgcaggccgagctaggggatcagccagagactccgttagatcagattgtgtaccatgttcgtcgcctcgcctcccagcctcgctcctccactcacaccactgcttccactccaccacccactctgcctgctcccgtcacccctgttgcaccatccaccaccacagccatacccgctacctccactacaccagcttccactgctcctcctcccgctcccgcttccgcccctcctatccctcctcctcgattccgggagcgcgatgagactgagagggaccctgtagcagttgacctcttcagcaccaggattcaggaatccttcttcagggcacagatgtatgttgaggagtgggtccgagttttctacgcgactgtatggatagacccagatcatcactggatgaggtttcgttttgagcgagaggatgtcactattactgctagttggattcgccagctctttggatttcccgaatcgtcgactcgacttcacagcttatgctacggcacctctgaccctcctcgtcgccctcacgacggtgtggctccgggtacagctcacgtcgcggctctgttccgcccgcccttctctgatgggtcgcgacgttcaccagcagatttcactacagcagccaagttcttatttgagcttatcagacggactcttctgccgaggatgagatacagggaggctaccacacatatccagctctggctccttggtgccctggtctctcactccgagtttgacgtcgtggatttccttatttgtgagatcgaggacactggcacacttgaggcctcacgccttgtctttgggtcctaccgtcctgcgcctgaggctcctgtgccagcttctgctccagtttttgactctcaggccgaggatgttgctcttcatcagtttgaagctcaggatgcagcagttcatgatgatgatgatgatgatgatgatgattttggggttcctcctccgcctccgcctcctatgcctccacgctcacatgatcatgaggctgggagttctagtgctaccactgctgcccctccggctattgaccctgctattgcttcgattctccactctctcactcagcagcaggctcacctggcagccgagcagacccggttatccgagaggatgctctcgatgtttcagaccatacaggacaggcaggattctcttctgcagcagtactctaggatcgagctgagagcagggcattcatggctcttatgctacagcattctggtgtctcggttcccccggttcagtctgcaccacctcctccgcttcaggttcctgttgtgccagcgattcagtcaggaccccctcttccttctgttggtccttcttcctctcctgtcacacccggatttcggggcaccaagacccgggcgcgaacaatcaccagcatcctccatgcgccttatcctatggtacccgttctgtgagacagcaagagtgagctcacatacgttcatcgctcaacaagttgtggggaataatgtgcatgaactcgccaaaggtgggagctcacgtgaagtgtaa

SEQ ID NO: 39966 - DNA, 915 bp, Zea mays
  Peptide Sequence Number=SeqID_83341
atggcgagaggacgtgacggcggcgtgctttcttcctttatcccgacggcggggcttggcggcctggctcctggcgtggattgcgatgggattgtgacgtgcgtcggggctcggtattataccagggccgaccaaccacccgaccgagatcactggagctccccagccgagatccggcagcatctgttggcgcgacccgagctctatggtgaggacgacgcccctgaccagtgggcccttcgtgcagtcaccaccgaacacggccgagctgttgctgcagaggaggggctgacgagtgagccccaccagtcatcggcaggcatcaccacgtgtccacgtgagcacgcgcgacgaccgctgacaggctgggcccgcctgtcggcgcggcgcgcagccaggttcagccgagctgcggcggcggcggttccctcgggcgtgcgaggaggcgcccgtgagcaggagagccccggccgccgcggcgctctccagccggcggattggcggtcgtggagggggcgcgaggaggagcctcagcgtccgcgtcggtacagcttcaggaggcaccggtcgggcgcagcggagtgggcggcggtggtgctgttcatggtgcttgcggtcgtggtgctgctgggcgccgtggccgtccttgtggtggtgctgctgctgcagccccgcgtgtcgtacgtggcgggcgccccgctgggcgacgccggcagcgccgccatggaggccgcgctctgcgacggcgtggtgccgttccgggtggatgtggaggcccggacgcgatggaaggtcgcggggatcatcgtcgtcgaccagtggacgcgcctggcgtgccagctccgcttcttctggcccaacggcaccgtgctccccttcagatgcatctccaagtccaagttcttgttcttctga

SEQ ID NO: 39967 - DNA, 612 bp, Zea mays
  Peptide Sequence Number=SeqID_83342
atgggcccaccaaaacctgccggggccgagcgtcacccaatgggatgccacagcaaccgtcacagggaggtgggcaccaggccgcaatttggtgcgtcacccaggattcgaaccctgggcgggagcacttgcgaccagtggccttgccactgcgccgtgacccacaaggtaaaccgtgctgttagcaccgcaatctatttcctacttcccgcagggagtgtttcccgtctccaccgcattccctgtgctgaaacctggcacttctacaagggagagcctctcacggtcttcgagcttcacgacgacggtcacattgaccttactgtcattggcccacaccttgaggcaggccagcgcccccagtataccgtgccaccgaacgtgtggtttgggtcgttccccacactagacgtcgagtcgttcgcatctgatggcagcgttcttgtcaagtctcggaagagggaccctgagctgcattactcccttgttggctgcacctgtgcccctggcttccagtacgaggattttgaaatggccaaatttgaggacgtgagatccatcgctcccaaggctgaacctttcctcaagtttcttattccctctaccgattaa

SEQ ID NO: 39968 - DNA, 1698 bp, Zea mays
  Peptide Sequence Number=SeqID_83343
atggagaaggatcgtcaagatgctgcccagaagcgccggacggtcgtcaggctcagggatcctttccgcgaggcaaaaaaggcgtgggcagccgcgaagtctgccgccccgggcactagcaagccattgccggctgcgaagccgcccgcccccgggcccagcaaggcttcggctggtgcgaaggctgttgcttctggcacgggcaagccaccctctggcgggcccgcgaagggtcgaaggctgccttcgctgacgcgaacggagggtgcggcggcgcatattgccgactttgacacggacatctgtgttggggattattttcttgggtcggatggggggcaactggctgttgtcccgcctccggtggaggccacttcgccaacggcggtggttggggcgaagggtgccacgcgggactcgtgggccgccttcggagcgagcggcgagattctgtcggccgctgccgctaaggacgtggcgggctccatgtcccagcaactgaggcaagcgtcgcagcagctgtcgcaacagctgaagcatgcggccgacttcgctgaccacgtcgtgtcgggtgccttgactgcggactttgctgccgaggttgagagtctctgcgcgcagcatgcggatgctgtgcaggagaactcggctgcagaaagcaaaagccgcagactgtcggagaaggctgcacaagccgaggccaagcttgcgcggacggagggcagtctcgcccgccaacttgccgaggagctgcaggcgagactcgacgccctgcgtagccgcgtggacaaggcggagacctcggtgcgtgcggaggtcgagcggacgcatgcgcagttcgtggacgcgtaccgggagctgggtgcgcggaccgctgccttcgaggcgcccggccaagaagcgggcctccgcttccttgaatggatgaaggaagagctaggggtgctcccaacgatcgtgacaggtctcatgtcatttgcctccctcgtcacctgcgaggggggcgtgaatgctttgtcccgcgaggggtgcaggcatttcgaggtcttcgaccaaaatgacgaaaactttgaacgtgagatcttcaaggttgaggaccccgtgcttaagcagtcggcgggggcgctctacgacagaatgtggggcccgcacggccgagaaacggtccgggagcggtccgcccgggcaatagaacagattgcgcatgccgaaggcgtcgaggaccttagtggtctagacggcgcgctactcgaggctgcggaggtggatctggcgccgccgtctgatgccggcgagggcccctcgtcgacccctgcaccaacagcgccaactggaggcagtgaagaccccgcgccgatgggcgaggacgccttgaaggcggtggccgagccggctgccgaagaccccacgaccttagtcgggccttcgcaggttctgaggtttgggcctgcgcacgcaaccgctactgacaatactatttttgtggcggcttcgaccgtggctgccgatgatgattcgtttggctctgtgtctaagtgttttgagtctgatgattctgggagttcgattgcgtggacggaggagtcttcagatgaggatttggattattttgcagcgttagatgtggctgcaatggagctgtcacacccggatttcggggcaccaagacccgggcgcgaacataatcaccaggtgtga

SEQ ID NO: 39969 - DNA, 624 bp, Zea mays
  Peptide Sequence Number=SeqID_83344
atgccgtcttcttcttcattcgctgcgaatacgccgccgggcaaatcgtcgtctgaggaaaccatgagcgatctggcagcggagctgcacccgggccacatggttgagtttggcgtttcacggatctcctcggttcgcgtgcaagacatgcagcagctggggtattttgggaacggagttggacgagtgccgggggcggaggagattccagagccggagggtgagattgttgtgttcgaggcatttttttactgtgggccttcggttacccgcgcatcattttgtggcggaggtgttgcagagaagaggaaagttggaaacaagattgcacagtttggatcatgcacctttacgccgaggactggcaagacttcagcggaggttgtggagctggttccttgcgcccgcaacaagtggggcaattggtatgattattggttttatgtggcgggaggcgaagtcgaagacctcctgggactcctgacggccatgatgtgctcgcactcctatgtggcgttcccgttgtttgacgtggcggaggatgatagtgacgaaggggcccttcgttgcgctgcccgcatgagtagcgggcgcgatttagttgaggaattcatcggctactaa

SEQ ID NO: 39970 - DNA, 324 bp, Zea mays
  Peptide Sequence Number=SeqID_83345
atgacgcattgcctatccaggagtccaagatgtgaccggggaaaagaggagaagatagaaaccagtggatgtgagcgtgcgaaggatgtgcacctcgaggaggcggtcttggggctcatcatagataagcgggatgatgcgcgcgccgacaaccttgacgaagttggtgtaaaaggcgcctatgtaggaggtcgcggtggtgctgtgatcctgtcgcccgcgccatccgccgggttcgagacgatgccagggcatccacaagaaccggacggcacctccggcccaagtcgccaccgcgggggtggaggaatcactgttgtttag

SEQ ID NO: 39971 - DNA, 468 bp, Zea mays
  Peptide Sequence Number=SeqID_83346
atgacgatttcttacattatctcggaattggtgcaggctggctcgtacgagcacgggcgtcggcggcatccgacgagcgccagcgccggctacccctttcccattcccaccacgaggatccccgacgcgtcacccgtcatgagacaacaagacccggacaggcacgccccgtgcggcgtgacgtgtgacggtgtgagcccccacgccacgccctctgcgctgcggcggcaccgtgccgcctgccggccggcccacggccacgggcaggcgagtagacggcagacccctcacgtggtcatgccgcgctgccgcatcggacccggcgtcagaggcaggcaggcagtcaggtcagtgtcaggccgccccagccaatccttgcggccgcaggcaaagccgccggtgctgcagctgcagcttcagctggtggtaaaaaagcgggacgccgtggggctgctggcctgccgctga

SEQ ID NO: 39972 - DNA, 492 bp, Zea mays
  Peptide Sequence Number=SeqID_83347
atgactcttggatgggctaccagacgaagtgcaccctgggttcatcagcaagcgtggtgcagcgctctggaccgcgtccaagcggcgactgcgcctgagcttgtcgtacacagcgacgcatgcggccacgtaggactgcttccagaggtcgaactagcactcgccaagcttcttatcgtcgccgatgaacgacgccaacgcgagcgcctcctgctggtggtgtttgctcgaggtttccaactagacgtgggatgtacggagaatgggaatgggcttttgagaaatgcggaacaaagaatgggaataggaatggaaatgagaatgggccttgtggggaggtgtaaccctagtttagccttcttctacgccaaatatttatctctctttggctctatgttgactagaggcgtcttgggtgacctaccgatcccaatgcacactctaggatctctcctccctgatggggggtcccttctgggaaacaagagctag

SEQ ID NO: 39973 - DNA, 306 bp, Zea mays
  Peptide Sequence Number=SeqID_83348
atggagcagtacctaagcatcacaagagcatactacaacccgagactccgcgaccacggttttgatttgttagagagagatttgagcgtatttttgagctgtgactctgctattttgattcgtgcgctctcttctttgcttctcgaggaccaacaagcagggatggaggccctcgacgccatggccgtgggggcagagcttcgatgctgcggcagcgtaggtagtagcctcggatgcgacctccgcatcagcgttctcgagccaacaggggaggccgccattgttgccggggaaggcctactatga

SEQ ID NO: 39974 - DNA, 111 bp, Zea mays
  Peptide Sequence Number=SeqID_83349
atggggtccaggcacagtgcttgctctgccggggctgagtgccgaggtaaagaagaaggcgtcgaggcggatctccaggagttccaggacttcgacgagttcaaggattag

SEQ ID NO: 39975 - DNA, 996 bp, Zea mays
  Peptide Sequence Number=SeqID_83350
atggttgccatccaagggggtcaccccccttttaaaggcgactctccccacttgcgtcctcaaccgtcgcggactgagttcaccagcacgctccaagatcctccccctgcgacatgggggttgggtcccacgcgtcatgcaaggtggcccaggacagaaggagccaaaccgccacgcgcggagcatacaactgcccagcggttacaagcactcctccactttcgccaagaccagcaggtgaaagggcggaccgccatggaggcggcatgcaaccgtaccaagggggcgcaccctttcgactctgacgcgtccagcatgggggcccaggcccacacgtcatgtaaccggcgcgccggttactacgtgcgagaagctgcaccgccacttgcgccagtaccgcgccttctcgactgcggaaccagtgccacgactcgaggcgaccctgcgcatggcccaacattgccaaccgagcacgtcgatcacgggtcagtcagccgcgggagaaggcgcgacggtcaatatggccaaaagtgggccggcagtaatggcgacggcaggcgggcggaagcagcggacaggcgtcacctttggcaggcgaagcaggcgacgcttcacctccgccataatgaccgcgtcaaaaaagggaccgggaaaggggatactccgaaagggatccttctccgcgaaggaagcgggccccgagcccccctactgatcagaggttcgaaggctggcccctcggaggggttcgacagccgcctcagagcactcgggccccgagccctcctactgatcagaggttcgaaggctggcccctcggaagggatcgacagccgcctcagagcattcgggctccgcgcccaccactggtcggaggttcgaaggctggcccctcggatgggttcgacagccgcctcaggccactcgggctccgcgcccactactgatcaggggttcgtaggctggcccccgaagggttcgacagccgcctcatag

SEQ ID NO: 39976 - DNA, 1074 bp, Zea mays
  Peptide Sequence Number=SeqID_83351
atggcgccccgcatgctctgtgacgacgacggctctcagcccccttacggaagcaagaagacgtcagcaaggacccaaccgctccgacagctgtccctccgccaggctccatcgctcctccgacggccacgacatcacaccagctgggtgccaaaatctctccggctgccacgacggcatggccctcttagagaaggttggccgcgcggggacgaggacgagaacaggtgctcgcttggggccgctcgctccctctcccgcgtggacgcttgtaaccccctactgcaagcgcactcgacctgggcgcgggacgaacacgaaggccgcgggattcccacctctctcacgccggtctccggccgcctcgctcttccccccttcgcgctcgccctcgcgctcgacccatctgggctggggcacgcggcgacattcactcgtcggcccagggaccccccggacgggcagcggcatcctcctttgcacctggagcaggagcacacgcagccgcaggagcactccgggcacgacgacgccggggcaccgaggcacgaaccgcggcagcacgctcccgtgccggtgccgcggcaggacgaacccccctcgcagcacgacgactggcacttgcagcaggaaggtcgcatctcactgcagcacgacgacaggccgccgagacaccggttgagagcgccgaggcagccagccgagcacccctcacaggagaagaagccggggcagctgcagcacggggggcaggagcaggagcacgggcagtccgcgcagctgcaaccactagagcagcagctgctgcactggggtcggcaatggccgcagcctggtggcgtcttgcagctgcagctgggaaggctgcaggtgcagcagccggggctgcacgaaggggtctttgaacagcggcagatcggagtacagcactgcgtgtcgcggcaggtgcaacaagaacagctgaagcagcttggcgcattgggcttcggcaagcagtggcaccagcagcacaggcatgaaaagcatgtgcgcaattttgatctgcgcaaggtttcgtttttcatgaattcgtaa

SEQ ID NO: 39977 - DNA, 1377 bp, Zea mays
  Peptide Sequence Number=SeqID_83352
atggagagtcatgatctccgggcagaatgggaatcacggcttgtgggtggttatgagattgatggttctggttatggttatggtgctgctagtccactacagccaaacaggatacttgctgagtatgttgatgtgtactcacccttgctctacacaccaaaccccccccaggttgtcagcattgcaaccactgctcaggcgaagatgaagctgtggaaggagacttccaggagttccaagattacgacgagttctaggtgtgggttagcggcaacccccagtcggctgcctgtgaaggccgcgttatctacgtttcttttccgcactttgatttattgtaagaactatatggacgtctcagacatggctcgacttagacacactgcacgaaagtcagtcatccccttcttaccctcccgtcttgctgagcgtccgcttcgccgtcccgtggccggacagtccagccacttggagagactacaccaccgcctgcgtgaggagcaggagcgtcgacgacaggagcagcggagctcttccctctcgctccaccaggagatagagtctgtgaggagctgctcccctgtgctttctttggagccgccccctgcaccaccactgggcgccccagcttctggagtagctgctggaggagacccagacgacggaggaggcgacgacagctcgagccacgacaccgacttctctgctaaccctgagccggaaggatgggttgctcgacccatcactcgcgacgctgctcgcgggtgtcacttccatgatgcgctcgacaccctgctacgtcgggcatttgaccggcatacttggtccgtcgagtatcgctgtgtggtctaccagcatagtcgcggggtctacccggaccgctgggaggcgacttgcttggtgcgctgcccggaggacagtctccagggtgcagaggcctgttcagagcactattctatctctgagcgggactcagctgaggcagccatgcaagatgctgcacggcgtgcgctttcgcactactgctcggttttcggtggggcagctgacggtctcgacctgaagtattacccccgccgttcatctggcagcacaggaggcgtgattgtctcacctgtcggtgagggcaatcctaggttgagcagcacagtcaacctagccgccgtgctaaacacggagctggaccatgcattagacgagctgagtagggctcgtgctgagatcgccctgctgcgggctgagcgcgcggaacgtcgttttctggatggtggttcccccgctcccgttgggactcagcacccgtaccgctcacctcagcgtggacaccagtcttatggcaatcccgcctgcaagaccaagataactctagaaccatag

SEQ ID NO: 39978 - DNA, 240 bp, Zea mays
  Peptide Sequence Number=SeqID_83353
atgaagccactgaagaagtgcgtcatcttgttcaagatgaacaagatcaaaggccccaacacagggagcttcgtcaagaaggcctattcaacgaggatgcatgccattcacaggcctcctggccacaactcccgcctccgccaccactacaaccgacctattcccgaagccagcagccagaagggcgtcagcactctcaacaacaacgggaattcagggaggaatccgaagctcgcatag

SEQ ID NO: 39979 - DNA, 798 bp, Zea mays
  Peptide Sequence Number=SeqID_83354
atgctccaagatcctccccctacgacacgggggctaggtcccacgcgtcatgcaagctggcccaggacagaaggagccaaatcgttgcgcgcggagcgcacaactgcccagcggttacaagccctcctccactttcgcccagaccagcgggtgaaagggcggaccgccatgcaggcggcatgcaaccgtaccaagggggcacaccctttcgactccgacgcgtccagcatgggggcccaggcccacacgtcatgtaaccggcgcgccggttactatgtgcgggaaactgcaccgccacttacgccaatatcgcgccttctcgactgcggaaccagtgccgcgactcgaggcgaccctgcgcatggcccaacagtgccaaccgagcacatcgatcacgggtcggacagccacgggagaaggcgcgacggtcaatatggccaaaagtgggccggcagtaatggcggcggcaggcgggcggaagcagcggtcaagtcggaccgggaaaggggatactccgaaagggatccttctccgcgaaggaagcgggccctgagcccccctactgatcagaggttcgaaggctggcccctcggaagggttcgacagccgcctcagagcacttgggccccgagccctcctactgatcagaggttcgaaggctggcccctcggaagggttcgacagccgcctcagagcactcgggctccgcgcccaccactggtcagaggttcgaaggctggcccctcggatgggttcgacagccgcctcaagccactcgggttccgcgcccactactga

SEQ ID NO: 39980 - DNA, 96 bp, Zea mays
  Peptide Sequence Number=SeqID_83355
atggcgatctggcccaaggttgcttctccgcgaagactgggcctcgggcgagccgaaggcctttgcagctttgtgctgatgggggttactagctga

SEQ ID NO: 39981 - DNA, 333 bp, Zea mays
  Peptide Sequence Number=SeqID_83356
atgacgattgacgactttttcaagctgttgtcgagcacttgcgggttgggcaccataaagagggaagagctcggcgagctcgaaggaaatggggaggaagagcagggagggcacgcggatggcgtgactgccagggaggaacgccgtacagggcagggcgagctcaccaggaatctcagcgcccaggagtcgggcgcgtggccatggaaagacagagagatgggctgggctccgacaggggaagtcgccgcgagggagctccaaggcttgaacggcgacaaatggggcaggaaaaacactgaggagattcagggagatgggcaaccgagctag

SEQ ID NO: 39982 - DNA, 291 bp, Zea mays
  Peptide Sequence Number=SeqID_83357
atgtggcagaaccccccgaattattccagcttaagtgcccaagtcacgcctcaaaggccgcaacacacttatattggaataagtcgtcagtccctcagatctagtctgataaagccacttatctgggatcaaataccacaaattcactcgaagtacaaggggtcaagcagtctcattagctacgagaagaagacgattcgaatcgagtttttaaaccttgcaagggagatcctcgatggcagtctcgggagcttgctcttggtattcctcatggacagctccttgctctag

SEQ ID NO: 39983 - DNA, 399 bp, Zea mays
  Peptide Sequence Number=SeqID_83358
atgagcatgacacaacatgtgataccgatgcctacttacgagaaggttaccccaatttttaccgaaaatgcttttctaagcgacgtgcgtgcttccctgaagcacgagcacgccggcaaccccgacgttgacgtcatcgcgcctcggaccgcgccggtgtgcgtggctggcacgccatcgttcaccatctgtccaaccgaggtcaccgtcgagttcgtctttatcgaccgcgcccccttgcctcctcgtcgtgctcacctcgacgcctgtaagctgtcggccaagccgctctccctctccctttctctctctcttctgggaaaggagacaagggtagcgggcgagaataggaaaaacccgtggggttttctgcaaaccgtcatagactcacgagaatag

SEQ ID NO: 39984 - DNA, 426 bp, Zea mays
  Peptide Sequence Number=SeqID_83359
atggaatccgagcgcagggcgagctctgggaaggtccgcgcgacgcagggggaaagtgctggagagagcgaggtaccagggagattcgatttggccgagccggcagaggaggaaccccgcgagctagaggaacgcgcggtcggagcagaggagcgtgcaccagggagaaccgagcgggcgctgggcacggacaccggtggggaaagccgtcgcgcagagaaggaagatgagcgtgcggccagcctggaggagcaggggtgcgacacaggaggaggaagatggccgagcgagcacctgagacaggcgacggtggccatgggcagggaactggacagggcgcgtcccgagcagagggatgagcgcactggagctcaggagcgactggtgagcgctgcaattgacagagagaagggttcggcgatttga

SEQ ID NO: 39985 - DNA, 567 bp, Zea mays
  Peptide Sequence Number=SeqID_83360
atggacccttttcctcgagagattgctaccgtcatacctaggatctttcctaggggtgatcctttcaaccctaagtgggaccagcctgagggtagagctctgatagggggtgatagtgagcagcagtacagtgacactgtagcctccagtgctatgtttgcagttatgcaactgtataacagctctgagcgcaacttggagatgcagctgaacaatgtaaaggcttggaatgctaacctgcatgaagaggtttttcagttgcatggccagctaaacccagttaaccttccagaacctgaggaagcagatgcagccgcaatagacgacggaggggcagtctttgagatggtgactactcgccatatcaacctaggagccgctggaacttctggtggtggtaaccaggagggtaatcaagaagtacctcttcctccacctacaccatacacactcgagcagtttttcacccaatttctaggagctcaaaggaatatggagaatttgcaacgaaacatggaagtagagcttcgcaacattgctgataacactcgccatgggcaaccttag

SEQ ID NO: 39986 - DNA, 624 bp, Zea mays
  Peptide Sequence Number=SeqID_83361
atgacgcttcctgttgacgtggcgggtctgtgccctaggcggggtgacgtgggggctcctccgaagccaaggttgagtctgtcttctgttgccgaggccgagtccgagccatggggtcgggcgaggcggaggccgtttggccgaggccagggcggagtccgagccctggggtcgggcgaggcggagtttcgtcgtcttccgggtcttagcccgagtccgagccctggggtcgggcgaggcggaggccgtttggccgaggccagggcggagtccgagccctggggtcgggcgaggcggagtttcgtcgtcttccgggtcttagcccgagtccgagccctggggtcgggcggagcggagttcgtcgtcttccgggtcttagcccgagtccgagccctggggtcgggcggagcggagttcgccgtcttccgggtcttagcccgagtccgagccctggggtcgggcggagcggagttcgccgtcttccgggtcttagcccgagtccgagccctggggtcgggtggagcggagttcgccgtggcgcctttggcaaggcctgactgtctgtctgactcactctttgcgttaaatgctcctgcaactcggtcagtcggtgtggcgatttag

SEQ ID NO: 39987 - DNA, 909 bp, Zea mays
  Peptide Sequence Number=SeqID_83362
atgtcttcttcctcccttatgcgtcgtgtctttccatcttcccagcccccggatggggggtatccgccgcctttccgcctcctcgttggaggaacgcaactccatgggagttggtacctctcagccatcattcggcttcaaggattttcatcacgcagcctggttgctcccttccgccggtggccacccaagacggtgacctccagctcctggatggggagaggcaaaccaggctgtgatcccgccctcagcatcgggtgtgttcgtcatcctcgctggggcgggggtcgaggcgagccggggctctacctcgtgtgcgggtcggcgaaccacctcctcttccagcttctggtggtggcaaccgtcctcccgcgctacgacggagtcgtcctccagtcatgccggggaaggcgaactgttgctgtccagctaggatgcaacattccgtcttccccctcgcattcgaggcgaggacggcagcgaggatctaccggagcgcttgggagcggcccgctctttggctttgatggcttgttcgcgtcccttgagcgggaccgcgaacaagagccttccggtggccgcgttcacctggggtcatggctgccgctgcagaggtcgctggcgagcctcccggcgttcgtccccccgcaggcccgaggtcgctcgtaccctcggggacggaaccggagttccgtttgtgatggcacttcgaatgccaatgttttttgctcattgtggctgtcggggcctgaacatgatccgctttccgaagtagtcaagaagcacgaaagtaatccttctaaaaagagatcctttttcgaggaaaaattcgacgcagagggggtctccccccttttagcccccgagggagggtcgggctttgccgaggctaggccgacccttccttga

SEQ ID NO: 39988 - DNA, 645 bp, Zea mays
  Peptide Sequence Number=SeqID_83363
atgagattgtgtctagagcgagctggcgaggatacaaatctagtgagggctctggcgacgacgaaatcacgagcaaggaaggacgggttcaacagctcgacggcaaacgcgagcacgcacgaagcccgatggacgaagagcgagtgcgacgcagtgacaacgagcacgcacgcaagcgtcaacgcgagccagcggcaagcacgagtgctgaggacaacggcagctgatgagttggagcaccaccgagtagccgacgtgggtgagcaaagcaggcaggacgccgagcgtcacggcgagctagaaaatgatttggcgtgggagctcgacgcgccgtggcgagcagagaacttcacgcatacaatagaggggttcgacacgagcagcacgggcaaaccaggggcgcgcgagatccgggaggagggagcagaggatgggcgcgccgccatgggagaggactggggggtcacggcgcagcgggttgggcgccatggaagagggcagagctcggcgagctcgaaggaaatggggaggagcgccgagcagagtgacggcagcgacttgggcgagatccgaactgggcatagggagacgcgcaaggacgacgaggttggtcgaggcgcaatgggcgaagtggaggacgagtag

SEQ ID NO: 39989 - DNA, 249 bp, Zea mays
  Peptide Sequence Number=SeqID_83364
atgaagctaggacctattagatcaccaggaacgctcggtgttattcttgaattgcacggacaccaaaacgaagaagagatagaagttgaagaaacaaggactacaccaccaccacctgaagaaccacatgccgggaactgcttttattttgacatctgtggagcaaagcctgactcacctataacacaaggcaagccccggtgcatttgccacctccttgctattttaaaatctttctcacttgcttga

SEQ ID NO: 39990 - DNA, 549 bp, Zea mays
  Peptide Sequence Number=SeqID_83365
atggaagactcgcacctacatgacggacaccaagcggggaggctccaccttggagaggaagagcaagcgttagaacacgggcagaaacaaacacccacgtgttcgacacgttctggcgcgccagagcacgccccggcgctcggccccgcgcgcaccgcgccgcgacaagccgaactcgtgcccccgctcgcgccctcgcctataaagccagccaaggcttcaaccgtacgcctccgctcgctctcgacctcgacggagcgcaagatcaccggcgtttgccctgcacacggcgtgccagcggccgcccgagaacccaccaccgtagaccggccaaccgagccatcccagccccgtccgaccctcgagagagactctacgtgcctcggtgaagctcccagagcaaggaatcgagctctgcctcgccggagacaccggatcaaggtcaccgaacttcacccgaccgccggcgagcgtagaccaagctccacgaaaagcttcggcatgacggcagaaaagaggaaccgacttaaagatgaaaagccaaattag

SEQ ID NO: 39991 - DNA, 351 bp, Zea mays
  Peptide Sequence Number=SeqID_83366
atggcgagagtagcgtgtacccttcgtggcaagaggctagacggtggtgtatctatgctctcggttggcgtgaacctgatctgttttcccccatatggagatatgccgccgcgcacaaggaaaaccgcacgcaaatccactagaccaattggcatgcctcgccatcagctagctccaaggcatgatgatagtagcagcgacagtaatgatcccattggagatctagaagctcaggtagagcagcttcgaacggagctccgtcataggaacagtgtgtgggtcgaggatggtcagtgcataaatgagttaagaactaacatccggcatctgcaagacgagcttgtcgaatga

SEQ ID NO: 39992 - DNA, 75 bp, Zea mays
  Peptide Sequence Number=SeqID_83367
atggcagtcggggtcagtgaggcattgtacgccaaggcgatggatacacatttagtcttaagagagtcacactaa

SEQ ID NO: 39993 - DNA, 369 bp, Zea mays
  Peptide Sequence Number=SeqID_83368
atggggctcgctgcatccctaccgaggtcgagcgtgggggagacgtcgtgcggtgaagggagtggccggcgccggagatggagaaactcgtcgactcagggagctggtctggagatgggacctcgctggatttatggagcagggagcaagggaaacagggagctcggccatggcgctcatggcaacagcgactaccatggccggccatccaaaatggaggaggcgagtgccaagggcagggggcacgggcgccatggggagctgaggaggccggctgcgagcgtggcaccatggatagagagccgggcggcactggagggaagggaatgctcggccctggacgaactccgagcaatggggcccaagtag

SEQ ID NO: 39994 - DNA, 669 bp, Zea mays
  Peptide Sequence Number=SeqID_83369
atggctgctgggaccgtgcagatcgatggggctcgctgcatccctaccgaggtcgagcgtgggggagacgtcgtgcgggagcaagggaaacagggagctcggccatggcgctcatggcaacagcgactaccatggccggccatccaaaatggaggaggcgagtgcctagggcagggggcacgggcgccatggggagctgaggaggccggctgcgagcgtggcaccatggatagagagccgggcggcgctggagggaagggaatgctcggccctggacgaactccgagcaatggggcccaagtaggagggcgccatgagaggggaggaagctccctacgcgcggctgtgtgggatgaggagcgcgggcagaggaggtcggctgaagcaaaggaagggcgctggttgctgtcggaggtggaggaaaagggggtgttgcagggagatgggagcggctggaggagagggacgccacggctgctggccgatctccctgctggccgccgtggggaagaaaggctccatggatatgagctggagacgcctgcaccaaggggctcggccagcgcccaagcagagaggtggaggcgccatgtacagggagcgtcggcagaggaaggaagaagacagcgtgggggagaaggaggctgttggtggcggctggaaaaatga

SEQ ID NO: 39995 - DNA, 264 bp, Zea mays
  Peptide Sequence Number=SeqID_83370
atggggcttggtgtatgcggctcgctctgccaaggtggtaatgaggatgatggttatgattatgcttatggtaatgttagaatggttaagtggcttgaaacgagctcttgtgaacacagtcaatcaaaaagaaaacaatcacaagagacacgcgattttatcccgtggttcggccaagtaacacttgcctacttccacgttgtggcgtcccaatggacgagggttgcactcaacccctttcaagtgatccaaagatcaacttga

SEQ ID NO: 39996 - DNA, 615 bp, Zea mays
  Peptide Sequence Number=SeqID_83371
atggcggtttggtcattccccgcatgcgtggggcgccctgttggccccgcctttgttaagaatatcctccggcggtggccccgaggcgacgttggagcgtgcgcggcggtttgcctctcctgcgcatggaggccagcgcctcagccacgagactcgtgggcccaggcccccctgtcagtgactgagttgttcgggtgctatgtgtgcgccaagcggatttctccagggtgcgcggggagtattttcttgaaaaggggttttccgcgcgcagtggtttcgctttcgcattttccccaactgctctgccctttcgcctccaagccttccacgcctctccgcgttcgtgctcccccgtctttcgccgtcgtggtcgccatggccatgctggttcgtcccgatcattaccagaccgagaaggcactcgattcggtgcgccgcctacttggatggggcatgcctgtgtttgccaagaggattcgggccgacactactcctctcggtgatcttgctgctggggagtttgtgctcttcgtttcctatctcttctgcgggttggcgctgccgatctcgccgttcttcctgctgctgctggaggagttcgggcttcaactctag

SEQ ID NO: 39997 - DNA, 768 bp, Zea mays
  Peptide Sequence Number=SeqID_83372
atgacctacatcgcctcccttggtggtgcgaggtgggagaactggcgaagtgactgggtgatcgctagtgctgaggtcagcgaccgcctagcccttccgagtgacgggcctagactcgagcggaagcaatggagggtaaaaccatgcctcgtgcctgagttcgagcccgtcttggacaggattagggaactggcggggatcactggtgaggcttttatccccgaatccttgatacctcccgagggcatttcgcctctctgcgacaatccagggttgcggtcagcggtgctggcccgactgctgacccttaatgagagtggtgtggtggtccgccagaccggtggtcgggacccccaccgggggatccacattcccgatgcaccggtcggaggctcccagccagttgatgtggcccccagagttcctcctgcagtccccaatccctcggagaagggtaaggggcccgcaagtagctcctccactccggacgccgccgggaggtcggaggaagtaaggcgacaccgactgcgtcacgctgatgggtcctttgttttggatctacctcgagattcgggctctccccagaagcatcagaagacagctggtgggactaaggaggccgaacctcgggtccaggacaggcagaggggcgcgagccctctgccgccaccatcttcagatcagataccaccaccgccgccgcctgtgtcggaccgaccgccatcaccacgggggcagcggcagcaacagcagcaggggcggcagtag

SEQ ID NO: 39998 - DNA, 651 bp, Zea mays
  Peptide Sequence Number=SeqID_83373
atggactcatttattcgcgagaatgtgaaatccatcgtcatgacatccagagcacaacttcatgacttggaacatggtcactatgagatgacaaaagcaataacagggaatgccgataggtctctgggagaagattataaggatctttctgttgcccttcttaccttcatccttcggttcttgaatggtggccatcgtcgccggcgaggcactgaccttgtggcacatcggcttctacgtgctgcgcatcgacatggtcgccgccatgccaagaagcgcagcaagaaggacgcccgggccacacttgaccctgagcgcgtccaccggaccggcggtgatcctggcactggtcccagcaacgctgcggcacctgcagcaccgccgcagcaaccgcttgcgccacgtcaagaccgatgggtgcgtcctccatcgccttcgccggagcgggttgcagagcggttgcgtgagtccgagacccagcagccgctccgtccgatgcggtactgccccctccatggatggggccgtgtcctgctcgccagccgcgggctcctccaacggatgcagaccctacagcccccgctgttcgatcgagcggactgctcgttcaagtcgcctctccagcgcgccctcgtgcccggacacggctga

SEQ ID NO: 39999 - DNA, 342 bp, Zea mays
  Peptide Sequence Number=SeqID_83374
atggccctgacttcgactagcgacacgaaccggtggatccctcggtggtctatgcaagtggtggtggaaaagcgcatggacgtaatcacaatttttgaatcacttataaatacgcactcttcgacagattcattgactcatcgtcgctcatgctctcgtcgaccgaacgtgcaggagttggagattatgaggatgcgtgaggagatgagacaacaacgagaatttatggaggcttgcaatgcacataaccaagcgatgtatcaattaatgcaacaacagggcatgacatcaaatattccaccgccaccacaatggagccagtttacatccacaccagctccg

SEQ ID NO: 40000 - DNA, 1702 bp, Zea mays
  Peptide Sequence Number=SeqID_83375
atggtgatgattgttgtcgtgtgcactatcatcgaaaactgcggcttccagattgatgaggtcgagcgggtaccaaaggtatccatgctggtgggtgcttactttatgcctagggttgaggaagtattgtgcgccatcgctgctctcgacgagctgatcatagacctttctcgcccgaggactttcgacctcaaggctcttccactcgatgtcgtcgtaaacccagttgagtttttggacgaaggccttgagttcctgttgctgctactggaggttgaagctgatattcctcttcttggttgggaggttccacgtcctcctgcgcccatcgtggaggacgcatcggagttggcgacgcgaagctcaccggttgcggtggcgaagaagtcaagggaacagaagtcgatgcggctcctcgatgcgaagatctctccgatagtgaagaaactaggggacaatagaatttgtgttcgggaggagaagctagcgcgaactcactctgaatgggtcgtctgcggtgtggccccgcctttcatcatgaaccttggaacaccctccagcgtgcgtaagcccgcccgcgcgtcttctaccgccacgtgtcttccacctttactctgcttgcgagtccgccgccgtctctcctacccagtctccctgcccggcggcacgccatcggactcgccaagctgcgcgtcgggcagcctcgccgagccaagcgccgggcggcctcgccgaggtaggcggcctcacctagccggacgccgagcggacatcgcggagccgggcggcctcgccgagctccaagctccgggcgcggcgcagtgcctcaccgagccaagcggcctcgccaagccagacgtcgggcggctatctgcacagactgagccacccacccaacaaccttcttccacatgcgctaacgcgaccggtagcgaaacctcggtgtcctcgtccagccgtgttgccgttcgggtgccactgctggaatacagttcttccttctccagctgtcgggtgacagcaaaacttgtcatcacttctgctataaacagtgcatcttctagtaacgagaaggaactatctgcttctagcagcaatgatgacttcaaaagctttgagagcactacttcatacaccactgctgctagtcgttcatcgactattatactggtggcaatgcatggaacagcaccatgggtgattatgctggcagcttgtcagatgcgagaagatgttgtctccaggaaagcagcacagaagatgaaaaggatgcaacgatcaactcctgctacgactagttcatctaccatggctgcttcaggacctattgtagcacgtgcacacttcccaagagctccattccgtgaggtcattacaataggacattacataaatgatgatacattttatgctagaaaaccaaaccagaaaaagggtaagtaccagaaggcccgcagtttcagtaacatgtcgtcaaagaccggttatactactgatcatggagataatgtttcagctgggtctgataggagggcaaatgatgccatcgggtctgataggagggcaaatgatgtcgtggacaccttgccagccaggcatttggccatcgatgcaaacacagatgccaccgccgatgccgtggggatttcctcctcgtgggcagttacactcaccaggattgccctcacactcaccaggatca

SEQ ID NO: 40001 - DNA, 513 bp, Zea mays
  Peptide Sequence Number=SeqID_83376
atggacttcgccaggcgggagacggatctcaccttccgggaagaaatgctcacccggcggggcgagatgctggccgagcacgagctcgaggcagaggagaaggagaagaaaatggaagagcggatccgacagttccaggcggcgcagcgcatcgccgcatgggccagcgaggcaagcacggcactggtgccgctagggatgagtcccatcccggtgtcggagctgccgacatctatctccaacgcgctcccggtgctggactccaccgccgaccgcctccaatgcctggaccagattcttggtgcccgcctggaggccgagggcggcaggatctaccgggcggtgatcgaatatatcttgacgtgcttccggagtcacaatctggccatatccttggagccggtgatcgctggtccagtggccgccactgaagacgccgcctgggagggcgtacaagacgtcgtggaactggtggccgaacgcttccagcagtatcctgctgacgacgagtag

SEQ ID NO: 40002 - DNA, 375 bp, Zea mays
  Peptide Sequence Number=SeqID_83377
atgccaggcccaccgacgggtctggctctcagcagcaggctcccatgctccagccggggatccggcggcagcagcgctagcgtcaagcggcgctgcaacggcgccgacgtcgagcggcgtcgcaacggcggaggaggtgccgagcaagaagcggcgccagtcccgctccctcgcatgctgtcccgcgtccaccaggttcttagtgacactggggcggcaattttgcgggagtgggaggcgctagaggctgagcaccaacgcctcagcgactggcgcatacagctggaggagcgcaccaagtcggcatcccgacagttcctctctgagcggtcccaactcgagcgagaccgcaaggagtacaagagggacctctag

SEQ ID NO: 40003 - DNA, 1185 bp, Zea mays
  Peptide Sequence Number=SeqID_83378
atgcaggatgacgctggtgctgaggtggcgccattgggcccccaggatccgcctgtcaccgtcgaggcaacaccttcgggttcccaagttccagctgggggtccagaagtggtagcgtcgccaacgactgttgcagacccaacgtcggcgataccgtcggatgcaccgtcggtggtaggcgtggggggcgcgtccagctctgtccctttgccaacttcgaagggtccggaggttattcttaggcgaccactccggtctggcatcgaacctggagcaacgctgactcccctccctcatgtgctgactcgcgctcaccagaccctccaggaaaccgaggcggctatcttgcgagagtgggaggcgctcgagaccgagcaccagcgccttggcgactggttctcccaactggagaggcgcactaaggcgacgtcctgccaattcgcctcggagcgggtcgagcttgagcaggagcgtgaggacttcaaggaggacatccagaagaaacagcgggacaagcaggctgcggccgaggcaaagctgcagcaggaacttgccgacaaggccaatgacattgctcgcactgaggaaaacctcaaggcgagggaagcttccttggcgaaacaggcaactgacctcacttggcaggaggaggacctcatcttcagggaggagatgtgggcaaggtggaacaagctgctggatgagcttgagctcaaggcagaggagaaagggaagcgtttggaggggagggtgcagacactggaggagcaggtccgccagttccaggcagcgcaggctgtacaggcgacgcagacggcctcggacccccaggcgatggaggtgatgaggaagacacttgacgacctccagacagagcaacgtgccgaggcccagcgcatcgccgcctgggctggcgaggcaagtacagcgttagtgccgttggggatgagtcccatcccggcattgattcttggcgcccgcttggaggccgagggtagcagactctgccggtcggcaatcgagtacgtcttgacatgcttccggagccacgacccggctatctccttggggccagtcattgcgggtccagtggccgacactgaagatgctgcccaggagggcgtacaggatgttgtggacgcggtggtcaggcgcttccagcgggatcctgctgatgatgagtag

SEQ ID NO: 40004 - DNA, 225 bp, Zea mays
  Peptide Sequence Number=SeqID_83379
atggtgagagtggcacgtaccctcctggcaaaggaccgcctaaaaggggtggccttcgtcaaagtgccgagacctgcgaagggtgtcccggcccgctttgtctctgtcggaccagcggctgcagcgaaggcctcgagcgaagggtggcgtctttgccttcgccccaacatttgccctccgagggaccagttcgacaaagtcacctggtgccgaagacgtcgctag

SEQ ID NO: 40005 - DNA, 201 bp, Zea mays
  Peptide Sequence Number=SeqID_83380
atggagggacgggggagaggcgagctggagatggaggccgagccggagccagaaccaggggcacgacggcgcgtagaagatgagcacggctggagaggagagcgccgggagagagagtggcattgtctaagatggagcgctcgacaagcagaggataaggacagcacgcggtcaggaacaaaaatcagggaggggcgatga

SEQ ID NO: 40006 - DNA, 561 bp, Zea mays
  Peptide Sequence Number=SeqID_83381
atgatgaccgcgtcaaaaaagggaccgggaaaggggatatttcgaaaaggatccttctcagcgaaggaaacgggcccccgagccctcctattgatcaggggttcgaaggctggcccctcagaagggttcaacagccgcccagagcactcgggctccgagcccattactgatcaggggggttcgaaggctggcccctcggaagggtttgacagccgccccggagcatgcagagtaagggatgactttgggtacgtccgttacatggccgaggctcgggctacactcccgaggtaccctaggacatttccaagaccaccccctactgaagcaaggagacgtcagcaggatcccaaccgcaccgccaactgtgcttctacagggctcaggcacttctccgacggccacgttatcgcgtacatagggctcaagcacttctccgacagccacgttggcatgtacacagggctcaggcacttctctgccagacacttgacattccaaggtctaacatctgtatgggtatggaagaatggaatggacgaaagggttgagcaaagatag

SEQ ID NO: 40007 - DNA, 903 bp, Zea mays
  Peptide Sequence Number=SeqID_83382
atgggatgcacccgtgttgccttcttcttgcggctgttggaggagcacaaccccgtgggggttggcgctcttcagacatcgctcggcttcaaggattaccatcaggcagcccggctgcagtcccccaccggcggggagagggcgctcaccggccttgcgaagggggcgaacttcgacaacgctggaccggtcggccgcaagcgtcgtcagctgcagcgtgcctggcttgctggctcagctggctctggcgcggcctccgacgtcgcctcctgcagcttggtccgagcgttgttgtccgtgcgccgcacgggcggctgtcgcgtcgtgcgcaccgggggaccgtacaagacgtcgtacgccgcatgggcggcgttcgtgttcttggattgtcttgtcctcactccggcacgacacctccgcccggaggtcggcgccggcccgtctgggaggacgtggccgctatcgtcggtgctgaggtggtggcagccagaggaggttgtctctgtcgacgagaccatcggcgccacctgtggtcagacctccggctctttggctttgatggcttgtcctcgcccctcatgtggggacgtgggcgagggccttttcacagcagcgtctgccctgaggtcatcactgctgctgtttagccgctcgaggcagaggtcgttgtcgctgccggtggagcggtcgccgatgagccacctggagtttgttatcccgcaggccctctggtgtggaggttgttcattcctgcgggagtggatccggagtcccatttgtaatgaggcagtggtgtcggcgtggacagaggcggagtcagctcgaaaagaggctttgtcggcccgggagcatgtggcttcccaggccgaggaggtgcagcagcggcggctggagcttggctag

SEQ ID NO: 40008 - DNA, 579 bp, Zea mays
  Peptide Sequence Number=SeqID_83383
atgacaaacggcttggccattactgctgaattgcctccatacggagatatggggagaagtgctatcatagaagaaggtgtcatgattgtgaccttcagggtggagatttcttatgttctgcgcgacagcgaaatcgacgatcgtaggaacgcgctcgactttgactctctaggcaccgccaaccgcatcgtcctttgtgaggactcccctcatgtgccaatcgctgtgtctgcagcgacttggcctcccctccaccgaccagatccacaccgccaacaggctcaccgccgacgaccccgactcactgctcagttcgggccaggagttcgtcatcctactcccctgttaggtggaacaagtggaggtgtagttctaattttggctactgccgtgattgcagctaagccagaagaaaaggcggaagaagagccagaattcccattagaagtcatctcaaatgctggaggtgtacccatagtgatgaatgaaactattgggtttaattttgatagtgacacaaaatcttccattccaggacgttatgcaactctgccatctgttctacaagattgctattaa

SEQ ID NO: 40009 - DNA, 444 bp, Zea mays
  Peptide Sequence Number=SeqID_83384
atgacctacacattgcattcctatgcatacattgaagtgatatctgcaggtgagactgaagaacatcaaaccagggcacttagtgcttcggagggtggccaacccagatacagtgggaaatcttcagctcaaatgggagggtcctttcttggtggtgtcttcgtcaagaccaggatcgtacaggctgaaagatatggatggaaacaacattccaagaggcgctttgtcgtgaacgaaaacaagggaaggtgttttttgcctttggctcaaaagctacaagctatggtgttgggggtatgcttcgtagccgaagatcctaaagaaataaaataccttcggcagatcctctcaaaagcagcgccgaagctatcgcctataaagcttcgacacagtgacatgtctcaagacgaaggggtgaaccgacttaaagatgaaatgacctaa

SEQ ID NO: 40010 - DNA, 306 bp, Zea mays
  Peptide Sequence Number=SeqID_83385
atgacgaagataaatagaaacaatattgaattatatttgtaccttcggcttgacagaaggaccttcggaagacgaaggcccccaacgccaatagtagttgatgtccttttcaagcttcaggaatccgacactcttagacagggtgcatataattttagcaccggcacggtcgaggatgcatcccacgacttcctcgtcgaccccgccaaagagcatcaatcccggctggtagccacaagagattgcaaattctttcagctccgatatgtcctcttcagaaagctattggccacccaagtgccgtag

SEQ ID NO: 40011 - DNA, 693 bp, Zea mays
  Peptide Sequence Number=SeqID_83386
atgcagctggcgtgcaactgcaccacggggacgcacccctttgacttcgacgcatccagcatgaaggcccaggcccacacgtcatgtaaccggcgcgccggtcactacgtgcgaaaaactgcaccgccacttgcgccaataccgcgccttctcgactgcagaaccgatgccacgactcgaggcaaccctgcgcatggcccaacagtgccaaccgagcacatcggtcacgggtcagtcagccgcgggagaaggtgcgacggtcgatatggccaaaagtgggccgacagtaatggcggcagcaggcgagcggaagcggcggtcaaatcgtctgcaggctcacgtcccctcctggagcagcaagagagccatctcccacggcgtgaagacgacgcgcccgtgttccgtccctcgaacagctcgcgcaacgaccgctccgcgaaccacccgtcctgtcgcgttaacttcgcggcagggcaagcgacacctttggcaggcgaagcgggcgacgtttttcacctctgccataatgactacgtcaaaaaagggaccgggaaaggggatactccgaaagggatccttcttcgcgaaggaagcgggccccaagccctcctactgatcaggggttcgaaggctggcccctcggaagggttcgacagccgccccagagcactcacgcttcaggctcgttactga

SEQ ID NO: 40012 - DNA, 456 bp, Zea mays
  Peptide Sequence Number=SeqID_83387
atgaggctgacagcagctgagtccagcctcaggcgccacaggaagctccgcctcgcccgaccttgggccccagcctcaggagaagtctccgcctcgcccgaccttgggccccggcctcaggagaagtctttgccacgcctgaccccagggctcagcccccgcctcggcctcggaagatggactccgcctcgcccgaccctagggctcggcctcgacctcgaccttggaggatggactccgcctcgcccgaccccagggctcggccttgacctcgacctcggaggatggactccgcctcgcccgaccccagggctcgacctcggccccgacctcagaaggaatcgtgttctcacccaaccccgaccttggcctcaggaggagttttcgcctcgtccgaccttgggctcggaccgaccacgccacaggggggatcatcattaccctacccctagctag

SEQ ID NO: 40013 - DNA, 408 bp, Zea mays
  Peptide Sequence Number=SeqID_83388
atgacgctgacacgcagggcccacgggcaagtggctcgggtgggtggtcaggagtgcagcgggttgacagggggaccccagcaggagcgggcccgctggtcagcgatcgagggcaggtgtgggagcggtgaggtgcggggtcgcacagatgggtggggtccgcctatcagcgacccaaggaagggaaaaaggggacgacgctgggaagctgatgggtgggccctggctgttagggtccccatcttcgctggtcgggcatgcatggtctcggcatggcgcaaggacgaggcggcactctggtccagcgtgggcggtccttcgagcttgggggggtcgggcgcatgggtggtggccgagaaatgcgtgacgtgggttcgtccatggcagggcgtgtgggctggtggttag

SEQ ID NO: 40014 - DNA, 825 bp, Zea mays
  Peptide Sequence Number=SeqID_83389
atgatgacacgctctcactcgtccccagcagcagcaggtggcgccacgctcgcctacgcgtggggctactaccagcagcagcagcccagcgctccgttcggcgagcatcaggccgacagcggcgagcagcagctggacctgacgacggcgccggagctgaggcgggcgctggtccgcgcgctggccgagctgcacgcgtcgcgcgccgcgcaccaggccgagctccggcgcgtggagtccgaggccgcgcggctcgcggcgctcgtgtcgtccgccgccgccgagcgggacgagctccggcgccagtgccactcgctcctgctcctcctccaccaccaggcccaggcggcggcggcggcggcggcggtggcgcctgctccgagcctccacgctgcagcaagcgtcctgtcggcaggagggggaggatgctctgcctctgcctctgctactgcggctgcggtcgtcacgaacgagaacgcgccggacgccgacgacgcggagctggaaatggcgctcgcgcggcggctgccggagaagggccggctggtggaggccgtggtgtcggccgggccgctcctccagacgctcctcctcgccggcccgctcccgcggtggcggcacccgccgccgcccgcgccggccgacatcccgccgttccaccccggcggccgccacagccccctcgcggccggcgacgcgtccaactccttctcgtcggcctcggcggggtcgtcgtctcccgagagcaactgcagcggtgggcctccgccgccggtggcgccgcatgcgcttccttcttttcacatgagccccttctgcatgtag

SEQ ID NO: 40015 - DNA, 183 bp, Zea mays
  Peptide Sequence Number=SeqID_83390
atgggcggtgtcggatttatagcgattatatctggggtgcacgggaggtgggcgaactgtggtggggacatcgactgggggcgctcctcgtcgctgttggacgagccaactatagaggatccgggtgttcagcaggtggagactgttgagcaggagctcgttgaaggcaagttgtgcccttga

SEQ ID NO: 40016 - DNA, 465 bp, Zea mays
  Peptide Sequence Number=SeqID_83391
atgatgatggtcctcgatacagttgtcaccacctcgttcgccattctacttcttttctctctctcctcatgcctccacctccgcgccaccccattctcggcagagggcgtaggagcatgcgcctactccccgtattcgtctgacaccagccccgacagcgactcacgcagtggctattgcacgtccatgaggacgtttcacatcatgcgcgcaccatcgttttcgccgtcgtcggacgtcccattcgtcttcacgaccttcatcctgttcttcctccccaacctgttgcccccacccacggtcgcagccacgagccgaccgacgctcgtcgacgcgggtacaggacttttaagcttcggttctgggagcactttctcagcgtttgcgaagatgtctgaagataagaaagctgttgctgaatcaaagctgagcctttctgaggagatgcatctcggctttctttag

SEQ ID NO: 40017 - DNA, 279 bp, Zea mays
  Peptide Sequence Number=SeqID_83392
atggtccccgaggcggtggcggcgctgcagctcgtcaagggccccgtcggggtcgtctacagcatcgtgcctgcgaagaaaccacggtgcgtgcttggtgtgcacaccacgcctggagacactcacgcggttaatcagaaattcagaatcatcatccgcaagttgatgtcgtcgaggtactatgttaggcttttagcggacttgacaagatgcacatgcttcttcagcaagaatgtatggttttcatcgcatattaagctggccagctggggtatttga

SEQ ID NO: 40018 - DNA, 990 bp, Zea mays
  Peptide Sequence Number=SeqID_83393
atgccttcgcactcccctcatgcatcgcatccttccacctcccgagcccccggatgggaagtgcccgcgttgccttcgtcttgtcattggaggagcgcaaccttacggaggtggcacccttcacccttcgctcggcttcaaggattttcatcaggcagcccgactgcattccctcaccgatggtcacctaggatggtgaccactagttcgatggtggggagaagaaagccgggctgcggcctctgccccgcctcagcttcaaggatcttcatcatccttgttgtggaggagggcgaggcgagccggggcctgccttcgtcatctgggggtggaaaccatcctccagctctacggaggaggcgtcctctagccatacgagggaaggcgaactgctgctgcctggccagggtgcagcattctgtcctctatccgggcgactgcggccggccgcaccggagggtctcacaacacgtcgtacgccgcgagggtggtactcgtgttctgagacggtcccgttctcgttcttgcggcgaggacgggagtgaggacctgccggtggatgttgtcgtcggtgctgaggtggtggcagccagagaaggtttctccgctgacgagatcgtcggcgccacccacgctacgggcctccagctctttggctttaatggctggttctcgtcccccgcgagggacgcgaacgagggccttccagtgaaggtgacgagtgaggtatccgtatcccggaggcgtaggagtccctcggctcggtcggccttgccacgcaaggcttctcttgctcagttaaagaaccctcggctgctctgcgatgagccggagccggaggcagcggtgtcagcatggacagaggtagagtcggctcatgaagaggcttcgttggcccgggagcacgtggcctccctggccgaagagatgcagcggcggcggctggagcttggccaggtcgtccgctggcgagaccaaccgcggagttag

SEQ ID NO: 40019 - DNA, 849 bp, Zea mays
  Peptide Sequence Number=SeqID_83394
atggatgctctagactttgagtaccccgactacgagcggctagacaaggatgccgaagggcagaagagaaagagagtggctggtgctttgaataaagaagctactaaattgatgaaagacgacgaagaacaattgataaagaaaaagctgaagcctgagccgaagacagatgcttcgaagaaaagtaaagctacaactccgaagcagaaagcaattgatgaagaagaagaagaaactgctgcaacactgtcacacccggttttaaaggacaaagccggtgcagggttcttgcctgaccgccatcgcagcaaaatcaaccaaggacctccctacactgaccactcccctactgcccttgcccctttcgggtcgtcagcccctacggctgctcgtcggcgaggaagctcggacgacgcgcggcaatggccgagccggtgtacgccgctgccactgggaatgacaccgcagcggaagaacgcctgcccctggagccgaatatctgctcacggcatccatgaaaccgtggccggggtcggagttgaagcagccgaccgaggatgtggtcgaagctgcggttctccatcaccgcgaccaccatcgcctttatcgaagagtggatcttgtgtttctgctgacgacgatactcggtcaggtgctccgcccgcgaccgcgaccgcgctgcccggaccagcggtggaggcaaccgacgcgcgcaagggagaaggtaatcgcgtaccaggacgcacgcgcaaggggacagggagacgcaagccacccgcggacagcgtcgaagttgggagagagatgagggggatcgaccttggcttccgggtactcagctatggctag

SEQ ID NO: 40020 - DNA, 360 bp, Zea mays
  Peptide Sequence Number=SeqID_83395
atgcagagctgtaatcacttcgagggtgacgaaactacaaaagtcgttcctaagggagcacagaaaattgtctggcttcagcgacaaagtgcttcgttgaatacaaagaagcttcgtttcaaacatgtacacaggcattttatgcaaggaaatgcttcgatgtgtacgaaaagaagggaaggtgtttttcgccttcggctcaaaagtcacacatggggttttcgtccacagcaaagcaattcacacatggatggaaaggaagtcataaaaggaagcttcagcccagcaaccttcagaatgcgcttcagattactaaccttcggcgccgccatcctgcagataaacaacggtataaggtaa

SEQ ID NO: 40021 - DNA, 186 bp, Zea mays
  Peptide Sequence Number=SeqID_83396
atggggctcggtgtatgcggctcgctctgccaagtttgggttcgccccttggggaggagtggcaatgagattgatggttttggttatgactatggtgctggttgtcagcatggcaaccactgctcaggcgaagatgaagctgtggaaggagacttccaggagttccaagactacgacgagttctag

SEQ ID NO: 40022 - DNA, 462 bp, Zea mays
  Peptide Sequence Number=SeqID_83397
atggcggcggatttctcccttccgcgaacgcagcaatggcggcggcggtggtgcgtttccggggcaaaaggagctcgcgcgagactaaggcagggcagggatggatcacggaagcgcgttgccaggtcatttatctcctggcgtggtcaatcgcatcagcgacattcacggcgaacgcggcggggtcatggcggtctttctgttgcatggagtccgtgggtaggagatcgagctgacgaagtgggcccactcggcagcgagaatgtgcaagcgctggtcagtccgacgcaggggccccaacgtcagcgtccgagtaaagggaacgcaagcgcagagcggatgacaagcgggcccgcggtgtcggcgccgatccctgaagctgggctgtgcggcatggattcagaagtgggccgaaagctggtctgcggcccagatttatacttagattacatggcgccataa

SEQ ID NO: 40023 - DNA, 564 bp, Zea mays
  Peptide Sequence Number=SeqID_83398
atgaggggttcgaaggttgcgccctccggggttcggcaactgccccagagcactcgggctccgtgccctttagtgatcaggggttcgaatgctggcccctcggaagggttcgacagccgcctcagagcacgcagagtcagggatgaccctgggtacgtccgttacatggccgaggctcgggctacgctcccgaggtaccctaggacattttcgagaccagcagaaacgatttgtaatggaatcccaccggagggaggtatcgagccctcggacccgatcaaatgggtccgggtccggcaaatcacctgcagagggaagctgaaggagaagggtcacatgttgcacgccaagggacaggcagctgaaggacaagagtctcgcatgcagctgacgaagagacaggcaactgaaaagtttacgcgttttgtgcgaagtgagattcactcaaatcctttgctgatactaggttgcaaaagggtattccactattcccgctgtttagaagcatataagtcacacttcagtgcctttcatgagtatttagggattacccaaatcccatag

SEQ ID NO: 40024 - DNA, 390 bp, Zea mays
  Peptide Sequence Number=SeqID_83399
atggcgcacgcgttgaggtggccactgccgctggcttggctgctgaagacgccgcccaggcggtcgtacaagacgtcgtacgccgtggagatggcggccgcacgcttccagcgtgaccctactgatgttgaggccgggcttatgagggtggacctcgccgggctggcgtacacgtatgcacagcctagttacaaaagggagaaaactcaacccctcaggcttgctcctatggatagaacttatagagatgctctaggggttaggaagaggtactccttcagttgtagcgaggtggtcaccctcgggtcggcatatttccgtcgcctcgaagggtccttcccagctgggggagagtttgtggagcccttctcggttcagtacttgccctag

SEQ ID NO: 40025 - DNA, 768 bp, Zea mays
  Peptide Sequence Number=SeqID_83400
atggaagcaggcagagggcaagcagggacagaggaccgcgtgagctctgaacttggagcaccgcgaccatgggcgagggaggagctcggccgggagcgagctgagggagagatagaggagatgcgcgccacgggagcttcgagcagaggacggcagcgcgcgacacagggatctggaaaggagcaaagagagctggggcgactgcggcacccaggggagccagaggtgacgcgcgagcaccatgggaggagcctgcgtgcggaaaagaagcttggctgggcgagcagcaaagcgccgagcagagaggagctccgcccagggatggagcaaggaaccgggtgcggccatggaactggagacgcgcgcgcagggagagaaataggggatccgggctgggggcttggccgggacgcgactcccatgggcgagcggcgagccagagagaagtcgagaaggagctgggcgacggtgcggcaagctccacggctgggcaccgagcgctgcaagaaggagataagctccgtgagaaaaatctccaggactgcgcacggggcgagggcggcggctaaaaatctgctggggacggcggcgcgagtccggcaagcgctggacggacgtacaggcgataaggatcacgagcacgagctgggattgggatggagcacagtggaacaggggacatgcgtggagtcttctgaagagggaagatattttccttttctcatccatttctttgaactaaagaatttacatttattcatttcttaa

SEQ ID NO: 40026 - DNA, 207 bp, Zea mays
  Peptide Sequence Number=SeqID_83401
atggggtaccgaattcccagaaaaatacttaatcctgctccgataccagctgtggcagaacctcccaagttattgggcccacatgcacctgcccttgtctcaaagacctcagacggctatgcatgtgcaccagataacttaacaggatctgtccgagtgtcccagggaccccggataaaccacgaacaaccaggattacaagattaa

SEQ ID NO: 40027 - DNA, 768 bp, Zea mays
  Peptide Sequence Number=SeqID_83402
atggaagcaggcagagggcaagcagggacagaggaccgcgtgagctctgaacttggagaaccgcgaccatgggcgagggaggagctcggccgggagcgagctgagggagagatagaggagacgcgcgccacgggagcttcgagcagaggacggcagcgcgcgacacagggatctggaaaggagcaaagagagctggggcgactgcggcacccaggggagccagaggtgacgcgcgagcaccatgggaggagcctgcgtgcggaaaagaagcttggctgggcgagcagcaaggcgccgagcagagaggagctccgcccagggatggagcaaggaaccgggcgcggccatggaactggagacgcgcgcgcagggagagaaataggggatccgggctgggggcttggccgggacgcgactcccatgggcgagcggcgagccagggagaagtcgggaaggagctgggcgacggtgcggcaagctccacggctgggcaccgagcgctgcaagaaggagataagctccgtgagaaaaatctccaggactgcgcacggggcgagggcggcggctaaaaatctgctggggacggcggcgcgagtccggcaagcgctggacggacgtacaggtgataaggatcacgagcacgagctgggattgggatggagcacagtggaacaggggacatgcgtggagtcttctgaagagggaagatattttccttttctcatccatttctttgaactaaagaatttacatttattcatttcttaa

SEQ ID NO: 40028 - DNA, 1806 bp, Zea mays
  Peptide Sequence Number=SeqID_83403
atgggtaaactgctagagatagtcttaggcttcaaagttctaagtagttacattttgtcaacttttgtaagatatgggacacaacgtcttccccgtcttgttggtctgccaaaagcccttgagatgatgttgacatcaaagactataaaaggcaagatggcacatgaactcggtttagttgatgctgttacctcagctaataaattggtcaacactgcctgttcctgggctctggaaatttttgaaaagaagaaaccatggttcaaaagtctccacagaactgatagacttccagatcttgaggaagtgaaggatattctgaaatttgcaagagttcaagctgaaatgaaggctgctaatgttcagcatccaatagtttgcattgatgttattaaagaaggaataatctctggccctcgtgcaggcctcatgaaggaagtgctctctgggaaaatgcttgagcagtctcaaacaagcaaaagcttaaggcactttttttttgctcagcgtgccacttcaaagattccaaatattaccaacataggtttgacagcacggaaaattaaaaaggcagctatcgttgggggtggtctaatgggatccggaattgcaacaatactgatattgaacaactttaatgttgtcttgaaagaagtaaatgaacagttcttatctgctggcattaacagaattaaagtgaatttgcaaagtcttgtcagaaagggtcaacttactgaagaagattatgaaaagaagctttctctgctatgtggtgctcttgactatgaacagttcagagatacagatgtagtaattgaggcggtaattgaggatatggtgctgaagcagcaaatattttctgaccttgagaagtattgccatcataattgcatatttgcaacaaacacttcaacaatagacctgaacataattggtcagaagacagcttctcaggaccgcattgttggtgcacacttctttagtccagctcatgtcatgtcactgttggaaatagtttgtactcatcatacttcctctcaagttattgtggacctgattgatttggcaaagaaaatacagaaaacaccaatagttgttggcaactgcacaggtttcgctgtcaaccggatgttctttccttacgctcaggcagcttcttttcttgttgattatggtctggatgtgtatcacatagatcatgtgatcacacaatttggaatgccaatggggcccttccgattagccgatcttgttggttttggtgttgctattgctacaagaaagcaatattaccaaagttatcctgagcgaagttacaaatcaatgcttcttcagattcttgttgaggataataggacaggtgaatcttcttgtaagggcttctatgtatatgatgataaacgcaaagcctctcgagatcctgattttgggaagtacattgaaaaatcaaggaacatggcaggtgttatgcaagatcctaagctgatgaaactaacagataatgacatcgtggagatgatcttctttcctgtggtgaatgaagcctgccgagtgcttgatgagggaattgctctcaaagcatctgaccttgatgtagcttccattatggggatgggtttcccttcttacaggggtggagtaatgttttgggctgactcgcttggtgcgaaatatgtgtatgacaaactggatgcatggtcgaaggattatggggagttcttcagaccctgtgaatatttagctgtgagagctcgtcagggtgcatccctggctgccaaggttgatggtgtcaaatcgcgactctag

SEQ ID NO: 40029 - DNA, 1599 bp, Zea mays
  Peptide Sequence Number=SeqID_83404
atggctgaaaggtaccaacttccacgaagttgcgttcctccaacgacgacaaggcggaagaaccgcgggcgctccccatccgggggctcggaagccgtcgcgaaccgagtcttctccaacacactccaaggtcctccccctacgacacgggggctgggccccacgcgtcatgcaagcgggcccaaggcggaagaagccagaccgccgcgcgcggtgcgcgtaactgcccagcggttacaagcgcttctccacttttgcctagacatgcgggtgaaagagcggaccgccatgcaggcggcatgcaaccgcaccaagggggcgcaccctttcgactttgacacgtccagcatggaggcccagtcccacacgtcatgtaaccggcgcgccggttactacgtgcgacaaaattgcaccaccactcgcgccactaccgcgccttctcgactgtggaaccggtaccgcgactcgaggcgaccctgcgcgcgggcggaagcggcggtcaagtcgtcagcaagctcacgtcccctcctgggacagcgagagagccctctcccacggcgtgaagacgacgcgcccgtgttccgttcctcgaacggctcgcgcacgcacaacggctgccccgcgaaccactcgtcccgtcgcactaactctgcggcaggacatgcggcacctttggcaggcgaagcaggcgacgctttcacctctgccatgatgaccgcgtcaaaaaaagggaccgggaaaggggatactccgaaagggatccttctccgcgaaggaaacgggccccgagccccccctactgatcagaggctggcccctcggaagggttcaacagccgcctcaggccactcgggctccgcgcccactactgatcaggggttcgtaggctggccctcgaagggttcgacaaccgcctcagacgcagagcgagggatgaccctggcctcggctccggaagacgacgaactccgcctcgcccgaccccagggctcggcccctgtctcggcctcggaagacgacaaactccgcctcgcccgaccccagggctcggactcagcctcggctttggaagacgacgaactccgcctcacccgaccccagggctcggactcagccttggccccggaagacaacgaactccgcctcgcccgaccccagggctcggactcagcctcggctctggaagatgacgaactccgcctcgcccgagcccagggctcggactcagccttggcctcggacgacggtctctgccttgcccgacccggggctcggactcgacctcgacctcggaagacagactcgacctcgaccttggaggagcctccgcctcgcccgacccagggctcggaccgaccacgtcacaggaggggccatcattaccctacccctagctcgctcaggctacgggggacaagaccggcgtcccatctggctcgccccggtaaacaaataatgatggcgccccgcgtgctccatgacgacagcggctctcagccccttacggaagcaaggagacgtcaacaaggactcgacagccccgacagctgtcctttcgcaaggctccagcgctcctccgacgaccacgacatcacatga

SEQ ID NO: 40030 - DNA, 183 bp, Zea mays
  Peptide Sequence Number=SeqID_83405
ccgtcgtgccgtcaatggggctcggtgtatgcggctcgctctgccaaggttgatttgtcccttggggaggagtgcggtggttatgagattgatggttctggttatgattatgcctatggtaatggcgaagatgaagccgtggaaggagacttccaggagttccaagattacgacgagttctag

SEQ ID NO: 40031 - DNA, 399 bp, Zea mays
  Peptide Sequence Number=SeqID_83406
atgaagctcgccgagctcctgtggcaggcggcatgggtcgagctcgctggacgcggccgccccgacgagcttcgcgcgcgccgcgatagcatcgtcgagcgcctctacgctgccgccgtgggctgtagcaactgcgtcgggcgtcagaggacggcgaggaggcggctccggcttctccgtgggcggaggctgacgcgcaagccggtggcgcggaagcacagaccgaggtgctcggcgccggcgagcctgatctcgagagcaggaggaacaaacatccactacgatgatgctggtatgggagatggcctcagctctggtgcccatcgcgctggagtgcaaccacacgaagtggtcattcacttagcggagcggcgaaacggagaagagaagggtaaatga

SEQ ID NO: 40032 - DNA, 282 bp, Zea mays
  Peptide Sequence Number=SeqID_83407
atggcttccgcggcggtgccccttgctgcgtcatcgggaagcgctgcgagcgtggcgaccgctgggctcacagctttgcatgcaagtactaatgatgttgtcgtcaactatgatctgctgcaagaagagccgctgggcaccgtgtggatcgccgcgcacttcgagctcttcgagcaacgtcagattctttcgagcatccggtggaggcttaaaagtgcagtgctctctatggcctccggcgcaaatgcagtggaatcatgcgacacaaggtcaatcgtgtga

SEQ ID NO: 40033 - DNA, 354 bp, Zea mays
  Peptide Sequence Number=SeqID_83408
atggcctccagaattcggatctgctccggcctggggttccaccggggctttggatctggggtccgctcctcgccacctacgcatgcacaaatcgagaaccaagataatcaaccaggggcatcacgaatggggcgttcgcacgacaactgtcggggcggggaccgcacgacaagcaggggcgccggccatggatggtggcgaggcgtagtccaacacagaggcgaggtcgacaccaagaacggtcgacgctgggagccgcaggagcaggggcagtgccgcagtggtcgtggattccaggtatcccgggcgcggttgttacagcccgtggctgccgacgcgatcgccgggacgtga

SEQ ID NO: 40034 - DNA, 666 bp, Zea mays
  Peptide Sequence Number=SeqID_83409
atggcgcctcctgttgacgtggctggcctgcgccctaggttgggcgatgtggaggctcctccgaagccgaggtcgagtctgtcttccgtggccgaggccgagtccgagcccctgggtcgggcgaggcggaggtcgtcggctgaggccagggcggagtccgaaccctggggtcgggcgaagcggagttcgtcgtcttctggggctgagcccgagtccgagccctgggtcgggcggagcggagttcgccgtcttccgggcttagcccgagtccgagccctaggtcgggcggagcggacccgagtccgagcccctggtcgggcggagcggagttcgtcgtcttctggggctgagcccgagtccgagccctgggtcgggcggagcggagttcaccgtctttcggggcttagcccgagtccgagccctgggtcgggcggagcggagttcgccgtcttccgggacttagcccgagtccgagccctgggtcgggcggagcgcagcttcctatggtgcctttggcagggcctgtctgcttgtcagtctcactctgccaagtggcactgcagtcggagtggagcaggcggcgctgtccttctgtcaggccggtcagtggagcggcgaagtgacggcggtcacttcggctctgccggggggcgcgcgtcaggataa

SEQ ID NO: 40035 - DNA, 375 bp, Zea mays
  Peptide Sequence Number=SeqID_83410
atgaagttgttcattactgtggcggtgccgccgagacttgcgatgctcgatcaacatgaagttgttcattactgtggcggtgccgccgcggcgccggcgctagcgctggcgaccaagcggccgacggagggcgtccctggcttgggcaaggtgcccaacatgctctacgcctctgccatcacccttgacatcgtgctggtacacaaatcgagacaagtcatacatggtagtgtagactcggtggcggcgcacgttaggtctcaggcaagctgcacaaggagaactgctgaagacaagttcgctctggacttttctgctgcgcctacacttgggtgtactgggcctaaattcagcctgaccgaccgcctgcattga

SEQ ID NO: 40036 - DNA, 186 bp, Zea mays
  Peptide Sequence Number=SeqID_83411
atggatgcttctgacgccataagcagcacaggttatggccaacaggaagttgggtcactggccacatctattaatgttccaattgtgaaactgaaaaaggtatttgacttatttgatacaaaacacaatggaattcttagatttgaagactttgcccaggtgttgtcagcatgccacaaggattag

SEQ ID NO: 40037 - DNA, 174 bp, Zea mays
  Peptide Sequence Number=SeqID_83412
atggttgacaaaccagaaaatacagttacaggtgggggcaaccaagcatcttcgcgggctcaatttgtttttgagaaattctcaatttgttttgagaaatttagcaagaactacatcaggatagctttggtagcaggttgcatgaaagaagcaaagaaagtccgaaaacaatga

SEQ ID NO: 40038 - DNA, 444 bp, Zea mays
  Peptide Sequence Number=SeqID_83413
atgggcaagggtcacaaacgcaagcgtgagccgactcctccatcggaggattttggcgactcggaatactcggaggaggaattctcctccgagtccgagggatctccggctcccgtctctcccccggcgtcgtctgatgattcagacgactcccaggggattgccgcggaggtatggacgtacatccgggccatcgagcgctccgggctcgagggctcggatgagtccgagttctcctcggacgaggaggactcggacggcggcgaggacgaagatgacgacgacgacgacgacggcgacgacgacgacggtggcgacggcgacggtgacggcagctacggcggcgggggcagcggcggcaagggcagcaccagaggcggcagcagcacgggcagcaccaggggcggcggcggcaagggcagcagcagcaaggccagtggctaa

SEQ ID NO: 40039 - DNA, 627 bp, Zea mays
  Peptide Sequence Number=SeqID_83414
atgggtcagcgcgagattgaacacaagggggggaaaagggaaccacggctcgtgttatcctgcgcccagggcgaatgcgcttgcagtaggaggttacaagcgttcgcgagagagggagagagcctgctcgtcagcccgtcctcccgcgcgaccaccttctcgtacgaggaccctggaccttccttttatagatgtaaggagagggcccaggcgggggctgagccccagggtcgggcgaggtggagcttcctatggcgcctgaggctggactcggctgctgtcagcctcaccctggcgggtggcacagcagtcggagcagggcaggcggcgctgttttcctgtcaggtgatccttgcattgaatgctcctgcgatacggtcggttggcgaggcgatctggccaaggttgcttcactgcgaagcctgcccgagctgggcctcgggcgagtcgaaggcctttgcagcttgtgctgatggtggttaccagccgagtttaggagtcttggagcccgggttcatggtcaggttccgagttctcgggctgaggcgtgctccaaaagtacctgcaggtgatttgccggacccggtcccgtttgatagggtcttagggctcgatgcctccctctga

SEQ ID NO: 40040 - DNA, 120 bp, Zea mays
  Peptide Sequence Number=SeqID_83415
atggaaggacagtccgcacaacatctctgctgtccgcacaacatctctgctgtaggacaacagcaacaacagtttttgactgcaaggactgcggcagacagcacaacagcaatcttttga

SEQ ID NO: 40041 - DNA, 231 bp, Zea mays
  Peptide Sequence Number=SeqID_83416
atgtccggtgcacaccggacagtctggtgcccccttccgaccgttggcctggccacgtgtcgcgcgcagattccgctgccgaccgttggcccggccgaccgttggctcaccgggcagtccggtgcacaccggacagtccggttgttcagcatgggtctggtgaatgaaggcatcgacatggaggagggaaacccggagatcggcatagcaattcttttgcatgacagttag

SEQ ID NO: 40042 - DNA, 345 bp, Zea mays
  Peptide Sequence Number=SeqID_83417
tggacttccctaagaagtctgatcgctgtgactaagagtaatcaattgttctctaatcagctatgcccttttcagaatacgagtttggtaatcttcttcttcttccgagttatgcagattaggttgatgtctttcatgagactattgcctcaaaggctaccccaacttatcaggcaggtggagcaagatgttgagactgtaatccacgttctccagccaggtccaataggaattgtggagcacaaattcacagacacggagatcttagaggccagggctacagtgaaaagagcagtggataattggcgaagaaattggacccttgagaaaaatgttggcagataa

SEQ ID NO: 40043 - DNA, 222 bp, Zea mays
  Peptide Sequence Number=SeqID_83418
atgaagtattatttgaggttggtattgtatctgaaggtattgttgacgcagggaagtgttatagaacctattgtggttgttcgaggaaatgagatgatatcgctggtcattggtgagaatgaagttgttattatgcttgtgatatacaagtatgcctatgttgttttcaccatgtttttcatggttgagttttattacaataatattgttatatatgcttga

SEQ ID NO: 40044 - DNA, 561 bp, Zea mays
  Peptide Sequence Number=SeqID_83419
atgccccctgcaccacctcaaggcatcccggctgctggaggagaccctgacggagatggagacgatgatgtcggtggcagttcgagccacggcacggagcgctcggaggagccggagctggaggggtggattgctagacccatcactcatgacgccgctcgcgggtgtcacttccacgacgctatcgacaccctgttgtgtcgggccttcgaccgacacacttggtctatcgagtaccgttgtgtagtctacccagcatcgtcgcgggttatacccagaccagtgggaggcaacttccttgtcggtgagggcaatcccatgctgagcagtatggtaaacctggccgccgtgctcaacacagagttggaccacacccttgatgagttgagcaaggttcgggcagaggttgcggaattgcgtgctgaatgcgtggcacgccactatcttgatggtggttctcccgcccctgtagggattcagcacccttaccgttcaccaccccatggtcgcttcgactatggtaccccagattgcaggacctggatagatttagacccatag

SEQ ID NO: 40045 - DNA, 279 bp, Zea mays
  Peptide Sequence Number=SeqID_83420
atggaggataggaagcgcaagattggtggacctcagaactgtccaaagaaagctgctcagcagccgccaacagtcaatgccccaactagacaaggagcgccacaacaagcaccaggagtccgtggtcaggcctacaatcgtggaaaggtgaaccacctggaggccgaagcaatccaagatgctcaggatgtggcagtcggtacgtttccagtcgaatcctacctagcaaaagtactatttgatactggtgccaccactacaaaacaaccacccctttag

SEQ ID NO: 40046 - DNA, 354 bp, Zea mays
  Peptide Sequence Number=SeqID_83421
atgtataaggttcagtggagtcaccattcagtagaagaagctacatgggagactgaggattttctacgctcccgcttccccgactttctgcccaaaggagtcgttgcaaagagaatgacattcgaagagcagttaacaagaaaacttgagtataaagaaagagtagcacaccaacacaccttcaagcacccctccaagggactctacctaaaatctcgggacgagattcctttaaggggggagggctgtaacacctcaggtgttaccatggctagagcacaccttggtcctaaggactatgatcacatgtggcaggaacttaaggagcaaaagtgtaagggctttggaaactag

SEQ ID NO: 40047 - DNA, 615 bp, Zea mays
  Peptide Sequence Number=SeqID_83422
atggggcggcgggggcggggctccggctgcgcgaaggttgctccgctgagcgcggaccggacgcagaagagagggaaatggcacaccgaagggtgtcccgagcagctgacaggagcgggttacgctacgccttcccagtacacggtgcagctgttcgaggagcaccgggtacctcactttagggtgaggatgactttggagcctcatcccctacagccaggatggtgttcactagacttggagtctttcggtttcagggccgatgacactatagaggccacagctctgcacgtgctgacaaccttatgtggatttcaccccttggagatgccgagccaccccattggcttgttctccgctgagaaggaggattacccgatgtggaaggctcgggttgaccatgacaaggatgtgtgggctctctaccctggacacaccgctcaattgacggttcggtgcattagtgccctgtatcatctgcaggccttacgagctgaggcgatgtcccagcttatgggcctggtggagtctaccaagatgaccctagataacagggaggaccttgtcgtagacttgtccaccaagctagtggagaaggatctacaggtcgagtag

SEQ ID NO: 40048 - DNA, 846 bp, Zea mays
  Peptide Sequence Number=SeqID_83423
atgctgccggctcggatccgccgcggctccgagcggaacttcatccccctcccccaagacaccaccacctcggcaccagcagtccggcgcggcatgagggctcagcgcgcccgcctggcagaggcgctgaggctgaagatggttcaggtgccggttccgctcgtcgaatattccaagaattttctctattcgaaatactcctcaagaagagaaatccaaggggttcaaattgatcgaaagcgtagatctggctcctctcaaggagctgatcgatcccctgacaggaatgtttatgtgttctggcatgtgatgatgctgcagctgtgtctgaggctgcacaagatgctcttgatcatcttttcaaccaaggccacaatcacgctggttgaaaggctaccacaagtggtacttggaagcgaggagacaactgcactttcacatgctaggatgttgttggctctgaccttttatgctggtcatagctcacagttttctggttccatggacaagctaattgtatcaaagccactatctattgggtatctttattcagttgctgagttgaagagtggcgcctattctaaagatacaactaacatatctctgcatgccacgtcaacatctgcagcctccaaaatatctgttatccatgataatgctttgccaaatgcattacttggtacagttgaatatgagttgccccatgtgcctccatggttttttcatgctggtagccagaagctttatggggttcttgctggaataattagacttgttggcctatcaacagtgtcagttgatgggttcgattccttaaagctaacagtagtggttactagcccttga

SEQ ID NO: 40049 - DNA, 993 bp, Zea mays
  Peptide Sequence Number=SeqID_83424
atgtcttctcgctcccttatgcatcgtgtctttccaccttccaagcccccggatgggggatacccgccgtcttttcgcctcatcgttggaggaacgcaactccgtgggagttggtacctttcagccatcgttcggcttcaaggattttcatcacacagcccggttgctcccctccgctggtggtcacccaagacggtgacctccagctcctggatggggaaaggcaagctgggttgtgatcccgatcccgccctcagcatcgagggtgttcgtcatcctcgctggggcggggagcgaggcgagccggggctctacctcctgcgcgggtcggcgggccacctcttcttccagcttctggtggtggcaatcgccctccagccctgcggcggagacgtcctccaaccatgccggggaaggcgaactgttgctgcccagctaggatgcaacattccgccctctccctcgcattcgcggcgaggacggcagcgaggacctgcaggtgcgcttgggagcggcccgctctttggctttaatagctggttcgcgtcccttgagcgggaccgcgaacgagagccctccggtggccgcgtccacccgggaccatggctgctgctgcagaggtcgctggcaggtcccccgacgttcgtggcctcgcaggctcgagactcgcctgttgattatctgaaccgcttcaccaagcatgagtcgccccgtgtcaaggtgacgagtgagagtggggatccctggaccgcgtcgccgtccaaggctaggtcggacctcgctgaaggcgtcgtcgatgccgagggtgctactgcccccttccagcgtcaagacccgagcctgcaggatcagaacttttttgtcggtaacagggatgtttgtgcgagcgagagttgcttctcgcggaaggtgatgagtgaggagtccctcggctcggtcagccttgctgcttacgtgtactccgtcgtcttcaggatccacttttcgaagtag

SEQ ID NO: 40050 - DNA, 180 bp, Zea mays
  Peptide Sequence Number=SeqID_83425
atgagcaggccgaagcatgtgtcgccgacgagcccggccgcttgtgcacacgccagccctactccggccaccaccaccggcgattcgcccctcgacgtgactgccagaagcccccggacctcatccgaccctccaccggacctctcctaccgccgagaactagaaaaatccatacactga

SEQ ID NO: 40051 - DNA, 933 bp, Zea mays
  Peptide Sequence Number=SeqID_83426
atggccctagtctctagaggtggtgcttcctctaacccctcgtctgctatgtttgatttgtcttctttgttgaccatcacagaggaacagggcaagcaggaggctggcccgcatgaccaccactctagtcggcgcaagggcaagcaggagtacacctctggtaagcacaagtccgagggcgtactcgacaaggaggcgctcaagaagtacctcgacctcaatcatgactctgacgacacatcgtgtttctcgagcgatgaggagtctaacaggcgagtcaaggacaagctgaaaggactctgcttcctcaccaacaccgtaggtggtctttgcaccatggctcttggtgatgatgcaatggacagcgatggccaggacatcgacaatgacactacttctgaggtactaccttccgctgatgatcttgccactgaggttgaagagctaaatgctgcattagcaagtcaggataatttgcttaggcaggctgctcgtgagaggagagagtttagatctaagtatgagagcacgcttagggaactacagtcgtggtgtccgacgagactgaattgctttgaaaccatcagagaaatctacacccactcccaagattatcaaaatcacccacttaagcctatcacccttgtgagagatggtgtgattgaggagcctgtgagagtccattctcagaaagaagtgtggattcaaaaacctaaccatcgtaggaacacacttgacacccttcccgacatctctagtgatccccttcttagagctcttcagccacccaaaaagaaagtcccctcccacaagcaaaatccacccaagagagaggatgaacatgaaccacccttctcatggtgttcatgctcagccagcttagagatgtcctatgaggcctataggcctttgcctcttgctgctaggccttag

SEQ ID NO: 40052 - DNA, 540 bp, Zea mays
  Peptide Sequence Number=SeqID_83427
atggcggttacgacggtgtgcgggtcagcttcggagttggtcggacctcgcgcgcaggcgggggagctcgtcagcgcgagttggggagctccacggaaagtcagggatgtcgtaggtgcaaagaatttgcgaatggctcacctggtagcccaatccacgcgcggtggcgggcggtcgaagactggccaagtcgcgctcgctgtttcagtggggcagggcctcggctcaagcttggaaaagcttcatggcctctcggggaagttgtccaagggctcgggcgaggttggaggtctacggaaaaggctggccacggtggccatgctcgggagtggtggcgggcggtggcgcttgcttttcgcggcgaactccggttgcagagcactcatgacctatgagcccctcggactacagcacatttatggcccttgcatccctagccagcggagcactcatgagctatcgagactaggcctaagtgcgcagaccgctaggaaggcgcaacacaacgagctgcaccaagcccagggttatgaaggctag

SEQ ID NO: 40053 - DNA, 348 bp, Zea mays
  Peptide Sequence Number=SeqID_83428
atggcggtcacgacggtgtgcgggtcggagtcggaggtggtcagagttgtgagttggggagttccacggaaagtcagggaagtcgtaggtgcaatgaatttccgaatggctcacctggtagcccggtccacgcgcggcgacgggcggccgaagtccggccaggtcgcgctcgctgttccggtggggcagggcctcgtctcaggcttggaaaagcttcacggcctcttggggaagctgtccaagggctcgagcgaggttgggagtctacggaaaaggctggccacagcagccgtgctcaggcagtggtggcgggcggtggcgcttgcttttcacggcgaactccggtga

SEQ ID NO: 40054 - DNA, 294 bp, Zea mays
  Peptide Sequence Number=SeqID_83429
atggaacaccacgttttccactgccaacatgtcgatgtcattgaggagtcgatcatggatgtagctagtcctgaggaactccttggctgtgagagagttgagatctggggtggtcatcatagattaaaggagccaattgaggtgctaaaggttcaacacaaaccaataaaaagatacaagttagggttcaaaagaaaggagcaaaagaaaccgaagagaaccctggtctggcgcaccggactgtccggtgtgccaccggacagtgtccggtgcaccagggatcgtacaggctga

SEQ ID NO: 40055 - DNA, 300 bp, Zea mays
  Peptide Sequence Number=SeqID_83430
atggcagatgcatcatcgcagtcgacgcgcggcagaggcagcaagcagaggatccaaggaccaccggcgggcgggatttactgccatggcgacggcgaacgagcagaaccacaacggcgacatagattttctctccctcactctctctctcctctcggcaatggcggcacggctgcgaacagcgaaactccgagcttcggtcccaagctccaaggggttggcgtggagcggataggggcgaggggaggtccggctttatacctagggcagagtccgagcagaatttcttttaggatttaa

SEQ ID NO: 40056 - DNA, 435 bp, Zea mays
  Peptide Sequence Number=SeqID_83431
atggggctttgggccggggcttggcccggcccggcccaattcccagcactaatgatgccgcgccgtcccgcttgctcagccagtagctgcctgctgcagggactgctcgagcaggatgtggtggacgcctacgacgccccgttctacgcgccgagcgcacgggagatcgaggaggaggtgagcaaggaaggctccttcagcctcgactacgtgcggacgttcgaaggcagcatgagcagcggcgcaggcgttgagacagacggcaggaaggtgtccatggcgatcagggccatccatgagtccatgctcacccaccatttcggggccgccatcattgacgcactattccacatgtacacggagctagtcaccgaatccatgcacaagggagaggtcaagagcgtccagatcggggccgtcctggtcaggatatga

SEQ ID NO: 40057 - DNA, 984 bp, Zea mays
  Peptide Sequence Number=SeqID_83432
atggactcggcaacgctggtgtacgaggcactcaggccggagagcttcacggtagccgatctcgggtgcgcctcggggaccaacgcgctcggcgtggtggaggccatcgtcaggggcgtcggcgaggcctgccgcggccgcgggccgtcgtcgtcgtcgccgccgcccgagttctcggtgctcctgaacgacctcgcctcgaacgacttcaacaccgtcttcgcccgcgcgccggaggtcgccggcaggctcaaggccgacgctggggccgtcgtgttcctgtccggcgtccccgggtccttctacgggaggctgttcctttgccggagcgtgcacttggtttgctccttcaatagcctgcactggctgtctcaggttcctgcaggccttcgtgacgagaccaacaagccacttaataaaggcaagatgttcatatcaagcacgagctctcccgccgtgccggcggcctacctgcggcagttccagaaggacttcaacctgttcctccggtcgcgcggcgctgaggtcgtctccggcggccgcatggttctgtcaatgctctgccgggaaaccgaggactacaccgacgtgaagatgaccctactatgggatcttctatcagagtcacttgccgcgctggtatcccagggactgctcgagcaggatgtggtggacgcctacgacgccccgttctacgcgccgagcgcacgggagatcgaggaggaggtgagcaaggagggctccttcagcctggactacgtgcggacgttcgaaggcagcctgagcagcggcgcaggcgctgagacagacggcaggaaggtgtccatggcgatcagggccatccaggagtccatgctcacccaccatttcggggccgccatcattgacgcgctattccacaagtacacggagctagtcaccgaatccatgcacaagggagaggtcaagagcgtccagatcggggccgtcctggtcaggatatga

SEQ ID NO: 40058 - DNA, 213 bp, Zea mays
  Peptide Sequence Number=SeqID_83433
atgcccgccgtgtgttcgctgttttgcacagccccaaacatcgacgtcgttcaccccggaggagagaaccccgtgttttgcgtggagaaggcaagccgctcgacgctcgtcgatgtcgtagcgatgcacaaatcggaatcaccgtcgttcttgcaaacgccgattgggtttgtttatggtcgtaatatggtcgtgctcatgatttcgagttag

SEQ ID NO: 40059 - DNA, 414 bp, Zea mays
  Peptide Sequence Number=SeqID_83434
aaaaagaccgacagagtggaagaaaggggacgctgcaccagggaagctcggcctcggtcatgggagaggagaagccgagctgcagagaagcgctggcttcctgctggcccgtggagcaggggacgtgctgcaggttggagagggcgcactgggcgccatagaaggagctgagggggctgctgcttgcctgcagggagggagccaagcgccatggggtgatcttggccagcgcccatggagaagaaagccccctgcgcaagggaagccagggaggtgcttgctgctgcacggcaagaggaggaaggagacgtggggaggaagagaaggctgctggtggcggctgaaaatttttgaggggtgggagtgcaaaataaccaagtgcaaggagagagggctgctatttatagccatgag

SEQ ID NO: 40060 - DNA, 324 bp, Zea mays
  Peptide Sequence Number=SeqID_83435
atggggaagcctgtcccatcactcctcatgctcctcctcagccgaggtagggtcccactcgacagtccaacccggtggcaagatggacggccaagtcactccagcaaccatgtcctccagagaacctgtaaaaattatgccacaagcaaggctgagtatactaatactcagctagacttacccgtgaccgcacttgtacccaccataaccggaatgggagaccacgtctcaggtcgcgtgaggagggcaatctgcgggcaggttcactcaggtactaggcttaccaatttaccatatttctcggatttaataacattacgctaa

SEQ ID NO: 40061 - DNA, 132 bp, Zea mays
  Peptide Sequence Number=SeqID_83436
atgactagtgacaggccactggagctcctacacatggacctattcggcccgatcgcttacataagcatcggcgggaaaaaaatctcatacccaagagaccttaaagggattcttgagacgggctcaaaatga

SEQ ID NO: 40062 - DNA, 471 bp, Zea mays
  Peptide Sequence Number=SeqID_83437
atgggcaagagcaagaaaggtggtggctcttcgcatcactccggcgacaagcgcaagcgcgagccaactcctctctcggaggacttcggtgactcggagtactcggaggaggagttctcctccgagtccgagggctctctggctcctgcctctccctcggtgtcgtctaatgattcagacgactcccaggggatcgccgcagagatatggacttacatccgggccatcgagcgcgccaggctcgagggctcggataagtcagagtactcctcgaacgaggagaactcctcgggctcgtccgaggagggcggcggcggcgatggcagtgactgtgacggaacctcccaaaagcagcaaaagtctgctacttcctcacctaaaaacaacaaagggataaaccctgagtatggaatactcagcaagtcttacccgactaaggaaaagactcccaagggtatgctggataaatag

SEQ ID NO: 40063 - DNA, 1023 bp, Zea mays
  Peptide Sequence Number=SeqID_83438
atggcgcctcctgttgacgtggtcggtccgtgccctgggttgggcgatgtggaggctcctctgaggtcgaggtcgagtctgtcttctgaggccgaggtcgagtccgagcccccgggtcgggcgaggctgagaccgtcggctgaggccagggctgagtccgagccttggggtcgggcgaagcggagttcgtcgttcttcggagctgagcccgagtccgagccctggggtcgggcggagcagagttcgtcatcttccagggctgagcccgagtccgagccctggggtcgggcagagcggagttcgccgtcttccggggctgagcccgagtccgagccctgggttcgggcggagcggagttcgccgtcttccggggctgagcccgagtccgagccctggggtcgggcggagcggagttcgccgtcttccggggctgagctcgagtccgagccctggggtcgggcggagcggagttcgccgtcttccggggctgagcccgagtccgagccatggggtcgggcgaagcggagtttcccatggcacctagggccaggcttggccgctgtcagcctcactatgtcgagtggcacagcagtcagagcggcgcaggcggcgctgtgcttttgtcagaccggggtgccccctaggccttatatactcgaccgtagggcattacatgtggatatgataacaatgtgtgccaaattcagccgactcatcctcgctcagttccgatgtacggggcccctgcgcgggaaggtcgggtcacagttgcgatcacgactcaaatccatcgggccgtctgggcctgcgttgatccagtcttgtgtcaatctgccttactggacgtttctcccaggcccacgaagggatgacctcgcgaactattgggtccatgggtccttcgtgaggtcttttatccttccggtggacccgggggatatctgtcccccacaagcccccgatctttgggttgattttgaaataaccgactcaaagatcctaggtctagcttgcagtctttga

SEQ ID NO: 40064 - DNA, 927 bp, Zea mays
  Peptide Sequence Number=SeqID_83439
atggcgcctcctgttgacgtggtcggtccgtgccctgggttgggcgatgtggaggctcctccgaggtcgaggtcgagtctgtcttccgaggccgaggtcgagtccgagcccccgggtcgggcgaggcggagaccgtcggctgaggccagggctgagtccgagccctggggtcgggcgaagcggagttcgtcgttcttcggggctgagcccgagtccgagccctggggtcgggcggagtggagttcgtcgtcttccggggctgagcccgagtccgagccctggggtcgggcggagcggagttcgccgttttccggggctgagcctgagtccgagccctggggtcgggcggagcggagttcgccgtcttccggggctgagcccgagtccgagccctggggtcgggcggagcggagtttcccatggcacctagggccgggcttggccgctgtcagcctcactctgtcgagtggcacagcagtcagagcggcgcaggcggcgttgtccttttgtcagaccggtcagtggagtggcgaagccacctttgcattaaatgcccctgcgatttggtcggttggcgtggcgatttggccaatgttgcttcttggtgaagactgggctttgggcaagccgaagctttgtgctgatgggggttaccagctgagatttaggagccttgaggctcggggtgcacggtcgggtcccaagttctcgggctggtatgttgacgctgtcaacggtttggccggagccggggcgccgaacatggtgtctccggtgagctactggcgggtaatccgagtggacgcacgtgccccatttgttaggggtcggctagaggcccggaggcgcactcaaaagtacctgcgggtgatctgccggacccggtcccctttcggcggggtccgagggctcgatgccttcctctga

SEQ ID NO: 40065 - DNA, 126 bp, Zea mays
  Peptide Sequence Number=SeqID_83440
atggccttggtctttagaggtggttctgcttctaacccctcacctgctttgattgctctatcttctttgttgtctatcatagaggagcaggtggagagccttggggatgaggagctaacacttgtg

SEQ ID NO: 40066 - DNA, 1089 bp, Zea mays
  Peptide Sequence Number=SeqID_83441
atgtccgccaccggcgttctctggccgcagcgcgcggtggccatgtcgtccgacgcggtggccgaggccaggaagggccggctgaagcagcgctacgacaacgagttccgcctcgtcgcagggtgcgtgccgtaccgggtgaataagaaggacgacgacgaggtagcaggcagcccgtgcagcagcagcctcggcgacgacacgggcacggccgaggtggaggtgctcatgatctccacgcctaaccgggccgacatggtcttccccaagggcgggtgggaggacgacgaggacgtgtaccaggcggcgtcccgcgagaccatggaggaggccggcgtcaagggcgtcatccacgcggtgagggcgccgagcgcagagacggaggaagggagtgggcgcgagaggggagaggggcatctcggtgatggagcaacattcgcgcccgagatccacggcaggggaagcgcgatggcgtgtgggatgggaacctgcgaccgcctccttctcttctctgaggcgcgcaacagcgacgacaagtcactcgggcttcggccacaaacgggaggaagcgaggagtcaaaggagggaacacggtggagaatgaaagtcgacgaggaggggaaggaacgccgcctcggcagtaggggcagaggcgaggggcgagggggaggggctctccgtgacgagcatcgttggggtgcgtggcggacgggggcaggcagcgcggaggtttatgagagagctgccttggggcactgggtgttcaagagcaagagcagccaaagcagggccggcccgacgggagcctgcaagggctacatcttcgccatggaggtcacggaggagctggacacgtggccggagcaggacacgcacgaccggcggtgggtcgctcccgccgaagcctaccagctctgccggtacgactggatgcgggaggcgctcaccgcgctgctggagaggctgccggtgctcgaaccggtggtggctgccgcggcggctgcagccacggcggaactgacgaccgaccaagctggcatgtacatgatgctgcaggcgacctcggacggcgctgtggcgctgtgctag

SEQ ID NO: 40067 - DNA, 501 bp, Zea mays
  Peptide Sequence Number=SeqID_83442
atggccgtggccccctccgcgccgcgattcttcccatcctctccctccgcgcggtttgcggctgccaatcctctccctccgcgtcgtgttcttcccatcctctccctccgcgtcggatctctccccatgtccaccaacgccggcgtccgtgatggcgcgcccggggcggcggtggacgcggctttcgccaggcatgcgctccaggccgaggccctcctcgggtacctccccgcactggccaccagcccgcgtgccgggggcaacagggtaaaccccgccgtcgccgcgacgcagctcggggcgctcggccggtggaagggctcggcgaggggccttctcgagtacatggtcgtccacgacatcggtggtgccatcgtcgccgcccctgggagagccaaagccaagcggaggaggccgcagtcgaccggatttgggaatcatgctcctgccaaacgggatgaacggaaggaagcgagatctttctgggttgatttggcttga

SEQ ID NO: 40068 - DNA, 882 bp, Zea mays
  Peptide Sequence Number=SeqID_83443
gttctctaccgcgcgcgggttcaccctgacggacgggtccaccgctcaactcacactctcttcgtgctgttcagcgaagctgtggcggcactcatgtcactgtcggggggacccactgtcatccttcgagctgccatcaacagacaacgcgagatcacggcgagctcttccccctttttccgtcgacgttgttactggcgggtccacctcgctggccatatagatataggtgacgtgtgccgcctatcctctagtaaccctaaccttccgaatcccctaaaccacggaggagcaagtgcctcatctcggttggcggccgtcgtcattgaaatccctgtacaccgccgtggaaacctactagccgtggtctgggcttccccggtgtcatcgcgtgattactcgaggtcgttatggggcctgattgccaagcaaggtacaacaattgctcgccggcgctgcctcttcgccgcggacgcgcacctcactgtggttggatcgcctgctcgctcggttcacggctactgtggcagcaagaggaggcgagtgtgtctgtgcgactgtgcggtggccggtgggcgacatcagccatcagctccaagttctctgagcagtacaacggcgcctataactgagcagtcctccaatatgggggacactgatgatgttgctgttaatgaagtgaacgcaaaagaacagatagcgacagatgcagacaaaggcaaggaagagcagcccaatgatgcaccaacagaggaggatggcaagaaaaggaaagctattgctccaaggtcagatccatacgccgccgccgagacccgagagcaggcagttcaccagacgccagtctggcgcaccggacactgtccggtgcacccagactga

SEQ ID NO: 40069 - DNA, 573 bp, Zea mays
  Peptide Sequence Number=SeqID_83444
atggattcataccatgagctgggcgcgcggaccggtgacttcgaagtgccggaccgagagcccggacttcgctgcctggagtgggtacaggaggagttgcaggcactccccactatcgtggaggggtttatgtcttatgcttccctggtcatctgcgagggggcgatgaacgcgctctctcgcgaagggtgccggcactatgaggtcttcgaccaagctgatgaggatttcgagcgagatatctacaaggcggcgcgtggcgagagggtggatgatttcggggcgttgaacaacgcgctgcctgacccggagtcgaacccagcggaggctgtgcccgaggccgccctggagccgcccccggaaactgccgaaggcgctcctgatgcccccgcagccgctgcggccggcggaggcccgccccagagaccgccgaaggcgcccctgatgcccccgcagccgctgctccgagggctgaggatcctgcgacggtggcggcggaggcaacagcggaggcgacagcggaggctcccgcgacggctgggtcttcgcaggtggcgtagtgggtgtgggtag

SEQ ID NO: 40070 - DNA, 1341 bp, Zea mays
  Peptide Sequence Number=SeqID_83445
atggctggacgtctgcgtgctcctgttcatcagccgcttcctgtccatgcggcacagtgctctattgaaggtgcaggggggtcactccctgatgagggcctttgtagtaggcgtcgcctggagtccggcattactgttgacgttgtctgcacagagaagccacatattgctcctacttggatcatcccatggtctccaagtttcaaccagagggctgaagagcttgatcgtgccattgtcctcaatgtaactgtggccattaatgaagcagttgaggaagctattttggccaactttgcgcggaggctggagcttgtacatgactctctgtctttgtgtcgactgggtcctgcaagttttctgcttatccttccaagtttagaaatggcggaccgtgcctatgatgggggcagaattgtgaatttatctcccacaactaaaatccatgttatgcgatggagcagattcctcaactcatctgtgacggcgtctctgccttttcatgtggagattgaagtgtctggcatccctgcccatgcttgggagttggaatctgtgcaagctctcctcaatgagtggtgctggattgctgatcttcacccagattgtgagcgacagcgtgaggtgttcaaggttatcgcctggtgttctagcctgagctccattcccagggagtttaagcttcaaattgttgatccggtcacgtccgatggtggaatgttgcgccgttcattagtctatcctatccgggtgtcagtgaaggtccttgatcgaccgaacttgctgcagtccctccagccgtcacctcctccggtggaggacgatcccgatcagggcaggcggcggaggcggcgtcgatctaggcggtcgtcctttggtattaatgctcccggaaaaagttcgacgacagcggtcttgcctcgggcgtcggttcatcagcgacttgggccgtgcgtgcaggtctttgtgaaggaaggaatcaggatgcctcgtctgccggtccataatcggctaggccccctggaggtattcattgctgagaaaggtgcaatcaagaagatgaagcgagtttggattcccaagaggaagttggcccgttacaatgggccggatcacacgtgggcctccgagctggacggggccgcacagtgggatgacctcgtcgcaggccttcgtctgatgtcgtatgaggcgaagggggtccctgcccgttttatctccgttggaccaatgactgcagcgaaggcctcgagcgaagggtggcgtctttgccttcgccccaacatttgccctccgagggaccagttcgacaaagtcatctggtgccgaagacgtcgctag

SEQ ID NO: 40071 - DNA, 417 bp, Zea mays
  Peptide Sequence Number=SeqID_83446
atggttgagcgccttatctgtacaaatgattggattcgcggatctaatttcattagtgttgaagagaacctagaattttccaagcttgaggaaggttccggtggtcgcctcggcccttatcttcctggccaccgtgctccaacgcctgctaaggcggtagtggtcgtgtacctcctaaatctggaggtgtgtaagtactttggcctcaagtgtcaccgctactccgacgacatcgtcgacttcatgcagatggtgtacaacaagtccagtctgggccaggatatcgaccatcgcgccgcccttcatctactcaggaatgttcgagaagacactgacattcgcgatccaggaggtcgaggagggtctgttcaccgccgtggagcagaacctggcaaattcggatgtgagacccagtga

SEQ ID NO: 40072 - DNA, 513 bp, Zea mays
  Peptide Sequence Number=SeqID_83447
atgcgcctcatcctgcggtacctgttcttgacctgtggggggtgtgagacagcaagagtgagctcacatacgttcatcgctcaacaagttgtggggaataatgtgaatgaactcgccaaagataataaaagtgtgatcatgaataatgtatcttcatacccaaaaccacataaaagctctagcaagtactacccaaaaagttcagtggtaaacaaggtttttcttccctgcctgggctgcgcgcactatttacagagaacccaggggtctcggggaaagattcccaagacacagaaaatcctggactggaccgcggacctcaatggtaccgcgcacgcaacccgtacgtcccggcgaagccccccgaccacagtcgaagttctagcactggcacaaaaggggaaacagcacacggcggatttctccttccttccgcccccttctgaagctccaattctcttccctggcaatggcgctctgctagttggcggggttgtagatgtggagaggtag

SEQ ID NO: 40073 - DNA, 846 bp, Zea mays
  Peptide Sequence Number=SeqID_83448
atggacttctcctacctcttctcgtcgtcgtcctcggagaagaagtcatcgaagcgcctgcagcagcagcagctgctgcagcaacaggacaacaacagcaacgagacaaggtacctcggggtgaggcggcgaccgtggggccggtacgcagcggagatccgggacccggccaccaaggagcggcactggctcggcacgttcgacaccgcggaggaggccgccatcgcctacgaccgcgccgcccgcaacatccgcggcgcaaacgcccgcaccaacttcgcctaccccgacctgccgccgggctcctccgtcaccccatacctctccccggacctctccgccgaccagctccagcactactattacgccaataacgaccccgtagcgcccgccgctgatcagccgccaacgccggcgtgcgatcagtccgcacatggcggcgccgccggcaccgaggcctatcagtactaccaccacgtgccagtggagatgatgtcgtcctacggcgctgccgagggaaacggctctggtggtgacgacgacagagcgtggtgcgaggcgtcgtcggagctgttgttcggtggttacagcgacgatgcggcggcggcgccggccaacgcgtcgcacgggatgtacttcgaggaaggtgcagtgttatcgtttggtcgtctctctgctgctttggtcaacggcggcttggcgcccgccggagggggctacattgcctccggcgtgtctgcgcttgatacgtgcaggcaaccaaacacaaactcagataaagtcaacgcacatagtgacgcgggacgagacggtgcagctaaccaatcacatgatgtgcttcaataa

SEQ ID NO: 40074 - DNA, 666 bp, Zea mays
  Peptide Sequence Number=SeqID_83449
atgacggccaccctccaggcgccgggatgtcttcttcttcaccaggatcccgttcgcacgacccactcttctggtcgcggcaaggctctgaaagggaaatgtgcccttgggccatttctaagtattttggtgattgagtgcaaacacaagtgcttaaatgtgaaaatatgcccatggatgaacaaagtgcaaatcacaagtaaaggaaaaagaaaagaagtggagagtggctgtgtacagccaaaggctgcttcgggctggggcaccggactgtccggtgtgcaccggacagtgtctggtgcgccagaccagcacagagcaaaccagccgctctcgggtttttctccggcgacttcggctaaaattcaccggactgtccggtgtgcaccggactgtccgatctgcatcagacagcaacggtcggatgcactgtttatggaaacaaatcgggcaccggacagtgtccggtgtgcaccggactgtccggtgcgccacgagacagaaggcaaagatggccttccagatttgttcccaacggctcctagctgccttggggctataaaagggaccccttggcgcatggaggagtataccaagtattcctacaacacttctaagcaccaagacattgatttcgcgcattcgtttcattgtgatagcatatag

SEQ ID NO: 40075 - DNA, 591 bp, Zea mays
  Peptide Sequence Number=SeqID_83450
atgtccgcctccaggccctcctctggccgccagcccctctgcccgcccctctgcccgccgttggccgcctgcccctctgcccgccgcccacctccagcccacctctgcccaccgccctcctctggctgcgtcccctcctctggccgccgtccagacgcccacctccaaccgtcgagggctcgaggcctccagccgttgaggcgtccacctctggccgccgcccacctccagccatcgaggaagccagcccacctctgccctgacaagtctcagcaacctgtgccgccctcacaagtcacaacaagctctagggatatggaagatgcatctgcagatcgaccacaaggggagtcaggaagccagcagccatatgatccagctaaagatcctaagaaaaaggcaaaatcgaaggatccggcatggaactattgttattggctggatttgaacaaaaaagatgtggtgaagtgcatcctttgtggaaaaattgttcatgcaggtgttagaaggttgaagcagcaccttgttggtggtcatggtgatgttgctaagtgcccgaaaacaacatcggcaatcagcaaagagatgtga

SEQ ID NO: 40076 - DNA, 2984 bp, Zea mays
  Peptide Sequence Number=SeqID_83451
atgtcgtcctcttcttcatctgctgctgatacaccgctggccggcgcatcgtccgaggatactttgagcaatgtggcggcggaggagttgcatcctggtgatacagtggagtttggcgtgtcgcggatttcctcggtccgtgttcaggacatgcagcagcttggatattttggcaacgaagtggggcgtgtcccgggggcggaggagatccccgagccagaaggcgagttggtcgtttttgaggcatttttcactgctggccttcatctgcccgcacatcgattcgtggcggaggtcctgcggaagttcgagccctcagtggaagtcttcgcaaaacattactgtctgcactggcaaaagaggaaaactggagatgagattgcacagtttggatcgtgcacattcacgccaaagtccgggaagacttcgatggaggttgtggagttggttccctgcgcccgcaataagtggggtaattggtgggatttctggttttacgtttcagagggcgctgtcaaagaccacccagggctccccatggccgtcatgtgctcccatcactatgtagcatacccgcaatttgaggtagcggaggatgatgaagacgaaggagcctttcgctacgctgcccgcatgagtagcgggcgcgatttagttgaggaatttgtcgggtatggggtatggcccttggcgcatggctgggcgctgggtgaagtatgccctcacgagatgccctcccgtggcgggcagctggatatccgcgggtccaacgacagattgaaccgggtttttgacctggaccgcttgtcgtacgatgattatcccggtgtggacgccgccgaccaccgtgggaagaaaccgatgggcgggaccgaggaagggccttcgcaggagcctgccccggctagtaagaagaggaaattaggtactatagtgggaggaatgggggtgtctgataattttgctgtggagttgatggggacatgcgcggccccggggggaaggatgtcttcgcccaagctccgggagtcttcggcgcgaatgctggaggttaccgggggtcgatggccaaagaatcttccaatcccctgggcagaaggcgaagacatgtctatgtctcgtatagctcgtggcttgaagattttcccttacggacggaatattgctgttgttgtgtcggcagtgatgactaaggaccgtcaagacgctgcgcagaagcgccgggcggttatcaggatggcgaacccgaggcgtgaggcgaagagagcgcgggggagcgtgaaggctgctgcctccgcaagccatcggcggcgcgaagacggctaccgctggcgtgaccaagtctccccggttgaggctgcaaagggacgggagctgccctcaccggggaaacgtgttaccgacttcggcacagacatcagcgtggaggactattttgtcgggtccggcgagggacagatggttgttgtcctaccttcggtggcaaccgctatgccatcggtggaggtaagggcgagggggaccgcgcaggacccgtgggccgccttctgcgcgagcggcgagattctgacagccgctgccgctaaggatgtggcaggcaccatgtcccagtggccgagggaggcatcgcagtggctgtcgcagcagctaagtcaagcggctgacttcgccgaccgcgttgcgtctggtgtcctgactacggacgtggctgccgaagtcgagagacttcgggcacgttcgggagaagtcggccgcggagagcaaaagccgctggctgaggccaaggtggcgcaggcggagggaagtctcgccagccaacgcgccgaggagtgggaggcgaggttcaacgccctgcgcggccgcgtggataaggtcgaggcctctacgtgctctgaggttgagcggacgctcgcacagttcgtgagttcgtatcgcgagctgggcgcgcgtactgctgacttcgaagtgcccgaccaggaggcgagccttcgcttcctcgaatggttgcaggaggagttgctggtactcccaaccatcatggaaggtttcatgtcctttgcctccctcgtcacctacgagggggccatgaatgcgttgtcccgtgagggctgcagacactatgaggttttcgaccaggcagacgagagctttgagcgcgagatcttcaaggccgaagaccccattgtgaagcagtcagcgggggccctttttgataggatgtggggggcacatggtcgggaggctgtcagggagcaatctgaccgggcgagggagcagatggagcgtgccgaggacgttgaggactttggaagtctggtcgacgcgccgcccgaggctgcggaggccaatccggtgctgcccttggacgccggcgaaggcccctcggccgtggccgttcctgccatgaccggcggcgaagaccctctgtcggcccctgcgccgacaatcgaaggtgccctagaggtggcggatgagccgccagccgaagaccccacggccgcggccaggccctcgcagggttttgggcctacgcacgcaaccgctactgacactgctaattttgtggtggcttcgatcgtggttgctgaagatgtttcagatgattctgtgtctaagttttttgagtctggtgattctgggggttcgattgtatggacggaggagtcttcggatgaggacttggattattttgcggcgctggatgtggctacggtggaagcttctccgcgcgtggtaggtgctgaagttattcctagtgcgagtgttgggcgtaggtggcgaagggcggtcacaaagcggagggttagtgaagtggagggaagtcgtcttcgtgtggacggggctggcaaacgagaattgttgtcctcaccggctgggatgagtgtaggtgagggggagttgcggaatctttttgagggtgaggagctgaggataatgctgttcaactacagggagatgggcattatccctaaggttgagccaat

SEQ ID NO: 40077 - DNA, 387 bp, Zea mays
  Peptide Sequence Number=SeqID_83452
atggaggctcctggggttcttgttggcactgttactagtgagcctgctgttcagctggtgtctactattctatctatgtcagctactccgcctggttctgggaatcaggtgactgaggtcattccgcaagatgattctccctgcctcaaggtttatttcaagagaaagaagtttgttctagagccagttcaggatgaggagagtgtgctttcatcacagctgcaagagttcaagaatgatgtaactaaaccgattaatagtttgctgccacctcctcgaatcaccaatagaaggaggaggactgtgcctgctaatttcattcccaggcatagcaggagagtgccaagtttctcaaagtgggttctagttctgctgcccagtctgtag

SEQ ID NO: 40078 - DNA, 948 bp, Zea mays
  Peptide Sequence Number=SeqID_83453
atggagaaagtggatgtcatcatatcccgagcatggaggtcattgcttcgagtcacaaggatcgatagactgttctcaaggtggtgcctactgccaagaaaggacacaaagaagactgatggaataaatgatgatgtagaagagccagacctctatgtcgagcgtgttcgcctagagaaaatggagctgagcgtaatgaatctgttgagaaaaatgacaattcaagagcctacatttgaaaggatgatcgtggtgtatagccttcttgccaatacagttgcttattctgatcctaacgttataggaaggctagcccagaaaccagagaagaagaacccaagcttaacaccgatggattgggtcacatttctaatttctgctgtgattggtttggtcactctgataggcagtctagaaatgcccaaggctgacatatggtttgtcacagctatcctatctggtctggttggatactgtgcgaagatatacttcacattccaagcaaacatggtccaataccaaaacttgattacaaagtcgatgtatgataagcagcttgatagtgggagaggaacactcctccacttgtgcgatgatgtgatccagcaggaagttaaggaggttatcatttcttactacattttgatggagcaaggaaaggccactgtacaggatcttgattcacgttgcgaacagctcatcaaggaagagtttggtatggagtgcaattttgatgttgtagatgctgtaaagaagctagagaaactcggcattgtttctcgggtttctcaaccttgtccgttccaagtttttggaccttataatgatagtttgtctactcaggactcgattgggaggatcctatgcgtcccattgaagcgcgcaaatgagatcataggaacaactactgaagaaatggtgatgcgagcccaacaagcttcgggataa

SEQ ID NO: 40079 - DNA, 378 bp, Zea mays
  Peptide Sequence Number=SeqID_83454
atgtgctggccgacggcatccagcgaatgggggcgtggtcgcgcaggccggcggtgggtgggagcgcgtcctgctcctgctgtcttgcgagtgcgggagagaccgagaggggcagcggtggccttgaggctcagctctggactagctgactggggacttgaggaaaacccagatttgtggaaatggttgactagtcaggagcagccaccagaggatctgatttctaatccggtgttttctgccatcaaatcaaaggtcacagataacctgatcaagcatgcttctcccgagacccgatcaacacctggccaaccttgggttagaggatgggatgacataaagaaaggcaaagatggacctaactatggaaatcagtga

SEQ ID NO: 40080 - DNA, 468 bp, Zea mays
  Peptide Sequence Number=SeqID_83455
atgaccaaacacactccagaaggcacccttcacacctgcagctccgaagggcagccacaagtgccacccccaggcttcacaccaccagcgggcaaggacgcagcagaggacggcgaggtccttggcgtctccgcagaagagcagctacagctacggtccctgtgcctcagaaaccgcaatcttcagaagcagaaggaaatcctcgaggccaaacgccaacgcgtcactgtgcaggccaagctgcgccaaatgatacgagatgaagagcatagggtccaggagcttgagcaagagattgcgctcttgcagcgcgaaggccagcacgatctgcagcagcacggcccgcccctccagcagcgcgcgccggtcgaagacctattcgtccctcaccgcaggcccttcatcccgcacgccgcagctttccaaggcatcaattaccttgacgagcgaagacccctggcgccgtag

SEQ ID NO: 40081 - DNA, 453 bp, Zea mays
  Peptide Sequence Number=SeqID_83456
atggtggtatataacctaggctcccctcaatcgatcacccgcgtcatgtgccagggcgatacgcagagaaaagatgagaggacagaatggaatcacaatctccgccgtcgccattgttgtgcatcctcgccatcgctttggcctctatgttgggtcatggaggtccattggggctcatggatcacacatccacatctgggcgggtgcaagggtcattggtcggtccgaattttgctgccgagctttgtcaaacgcgtcggacctgctgcgctgcgtgggcaacatccctaccgccaccctatccaagaatcgtactctaggatgttgggcgcgtgctcaccggtgctcgccaccgtggagaatctgtgcgccgccgcctggttgcggcgtgaggaagaaaaggcgcggggcgttgatcttgtgatcaacggctccggatggacgatagtgtga

SEQ ID NO: 40082 - DNA, 342 bp, Zea mays
  Peptide Sequence Number=SeqID_83457
atggcagcaagtacaacctccttccaagagtacaagagctggaagctttcctcccaagatccatacaactctttcaacgccttctctttccccttccaaactcgcctctcccccgccttctcggccactccgaccccgaagacctcccagcagaacgccgccaccaccacgatcgacctctcctccgacgagagtcgccgccgcctcctcaacaggttggtgtaccggagcaagcagcggggtttcctggagctcgacctggtgctgggcacctgggtcgaacagcacgtgcacgccatggacgagcccaacatccgcgcccttctacaagtgctcgacctc

SEQ ID NO: 40083 - DNA, 315 bp, Zea mays
  Peptide Sequence Number=SeqID_83458
atgagcttccaacgctttgatctcaatctagaagctcaaggatttttcttggaggaaggggatgaacaagcattagttcaaatcagggatgagggagaaatgcaagggacagatataccatggcctgtcctaggagatgcaatgggagtagacgaagagcttcaacctcgcaggagcgcaagagtggctagagaggtggatgaagaagattgggaatctgaaaaagaagatgaagacaatgtgcatgagtatattaattatgaagaggacaactatgagatttcaaacaccagtgactatgtccatggggagtga

SEQ ID NO: 40084 - DNA, 648 bp, Zea mays
  Peptide Sequence Number=SeqID_83459
atggagaccatcaagtgctgcatcgcgtgcatcctgccgtgcggggcgctggacgtggtgcggatcgtgcactccaacggccgcgtggaggagatcagcggggggcccgtgctggccgccgagatcatgaaggcgtaccccaagcacgtcctccggaagccgccgtccacgtgccccgccgacgccgccggcatcgtcgtgcacaagcccgtcgtcctgccgcccagtgccgagctgcacaagggcaagatctacttcctcacgccggtcatggccgacgccaccccgccggcccccgcgcccgagaataagccaccagccgcgagtctccaacccccgcccccgcccccgcccgccgcccaacaaaccgcttcttcggcggcgaggacgaggcggcgccggaggaagggccatactaccgcagccgcacgggagggagcgcccgcctgcagcagcggggccggggccggggctagaaccgcggccgggctggcgccgcaggagggcgacaaggagcggctgctagacaacgagcggtacctgtcggagatcatgaaggagacggcctccacgcccagggaccggcggcaggggcgcgtcgccgtgtggcgaccgcacctggagagcatcaccgaggatgacttgtaa

SEQ ID NO: 40085 - DNA, 582 bp, Zea mays
  Peptide Sequence Number=SeqID_83460
atgggggaggccaaggtggggactacgcggcgagcagggctagggcgtggcgagatcctcgcgcgactggggaggaaggggcaggcggtggcgatttcgggcggaggaggcgtcgtggagggcagtggggcggactgcgctgaagtcggcgagcgctaccctctcccctacctcgccgcactcttctctctcacgctagatgcaggggatgactgtagccgccccctctcctccttcgcgcggacggagccgcccgcgccagacaacggaaacttctcgctccacctcgctacgcctcgacccatccgcggaagggcgattttgcgcggcaacgcggcggcggatctcccgtcggccggtggagtcggccctggccccgctcggttgcgcagaagaggaactcgacttcgtgaccacgcagtgccgttcgcggccgaagacgaagaggggtcaaatccgcttccgccgaggtacctcgcgaccgattcgttggcttccgtctccgaccatcgacggctccatcagatccacacggagacgcttcgattcggcgtgttgcggccgagatctccccttctttag

SEQ ID NO: 40086 - DNA, 180 bp, Zea mays
  Peptide Sequence Number=SeqID_83461
atgaccccacctctggcgatagtggcggtttcgaccctgccttccgcgtctggggatggtgcggagacctcagggttgggtgcagaagccgatgaagcggatgatgacgacccccctaccagatttgtgattgatcttggttctgttgatgtttgtcgtcttcatggcagttgtcagtag

SEQ ID NO: 40087 - DNA, 720 bp, Zea mays
  Peptide Sequence Number=SeqID_83462
atggcgctttccccccctcctccttgcagaaggcgacacaggggcgtatgtaaaaaagtcgagtctgtccctgatcgtcctctcgccctatgcagaggctcgggggctgctctcgcaaacctggctccggctaaaccgttgacagcgtcaacataccagcccgagaacttggaacctgaccgtgcacccgggctacggccagctcacatgagggaacgaccagaccagccgaagcattacgcgagtcgacagagccgaagtgaccgcagtcacttcgccgctccactgaccggcctgacagaaggacagcgtcgcctgcgccgctccgactgctgtgtcgctcgacaaagtgaggctgagaggcagtcaggcccgacctcaggcaccataggaagctccgcttcgcccgacccagggctcggactcgggctcagccccggaagacgtcgacctccgctccgcccgacccagggctcggactcgggctcagccccggaagatggcgaactccgctccgcccgacccagggctcggactcgggctcagccccggaagacggcgaactccgctctgcccgacccagggctcggactcgggctcagacccggaatacggcgaactccgctctgcccgacccagggctcggacttgggctcagccctagaagatgacgaactccgctccgcccgacccagggctcggacttgggctcagccctag

SEQ ID NO: 40088 - DNA, 933 bp, Zea mays
  Peptide Sequence Number=SeqID_83463
atggctgaaaggtaccgactcccacggagttgcgttcctccaacgacaaggcgaaaggactgcgggcatcccccatccgggggctctgaaggtggaaagatacgatgcataagggagcgcgaagacatggtcgcctttcaagggggtcaccctccttttaaaggcgactctccctacttgcgtccccagccgtcgtgggctgagtcttctccaacacgctccaaggtcctccccctacggcgcggggactgggtcccacacgtcatgcaagccggcctagagcagaagaagccaaaccgccgcgcgcggtgcatgcaaccgtccagcggttacaagcagttctctacttttgctcagaccagcgggcgaaagggcgggcagccatggaggcggcatgcaaccacgccaagtgggcgcacctctccgacttccaacgcgcccaacttggaagcccacgcccacgcgtcatgcaaccggcgcgccggtcgctacgtgcgagcaactgcaccgccactcgcaacactgccacgcctcctcgactgcggaaccagtaccgtgactcgaggcaaccctgtgtacgacccagcagtgccagccaggcgcgacggtcaatgcggccaaaaaagggccggcagtgatggcggtggcaggcgggcgggagcagcggtcacgtcgtcagccaagcttacgtcccatcctggggcaggaccgggaaagagggataccccgaaaaggacccttctccgtgaaggaaacaggctccgagcctccctactgatcagaggttcgaaggctggcccctcgaaggggttcaacagccgcctcagagcacgtgggctccacacccactactggtcagaggttcgaaggccggccccctcggaagggttcaacggctgcctcaggccactcaggctccgcgcccactactga

SEQ ID NO: 40089 - DNA, 150 bp, Zea mays
  Peptide Sequence Number=SeqID_83464
atggggttcggtgtatgcggctcgctctgccaagagacattttggtttacagatgacaatgaggctggttatgattatgcttatggtaatggcgaagatgaatctgtggaaggagacttccaggagttccaagactacgacgagttctag

SEQ ID NO: 40090 - DNA, 930 bp, Zea mays
  Peptide Sequence Number=SeqID_83465
atggggagaagcaagtcgggctatgatcttggtcccgccctcagcttcaaggatgttcatcatccttgctggggcggagagcgaggcgagccggggctctacctcccgcgcgggtcggctggccacctcctcttccagcttctggtggtggaaacaatcctccagctctgcggtggaggcgtcctccagccatgccggggaaggcgaactgttgctgcccagctagggtgcaacattccgccctcttcctcgctttcgtggcgaggacgggagcgaggacctgctggtgcgctttggagcggcccgctatttggctttgatggctggttcgcatcccttgagcgggaatgcgaacgagagccttctagtggccgcgtccgtcctgggaccatggctgctgctgcagaggtcgctggcgagtcgcccggaactcgtcgccccgcaggctccccggagtccctcggctcggtcggccttgctgtccgaggcttctcttgcttagttaaaggaacccctcggccgctcttcgatgagccgaagccaggggtagcggtgtcagcacggacagagacagagttggctcgaaaagaagacttggtcggccggagcctggccgggtcgtccgttagcgggaccgacgccggagttgatctgccgaggcctcaggccgggctgatgtcttcgggggacagctggccgaggcctcggggtgaccagccgagccgcctgctcgagccggattcttggaggagacccaggtggcgatggcccgggcgtgatgatgaagtcgtccttcagagtggagaccctcggaccgtgtcgccgtcggaggctaggtcggacctcgtcgaaggtgtagttgacgccgagggtgctgctgctcccttcaaccgtcaagatccgagcctgcaggatcggattatcttgtag

SEQ ID NO: 40091 - DNA, 573 bp, Zea mays
  Peptide Sequence Number=SeqID_83466
atgactgatagtacaatggaacttcaactgagtgttgcagctttaggtacggggaattgggttcatagttttgaatctctctccacacagataactgagtttttgcaagaaaagagtggtgctggtgttaatcttttgacggatgagataagacctctagatgttggcctagataatgaagcacaaattgcacgcaattggagtagtactacgcgtccatcaaatgggagacgaggacgtaatggggctaaccagttcactgctccaatcaaatatttgcacattcatgaatgtgaaagtttctctatgggtatattttgtatgccaccttcttcagttattccacttcataatcatcctggaatgacagtacttagcaagcttctttatggaagactgcatgctgagtcttatgactgggttgatgtacctgatcatcctattgatcaattgcaacagaatatacttaatggaaatgaaacttgcagtttcgaggtgatttgtttgttcctaaatccgaagaaatggaacttcactatctcatgtttcttgcacatctattgtgttctttga

SEQ ID NO: 40092 - DNA, 129 bp, Zea mays
  Peptide Sequence Number=SeqID_83467
atggcgtctggcctctatgttgaggatcccttaaagcggcagtttgtttctggggagcccaaaaaaccctcatttgtagctacaaatgagggagttttaagggctatgaaaaagttgggagcgttttag

SEQ ID NO: 40093 - DNA, 1596 bp, Zea mays
  Peptide Sequence Number=SeqID_83468
atggtgtgtttgggcctcggcggccacagaaaacacacactacaagataatccgatcctgcaggctcggatcttgacaattgaagggagcagcagcaccctcggcgtcaactacaccttcggcgaggaatccggctcgagcagacggctcggccggccaccccgaggcctcggccagctgtcccccgaaggcatcagctcggcccgtggcctcggcaactcaactccggcgtcggtcccgccagtggatgacccggccaggctctggccgaccaagtcttcttttcgagccaactcagcctctgtccgtgctcacaccgctaccttcggcttcggctcatcgaagagcagtcgaggatacctcactcgtcacctttgcacaaggcaactcacgcttgatgaagcggttcagatagccgacaggcgagtcttagtgctcgaaatgaggaaaaaacacggctccgcgccaaaaatacatacatgtacgaacaaccccacacgattgggggggcctgcggagcaacagaaggccgacggatggctcaccgtcgcccgctccaacagcagcggcgacgacgacttctgctccggagggccgaacagcagcagcgatgacctcagggcgaatgctgctgccatgaggccctcgcccatgccctcactcgagaggcaaggacgggcagaaggccgtagagttggaggtcagtccgtgggcggcaccggctatctcgtcggcggaggaacctcttccagctgccgtggtggaaggcggcgccgggagcggctccgaagccactcgggctgccccagagcagaagaagccaaaccgccgcgcgcggtgcatgcaactgcccagcggttacgagcgttcctccactttcgcccagacctgcgggtgaaagggtggacatccaggcagtcggcatgcaaccgcgccaagtgggcgcaccccttcgactccaacgcgcccagcatggaggcccaggcccacacgtcatgcaaccggcgcgccggttgctacgtgcgagcaactgcaccaccactcgcaccactaccgcgcctcctcgactgcggatccagtaccgcgactcgaggcaaccctgcgcgtgacacgacagtgccagccaggcgcatcgatcacgggcttgtcggccgcggggaaggcgcgacggtcgatgcggccaaaaatgggccggcagtaatggcggtggcaggcgggccgaagcagcggtcatgtcgtcggccaagctcacgtcacctcgtgggacagcgagagaaccctctctcacggcgtgaagacgacgcgcccgtgttccgttccccgaacggctcgcgcacgcgcaacggctgccccgtgaaccactcgccccgtcgcattaactccgcggcgggacaggcggcgcctttggctggcccctcggaggggttcaacagccgcctcatagcgcttgggctccgcgcccactactggtcagaggctggccctcgaagggttcacaactgcctcagacacagagcgagggatgaccctgggtacgttcgatacataaccaaggctcgggctacgctcccgaggtaccctaggacattttcctag

SEQ ID NO: 40094 - DNA, 492 bp, Zea mays
  Peptide Sequence Number=SeqID_83469
atgggaaactccgctcagggctcggactcagccctggcctcagctgacggtctccgcctcgcccgacccaggggctcggactcgacctcggcctcggaagacagactcgacctcgacctcggaggagcctccacctcgcccaacccagggctcgaactgaccacgtcacaggaggcgccatcattaccctaccccaagctgactcaggctacggggaacaagaccggcgtcccatctggctcgctccgctatacgaggccctcttacgagggttggccgcgcgtggaaggacgggacggcgctcgcgtgaggccgctcgctccctcccgtgtggacgcttgtaaccccctactgcaagcgcacccgacctgggcgcgggacaagcacgaaggccgtgagatttcacctctcacgcccgtctccctccggctccttccccccttcgcgctccgtctcgcgccgacccatctgggctggggcacgcggcgataa

SEQ ID NO: 40095 - DNA, 1080 bp, Zea mays
  Peptide Sequence Number=SeqID_83470
atgcccattgttggtttggctgctgatggattagggttttatctgtctcatttcgctaaacctttgaccaaaaaaccaaaaagggtttttatcggtctggttaaagtgattgagggattagtctcggctgaagatcttgagagagatttcggttttcacttcccatggaataagatgtggaaagctactaagtgccattcagggtttctgatgcagtttccctctcaagaacgtcttgaggaaatgataagcttcccggagcttaaaatgaagatgtctggggccaagattgttgttgtgccttggagttctagggccaaacctaaatctagacttcatactgtgtgggttattgctgaaaatgtccctgaggaattacagaactaccagtctatctgtgaaattggttcaatgattggtgcagtggaggaagttgacctcatgtctttagattctgatgatattgtgagatttaaaattcacattaaaagtgtggctatgattcctcttgtggtggaagtgggagtcaagccttttctttatgatatcttctttagaattgaatctatttgtgatgaaggatggaatgatgattcagtgaatttgggtaagagagcttctattcaaatccatgggtccagtgacccactgtttgataaatctgggaaaaaaccaaagaatttggatgatgttaccctcgaagatgaccctaatcctaacctcaaaattggggagtcttcttctcaaggcaaagagtttgccaaaatgtctgaccctaaccttgtgccttctaaagacatgtctgatgaagagcagaaacttgataacctttctgatgagaaagtggattttgatccaaatgaagatgatttgcttagctctcaagaacttgaagaatttgctaaagatatggaggaagatcaaactgattttcaatctaaaattggtgttatgatctcgaccccccccccaatgacgagattgttcatgatgggaaaaacaaaaagcctctggacttgcccactaacacgggtgatggcgtcagaaaaagctctaggttggagaagaatgatgatgtga

SEQ ID NO: 40096 - DNA, 705 bp, Zea mays
  Peptide Sequence Number=SeqID_83471
atgcaaagggacactagctctagcgatgtttctgcttctcatgtagggcgtgtaagacgtcgcaaacatccatctgaggctaccacagatgggaatagagctaatggacaaccgttgcttgtcaatgatcagaacaagtataaatcaatgcttatccgtacatattctacagtatggatgattggaggctttgcctttattatttatgtgggtcatctatatatctgggctatggtggttgtgattcaaatatacatggcaagagaacttttcaacctactcagaaaatccagtgaagagaaacaacttcctgggttcaggctactgaattgccaaaaaaatagtatttatggctctttcgttccaggttttgtatggtttattttgactctcaagaaaaagacatataagtaccagttcaaacagtatgcctggacgcacatgatacttctaacggtttttgcacagtctgctttcactgtggcaaacatatttgaagggatattctgctgtaaaaagtatagtaaccttgagcctctgaacttaagaggaaagttttgcacttccattgtccaacactatatgcctctttgcagcatttacaatctgaatttgctacttcagcaacattggtttctaattgcactattcgcctcagagtgcctaattgtggatttttgtgctccatggaccaataagtattga

SEQ ID NO: 40097 - DNA, 107 bp, Zea mays
  Peptide Sequence Number=SeqID_83472
atggcgcgcccgaccttcggatcgcgagtgtggcgagtatggtaccctgagacatttcttcagctgagatacatgaaatacatcatgaacatccgcaagatgacccg

SEQ ID NO: 40098 - DNA, 579 bp, Zea mays
  Peptide Sequence Number=SeqID_83473
atgtcttttgtagatggcccatatcaggtgcactacacagcgtcccgtgcgtcgcacggtgtcaggtcagtccagccacctggagagattgcatcatcgcctgcacgaggagcaggagcgccgatgccaggagcaggaccaggaccaggagcagcaggactcttccccttgcctcagcaggaggtggagtctgagaggcctccttcccctgcacctcagccagagatgccccctgcaccacctcagggcatcctgcatcgtcgcgggctatacccggaccagtgtgaggctacttgcttggtgcgccgtccggacgatgatctccggggtgcagaggccttctcagagcactattctattactgagagggatactgccgaggcagccatgcaaaatgcagcacgacgtgcactttctcagtattgctcgttgttcagcggagtagctgatggccttgacctgaagtactaccctcgccgttcgaccggcagtgctggaggtgtgattgtctcgctagtgggtgagggcaatcccaggttgaacaacatggtcaacttggtcgttgtgctcaacacatag

SEQ ID NO: 40099 - DNA, 471 bp, Zea mays
  Peptide Sequence Number=SeqID_83474
atgacagtgtctagcacgctggccattctcctcctcttgggagttgtggcgggagcctttgtcaccttcggcagttctgcctctactggtgggctcagaatttctggtaacactattgtttttttgaactctggctctttggccgcaccatctttggcttcggctgacccgactataggcaccttcggcactatagtcgatccttcagcgctccgaacggcgggagcagcttgttccgcttcggcaatggaagaggtccctttaccaaattcaggcactatggtcgtttcaatatatcttcgctggtgggtcaaaaccttgattttcttgcccttcagcacagcagagatggccgaagtggcagttttcctctttttttccctgctttcgcaagggatagcagtaataaggatatataaaaaccaattgcatcaaaaaccatgttcaaccttttcttgccctgacccatga

SEQ ID NO: 40100 - DNA, 291 bp, Zea mays
  Peptide Sequence Number=SeqID_83475
atggagaagaaggatgccattcgaaagatggttgttgattcaaagtggtatgacttacccgatgtgaagtctaagaagggaaaggaggcaacaacaatggttctaagcataccattttggataggtgtgtcactttgtttgaaggtatttgagcctcttgtcaaacttcttcgtttggtagatggggatgtgaagtcatctatgggtttcctctatggagaactaatcaatgcaaagaaggccattaaggaagcattgggaatgttgagacaaaatacaaagaagttatga

SEQ ID NO: 40101 - DNA, 291 bp, Zea mays
  Peptide Sequence Number=SeqID_83476
atggcctcccccggactccagacgccgagggatatcggtgactgcttactcgggcagccaaccaccttctgcctctcgctcatcctccaagcgatctacgacacgccatcaatagtcggcgggacgcacggagctccatcaatgcttcacgcgaacgacgacacgagaacgatattcggcgtcgagaagagaggatacgtgtggagtatcggcgcttactccacgtctcagggccattcagtggcccctaacttcaaggtctccaacgtcgacaagtacgagcccaagtag

SEQ ID NO: 40102 - DNA, 2814 bp, Zea mays
  Peptide Sequence Number=SeqID_83477
atgggatcgctccggggcgcggcagcctcctccgcggcgccgcgcgcgggcgacctggtgaccacgcaggttagccttggtggatttgatgccaccgtcaaggcgctcgatctcgccgacttcctcgagttgaatgcgggctcggtctggcgctgccgcctcaagacctcctggactccgccggacgcctatcccgacttccttctccccaccgtcacctccgccgccgcgccgccgccacagtacgatcgcgtgcctccgcacgccttcgtccactttgcgcgcccggagggcgcgcgcgccgccgccgacgcagcgggccgatccgagctcatcctctccggcaaacccctgcgcgccgcctccgcacaggacagctcccttcgggcatcccgccgccgtagtgtctcgccattccgcttccctggctcgcgcctcgaggtcggggatctcccggcctcggacgccttcatcgccgcctggcgcggcccggcctctgggctcgagttctccgtcgacccgttcgacgggtcttgccacttcatcttcgcccgcgacaccgctttcaaagtccgggagttccgcgagtctgtggtgatgcgctgcgacgtcaagctccagttccccgtccgcgatgttgcggaagtcagggtgttccggctcgactgctcgctgctgatccggctatcggccgcaccgctggtctgttaccgcacggcggatgacgacatccacgtgtccgtgccgttcgacctgctcgacgacgatgacccgtggatacggaccacggacatcactccaagtggtgcgattgggcggtgcggtgcgtatagaatcacattctcgccgcggttctggccaaagatggaacgcgcgctgacgtacatgagggataggagggtggcgatccttgattgcgttggagggtggggggccaggagggggctcaccgtgcgtgatgagcctgagtttggggagcggatgcaggacctgttcttctgcgtgcagcacgccgagggtctcaagtttccggtgttgttcctcgtgaatgctctggtgcacaagggagtaataagtcaacaccacctcacgcctgaattcttcggtttgctccagaggaaggaggatgatgtgaatgtggctgccttgagggaattttggggggacaaatttccagtttttgatgcatgtgggaggctgaagaatctgcaggatagggttgccaggtacctgaaacatcttcgcaacaagattggggatgtcaattctgaggtgaggaggctggtaatcacgcccaccaaggcttattgcatgccaccagaagtggagcgctctaatcgcgtcatccggcattatagtgaagtctcagaccggtttctgagggttacttttatggatgagagaatgcagatgctcaacagtaatgtgctgaatttctctgctgcacaaatcgtcaaagatttgatgtcaaactcgttcctgcataagacaacagtgtacaagcgtgttaaaacgtttttgacagagggattccacatgtgtggcaggaagtactcgtttcttgcattctcatctaaccagctgagggacaggtcagcatggttcttcgcagaggacagaacgacaacagtggaaaccattaggaaatggatggggcggttcacaagtaagaatgtagcaaagcatgccgctcggatggggcagtgcttctcctctacatatgctacggtggtgctgcagccgcatgaggtaaatgagtgtcttgatgaagttgaacataacgggtacattttctctgatggaattggcaagattacgtgcgaccttgcactcgaagttgctcagaagctgcaattgacagataatcccccatctgcttaccagattaggtatgcaggcttcaagggtgttatatctgtctgggaaggaaaaaatgatgggatacgactttccctgaggccgagcatgcacaagtttgagtctaaccatactgtgttagaggtggtctcgtggacaaagtttcagccaggattcttaaatcgtcagattattacattactgtcctccttgaatgtcccggatgctatctttgctcaaatgcaggaagccatgttatctaatctcaacaatattttgtcagactctgatgttgcttttgacattgtaaccgcctcttgtgctgagcaaggaaccactgcagcactgatgttgagtgctggcatttcacctggaactgagccacacctgaaagcaatgctgttagctataaggtcctcacagctgctaggtcttttggagaagacaaggatttttgtgcccaagggaaggtggttgatgggctgccttgatgaacttgggatccttgagcaagggcagtgctttatccgggcatcatctccatcactcaataattgtctggtgaagtatggatcaagattgtctgcagcaaacacaaatgcagagaccattctgggtactatcgtaatggcaaagaatccatgccttcatccaggggatgtccgaatccttgaagctgttgatgtgcctgaactgcatcaccttgttgattgcttggtcttccccaagaaaggtgagaggccgcacgcgaatgaagcatctgggagtgatcttgatggggatctatacttcgtaacatgggatgaaaaccttataccacctggtaaaaagagttggaaccctatggactactccccagctgaagcaaaacaactgccacgcgcagtatcccaacatttttggactatgtctttatatggttatatcgtcttctactccctccagtctggtttctaa

SEQ ID NO: 40103 - DNA, 144 bp, Zea mays
  Peptide Sequence Number=SeqID_83478
atggcaaaagttgttgatgctaaatgtttgataccatgttctctggaggacatggttgctggagtgacttggccgtccatcttgccatcaggttggacagtcgagtgggaccctacctcggctgaggaggagcatgaggagtga

SEQ ID NO: 40104 - DNA, 483 bp, Zea mays
  Peptide Sequence Number=SeqID_83479
atgagattgatggttctggttatgactatggtgctgatggctcgacttagacacactgcacgaaagtccgtcatccccttcttaccctcccgccttgctgagcgtccgcttcgccgtcctgtggccggacagtccagccacttggagagactgcaccaccgcctgcatgaggagcaggaacgtcgacgacaggagcaacatggctcttctttctcgctccagcaggagatagagtccatgaggagctgctcccctgtgcttcctctggaggcgccccctgcaccaccactgggcgccccagcctctggagtagctgctggaggagacccagacgacggaggtggcgacgacagctcgagccacgacaccgacttttctgctgaccaggagccggaaggatgggtcgcccgatgttgggaccatgcttcgtcgccgaaggtcctgcaggaagaaacagcttcggctgaagctgtctgtacgtga

SEQ ID NO: 40105 - DNA, 159 bp, Zea mays
  Peptide Sequence Number=SeqID_83480
atggcgagagtagtgtgtaccctccgtggcaagaggctggacgatggtgtatctgtgctctcggtgaagaagcagcaaatttttgttgcttctgttctaaggtggtgcccaaagaagaaaatcaagactgaagctgtgggaggaagtgtcctcctttaa

SEQ ID NO: 40106 - DNA, 654 bp, Zea mays
  Peptide Sequence Number=SeqID_83481
atgttgatgattttctttgagaacaagattccaatgcacgtcaactcaaggagttgggaggttatgttggattccaatgggcagtatcagtatggtcctagataccgcggcctatcataccatgacgctagggtactttgtcttgagagagatatcaagaggacatcaacattgagaagcaaattgacaagattgggatacccactttgtcctaacaatttggataccctaacaggaccatatgctcaccaccctcgtctactctggctccacgccatgcttcatggcggctcaggtggcacgccggctccacctgactcccacgaccaaggatggcacaacggtggaggtgccaacggcaagcatctgtcttacctcagggtatgctccgcgctcacgttctccatcgacgacgagtcgttccacatcgacttcctcgtcatcgccttggaaggattgggcgtgtctcgcccgccggcattcgctctctccaccgacaatctccggcaacttatcgcaaagttcgcggacatcttcgctgagccaacaggtctgcctccatcacggcccttcgactaccgcatacccctcccatcggagcgcgccgcctatcgccatcagaccgtaccgcaacccacagttgttgaaggatga

SEQ ID NO: 40107 - DNA, 339 bp, Zea mays
  Peptide Sequence Number=SeqID_83482
atgccgtggagtatgacaatgttgaagaacactaacatgaaacgccagagccagagatggcaacgggtacccgaaacccaaaaacttggtgggttttggcgggtatgggatgatttctctacccgcgggtacgttagtgggcaagaatctctaccagttgggtatacgggtatgggtacagtattagaatttgagaccttcatggcgggtatgggtaagattctatacacgcgagcgtatatgggtaacccgacgggtataatttttggtgatgggtatgggtatggaatggggctacctgacgggtatatacccgttgccatgggtggccagaggtag

SEQ ID NO: 40108 - DNA, 978 bp, Zea mays
  Peptide Sequence Number=SeqID_83483
atggaggtcgggcgctgctggtcaacgtgcgttgggggaggaggcgggacattcgcgctgagaacggtgaccaagcaccgggaggcggaggatctgagaaccagtgttgaggggatggaggttctaggcagatcccaaggcggcttggcaaggagctgggaggaggatgaaggagatggacatcgattcctgctgctggaaccgaacatctgcattgtacccaccatcgtctcctcccggccgccgtcgcggtcttccttcgccgccgtcgcggcccttcttccacctgcgccgcccctgttcacatccgcctccgcggatccgtctgccccgtccgccgtcgcgcagatccggccgctgcacgtccaccatcgcagaaaccgtcctgatccgcggccgtcctcgcggattccagctgctgcccgtccgccgtcacggaagcagccccttcctgcctctgcctccggtgtccctgggcagctgcgcccagccgcgcttccctctgccgcgggcgcctctgccacgggcggatctgggcggacccgccccttcattcctctgccgcgggcgtccctgggcagttgcgcccagccgcgcttccctctgccgcgggcgcctctgccacgggcggatctgggcggacccgccccttccttcctctgctgcggccgcagccgtcatccgtcgtctgcacctgcctccacttgttgcacgccacaaacagttgctgcagagaagatttgtgcaactgccatcgacccgataatcacgccgcaaaacagtctgcggatccggatctgcgccgccgtcgtcgccatctgcgccctgcatcgtcgccatctgcgccgtgcgccggtggctgccattgcgggcagactgtccaactcgtcttccgcgaccaggcactccgtcaactcgtccaactttgactgctgtcagctgcggttcctccggtttgttcttcctgattttcattga

SEQ ID NO: 40109 - DNA, 747 bp, Zea mays
  Peptide Sequence Number=SeqID_83484
atgtggcaggacgccaagaaaagcttcgcacagatgaacataaatggaaatttgcagaatggaattgggattcagatgggtcaaattaagacgatagaaatcaaggaggccgcggaaaaagggagaaatgggaagaccgagaccgcggagaagaaaaggaacataaattacggattcgtgggtatcctctgtcgggacagtgaccccatggcaaatccgccaagaacaaagctccctcgggggaaggaccccgatggatacgaggtggagaagtggcatttagccactggccttgttgctgcccttgctgctgccgccgctgcccctgctgctgccgccgtcgctgcccctgctgccaccgttgccgcccctgctgccaccgtcaccgtcgtcgctgtcgtcgcctccgtcatcgtcgtcgtcgtcgtcaccttcgccgtcctcctcgggcgagtcctcctcgtccgaggagtactccgactcatccgagccctcgagcccggagcgctcgacggcccggatgtaagtccagacctccacggcaatcccctgagagtcgtccgagtcatcggacgacgttggggagagacgggagctggagacccctcggactcagaggagaactcctcctctgagtattccgagtcgccaaagtcctctgatggaggagtcagctcgcgcttgcgtttgttgttcttgcccatggtggaatgcaaggagaggaagaaagcaagcagcggagaatag

SEQ ID NO: 40110 - DNA, 447 bp, Zea mays
  Peptide Sequence Number=SeqID_83485
atggtgcacagggttacccggtccacgtgctccggcgggttcacgaactccagcgagcgcgattacactattccggtggggctggttatcggctcaagctcgggcaagctccacggccttctggggaagctatccgagggcttggatcgagcggaggtgggcgggaaagggtttggccacggtggttgccctcgggcggctctggcgggtcgcggggaggtcgctgaagctgcgggcgagctcaagagggttaggcgtggtatagaggaggcaacagggacgatggtccgacgcagcgaaggcttcgagcgaagggtagcgtcttcacctttgccccaacatttgccctccgagggaccagttcgactcagtcatctggtgtcgaagacgtcgctagatggtggagacgctgccctcgctcgaagtggtcccacgggggtttttgag

SEQ ID NO: 40111 - DNA, 336 bp, Zea mays
  Peptide Sequence Number=SeqID_83486
atgcagattattgaaagaaagtgcgaggctcaaaagggtgttgggataaggtctaacctgaatttttatgtggttttgtggactgtaggaaaaaaaacactcgataaactcaccgatcaacctggaaatctgataccaattgatgtagctgaggtgcccgatctttcggcgagtagagataattccgatttggcggaagatgacccttgcgatccgactacgacgagcaagcccgaggcgccaatgcaatcgctgaaccaactccctgtggtggaaggggtggcgcctggactgggaaagatggtgcctgggctggagaaggtgctgctggtgtag

SEQ ID NO: 40112 - DNA, 153 bp, Zea mays
  Peptide Sequence Number=SeqID_83487
atggccagttatgactttgtcaaggacgtcaacctctttttcaacacattcaagagccccaggaatatcctcagcagaaaggccttgatcatcgtgttccgcgcttcggactcgcaattgaagcgatccgagttcctttccaaaagtgtttga

SEQ ID NO: 40113 - DNA, 699 bp, Zea mays
  Peptide Sequence Number=SeqID_83488
atgtccggcgaagggtcgggcgaggtccgggggtctctggcggtcacgtcaaggtgcgggtcgtcggcggtggtgaccgaaggtgggttggccgcgtgcgcaggcgatcgggctcgtcggcggtgcgtgctccggcctgctaacggcggtagagttaaatcaaagtgctcggggagcttcacgggaagtcagtggtgccgtgggtgcaaggaatttggaaatggctcaccgtggagttcagtccacgcgaggcggcggtcggctagagtctggcgatggcgattcggtgcctccggcgaagtagcgttcggtttgagggctcaggaagctctacggggctctagggaagctagccgtggagctggatcgggtggcggtgggccggagtggccggtccacggtgggcaggctcgggtggccggtggcgcgccgtgctcagggaaaactccggcgaactcgggctcgggcagagctgagggcatgcgggggagtacggtcgcggccttgggctgctttataggcgcggggtcgggcattgcttggcatgggcgcgtgggggccgagcgcctgggcatgctctggcgcgccagaagaggtcgaacacgtggagcttactcagtttatgttaagaccatctttcttatatttggattcaaagggcaggggggttggggcatagttacgtaccgatctccttag

SEQ ID NO: 40114 - DNA, 693 bp, Zea mays
  Peptide Sequence Number=SeqID_83489
atgacttcccacgtacccactgacagaggggacgcacctttcgacacggacggtctcgcacgagagggttttcccctcatcttgtgggaggtactgcagggggcaggatacactacacctccccagtacacggtgcagctgttcgaggaacatcgagtacctcgttgtagggtgaggatgactctggagcctcatcccctgcatccagggtggcgttcactagactctggatcctttggtttccaggccgatgacactacaaaggccacagccatgcacgtgctgacgactatctatgggtttcaccccctggaaatgtcgacccaccccatcggcctgttccccgctaagaaggagcatgacccgatgtggaaggatcgggttgatcacgccaaggacgtgtggtcactctaccctagacataccgctcgcttgacggttcgatgcatgagtgccctatatcgtctgcaggccttacggggcaaggcgatgccccaactaatgggcctggtggagtttacaaagatcaccctcgataacagggaggaccttgtcatagacttgtcttctgagatagttgagaaggatctccaagttgagcaaatggttaaccacatccgtgagctcgaggagcaagtggaagcccgggatatcaccatcgaggttctagaggaccggctccagaccacctag

SEQ ID NO: 40115 - DNA, 351 bp, Zea mays
  Peptide Sequence Number=SeqID_83490
atgtccaccttgatgacacttgacactgatgaggatggcgaacccgtggagaaggagtacaggagcatgattggctctctcctgtatttgactgcgacgaggccggacatacacttcgcaacggtctgcatgtggagcctagatggtccacgcgtgcgcagggatggtggcgttcgccaacagcacatggatctcgcccctaggagggatcccgtcaaggaggagaaatcctgggttcgtcttcagatcgacaggtcacccaagacacctccaggcaacatagagtcgaagagaggtgaaatagagatggaagaaggatactttgctgctactcctagggcacgaaagtaa

SEQ ID NO: 40116 - DNA, 321 bp, Zea mays
  Peptide Sequence Number=SeqID_83491
atggagctcgccaagaccctctctgcctgcttcactccatggccactgcgcctcctcagccgagctccctttagttctcctcagcgcgtgcgcagcttcctcaagttgccatgtgcccagctcgctccagctcgccgtttggatagtacctgccaagtgctcaacaaaaaggttcgaacgagtcgacttccatcgtcttcgtcaaatggaaatcgttgcgctggcatgtcgatgtcatcgatcgccatcctcgtctacgccaagtcccaagccgtgaagacgctctcgtgctggccacgcgtcaccagctcgacaaaataa

SEQ ID NO: 40117 - DNA, 366 bp, Zea mays
  Peptide Sequence Number=SeqID_83492
atgggaaggggagggagcacgccgaggaagcccggccgacatggaggagccgagcgcgtagaagagaggaagaagccgaggaaggtggctggagggagatggagcagagggcgtgccatgggaacttcatggctggggaagaagcttagcagagaggagcacgcggctggaaaaggggctggggcgccatggcgagctggagcaggcgacccagggcacggagagcttgcggcaccagaaacgccgggctggaggtcaggcagagcgcggacggcgagtggaggggacgcagcaaccatggagcttggggccgtgcacgcagggtgcagggcgcgcgcagaagctccagggaagaagaagacgtga

SEQ ID NO: 40118 - DNA, 696 bp, Zea mays
  Peptide Sequence Number=SeqID_83493
atggcgaaagaggcatcgcctccgcctccgccgctcaagctgctctacattgccgtcgccgcccaagctgctctacattgcgttccagtacacgcgccccgtgctgcagagcaccctgcatctcatgggatgcaagcctcgccataccttcaagcgcggtgcgaaaactgcagccgggaagctgtacctgccttggaaagaacagacaaaactgactgtaccgtgaatgtgaaaactgctggaaagaaaaataaagaagctaatgggtacagacacaagacagtcttatattgggactcgatcaacttggtgtttgggaaagatcatgcaaccggtgaagcggcaaagaccccagctgatggtgcgagagatatgagtaaggaagagggaaccggtaaagagcttacttcatcaacaacctcaggaagcttgaagaggcaacggtccagtgattccttcacctcaatgatggcggagaaattagacaagttcactgaagctattagggatgaagcaccaaaaggcccgacatcaaaagaaatttttagcacattggaggagatagatgggttagatgaagacacatttttagacttgtttgatatcttaacaggtggtgcgcgcaagtacgagtccttattggcacttccattgattttgaggaagagatggctgttgaagcaacttaaaaagtga

SEQ ID NO: 40119 - DNA, 309 bp, Zea mays
  Peptide Sequence Number=SeqID_83494
atggacgagcagacacgacatggagggtgcgagtccgccaaggacgtgactgtcggagcgccggtagagaagggagatgaacctagtcgagcactagagagcgagtggacaagggagcaggcgcggctgggctgggcgacggcgaccgacggctatatggatggggcgagcccgatagggaacaacagggcgagcgacgctagggagctcggcatggtggagcacgcgaccaaggtgttccctatcgcgctccatgacacgacgctgctgagcgcgttacagaggcgaacggcaatgatgatggagtag

SEQ ID NO: 40120 - DNA, 675 bp, Zea mays
  Peptide Sequence Number=SeqID_83495
atggcggcgcaaggggcaggaagggcggtttcctcttctctggctaagtctctcgggttgcgaaaacctaagagggaggcaggaagcggagcaaagaaccgtcaccagaccctctcccgggctccgagcctccctactgatcagaggttcaaaggctggccccccgaagggttcgacagccgcctcagatcgcgtgggccctacacccactactggtcagaggttcgaaggccggccccccgaagggttccacggccgcctcaggctactcgggctccgcgcccattactgatcaggggttcgaaggctggcccccgaagggttcacagccgcctcagacgccgagcgagggatgaccatgggtacgttcgatacataaccaaggctcgggctgcgctcccgagctcatcggagacaccatgttcggcgcccatcgagggcaacatggcgctttccccccccccctccttgcggaaaggcgacgcaggggcgtatgttaaaaaagccgagtctgtccctgaacgccctctcgccctgtgtagaggctcgggggctgctctcgcaaacccggctctggccaaaccgttgacagcgtcaacataccagcccgagaacttgggacccgaccgtacacccgggctacggccagctcgcatgagggaacaaccagactag

SEQ ID NO: 40121 - DNA, 477 bp, Zea mays
  Peptide Sequence Number=SeqID_83496
atggggtacaccggatccgtaacacgacatcggggaagaagggtacacatggaagttagaaatgcacctacaaaaacgacgacttcggataacggtggagtccaaccttgcggaagacctagcggcagcgaggtgaaaaccctagcgacgtcaacgggggatgagcggatacggaagacctggcggcggcgaggtcaaaaccctagcgacgatgcagcgacgtctacgggggacgaccggatacagaagacctggcggcggcgaggtcaaaaccctagcgacgatgcggcgagctcggatctcgacttcctgctcgctcctatctccctcccatgcgagcgtgagctcgccggtgatcccggtcccagctcggatcttgctcctgttcgccggcctcgcacactgctgtcggtgggtgctatcatcaccatcgactcatttctcctccgcggcgttggtcgtgcttgccgtggctag

SEQ ID NO: 40122 - DNA, 762 bp, Zea mays
  Peptide Sequence Number=SeqID_83497
atgaccgagccgagggactcctacgccttcgggatacggatacctaactcatcaccttctgcgataagtaactcacgttcggataaagtgattccacggaccgaacaagtcttcacgttcggaagctcttctgccgaagcgatccttcgagccttctcgactgagtcggtgacagagcctcatggacaggtgaaagtgcgcataagcggcaaggccgaccgagccgagggactcccacgcctccgggatagggatacctcactcatcaccttcggcgagaagcaactctcgctcgcacaaacatccctgttaccaacaaaaagaaggcacacgctacaagacactctgatcctgcaggctcgggtcttgacgctggaagggggcagtagcaccctcggcatcgacgacaccttcagcgaggtccgacctagcctcggacggcgacgtggtccgaggatctccgctctaaaggacgacgtcatcgccacgcccgggaaatcgctgccagggtcttctccgggaatccggcccgagcaggcggcttggccggtcaccccgggggcctcggccgaccatcttccaagggcgccagcccgacccgaggcctcggctggtcaactccggcgtcggtcccgccaacggacgacccggctaggctccggccaaacaggtttcattttcgagccaactctgcccctgttcatgctgatatcgctacccctggcctcggctcatcgaagagcggccaaggggtccctttaa

SEQ ID NO: 40123 - DNA, 144 bp, Zea mays
  Peptide Sequence Number=SeqID_83498
atgggttcaacatcgaaaaagatgtacctctggcaggttacgagtcacttgattgtgattggtgttaagcgccggtgggcacgaccttctataagtctaagtacttcttctatacttcttattgaggatgatcacttaagctag

SEQ ID NO: 40124 - DNA, 165 bp, Zea mays
  Peptide Sequence Number=SeqID_83499
atggcctccgccgtggtctggtgggcggcgccgcctcataccggcgtttgctggcacgaagagaccgtggctgtggatcctggtgagcagcagattgaagtagctgagcaggagctcattgaaggcaagttgtgccctggcgcacttctaacgaattcaagctga

SEQ ID NO: 40125 - DNA, 315 bp, Zea mays
  Peptide Sequence Number=SeqID_83500
atggagagtcatgatctccgggcagaaagggaatcacgacttgtgggtggcaatgagaatgatggttttggtattgattctggtaatgataagtggtactctttccgtttggaaagggttgtcagcattgcaaccactgctcaggagaagatgaagccgtggaaggagatttccaggagttccaagactacgacgagttctaggcgtgggttagcggcaacccccagtcggctgcctgtgaaggccgcgtgtatctacgtttcttttccgcactttgattattgtaaagactatgtggatgtctcagacatatga

SEQ ID NO: 40126 - DNA, 171 bp, Zea mays
  Peptide Sequence Number=SeqID_83501
atggccaattcagaaatgggtaactattactccatccaaattgtttgctatgactggagccgtggggccgaaaatcacaaccctgcagctgcaaagacatccatctatctccacagtccacaggaaaccgaggtcaaaggaaagccgcgcattgcaacaggcaggaagtga

SEQ ID NO: 40127 - DNA, 333 bp, Zea mays
  Peptide Sequence Number=SeqID_83502
atggccgcggaggaagaaaggggcggaggggcttaccggcgacgagactgctccggtgaggtggtcgagtatgtaggggaggtcatgagggtcacggcgatgtgtgggtcgccgtcggggatgggagcttcaccagagatcaaggaagacatgtgtgcaaggaatcggagaaagactcaccagattgctcggtctacgcgcgcaggcgggcaaccgaagtccggcgaggacgatcttgggtcttcggtgaggttctgccaggtccaagcgcttggaaagcttcacaggccactggcgaagctaaccgaggggccaggcgcggctgggacgtaa

SEQ ID NO: 40128 - DNA, 648 bp, Zea mays
  Peptide Sequence Number=SeqID_83503
atggaggaagaaaggggcggaggggcttaccgacggcgagactgctctggtgaggtggtcgaggatgtaggggaggtcctgagggtcacgacgatgtgcgggtcgccgtcggggatggtcggagtcagccggtccacgtgctcaggagggggagctcttcggcggcgaggagtccggcctaaccagggcgcgattggtcaatcaaatgggtcagggagcttcaccagagatcaaggaagacatgtgtgcaaggaatcggagaaagactcaccggattgctcggtctacgcgcgcaggcgggcgaccgatttcctacgaggacgatcttgggtcttcagtgaggttctgccgggtccgagcgctaggaaagcttcacaggccactagcgaagctaaccgaggggcaggcgcggcttggacgagactggagcgggctggtcgcggtggtcaaggcttcggcggtggtggagggcggaggaaaagctcgccggagctatggaggggcgtctggccagcgagggattttgcctactggtttcaaagatttggagctctgaagtctggtatgtctccgagcccgagcccaaggcaaatccttggttttgtcatgtctggggctcgcgtcccaatgccatcttctggcaagtga

SEQ ID NO: 40129 - DNA, 360 bp, Zea mays
  Peptide Sequence Number=SeqID_83504
atggagcagggtgttacagatctaacccccttaacaggaatcttgcccccgagattcaagaagaagctagcaagaaagcaagcggctaacccccttaacaggagcgttgatacacgcttggtgaagatgatgccgactctgatcttgactgatttgaaggagttggaggttgccaaatggacatgtgcaagaggaaagaatagcggattagagagagcagggggagaacccaactacttaactctatggcactcacctagtaaacagatgccattgtggaccaagggccacaacacatcaacactcattccaaagaagcaaatcaatcatagcagaaggacaaacatcatgagcacatag

SEQ ID NO: 40130 - DNA, 594 bp, Zea mays
  Peptide Sequence Number=SeqID_83505
atgtcgtcgcaaagggacgcccacgcgagggccaagcgcctcggtcgagagccgcgggcattctccacgcgcaagtggtgctccgcttccgactcctctcagacgctccccgccgactccactatcgagcttccggccgaaacgccgcgggtctcgttccctctgatacacggtggcggccgttgtgggggacagatatcccccggatccactagaaggctagaaggcctcgcgaaagactctgggcccattacttcgcaaggtcatcccttcgtgggccaggggaggaatcactggcagaatggatcgacacgaagaagggattcttcatcgtatagcggatccatcggagaagaagccctcctcgaaaatctccgaaaaagccaaaacgaagcaggaaatagtgcaacctccagtgctccgggcgaaggctacctcctgcaagataggagcagagaattcgtttacccggagaactccgttgtccacctcatccacgaaaagatggacgcggattaccaggaaaaaagaagcaaacaagataaaggcccgtcaagctgctcttctgacacctctgccctcaaaggagaatag

SEQ ID NO: 40131 - DNA, 1056 bp, Zea mays
  Peptide Sequence Number=SeqID_83506
atgcaggcctgccttctcttctgccgttcccccggcgagctctttctctctcgtgcggcaactgggctattggcgaccgccaacgccgacgattacatttacaccaagtgcccaagccgtcttcgactacaccagatactgccgaacccaggtgactctgtctccagcctcagctttagtcccaagagtaatctgcttgtggcaacctcctgggataaccaggtgaggtgctgggagattgttggtggtaacagtcagccaaaggcgtccatttctcatgatcagccggttctctgctcggcttggaaggatgatggaactactgtcttctctggaggctgtgacaagcaggtcaaaatgtggcctcttctgtcaggtgggcagcctcagacggttgctatgcatgatgcccctgtcaaggaggtcgcctggattcctcagatgaatcttcttgtatccggaagctgggataagactttaaggtactgggatacaaggcaatcaaatcctgtgcatattcagcaacttcctgaacgttgctatgctcttactgtgaattatccccttatgattgttggaactgctgaccgtcatcttgttgtcttcaatttgcagaatcctcagacggagttcaagcgaatccaatcaccactaaaataccagacacggtgccttgctgcattccctgatcaacaagggtttttggttggttcaatagaaggaagagttggcgttcatcatatcgatgacgcacagcaaagcaaaaacttcacattcaaatgccacagggaaggaaatgatatattctctgtcaattcactcaacttccaccctgagctctgccttttcattaagaagattagaattaacccagttttaaggaaaaccgggttcgaaacctacacagggagcccaaacaacacaagcagcggcaaccccacacacaaagcacatccagagtcatcgttgccgagctcaacacaaggtacgagcagctccgacttcgccagacgggccgcacatggctacaagaacacgacgacgcctacaccttaa

SEQ ID NO: 40132 - DNA, 312 bp, Zea mays
  Peptide Sequence Number=SeqID_83507
atggccacctgcctcgacctctcctacagcagggctgtcagcacggcgctggaagttgaagccaaatatgcaggcccaggaaagtcaaagggctatggatgtaacacctcagattgtaacctcgcggatggagagtacatcctcgtgccagagcaaggagttgctcaggaggtgaccccggatctagcaccagagcctaccccagagaatctgcctgccccagctttggaaggcaagccccggttttatgcacaaccaattatattatgcacaaccaattatactatacacttaagtgtaggagttgaatga

SEQ ID NO: 40133 - DNA, 174 bp, Zea mays
  Peptide Sequence Number=SeqID_83508
atggccatgatgggttcaacatcggaaaagatgtacctctgtcaggagcactatattccagaagtagtgctccatatgaaacaagaagaatttatgaagcttaaacaaggtggggatactgttacacagtatctcaacaagttcagccacttgtcccagtatgccattgattag

SEQ ID NO: 40134 - DNA, 2301 bp, Zea mays
  Peptide Sequence Number=SeqID_83509
atgggagaacttggggtttccgatggctttgctagagagttgatgaggacatgcgcggccccgggggaaaggatgtcttcgcccgagctccgggagtcttcggctcggatgctggaggttaccgggggatgctggcctaggaatgttcctatcccccgcgcggccagcggggatgtttttacatctcgcatggttcgcaaatggagagtttttccttacgggcggaatattactgttgttgtgtcggcagtgatggacaaggatcgccagggggctgcgcaaaagcgccaggcggctgtcaggcttgttgaagccaggccgaagaggcagcgggggtcgacgaaggctgcggccctcggcggaggcaagccgccgctggcggcgaagtcgggcgttcctgcatccagcaaggcgccagaggcagcggcaggcgccgggggctccaaaccggcgaaggctgcgctgccgcccagcagggtggcggaggccgcgaaggcggcccgagcgttgccgtcggcaggcaagcgtgtcgccgacttcgccaccgacatttgtgtggaggactatcttggtgggtcggacgagggccagcttgctacagttgcgcctgccgcggcgatcgcgacggccgccatagtgccgaaggcgaggggcgaggctcgtggctccgaaggcgaggtgtcggccctcgcggttgtcagggacgaggcgggcgcagcgacccgccggctgaaggaggtgacggaggcgctgagtcaggtggttgacttcgccagccgtactgcgtcgggggccctcacggcagttgtgtctgccgaagtcgagagacttcggacgcaacatgctgacgctgtccgtgagaaatcagcctccgacagcaagtgccgtaaactgacggacaaggtggccgccttggagagggagaaggctgaccttcggcgccaactagcggcggagaggagggaggccaacgaggctatcgccaaggagcaggctgcgcaggcggaggccaagctggcgcgggcggagggcaatcttgccaaggagctcgccgaacatctgcaggagcagctcaccgccctggagagccgcgcgaagggggctgaggccgcgatgcgtgcggaggccgaacggacgcgcacgcagcttatggatacatatcgtgagctgggtgcgcggaccggtgacttcgaggtgccggaccgagagcccgggcttcgttgtctgcaatgggtgcaagaggagctgcaggaactccccgctgtcgtggggggtttatgtcatacgcctccctggtcacctgcgaggggggcgatgaacgcgctctcccgcgaagggtgccggcacttcgaggtcttcgaccaggcggatgaagattttgatcgagatgtctataaggttgaagacctcgtggtgaaggattctgccggggccctctacgaccggatgtggggtccgcacggtcacgaggtggtcagggagcgggcggagacggcgatggctcaggtaacattttcgtttgtttggcgtttgtcggatgtggggtgcgttgctggcgagcgggtggatgactttggggcgttgaacagcgcgctgcctgacccggagccgacccctacggaggccgtgtccggggtcgccctggagccaaccccggagaccgcggaagacgcgccggatgcccccacattcgctgcggccggcgaagacctgcccccgaaggtggccgaggacgcacctgatgccgccgcggctgctgcgccgagtgctgaagatcccgcggtcgtggcggcggaagcaacagcggaggcggcggcggagccaatggcggaggcttccgcagcgccagggccctcgcaggttcaagattttgggcctgcgcacgcaaccgctactactgaatttttggcggcttcgaccgcggagggtggtaatgaatatggtggatctgcatctgagtttgctgattttactgactctgagagctcggttgagtggactgaggagtcatcggaggaggacttggactattttgcggccttggacgtggctgcggcggaggcctcgccacatgccgcggacgcgcaagatgtgccgggtcctagcaccgggcgccgacggcgaaaggcggttgcaaagcgtagggttagtgcggaggaaagggctcggcttcgtgcgacttctgcgcggatagtcttcgcgagagacttcgggttttttcgcacttgttgtgctggtccggctacacccttgggcgacttctgcgcggatttgtcgcacgcgagggtggctagcgcttag

SEQ ID NO: 40135 - DNA, 186 bp, Zea mays
  Peptide Sequence Number=SeqID_83510
atgaaaggcaagaagaaggctccaagctcaagttcctcatgtgaagaagaggaggaggaggaagatgataaagaaagtgatcaagcctcaacatcatcctccgaggacaaagaaacggtcgaggatcttctctttaacattaacatgaaaaagcaaagaaagagagaggatgctttgcatgtgtga

SEQ ID NO: 40136 - DNA, 342 bp, Zea mays
  Peptide Sequence Number=SeqID_83511
atgacaagcccgaccatctccggtgagtttgccacggttgtggccacgaatcaccgcgccagtgactcagtccctctctccggctgccgcgcgtcgctgttaaattcattggccaccgctaaagcatgctataaattgagcgcacccgcggctccgctagaaaacgaggaagagatagaagttgaagaagcgaggactacaccaccacctgaagaacctcaggcaggaaactgcttttactttgatatctgtggagcagagcctgactcacctatcacacaaggcaagccccggtgcatttgccgcctccttgctattttaaaatctttctcacttgcttga

SEQ ID NO: 40137 - DNA, 375 bp, Zea mays
  Peptide Sequence Number=SeqID_83512
atggggaagcctgtcccatcactcctcatgctcctcctcagccgaggtagggtcccactcgactatccatcccggtggcaagatggacggccaagtcactccagcaaccatgtcctccagagaacctgtaaaaattatgccacaagcaaggctgagtatactaatactcagctagacttacccagttacaatggatcaagcagtctcattagctgcatgaagcagacgattcgaatcgagtttttatccttgcaaggtttgaggttcttgcctcagcataatggattaagacttggaatgccccttaaatgttttagtaggtactcaaggggttttgctggtttggttaggggtgggtttgaactacaacagtga

SEQ ID NO: 40138 - DNA, 372 bp, Zea mays
  Peptide Sequence Number=SeqID_83513
atggcgcaatgctcagctctaaccatcctctttggtaagccttacacttcacaactcttattatgtagtaaagatgtgacattcgatcctgtgccacgattcatcatatgtgtgagacttggtcccagcacacctggtgattatgttcgcgcccgggtcttggtgcccctgaaacccgggtgtgacattcttcaagcaaagatgaacctccacggacccgcagccatcgatcctcatcacgctcgtcacatagatatggcaagaggtaaaacaagtatcccatcctctagtgatgatagtagtagtgatgatggtgaaggtgaaggaaagccctccttagatgaacttgtggaggccatcaaatatttttag

SEQ ID NO: 40139 - DNA, 225 bp, Zea mays
  Peptide Sequence Number=SeqID_83514
atggacgaaggccttaagccgaagtttttcaagctttctgagcttcggttaaaaagacgcattttcgtcatttctgaaggagaaatgtctcaagacaagaaggttgctgctgagacgaagctgactgaagaggataagctttttgaggagaagaaggctatgaatccttacattgctggatttatcgagtcaatggcaaaaaacaaatacagagaagattactaa

SEQ ID NO: 40140 - DNA, 210 bp, Zea mays
  Peptide Sequence Number=SeqID_83515
atgccctcgctgcaccttgcctcgtcgcggtcggaactgtgcctcctcgtcgtgcgcagggcaacacgcgccctaccctcgatgtctgggctgctgcgctatcgtcgccatggagtatcgctgctgttcatcgatgtccacacctctctgccggcgttcttcttcttccgtttcgcatgtcggttcgcgcgtgtcgtgcgcgtgccgtag

SEQ ID NO: 40141 - DNA, 387 bp, Zea mays
  Peptide Sequence Number=SeqID_83516
atgtctaacttccctaccgtgccggctacccgcctgtggaggtcgtcgacgggaaggggatccgaggacatccgcaaaccctccaagtcgacttccggcgtcatctcccaaagcggcagccgccgctccgtcaagggggcaccctccggcgatgaatggcggcaaccacccccgcggcggaaggttcagggctctcgtacgagaaggttggtcgcgcgggagaacgggccgacgcgtaagtcactcgctctctcccacgctgacgcttgtaaccccctactgcaagcgcacccgacctgggcgcaggacaacacgaaggccgcgggtttccccttttgcctgtctcctttccccccttcgtgctccgtctcacgccgacccatctga

SEQ ID NO: 40142 - DNA, 723 bp, Zea mays
  Peptide Sequence Number=SeqID_83517
atgccgagtgccgccacctgctccatcttcccctttctctctctctctctcccactcggctctctctcccctgcaccgacgcgccagaagccaagcagcccaggagcaggcgaccggccaaccccgagccgtccctgcacccgcgacttcggcctccccgcgccgcgcccgtgcagcctgcgcgccaaccgcccgaccgcgccctgtccatgccctgcacctcgcgccgcgcccaggtgccgcgaacccgaccgaaggtcgccgcgtcgcgatgcaccgactgccctacgcgcccgacgcgatcccgcgcgaccatttcttaacgttaatgaaacttcaatgtcgcggttactcctccctctgttaatggccatcaatgaaattcatggtcaccatttcttctcctccccggcgacctctgctctccctccctctctctataaaaccccaaccgagccctctccttctgcctgcccaagctcgctctccaagctatcccgtgttcactgccgtcgttgtggaacgaagccggagccgcgccttactcgtcgtcgtgcctcgctggagtgcctcgctggagttcgtccacgccgctcgacgtcgtacctcgccatccgaacgctcaccgacgaccgtgtccgttctttgcccaccaagaccgtcgttcatcccaaggttgaaaataaccccaacccgttaatgtattttctaaatagtgtttga

SEQ ID NO: 40143 - DNA, 249 bp, Zea mays
  Peptide Sequence Number=SeqID_83518
atgcaggaatcccttgcaggaccgccatcgcagcaaaatcctcccgagggcctccctacactgaccactcccctactgcccttgcccctttcggaacatgagtgggtaaaagaagtgatcaagggcacaacttgcctgggacttgagattccagtttcctggactgggcgcattataacagagaagtgtaggggctctggtgtaaaacttctcaagactcagactattctgagttggatggcgggttga

SEQ ID NO: 40144 - DNA, 363 bp, Zea mays
  Peptide Sequence Number=SeqID_83519
atgccgagtgccgccgctgctccatctcccctttctctctctcccactcggctctctctctctcccctgcaccgacgcgccagaagccaagcagcccaggagcagccgaccggccaaccccgagccgtccctgcacatgcgacttcggcctccccgcgccgcgcccgtgcagcctgcgcgccagccgcccgaccgcgccctgtccatgccctgcacctcgcgtcgcgcccaggtgccgcgaacccgaccgaaggtcaccgcgccgcgatgcaccgactgccctacgcgcccaacgcgatcccgcgcgaccatttcttgtcgttaatgaaacttcaatgccgcggttactcctccctctgttaa

SEQ ID NO: 40145 - DNA, 843 bp, Zea mays
  Peptide Sequence Number=SeqID_83520
atgcatcgagccctcggaccctgtcgaaggggtctgggtccgacgaatcacccgcagaggctcgggggctgctctcgcacccggctacggccaaaactgttgacagcgtcaacaaaccagcttgataacttggaacccgaccacgcacctgggctacggccatgccgcatgagggaacgatcaaaccggtcgaggcatcacgaaaagcattcagacctcagaggagtcaaaccactcctccgaggcctcgggggctatacccggcgggaaaacagcgccgctcgccctgctccgactaccgtgtcaaccacccaggccaagactgacaacaagtcacgatcaaccaccgagttcggcctcgggcacaacaggaagctccgcctcgcccgacctcaggctccggcctcgggaggaggtttccgcctcgcccgacctcaggctccggcctcgggaggatgtctccgcctcgcccgacctcaggctccggcctcaggaggaggtctccgcctcgcccgacctcaggctccggcctcgaccccggcctcgggaggaatcgcgtcctcgtccgaccccggcctcggcctcaagagaagtctccgcctcgcccgaccttggactcggaccgaccgcgccaacaggggatacatcattaccctattcctagcctgctcaggctacaaggaacaagaccgacgtcccatctggcttaccccggcgacgggtaatgaaggtgccctgtttttcctttcgccggtggctctcagccccttacggcagcaaggagacatcagcaggatccttgctgcactgccgcactgccagctgtgctcctacaggacttag

SEQ ID NO: 40146 - DNA, 237 bp, Zea mays
  Peptide Sequence Number=SeqID_83521
atggcgggcggaattaagctcgccggagctaagggaaggtggctggccggagaggagatatggagccaggaaatctggtctgtctccctgcccaaacccgaggcaaatcccagaaaaaccctgagtgacactggggtgtcacaaccttccccccttaaaggaatctcgtcccgagattcgggccagagtcctcccggggtgaagcgaagggtgagactgataggaaaagggtggtga

SEQ ID NO: 40147 - DNA, 593 bp, Zea mays
  Peptide Sequence Number=SeqID_83522
tcggagtggcgcaggcggcgctgtccttctgtcagactggccagtggagcggtggagtgacggcggtcacctcggctctgccgggggcgcgtgtcaggatagaggtgtcaggccacctttgcgttaaatgcccctgcaatttggtcagtcggtgtggtgatttagtcaaggttgcttctgagcgaagccaaggccttgggcaagccggtgatgtgtccgccataaaaagggggcctcgggcgagacggaagtctctcgaggccgaccgctcgcaagggctagggccagccaagcagggccacgggccgcaacggctgcgggctggcaactatggctgcacgccgcggaggggcactggctcgccgccgagcctgcccgaccagagagaaagagggagggggcgtcggtgctgctgcaccactaggccgacgtggggaatggcaacgaatggaagggtgagctcggacgccggcaatgacgagggcgcgggtgggggaggggcgactggccgggccgcgacgccgaccgccgaccaccgagctaggctgccagatgctgtggccgctgaaagtcgcctagaggggggtgaatag

SEQ ID NO: 40148 - DNA, 345 bp, Zea mays
  Peptide Sequence Number=SeqID_83523
atggcaaactcaactttttgctcaggtggcatacctgtctcccatggttatagcgtggctgagagcggttgcctgctcctggctgaggcgcattctgctttgctggggcactggggcctgactgctgctgggctgccttcttcggacattgcatcacccaatggccttgctctccacagtggaaacatgttctgtttccaccctgaactggaagacgaggtgcctgctgattctgcctctggaactggcctcctcctgactgattgttctggcgattctgatgctggtgctgaggatactgcctttggaactgctgctgctgaggtggacgttggttctacctga

SEQ ID NO: 40149 - DNA, 918 bp, Zea mays
  Peptide Sequence Number=SeqID_83524
atgttcggattacaggtggtgatgagaatgttggttttggcattgactctgatgatgatggctcgtcttagacacactgcacggaagtcagtcattcctttcttgccttctcgtctcgcggagcgcccgcttcgtcgtctagtgaccggtcaatccagccacttggagaggctgcaccactgcctgcatgaggagcaggagcgtcgacgacaggagcaggagcagcagggctcttctttctcgctccagcaggaggaactggaaggatgggttgctcgacccatcactcgcgacgctgctcgcgggtgtcacttccacgacgcgctcgacaccctgctacgtcgggcacttgactggcgtacttggtccattgagtatcactgtgtggtcttccagcacagtcgtggggtttacccggaccgctgggaggcgacctgcttggtgcgccggccgaagaacagtctctggggtgcggagatctgctcagagcactattccatctctgagcgggactcagctgaggcagccatgcaagatgccgcacggcgtgcgctttcgcactactgctcagtgctcggcggggtagccgatggtctcaacctgaagtattacccccaccatccatctagcagcacaggaggcgtgattgtctcacctgttggcgaggacaatcctaggttgagcagcacagtcaacctagccaccgtgctaaacacggagctggaccatgcggtagacgagctaagtagggctcgtgctgagatcgcccagctgcgggctgagcgcgcggagcgtcgtcacctggatgatggctctcccgctcccgccgggactcagcacccgtaccgctcacctcggcatcgacaccagtcctatggcaacctcgactgcaggaccaagataaatttagaaccatag

SEQ ID NO: 40150 - DNA, 288 bp, Zea mays
  Peptide Sequence Number=SeqID_83525
atgccgccaaagtcgaagaagtcagtgaaggggttgttcaagggcctaggcctatttcagggcagttcttcgagcagcagcaaacgtcgagagctgttgagcgttgcacatggagatcaggaagctacgcgtggccaaaagcctagtgacattgaggtctaccaggagggccacaaaggaccagaccctaacaaccctgacctgctttgcagccagacgaccacagatcgactgcacgtgctctcatcgaccgaacgagcaggagttggagattatgaggatgcgtga

SEQ ID NO: 40151 - DNA, 529 bp, Zea mays
  Peptide Sequence Number=SeqID_83526
tagccgcggcgaagaaaagggcggaggggcttaccggcggcgagactgttccggtgaagaggtcgaggatgaaggggaggtcgcggggatcacaacgggaggtccacgggatgccagagaagacatgagcgaaaggaattgggcggagactcactggatagctcggtccacgcgcggcggcggaagaccgaagtccggtgaggtcgatctcgggcctccggtgaagtccggtcgggtccgagggcttggcaagcttcacgggctactggcggagctagccgaagcactggctgggcttgagggtggctggagtgggctggccacggcggccgaagctctggcggcaatggcgggcggaattaagctcgccggagctaagggaaggtggctggccggagagggtgagtgcggggcgaagagagagatatggagccaggaaatctggtctgtctccctgcccaaacccgaggcaaatcccaggttttgtcggatcaaggtgaacatccctgatctttggctcaaggtctga

SEQ ID NO: 40152 - DNA, 1194 bp, Zea mays
  Peptide Sequence Number=SeqID_83527
atgtcttcgcgctcccttatgcatcgcgtctttccatcttccaagcccccggatgggggatacctgccgtctttccgcctcatcgtcggaggaacgcaactccgttggagttggtacctttcagccatcgttcggcttcaaggattttcatcagctagcccggctgcaccccttcgccggcggtcacccgagacgacgaccaccaacccctggatggggagaagcaagccgggctgcgatcttggtcccaccctcagcttcaaggatgttcatcatcctcgctggggtggaggccgggctgagccggagctctacctcccacgcgggttcgcgggtcaccctcccctgcggcgttcgagggagagggcgctcgctggccctacaggcgggtcggacttcgacaacgaggggttggtcgacggcgggcgtcgtcagccccagcgcgtcgagctcatcggcttggctcccggtggcacctcctgtcggaaggcggctgccgcgccgtgtgcacgggaggaccgcccaagatgccgcgcgctgctagggcggcgttcgtgttctggggtggtcctgcctttgcaccggcggaggcgactcgagaagtccccgtcgccgacgggatcaccgccaccatccgcgcttcaggcctccggctctttgtacttgtcctcgcccctcgagcgtcggcgtgggcgagggcaagattgcagcagcgcccaccctgaggcctatgctgctgcagttcggacacccggagcgggggtcgttgttgttgctgtcagagcgggcggcggcgagccgcccgtcagccttctgttgctccgcaggccttcccccatagagtgtggttactcgcctgttggttgtctgaaccgcttcaccaagcatgagtcgccccgtgtcaaggtgacgagtgagccgaagcctcgggtcgggctggcgccttctgaggacggctggccgaggccctggggcgaccggctgagccgcctgctcgggccggattcccggagaagaccccggcagcgattgcccgggcgtggcgatgacgtcgtccttcggagtggagatctccggaccacgtcgccatccgaggctaggtcggaccttgtcgatggtgtcgtcgatgccgagggtgctgctgcccccttccagcgtcaagacccgagcctgcaggatcagattgtcttgtag

SEQ ID NO: 40153 - DNA, 492 bp, Zea mays
  Peptide Sequence Number=SeqID_83528
atggctgtaatgaaggctattcataagaccccgcccccagtctcggcggaaaaaagtgttgcccctgctaatgtcgaagtcaatgctgatgccgaagctgatgaagttgcccctaaagctaaaaatagcagaggccctcttggaaccacaatgttagaaattgacaggattatagctgatgtggttcccgagaaagaaatggctgaagtgactactgatagggctttgcccttagaaatgaaagaattggaaggagcttcttcggaggatatagagttggacctacaacacttgcatgaccaggaactctttgtagaagatatctgtgagttaaaagaattcactattgctgacggctacaagcctggatccctgactgtgccagagcaaaaattatcaatactttatcaaggagtatcggattttcgaagctcgatcgagatctcaacaattataggagacaacatattactaggagcttgttctatttga

SEQ ID NO: 40154 - DNA, 327 bp, Zea mays
  Peptide Sequence Number=SeqID_83529
atgatgtacaggcttgcgctgacccggccttgtgttaatccgctccactggtcgttcctcctaggcccacgaggggatgaccttacgaattctggggcccttgggcctttcatgaggtcttttatccttctagtggacccgggggatatctgtcccccacaacaacagcaaccattcattttccctcaatttcagccgtctatgcctcagtggggattacatgctccgacacctgcacctcagactccaaaccagacagacgacttcgtcaacaacttcttcacttctagaggtagtggccacaactcaaacgacccctatatgtga

SEQ ID NO: 40155 - DNA, 441 bp, Zea mays
  Peptide Sequence Number=SeqID_83530
atgcagagttcgtcgtcttccggggctgagctcaagtccgagccctggggtcgggcgatgcggagttcgtcgtcttccggggctgagcccgagtccgagccctgggtcgggcgaggcggagtttcctatggcgcccgaggccggacttggctgctgtcagcctcactctgtcgagtggcacagcagtcggagcggcgcaggtggcgctgtcctcttgtcaggccgaccacctttgcattaaatgctcctgcgatacggtcggttggcgtggcgacttggccaaggttgcttcttggcgaagactgggcctcgggcgagccgaagctttgtgctgatgggggttaccagctgagattaggagtcttgaggggcgccgaacatggtgtctccagtgagctgctgacgggtaatccgagtggacgcccatgccccatttgttag

SEQ ID NO: 40156 - DNA, 681 bp, Zea mays
  Peptide Sequence Number=SeqID_83531
atgcagtcggcatgcaaccgcgccaagtgggcgcaccccttcgactccaacgcgcccagcatggaggcccaggcccacgcgtcatgcaaccggcgcgccggttgctacgtgcgagcaactgcaccgcccctcgcgccactaccgcgcctcctcgactgcggaaccagtaccgcgactcgaggcaaccctgcgtgtgacccaacagtgccagccaggcacatcggtcacgggccagtcagccgcgggagaaggcgcgacggtcgatgcggccaaaaaagggccggcagtaatggcggtggcaggcgggcggaagcagcggtcacgttgcggcacctttggcaggagaagcgggcgacgcttcgccttcgccataatgaccacgtcaaaaaagggaccgggaaaggggataccccgaaagggatccttctccacgaaggaaacgggccccgagcccccctactgatcagaggttcgaaggctggcccctcggaggggttcaatagctgcctcagagcgctcgggctccgcgcccactactggtcagaggttcgaaggccggcccctcggaaggtttcaacggccgcctcaggccactcgggctccgcgcccactactgatcaggggttcgtaggctggccctcgaagggttcacagccacctcagacacagagcaagggatga

SEQ ID NO: 40157 - DNA, 606 bp, Zea mays
  Peptide Sequence Number=SeqID_83532
atgccggggccgcgccgtcacgccgaggccgagccgcgcatcgcgagcaggcagcggggccgcgcctcgctgggctacgcgccacgggcatgggcggacaagacggggccgctgcgccacgccgggcgagcgaaccgagggctggggcacgccgaggccgaggcggggccgcgcgccgggacgggggcagggggtatcgcgcgccctggccgggcggacgcgctgccgcgcggggagggaggggccgcgcgcaccacgccgtggccgcgagccgcgctggctggggcagggggccgcaccgtggccgcaagccgtgccatggccgggccagggggcacgaggaggtggggcgcgccatgcctagcgggctggccgtgccacgggtgccgcgagctggccgtgccggctgccgggggccgcgtccgcacgccgccagggagggccgccgggcgagcgcatagcgagggaagaaggcacgatggagaaggagagagtgggagaaggagagagtgggagaaggggcggttggggaagacgagtagaggaggggcggccgggtgggtgggacccacccacaggcggcagcggcgcgcgcccgcgctctag

SEQ ID NO: 40158 - DNA, 183 bp, Zea mays
  Peptide Sequence Number=SeqID_83533
atggagctcatcgacgacaaggtcggggtgcggggaggcgtcgcaaggaggcgccagtggaggagaggtcgggagggcgatgacttggttatggaaggcggtggtggctttcggggaggcggcggtgggtggctccggcggggcacgacagcggcgaggaaacgaaggcgcggggagatttga

SEQ ID NO: 40159 - DNA, 435 bp, Zea mays
  Peptide Sequence Number=SeqID_83534
atgggaaccctagaactctggcgacctccccgcgacccgccagagccacccgagggcaaccaccgtggccaacccttttcccgccctcctctgctcgatccaagccttcggatagctcccctgggaggccgtaaagcttgcatgagcttgaaccgcaccaccggaatagcgaaatcgtgctcgccggagatcggaaccccgccgaagcacgtggaccgggagccgccgacgacccccgccgcctgtgctcgtggccagggtagctccgaccacctccgacgccgacccgcacaccgacgtgaccgtcgtgacctccccgacgtcactggccaccccgccggagctctactgccgccgagttttgaattaaataagaaaactgctaaaaacttaatattagaaggaaaaatagaaatattgttagaccagggttaa

SEQ ID NO: 40160 - DNA, 611 bp, Zea mays
  Peptide Sequence Number=SeqID_83535
tggtagtcgaggaaatccctgtggatctccctcgcattcgggtggagaacagagtcattctggaggacagctcgaaggagtttctgcctacgcccaccccgttggcagaatcactagcctttgtagctggatcgtcagctttagcatcgccagcaccagcagtccaagcccctgctctcggaggcgacaacccggacgactctggtgacgatgatgaagatgacaaagaggaagaagaagatggtgaagaaaacatcaatgaggaagccaacgaagaacagcaggaccactatgtggggttatggcctgtcactggacattatacctcaatagaaagccagaccagcattgttccaggtggagctggagaagattgcctcaacaccctatctggtgtggtggcaggtcttaacaccgacctagatagtgctacactagacctctctagggtacacttggagctagaggatgcacatgcaaggatagctgccctggaagctcagcttgatggaaggaatccccctgaagttcaagtccctgccatggcgttatcccctcaccgcaagaggatccgctatagagaaccaggatccatcaccagactgctttag

SEQ ID NO: 40161 - DNA, 471 bp, Zea mays
  Peptide Sequence Number=SeqID_83536
atggccaacctggtggtggagaatttctcgccgtggaacatcctatgcttgggtccaccgcaaaccaaggacaatgccctctgcgtcgtgttctcgggttatgttgttacttttgttctactacttaattgggttggtatttacttatacttagttactgctaataaaattttgaccaactttaaaagcaatgctcagctacaaccatcctctgtgagcggaactgagaaccttgggagttgttctaacgggtattcctgctcatctgcccttggaactttctcttgtgatccgacaactctttccttttgctttcaaggccaattgccttgttcagcaaagtctggaaattggaaaagttgtggctctataactggtagttcaaaggtccaatcaagccttccaagaaacgttcttggcgcttctcgtcagtgtccacttcctaaggggcgtaacgtgaaagctgggtga

SEQ ID NO: 40162 - DNA, 750 bp, Zea mays
  Peptide Sequence Number=SeqID_83537
atggagctggatctgaacgtggccgaggtggcgccggagaagccatcggcggcgctggaggcgagcgactcggggtcctcgggctcgtcggtgctgaacgcggaggcggcatcggcgggcggcggggggcccgcgccgggggaggaggggtcaagctcgacgccggccgtgctcgagttcagcatcctcaggagcgacagcgacgcggccggcgcggacgccgacgacggcgacgccacgccgtcgccacctcgccaccaccagcagcagctcgtcacccgggagctcttcccggcgccgcagcattgggccgagctcggcttcttccgcgccggcccgcagcagcagccggacatcagggtcctgccgcacccgcacccgtacccgcccccgccgccgcccgcgcagccgcagcaggccaagaagagccgccgcggcccgcgctcccgcagctcgcagtaccgcggcgtcaccttctaccgccgcaccggccgctgggagtcccacatctgggcgtacgaccgagcggcgatcaagttccgcggcgtcgacgccgacataaacttcaacctcagcgactacgacgacgatatgaagcagatgaagagcctgtccaaggaggagttcgttcacgccctgcggcggcagagcaccggcttctcccgcggcagctccaagtacaggggcgtcaccctgcacaagtgcggccgctgggaggcgcgcatggggcagttcctcggcaagaagtaa

SEQ ID NO: 40163 - DNA, 342 bp, Zea mays
  Peptide Sequence Number=SeqID_83538
atggcttttgattcccaaagggttgagtaccgactcgatattcgattctccctgccgtttcgtgaccccagggcgtacgacaaggccgcgatcaaatgcaacggtagagaggccgtgacgaacttcgagcccagcacgtacgacggggagctgctgctgactgctgaagctagcgcagaagttgctgacgacgttgatctgaacttgagcatctcgcaaccggcatcgtcccagagccccaaaagagacaagaactgccttggtccgcagctccaccaccaccatgggcggccgtttgacggctccgccgttctgaagaaaaccaaggcaagcgctaagtaa

SEQ ID NO: 40164 - DNA, 348 bp, Zea mays
  Peptide Sequence Number=SeqID_83539
atggagcatgcatgcaacggaatcgatctagctcagctatatgaaatctacggcggcggccactccagcaagagccgcagcggatcgagtagcgaggaggacgacgacggtggcggcgggtcgaaccggcgggaggaggcggccgatggggcggcggcagctgtcgtggcggtattggagaatcctgatgatgctgcagcggacgacgtcgacggcagcggcaacggcaacagggtggtggtaggaggaggaggtgcagctgcggtcaccttccatgctgctgctgctgcccagctgggatctcttcttgatgcatcactctgcatgcatggtcaacaaataaactga

SEQ ID NO: 40165 - DNA, 858 bp, Zea mays
  Peptide Sequence Number=SeqID_83540
atggccatctatgtctggctcctcccctccgttgtctccctcctcaagcaccaagccttggtccctgctcccggctccctcatcttcaatcccttgaccgccctccccagcgatgtgcctccaagtctcaagccagctccgcctcctcccacatctcccccacaccgccgtcacctagctccttgctcccatggccgcaccccctccatggattcttccagctggggctcgcaggacgtcgcttcctggatgggctcctctacagagcgccctcaacccttccccaagctcggctcagtgtggaagatagccatcggacgccgcacaccaacctcgccgtttccgagcccaaccccgccatggagctcacggcgcctcctgctgctcaaccttgggctctgggacgctgctccctacttgtcctcgactctctgccatcggacccaccctgctccagctgtcggacatcgccagcccctgcgccgaccatcgcatctcatgggtgtgcagtcgttctcctcaagctccgtcatggcgtcatggtgcttgactgcgctccactatctcatcgcactggctgtcgaccttgttggtcctccccatgtcgaaccagcaagctctgccatcgtcactcagctacacgcctccacctcgccaagtcccacacaaccgtgctactccctcgtcgtcgtccgttcctattttccccccgccatatgccgcctcgccatgatgcgtgtcgtcgtctttgatctcattagctcttccgatacgcgcctcgccgtgcttcgcctcctcgtggtcagcaccatctgggccatgagggcggtagatctcgacactccttcacatatctag

SEQ ID NO: 40166 - DNA, 186 bp, Zea mays
  Peptide Sequence Number=SeqID_83541
atgacgaaggtgatgcttgccgaagatgttcaaagctcaagaaatggaatcaagcttcgtcttgaccatgctcttgtatacccgcaacctgattccgaagatacctgctcgcatacttggaaaacattgtcaaatcatgtttttgaggaccttcggaagccgaaggcccccaacaattgcatataa

SEQ ID NO: 40167 - DNA, 1242 bp, Zea mays
  Peptide Sequence Number=SeqID_83542
atggcgagcacggcggcgggcgagggtcaccgcctcggggagatcgcggcgagcgaggggcacctgctgctgctgaagctgtggcagcgggaggaggaccgcctgggccgccgcgcgtgcgcgctggaggcgcacatggacgcggcgcgtcgggacgccttctacctctgcgcggccttcctcgcctttcacggcctttccctcgcgctcctcttcgccgcgtccgtggtcgccgcggccaccacctccccttctgccgcgtgcaggaggtggtgggcgtcgtcgtccctgtccctggcagcgtccctcgcgctcgccgcggccgtgcagctcctggtgggcgcctactggcgcgccgcggcgcggctgtgccgggaccgcggtgatgcgcgcgcactcgcgcgggccgtgcaggagctgcgcttgaagggcgccgcgtttgacctgtccaaggagccgcgtcccctcaacgtcggccttccccctgctcttcccagcccttggccagggagcgcccaggtccggcgacctcccaactccatgggcgcagggacctccttcctcctccatccagctccccctcctttctcccagccgctggacctcccctccccgcggtcgcccctttcctgcagcccggcgtcatggccgcccctcccctcatgccggccagcccctcctcttccctggctgcacgcatgccgcctcactggccgtgggcgccccccttccccggcctcccaagcagcgccactggatccgtgcccccctgtgtctgcgtcgcttgattctcgtaaggagaggatccaggtgtacgatgggggtgtagcagagtgctacgtgtctagcggagggagagctagcgccctaagtacatgccaatgtggcagccggagagatcttggcaccctgctgctgagagccgccatcgtcacagggcacgcggggcaccatcattgcctatctggtggagctagccagatgggacaccggtcttgttctctgcggcccgagtcggcttggggtagggtgatgatggcgctccctgttgacgtggcgggcccgcgcccgaggccgggcgacgtgggggctcctccgaagctggggtcgagtctgtcttccgttgccgaggccgagcccgagcccctgggtcgggcgaggcggaggtcgttcggtagaggccagggcggagtccgagccctgggtcggacggagcggagttcgccgtcttccgggtcttag

SEQ ID NO: 40168 - DNA, 474 bp, Zea mays
  Peptide Sequence Number=SeqID_83543
atgcaggcggcatgcaaccgcgccaggtggacgcgcttctccgactcccaacgcgccagcatggaggcccaggcccacgcgtcacgcaaccggcgcgccggatgctgcatgcaggagaagcgggcgacgcttcgccttcgccgcaataaccgcgccaaaaaaggggttcgaaggctggcccccgaagggttcacagtcgccccagatgccgagcgagggatgaccagggatcacccgcaggtatttttgggcgtgcctctgggcccctatccgacccccaacgaacggggcacggacgtccactcggattacccgcttgcagctcaccggagacaccatgttcggtgcccatcgagggctaagccccggaagacggcgatctccgcttcgcccgacccagggctcggactcgggctaagccccggaagacggcgatctccgctccgcccgacccagggctcggactcgggctaa

SEQ ID NO: 40169 - DNA, 960 bp, Zea mays
  Peptide Sequence Number=SeqID_83544
atggggggtacccgccgtctttccgcctcatcgttggaggaacgcaactccgtgggagttggtacctttcagccatcgttcggctttcaaggatttttcatcacgcagcccggctgcacccctccaccggcggtcacccaacatggtgaccttcggcttgatggtgggggaaagcgagccgggctgcggcccctccccctccctcagcctcaaggatttttatcaccaaggctggggaggggagtgcgtcgagttggggtcggcccctgcgtgggcggtggtccgctccttcactcagtgatggggggaggagcgggtgtcgtccgtggcgctggcagctgcagcgtgcccggctttcgggcgcaagtggcttcggagccgctcgcggcgccggcgtctgccacggcagctggaagaggttcttccgccggcgtgatagccagggccggccacggactgacctccaactctacggccttctgcctgtcctgcctcacgagttttggcatgggcgggggcctcctggcagcagcatccaccctgaggtcagcgttgccgctgttcggccccccggagcagaagtcgtcgtcgtcgccgctgctggagcagaggcggagttggctcgaaagtgagaacctggttggccggagcctagccgggttgtccgtcagcgggaccgacgccgaagttgaccagccgaggcctcgggtcgggctggcgcccttggaggatggttggccgaggcctcagggggatgtttgtgcgagcgagagttgcttctcgcggaaggtgatgagcgaggaagaagaagagaagaagaaagttggctgtgtacagccaagaggctgtttcggtctggggcaccggactgtccggtggtgcaccggacagtgtccggtgcaccaggctgcctcggccgaagagaccgctctcaggaatttgctgacggcgtacggctaa

SEQ ID NO: 40170 - DNA, 471 bp, Zea mays
  Peptide Sequence Number=SeqID_83545
atggagcatgttgatcttgatgaactagatgatgaagaggctccatgcgtcgcgctaaggaacatgtccattgggatatgtgtccaaaagaatccaaggagcctacacaagcacaagatcaaccttcatcttccatacaagcatctccaccaactcaagatgaggataaggctcaagaagaagagggtgaagatcaagacgatgagccacctcaagaggaggagattgatcaaggcggagatgaagatgatcaagacaaggaagatgatcaagaaattcaagaccaaagaccgccacacccaagagtccaccaagcatttcaaagagatcaccccgtcaactctatacttggtgacattcacaagggggatagaggatgcactaagagatccggattgggtgatggcaatgcaagaggagctcaacaacttcacgaggaatggagatatgccatttagttccatgtcctga

SEQ ID NO: 40171 - DNA, 387 bp, Zea mays
  Peptide Sequence Number=SeqID_83546
atggtgtccggcgttaaccgccgatgtttcgccgcccgcgcagctcccaatgaaagcgttgtgccgatggagcggaggaacggcaaccgcagtgccctaggattcgacggagaagtccgtgcgtggagtcgtggtcaccaaagtccgcggttctcgtgcggcgggtatggcgcgaggaaatcggtgtccgagcggaacacgacgcgacatgcgcggagtagagatcgcgcgcgtggagatcgattgatttggttggagtccgccatgtttgggagctgggaggagatcccgccccagtttgttctgcggacatggggtgcgttcgattcgagcagggagatagagctgacgaagatggcccgcgtgcaagtggctggcgcgaggtaa

SEQ ID NO: 40172 - DNA, 195 bp, Zea mays
  Peptide Sequence Number=SeqID_83547
atggttaacagcagccgagaccggaccaaggcgcgggacatggagaggacgacgggcagccagatcggcgaacaggtgaagctcgaccaaagagagggagtggaagtggaggtccaacgagacggttgctggagagtaaaagagctaaaggcgagcggtgagactgatggccggaagaagaaggatgagcagtga

SEQ ID NO: 40173 - DNA, 81 bp, Zea mays
  Peptide Sequence Number=SeqID_83548
atgaagaggattatcagagttgatgttggtctagtcacttctacaggatttaaaggttctttgtcgcaaaagggcctctag

SEQ ID NO: 40174 - DNA, 917 bp, Zea mays
  Peptide Sequence Number=SeqID_83549
atgcattcactaggcttgaagagagttttggccgtctcgaagagaagtgggatcagttcgttgtgatgttccaccgctacaaggagaagacagagaaggaactccaagcagcggtgcggcttcaggcggcagcgcgagggttcctggcacgccgccaggtacagccccttcgtggggagaagcaccttgttgtggcctccagggccaccccatggccgtcatcacatgagcaggccgtggtgcgcctgcaagccgcagtgcgcggcttccttgttaggcgggcagtgcggaagctgcacttgctaatcagctcatcgctgcaccaactcgcagcctgcgcgcccaaccaacatgtctcgtctatactttttgaaccccctgcagaagtcgagatctggctcgaggacgagctggacttcgaggcggggagagatgtcatggcctcctacgagagggctgagtaccgggactatcttgcgagtgcatcacagttcacaacaaattggtaccggagccactacacgcgcatcgccaccatggccagcgcgcacgacgatcttgtgacctactccgccaagatggacctcatcctcgcgcaactcgccaccatcaatgcccgtttggattcccacgacgctcgtctaaccaagctcgagcaggcgtgggtcagcccctctgcttctaccgcgggctgcttgggcgcgagcgagggcggccagggcgcgggcggaggcggccaggtcgaggacgatgggctgcaacccgacacacccagggaggaggtggaggcggtgttctacgttgtggtggccgtgccactgctgcagcccgccttcgtgctcgtggaggtccaggcgtggcccgaccctgtggtcgacgtcagccaccttggccaccgccgcggcgtggtcaactga

SEQ ID NO: 40175 - DNA, 2559 bp, Zea mays
  Peptide Sequence Number=SeqID_83550
atggaggtagttgagttggttccttgcgcccgcaacaagtggggcaattggcatgagttttggttttacgtcttggagggtacagtcgaagaccatcaggggctccccgtgtccgagatgtgctcgcatctttactcagcatacccgccttttgaagtggtggaggatgatgtggacgaaggggcccttcggtgcgccgccggcctgagcagcgggcgcgatttggttgaggaatttgtggcgtacggggtatggcctttggcgcatggctgggcgttgggcgaagtgtgccctcgccagatgccttcccatggtgggaagctggtgcgaagtcctgccttcgcgcttgatctgcatagccgcgatccggccgcctttgtgcgtgaggcggaggatggggcagtgcggatcgttagtcggtacgtgccgaggacagagggccagcgtagctgggatattcgcgggtcgaatgaccgcttgaacagggtttttgagttgaatcgtctgccatatggcggttatcccggccaagacgatgtggatcgtcgcgggaagaaatcggtggtagagtctggagacgaccccacgccggcggccgccccgtcctttaagaagaggaaactaggtactgctatgggaggacttggggtttccgatggttttgctagagaattgatgaggacatgcgcggccccggggggaaggatgtcttcgcccgagctccgggagtcttcggcgcgtatgctgagggttaccgggggttggtggcctaagaatgttcatatcccccgcgcggccggcgaagacttttttacatctcgcatggttcatgaatggaaagtgtttccttacgggcggaatattgctgctgttgtgtcggcagtgatggacaaggatcgccagggagctgcacggaagcgccaggcggtcatcaggcttcatgaagccaggccaaagaggcagcggggggctgcgaaggctgctgcccccggcggaggcaagccgccgctggcagtgaagtcggccgtccctgcatccggcaaggcgccggaggctgcggctgccgccggtggttccaagtctgcgaaggctgcaccggcgtccagcagggtgccggaggccgccaaggcggcccgagagttgccgtcgtcgggcaagcgcgtcgctgacttcgccaccgacattagcgtggacgactatcttgttgggtcggacgaaggccaacttgtcgttgttccgcctaccgcggcaaccacggcggctgccatagtcccaaaggcgaagggtggtgctcttagtgccggcgtcgagatgccggcactcactgctgtgagggacgaggcgggtgctgtgtcccgccggctgaaagagatgaaggaggcgctaagtcaggcggctgacttcgtagaccgcgcggcgtcgggggctctcacggcagttgtttctgccgtagtcgagagacatcggacgcaacatgctgacgccgtccgggaaaagtcggccgccgacatgccggaccgagagcccgaacttcgctacctgaagtgggtacaggaggagttgcatgcgctccccaccatcgtggaggggttcatgtcttatgcctccctggtcacctgcgagggggcgatgaacgcgctctctcgcgaagggtgccggcactatgaggtcttcgaccaagctgatgaggatttcgaacgtgatttctacaaggttgaggaccctatagtgaaggaatccgccggagccctctacgaccggatgtggggcccccatggtcgagaggtggtcagggagcgggccgagacggcgaggggtcaggcggcgcgtggcgagagggtggatgactttggtgctttgaacagcgcgctgcctgacccagagtcgaacccggcggcggctgtgtccgaggccgcactggagccgcccccggaaaccgccgaaggcgcccctgatgcccccgcagccgttgcggccggcggaggcccgccgccaactgctgcgccgagggctgaggatcctgtgacggtggcggcggaggcgacagcggaggctcccgcgacggctaagtcttcgcaggttcaagattttgggcctgcgcacgcaaccgccactactaattttttggcggctttgaccgtggatgatggtaataaatcggatgggtctgcatctaagttttctgattttggtgactctgggagctcggttgagtggactgaggagtcgtcggatgaggacttggactacttcgcggccttggatgtggcagcggcggaggcttcaccgcacgctgcggatgcagaagatgtgcctggtcctagtactgggcgtaggcggcgaagggcggttgcgaagcgtagattgtgtgccctcgcacattcggctatgctcgtgaaggcgttatgtactcggtctttgcgcggacagtttggtgtggtcgttttcgcttttgttatgcttcgtccggctgtgccttcgggcaactgttgcacggatagtctccgtggtagacttcagtttttcgcgcttgttgtgctagtccggctgcacccttag

SEQ ID NO: 40176 - DNA, 126 bp, Zea mays
  Peptide Sequence Number=SeqID_83551
atggaggctcccgcggttcttgttggcactgtcacgagtgagcctgctgttcagctggtgtctactattctatctatgtcagctactccgtctggttctgagtatcatgtgactgaagtcattccg

SEQ ID NO: 40177 - DNA, 183 bp, Zea mays
  Peptide Sequence Number=SeqID_83552
atgtttgggagctgggaggagatcccgccccagtctgttccgcggacatggggtgcgttcgattcgagcagggagatagagctgacgaagatggcccgcgtgcaagtggctggcacgagtgtatatcatcggttgaggaatatggttaagatagatatggatgagatagactacatgatgtag

SEQ ID NO: 40178 - DNA, 396 bp, Zea mays
  Peptide Sequence Number=SeqID_83553
atgagggagagagaaagttgctggacccgcggagctctggcgcatgccactgcacttcacccgtcgaatcctagggcactgcggttgccgttcctccgctccatcggcacagcgctttcattgggagctgtgcgggcggcggaacatcggcggttaacgccggacaccatcgctggtgcgcatcgggagttcgggtgcaggtgtggtggtcatggtaaggaggcggtcctaggggccggcgagtcgccggggtgcccctgtcgggtcttggccagcgccggtggatcaacgggggagagagagagcactggggaggacgcggtgtctgtgcctgggaagctggaggtaggagaaggtacctgggccgttggatccctgctggacgtttgggattag

SEQ ID NO: 40179 - DNA, 741 bp, Zea mays
  Peptide Sequence Number=SeqID_83554
atggacaccgccgccgcctcactcttgccccgcgccgccgccgtgaagacccgacgcgttttctctcctctccatgtttcccggagcggtctccttccccgtcaaagctccttcctcgctgctcgctgtgcccactcccgtgcccctcctccacctccgcctctccctcgcgccgattgcgatgatgctgccgccaaggcgcacccgcgcctccgtctccgcctgcttgcggaggagttccgcgcactcccatctgacgcagaccgcgcgcgccggctcctctccctcgcggccgcgctgccgcggctcccggagcccgaccgcgcccagggcaaccgcgtcatgggctgcgtcgcgcgggtgtggctcgtcgcccgctgcaacgcggcaacgggctggcggatgtggttcgcggcggactccgactctgacctctcgcgtgggtactgcgcctgcctcgtcgccgcgctggacggggccgaacctgaggacgtcctcgccgtcgaccccgccgatcccgacctcgcgccgctcggggcggggacaacggcggcccggtcgcgggccagcacgtggcataacgtgcttgtcggcatgcagaagcgggcgcgcacggccatcgcggcgcgcgagggtagacaccccgggaagccgtttccgtcgctcgtcatcgcccgcgacggcgccatccgcgcgcagggcagctatgcggaggcccaggtgagctccttcagttcctga

SEQ ID NO: 40180 - DNA, 504 bp, Zea mays
  Peptide Sequence Number=SeqID_83555
atggcggaccccctccgcaatcacggctgtaaggtctccgaccacaccctcgtcctcaacgttcttcggggtctgaacaagcgctggacccaacacgccttcggctccacctcaaggtttctactccaacaactcctagccctcgcacctctctacctcgtcacgccccccctgctcagggacaggggcgtggcagcggacgtggccatgggaaaagcggtcgggggtttggtggtcacaatcagggacacggccacaccgctcctggaccagcgaaggcttacggagggccacaatagcagcatcgcccctaacagcagcaggccttcgtcactgcccctggaccgctcgtgggggtgcctcagctcacacccccgctggcccccatcactactccagcgcagccctatggtgcccagcaacaacaggcgtctgcctcgtttccatggactccgtggcagggagcctaagatcagccgtccctggcccaatccttcaacatga

SEQ ID NO: 40181 - DNA, 78 bp, Zea mays
  Peptide Sequence Number=SeqID_83556
atggaggcacagcccgacaagatctccatcaagcaggatggcaagatgattgacaacgtcaacccacagaacatctga

SEQ ID NO: 40182 - DNA, 372 bp, Zea mays
  Peptide Sequence Number=SeqID_83557
atggcgtcggacatggcagcaaggaggacaagggaggggctggcgcccgcgggggagagagagaggcaccgaggagtggttggccgccgctgggagggaggccggtggcaggcccaggggttggatgttgtgcaaaagccagcacaaaatggtccacaaggtgcttctgtatcaccacaatgtgataacaactatagtacacggaattatggcgtgagaccaagttggaattctcgtcgtggaccacgtggtagttttataccccctatcagaaacaatggaggatcaggtacaacgatctcacgggtcactggtaaaaatgacgagtccatggaagattcaacaaggaaatggtttgcattttcaacttaa

SEQ ID NO: 40183 - DNA, 393 bp, Zea mays
  Peptide Sequence Number=SeqID_83558
atgaggatcgacgagcgtggcatggatggaggggacaggcaagggtggcaaatggatagcaaccggatggtgcaccagcagctcgccacgggaacgggccagggcatagagcggttcgtcggaggaggggactggtggaccgggccacacatgtcgctgatagacgtgggtgggatcgacgaagcaatagggtcgtgcgtggcgcaggcggaggcaatggtgctgcttgcggcgcgaaagagggtaggggaagaggaggaacatcgtcgcatccggcatcgaggtcgggaggtggggcggagcttagtaaccaggggcggagccaacatgggggaaaacatcctcaccaaagacaacatgccaagagatgatgcggtgggtgagaagatctag

SEQ ID NO: 40184 - DNA, 2358 bp, Zea mays
  Peptide Sequence Number=SeqID_83559
atgacgccgttgaggtacgccgcctcacctcacctgcagccgcccttcctgggctacaaatcctccaacgttgatggccgatcaagaacgcggcagcaggccatgatcgccgagcgcagcagcagcagcagcacaagtgggcgaggaggacagctggaggacaggatcagggagcagctcctcaacgccgagctctcgccgtcgtcgtacgacacggcctgggccgccatggttccggcgccggggtcccttgcggcgtcgcggtacccgcagtgcgtggattggatcttgcggaaccagcgcagcgacgggtcgtgggggttggacccttcgctgcgcaaggacgcgctctcgtccacgttggcgtgcgtcctcgcgctcaggacctggggcgtcggggaggagcacgtcgggaaagggctccgcttcatcggacacaactccacctctgtgacggactgcgacaagtgcgacacgccagcagggttcaacgtcatcttccccggcatgctcgagcgcggcattggcatggggctggagatccctctggcccatgcggaccttgacgccatcctccggctgcgtgacacggagctaaaaagcatagctgcttccggaagaagtaaagcttacatgtcctacgtagcagaaggtctgggggacctactggactgggatcaggccgccatggcttaccagaggaagaacgggtccttcttcaactcgccggccacaacggccgcagctgccatccacaacggctacaacaagagagccatcggttacttggatgctctcatcagcgagtctggcagcagctcgtcagtaccggctgtgtatccacggaaggtgcacagccagctccgcatggtggacaccttggagaggatggggatctctcccagcttttcctatgaaataaacgccatacttgacatgacatacagttcgtggctgcgcaatgacgacgagatctcaagcctgaaagtgtgctgtgcagatgcgctagctcaattcagcgaagaatccagtttccacgactccatcgaagcgcatctgaacggcacggaggcgttgctagaactgtacaaggcgtcgcaggttcagatcttggaggaggagccggtcctagagagcatcttttcatggtcaggaaaactgctgaggcgaaaacagtgttccgattccgacgatccggcagaggtagaacatgtgctcaagttcccctcctacgcgaccctggaccggctggagcacaggaggaacatagagcgtttcaagacaggcggcttccagatgctgaaatcagcattccgcgtttctcacgcagatgaggaaattctgacgctggcaaccgacggattccactcctcccaggctgtgtaccaacaagagattgagcagctcaacaggtgggtgaaagaggtgaggctgccggagctggagttcgcgagagtactgcctctgcccatccttttctcggcagcagccaccatgttccccgccgaactgtcggaggctcgcatcgcgtggagcaagagctccgtgctcaccaccatcgtggacgacctgttcgacaccggggactccatggaggagctggagaatctcgtcacgctgttcgacctgtgggacgcgcaccaggaggctggcttctactcggagcgggtggagatcgtcttccgcgccgtctacgacacgtgcaagcatctggtgggcaaggccgcggcggtgcagaaccgcggggtcatggaccacatcgccgacctttgggtggacgtcgtgagggccatgatgcccgaggcggagtggaggatgagcggccgggtgccgtccatggaggagtacctgccgatcggggaggtgtcgttcgcgatcggccccatcgtccccatggccgcctacctggttgggccagagctcccggaggacgtggtggggagcgccgagtacgaggagatgctcagcctcgtcaacctctcggggcgcctcctcaacgacctccagacgtacgagagggagaggaagcaagggaagatcaacagcgtcctgctgctcgccgatccgtcctactgcggctccgtcgaggcggcaacccgggaggtgaggagcgtcatcgaggcctccaggaggaagctgctgaggctggtgctcagagacggggccgcggtgccccgccctgcgaggcagctgttctggaacatgtccaaggtgctccacctgttctacatggacagggacggctactcatctccgctcacgaatgccatcgacgaggtgttgatcaagccgctccagatgggaaggagacgagaagaagatcaactccccggtcgcgtccggtcaaaccaaaactag

SEQ ID NO: 40185 - DNA, 1170 bp, Zea mays
  Peptide Sequence Number=SeqID_83560
atgcctaaagtgctgtcctctactcaaactgcagccaagaccaaaaggactgctgctgtcctatgcctccacaacctaaagactgctgccctccactgcagcaaagaccaacaaggactgttgatgtccttcccaaagacaaaggactgttgttgtccttcccacagaccacaagacttattccaacagcctcgtctttggcttgtggttgtccgcaccaagcactacaacctgaatttcctccttgaccagcgattgtccagccccggggcacctcttgtcctagcccctaaggcaccactggcattggccacaagggcaccacacacatcgtccccacaatgcacctcaagcatcggccctcgagacaccttgagcatcggctcccagggcacctcttgccacgaccctcagggcacctcttgccctagccctcatggcacctggtgcaccgaccccaaaggacctcttgccctagccctcggggcaccttgtgtgtcgtcccttagggtaactcttgccctagccctcagggcacctcaggcatcagcgaacctcttgtgctggccctcgggggcaccttgtgtgtcgtcccttagggtacctcttgccctagccctcaaagcacctcaagcatcggcccctagggtaccacttgccccaatccttagggcaaatcgtgcgctagccctcaagcctcagggcaactcgtgcatcggccctcagagcacctcgcatatggtcacactagcccattcgactggtcaaaaagggatccaaaagacccttaagcgcatgtgcaaggacttctatatcccaggcgatcgagttctcgtccgcgactttgttcatgcgtgtgtcacatatggttggcgtcaagctcctcctgagcacaacattccaaaccagattgatggccagccggaggtcgtcaacaaggctcaacagtacgccaagtgttactacgagtctaagacaactaacatcatgagctccagttcaaggtccgcaattgagtctgactctgccttctccatcgcccaacacaaacttgggcctcgctatgctagcccctttcaggtgttggagcgtgttgggcagggcctgaccaccgatgacgctacttgggagcagctaaacaacttcaagaacctctacctagacgtttag

SEQ ID NO: 40186 - DNA, 660 bp, Zea mays
  Peptide Sequence Number=SeqID_83561
atggcgtcggacatggcagcaaggaggacaagggaggggctggcgcccgcgggggagagagagaggcaccgaggagtggggttggatgttgtgcaaaagccagcacaaaatggtccacaaggtgcttctgtatcaccacaatgtgataacaactatagtacacggaattatggcgtgagaccaagttggaattctcgtcgtggaccacgtggtagttttataccccctatcagaaacaatggaggatcagtattgaaatgctttgtgctcctgatgggaacaggcaaaaccatgattggaaaggcaatagctggtgaagccaaggcaacatttttctacatatctgctagttcactaacaagcaaatgggccacactggtgagctccaccaaggccatccgcagccgtgggtgctgcaacagggcaaggctcgtcggagttgtggcgtgggtgtcaaactgcgtccttgacgtggagctgcgattcaaactgcgatatggacctggacacatagctgtgttgctgtcgcctggacgtgtcagctggaccagcgacactcactgtgaggtcaggctagcggaagcgatgcaagccgtggctggatgtcatgctggagccagtagcggtggcagtgctgcacaacaaggaaagcgtggttaa

SEQ ID NO: 40187 - DNA, 249 bp, Zea mays
  Peptide Sequence Number=SeqID_83562
atggcggtggccgagaattttagtggggacgtgcggcggtcggaggaggaagaagagtactggcgcggtggcttggtgtccagcgccgtggcaattgctccgacgatcaacggggagccactaaggcttacgacgatgcggtggaaagttagagccacgcggcggacgccgatgtctgagaacaggcgcagaggtgcgaggcgtgctcagccagagcagcaggcaccccaagaggaggcaaccccgtag

SEQ ID NO: 40188 - DNA, 543 bp, Zea mays
  Peptide Sequence Number=SeqID_83563
atgcccggctcgatcgcgcgtaggcgtagcgatgaaggccgcgtaggtgtagtgacgaagggcacactagcttgcccgctcgcgccttcaactgctttttggccggtccaaggattggactgtggcaaaccggtcgccgccgccgtcgacgccaccagacttctcttgtgctgctgctgggtgcggtcgcgagcacgcgctggtggtggacgacggatggatgaacggatgcacgcgcgcgcggcctactggcggctgcctccgtatgctgagcgagcaagtgggagaggagagggctctggcggcgcttgggaagagcaggagagagggtgggagagagcagggtggcggctagggcagccagggagcgacggccagagggaggggcgggggcggccgcggccgggggcggaggggcggccgggcgtgggagaggcgggcgcgggagaggcggccggcgcgcgtggagacagagacattgagaaagcaagttatcttggcttctttgaagctagttatctgaagattgatcctacgtcgtga

SEQ ID NO: 40189 - DNA, 453 bp, Zea mays
  Peptide Sequence Number=SeqID_83564
atgaagctggagaacgtgatccagctcaacctgtctctcgggatgaagcctctgaagctggggacatcctcgatgaaagaacacaccgagagcgccgcaactcccgccactgtgatcactgtaatgctcaggagcgcgatcgggaatgtcacacccggttttagaaggcaaaccgaatgcgaagcatggcgacatgacggactcaaccgtgggcacaacgccgacgcgggggcaccagagggcgtgaaccatggtggagcggcccaacggtggagcggacttgctctggcgagcaatcgcgcgaaggatagggcaacaaacggggaaataagggcatggggggattgctcacctcgagaggaaactctggagcaccgaagcaatagcagggacgcagggatgcctcgggtcgatggtggcggggcttcggctgcatggggaaagctcaggtga

SEQ ID NO: 40190 - DNA, 669 bp, Zea mays
  Peptide Sequence Number=SeqID_83565
atgggcgctgcctccactcttccctggatgaagaggacatccgggaagaaggagcttagattggtgtgtaccccctcgacctcccttgaggacagagcggtcggggtgatcactggtgatgctctctgggtcttgttaggccctggagcattcatctctctctgtcaagtgatccacgtccactcccaagtgggcgaggtgaaaaacaaagttcgacgtgctggagaagtcttagctgaccgagccgcagccgtcagggcgtttctgggcatggtcttgtgcaggaccacacccctttgcttcgtcggtaggattcttgctcgtgcagttcgcgatttccctgtggccgtctttggcgatactagggaagatttttcctgggtgggaccgctatgcggtgcagggttccctcctgtctgcaatgcaggagatgcttccgaagcagaagatcgcttctggattgaaggtgatcatgctcttgaagcagaccgtctccctacatatctagaatcttcctcaatcgtccgttcgagttaccactgggagtttagcctatcaggtgatcgcaaccgctctgcccgatatgctcgtgctcccgtagcgcttaactcgggtgttggtcttcgccggcttagattgggcttgcttggcctagttgcactcggctga

SEQ ID NO: 40191 - DNA, 303 bp, Zea mays
  Peptide Sequence Number=SeqID_83566
atgaagctgtggaaggagacttccaggagttccaagactatgacgagttctaggtgtgggttagcggcaacccccagtcggctgcctgtgaaggccgcgtttatctacgtttcttttccgcactttgatttattactcagctcttacattgacctaacggacttattcggctggttaaccgccacagctattcggactgctacaaaatactgtagaaaccgtagtcttagctacaaccaaattaaaaccgcaacaaacaagtacaagatccatgtatcagtagcaagaattaaccccggatag

SEQ ID NO: 40192 - DNA, 993 bp, Zea mays
  Peptide Sequence Number=SeqID_83567
gaccctcccgtggtcaccccgcgtgagacgtggaagttcgggtccacccgtgagggaaaacggaactccccgaagtcctgggagggggtctcctcggccgagccccgcaccccctcgcggcctagccgtggccggtcggcaccctaccgcgcccagctccggctggcgctgttggctgcctggccggccgtgaagtgcttgcgtgctgctacccgtcccacgggaagccgtgctcgatacacgttgccttcgtcgagctcaccccccggggtgcggctcgtcggctcgagagcgcccgcggcgtttgcctcgtgccgccgtcggcctatggccggcggcaccgaggacacctcgctggcgcttttggtctcggatgtggctcacgctgaaggccggagacgcgttggcgtcacgcgcccaagaatcggtccgcccgaacgaacgacggccagcccggcacgacgcctccgcgcggaggccggcgctggcccgtctgcgaggacgtgctacctggttgatcctgccagtagtcatatgcttgtctcaaagattaagccatgcatgtgcaacgtcccggcgcgcggccggccattcggccctaaggacccatcgagcgaccgagcttgccctcggaccgcgaccccagaggcgtcctcagcgacggaccgggcccaagttctctggaaagggacgcctgggagggtgagagccccgtccggcccggaccctgtcgcaccacgaggcgccgtcaacgagtcgggttgtttgggaatgcagcccaaatcgggcgggttcgagttggagcacgcctgtcgggacccgaaagatggtgaactatgcctgagcggggcgaagccagaggaaactctggtggaggctcgaagcgatactgacgatagctggagcccacacgagttctatcgggtaaagccaatgattagaggcatcgggggcgcaacgccctcgacctattctcaaactttaaataggtag

SEQ ID NO: 40193 - DNA, 435 bp, Zea mays
  Peptide Sequence Number=SeqID_83568
atgggcaagaacaacaagcgcaagcgtgagccaactcctccatcgaaggattttggtgactcggagtactcagaagaggagttctcctctgagtctgaggggtctccggctcccatcccccggcgtgagtcgtctgacaacacagacgactcccaggggctcgcggcggaggcctggacgtacatccgggccgtcgagcgctccgggctcgagggctcggatgagtcagagtactcctcggatgaggaggactcggacgacggcggcgaggacgaggacggcgatgacgacgacgacgacgacgacgacgaaggcggtggcggcggtgacggtgacggcagcggcaggggcggcggcagcggcagcaaggacggtgacggcggcggcagcggcggcggcggcagcagcaaaggcagcaacagggccagtggctag

SEQ ID NO: 40194 - DNA, 591 bp, Zea mays
  Peptide Sequence Number=SeqID_83569
atgtcgatctgctttgctggttgtccctccccaggcccacgaaagaatgaccttacgatttattgggcccttgggcctttcgtgaggtcttttactcttttagtggacccgggggatatctatccccccacagtgacatcattacttgtttaccggggcgagccagatgggacgccgcccaaggtcgggcgacgcggtgactcctccgaggtcgaggctgagtccgagccctggggtcgggcgaggcggagaccgttttccgaggtcaaggttgagtccaagccctggggtcgggcgaggcggagaccgtcttccggggtcgaggttgagtccgagccctggggtcgggcgaggtggagaccgtcttccggggtcgaggttgagtccgagccctggggtcgggcgaggcggagaccgtcttccaaggtcgaggcggggggcgagccctggggtcgggcgaggcggagcttcctatggcgtctgaggctggactcggctgctgtcagcctcaccctggcgggtggcacagcagtcggagcagggcaggcggcgctgttttcctgtcaggtcagtgtcacacccggattttag

SEQ ID NO: 40195 - DNA, 396 bp, Zea mays
  Peptide Sequence Number=SeqID_83570
atgacgggagtgaggacctgccggtgcgctttggggcggccggcgctcgctggtgcggtgttggtggacgccgccgtcggtgctgacgtggtggcagctggagaaagcttccccgtcgacaagctcatcagcgctacccgcggaccgacctccggctctttggttttaatgtctggtatcttcggactcaagtcggtatcacagcaggagaagaccaaaataatacgaaggttgatacagcgccgaagatgtgaacagtacccccgtactgttcacgctgatttggcattcacttttgcgtcacacctgtactttcatctccttcaagctgaagcatttgagaacaagtccccaacattggcgcccacctccggtgaactcacttccactctttga

SEQ ID NO: 40196 - DNA, 627 bp, Zea mays
  Peptide Sequence Number=SeqID_83571
atgactctgggtcaaggctccgtccactcaagggacacgatctcgcttcgcccgagcccagcctcgggcagggacagtagacccaggcagattcacgcctcgcccgagggcctcctcaagcaacaggcgcaccttcgacttgtccgaggcccagctcaggcaggcttcacggaaaacagtgccgcttgccctactccgactgctgtgccacccgccagggtgaggctgacagcagccgagtccagcctcaggcgccataggaagctccgcctcgaccttggaagacggtctccgcctcgcccgaccctagggctcggactcaacctcgaccccggaagacggtctctgcctcgcccgaccccagggctcggactcaacctcgaccccggaagatggtctccgcctcgcccgaccccagggctcggactcaacctcaactccggaagacggtctccgcctcgcccgaccccagggctcggactcaatctcgacctcggaagacggtctccgcctcgcccgaccccagggctcagactcagcctcaacctcggaggagtcaccgcctcacctgaccttgggctcggaccaaccatgttacaagggggtacatcattaccctacccctag

SEQ ID NO: 40197 - DNA, 357 bp, Zea mays
  Peptide Sequence Number=SeqID_83572
atgaagttgttggcgggcgaacgcgagcttcacggaggcgcccaacaacttcgcccgttcgcgaagaacgcgtgcagagtgaggctgacagcagctaagtccagcctcgggcgccataggaagctccgcctcacccgaccccagggctcggcccccgtcttggcctcggaagatggacttcgcctcgcccgaccccagggctcggactcaaccacgactcagaagacgatggactccgcctcgcccgaccccagggctcggacacagcctcggcttcgaaagacggtctccgcctcgcccgaccccagggctcgggctcaacctcgacgctcgacgacgaactctgccctcgcctga

SEQ ID NO: 40198 - DNA, 270 bp, Zea mays
  Peptide Sequence Number=SeqID_83573
atggcgaagctccctggcccagatccgaggcccgaacggcaacacaaacgaggtcccgcggtggagtccattttctctcgtcctcggtccgcggcggactggatggtggcccgacgcactccccctttggatggctcagagggtggcggggcttgcttatctacccaagggacaccagtaaaggttgatcttttcctttttttggccttggtctcattgattcgagatgtaattgtggacattactccacaactcatcacactcacttaa

SEQ ID NO: 40199 - DNA, 387 bp, Zea mays
  Peptide Sequence Number=SeqID_83574
atgccgtgccttctcgactgtggaaccggtgccgcgactcgaggcaaccctgcgcatggcccaacagtgccaaccaagcacatcggtcacatgtcagtcagccgcgggaaaaggcgcgacggtcgatatggccaaaagtgggccggcagtaatggcagcgggaccgggaagggggatactccgaaagggatccttctctgcgaaggaagcgggccccgagcccccactactaatcagaggttcgaaggctggcccctcggaagggttcgacagcagcctcagagcactcgggctccgcgcccactactggttagaggttcgaaggctggcccctcggaagggttcgacagccacctcaggccactcgggctctgcgcccactactga

SEQ ID NO: 40200 - DNA, 762 bp, Zea mays
  Peptide Sequence Number=SeqID_83575
atggggagcgcccgtgttgctttcgtcttgctgctgttggaggagcgcaacttcatggaggttggcacctttcagccatcgctcggcttcaaggattttcatcaggcagcccggctgcatcccctcaccaatgctagctctggcgcagcttccggtgccacctcccaccgctgggcggagtgtggctatctgcccgccgtacgggcggctgttgcgccgcgcgcaccgggggacgtccaagacgtcacgcgctgccagggcggcgttcgtgttcttgggctatcctgccctcgctccggcacgacgcctccgtgtggaggtcggtgctcgctcattcgggaggactcgagtggggatctgccggtgggcaggtggccaccgtcgtcggtactgaggtggtggccgccggagaaggcctcgccaccgacgagatcgtcggcgccatcagcgctccgggcctccggctctttggctttgatagcttgtcctcgcccctcgagtggggacgtgggcgagggccttgtcgcagcagcgtctgccctgaggtcatcgctgctgctgtttggccgcctggagcggaggttgttgtcgctgctgcagtggtcggcgacgagccacccggagcttgtcgtcccacaggccctccgatgtgggggttgttcgcacctgcgggagtggaaccggagttccgtttgtaatggcaccttgagtgccggtgtctgttcattgtggctatcggggcctgaacatctaggtatttga

SEQ ID NO: 40201 - DNA, 534 bp, Zea mays
  Peptide Sequence Number=SeqID_83576
atggacacaaactcaagtggacgtggtgttcgacaattcaaaacatacctattgcatatattggaaaaagggaacctagaggattttgggttcatccaatactttgatcctgaggatgcttctgatgcaaagtaccatatggatggaaagatgctgcttggaagggaaattgctgttgtttttgcagaggaaaacaggaagaagcctgctgacatgagggccagggaaaaaaagcattttaagaggcaaaagctaatttactcgtgcaatttttacttatgtagtggcagaggccattcttatgatgggaggttgcgctcaaggtcacctgggttgaacgattctcctggggtagatcacggtcccaaagccgaagctactcgccagcacttaagcgaaagaactattcaaggatatctgaacatgtactatgtattgggtattccaaaatctctgatgagtgaagtgggttgtgaaccaatgaaccttgatgttggacgtgctgaccagtgcgcaggtgcctatgtggtgtga

SEQ ID NO: 40202 - DNA, 336 bp, Zea mays
  Peptide Sequence Number=SeqID_83577
atgtcggagagaaaattctccggccggcccaagggaggcacgtacaaggatgttgagcctcgacatgtgggtccaggagcaaaatggagggaatacattataggagtaactaattatgggcgtgtcgcctaccagtggaatagacaggcacgccgcctacggaacggactggtcacctcctgccagcggaatggacagggctcattaaatgcggaggcggcacatcgcctgccagtggaatggacaggactcaataaatgccaaggcggcacatcgccttccagtggaatggacaggcggtgcgccttgtccgcaataaatgcagaggccgcgtag

SEQ ID NO: 40203 - DNA, 492 bp, Zea mays
  Peptide Sequence Number=SeqID_83578
atggtccagatcatcgagcaccatgacttcgttctcgaggacttcccgatggaggaagaaactgcgtattccacgccacgggccaccaaccgccctgcgcctggtgctgctgctgctgctgtgtactctgcggggcagcacactcctgtgcagacatctggagcatcaagggctgcgcctggggcgctgtctgcagctagggagttgctgcgccaccctcctagctccatggcctcgccaggggccatgaagcagtggcatgacgatgtcgaccgtctgctcggcatggctcattctagctcagccagacccaggcctcggtcatcccggcgtcggcattgcggagcaacgactacttctcgtgcaacggtcgactgcaacgcatttaatgcgcacctgtacgcgcaaaggacagaggacgcgcagaaggcgcaccagacagtctacaggacctgtccggtgcaccaccggacagcccagaggacccactag

SEQ ID NO: 40204 - DNA, 1377 bp, Zea mays
  Peptide Sequence Number=SeqID_83579
atggactccgaccaggagtccgtcgacgactgggtcgtcctcgcctcgtcctccgacgacgatgagcgagtcatcgcgctctcgtccggctcctgctccgactccgagcccgatcacgccgccggatcccccaacctcctccccgcctccattgaccccgacgacgccgagggcttgtatgcgctgtcggacgccgaggacaccgacgcgtccctgcagccttccccgctgctgcccaacccgctctcgggactcttgcaccacacgctggccggggacgtcgcctactccgccttcgacccggtgcctcccgccgccaagcagctggtcccggacaccaccttcgccgccttctttcccgagcccgtcgccgcgctcgcctccacccgcggcctcgtctgcctccgcggcgcctgctccgccgcctactacgtcgccaacccggccaccttcgccagcgagcgcctcccggcccccgcccgcgaccaccgcgcccacggcgaccccgccgtcgtcatcgccttcgacctcgacctcgaccccgacccctgcgacgccgaccccgagcgcgccgagtctgagggcgaggggttctaccgccactaccacgtcgtcgtcgcgttccccgtcggggaaggcatctacgctttcgagtccttctcgtccagggcctgggcgtgggcaaccggaagcggggtcgccgacgctgaggccgtcctgccaggctccggggtcggcgcgctcggctgcgcgttctggcgcaccaccatgggcctgttcctctgctacgaccccgtctcgcgccgcgcggacctcgtccccgcgcccgccgaggtcatgcagtggccctactgggagcttggcgagatggacggcacgctctgcgtcacttgcatgggcgcccgcgtcgacgccgtcgtcgtcatccgcctcgacatcgtgagcggcgccatcaactggactctggcggggtatttcgagggcggctgcctcaggggacgcaaggacgtcacgctgctccgctcgcagggtaaggcggaggtcgtcatgtgggaccccagctccgagacggtggtggccatggacatcgagggccgcactacacgcgtcatcaggttcatccctggcagcggctactatgccgatttcatcccctacgtcagctcgttggccgccgtctctcgctccggcttttggccaccaaaagctgctgcggactgccaaacactcagcttttcaggcagcttctataaaattcgtttggcagaagggaggctcatgctgagcgttcgacttctgctacaaataatgacttcatggctacggctgttgatgctgaggcatactaactacactggtggtacaaagctggaatag

SEQ ID NO: 40205 - DNA, 435 bp, Zea mays
  Peptide Sequence Number=SeqID_83580
atgggcaagagcaagaaaggtggcagctcttcacatcactcgggcgacaagcgcaagcgcgagccgactcctccctcggtggacttcggcgactcggaatactcggaagaggagttctcctccgagtccgagggctctccagctcatgcctctcccccagcgtcgtctgatgattcagacgactcccaggggatcgccgcggaggtatggacctacatgcgggccgttgagcgtgccgggctcgagggctcggatgagtcggaatactccttggatgaggaggattcctccgactcgttcgaggagggcagcggcggcgacggcggtgacggtgacgacgacggaggcgacggtgacggtggcagcggcagcggcaagggcggcggcggcgacggcggcagcggcagcaagggcagcaacaaggccagtggctag

SEQ ID NO: 40206 - DNA, 1854 bp, Zea mays
  Peptide Sequence Number=SeqID_83581
atggaatctctatttgtaggcttgtctcataacaagccaaaaaattcggtggcaaccgcaatagttcgagaagttttatctcatgactggttgctcctagactatatttgcacgcaaggtgatcttgctctcatcgattttattaaggaaatcccttgtgaaccaagggtagaagtcgtgcttattgatgatgcctttgttgaaaggaagtggatggagtgtttatttcagccgaacgcatatttaggtgacgaggttatagactgttacataaatttgataaaagctcaaaagcatctaaagtgccgatctagaggtcgcgttcacatagaaaatgctttccagttcaatttcctgaagcgagatggtgatgttgaaattaaaacagaagagctatatccaaataaagacatgacacaaatatgtagcgttgaacgaagggttttactttacttagaccatgacatggtgtttattccgataaacatccgagagacgcactgctatcttgttgtgatccatgcaagaaatatggagatacaagtgctcgattcacttggtacttcacaagaccacaaagacctcactgactctattaaaggactgcaaagacaaatagatatgatatctcaacgtaaggagttaaaagaccacaagtggccagacctccaagttacttcttggctgctcagagaaatagacatgggatatgcaaagcagacagataggatgacatgtcacactttaggaaaaaaaatggctgctatattactattttcagacctgaataagagaagggggtgtctgttatacaaaaatgaaaaagaagttgactctggaagcccattagatgttgagatattagaaaacccaacatattctaataagaggaaactactccacatgcttgatgatagcgaagtagtgcatgaagatgaggaaggccctattactcaagcagacttgcaaaggtggtttgttgatgattgggataaaagagctcctataaaagtctctaccgatgggtgcacaaatgactttttaatggttggtctttccacaaaggacatgccagtgaccaaagccgattcaatagatgttttatgtgattatatcatggcaatagaagacgatacgacactagagagaacatgggtgcgaagtttcaatccttttaagatagaaatatctgtcaaagacttgcaaaatatattaacgataaatcaagatatgattctaagatgttttgatatggctgttcggctgcttgccaataaagagtcacgtaggccgaaagaagaaatcataaataataaaaagcattatatggacatgcgtttttggagaatgattggttatggtaaacttccaaagtaccatcaggatcctacaacagaagagttagccaaaacactcggttgttggccatcaatgaattattgtatcacgggttgtagatatgttcttatgccatggaaattcaatggatgtcacgccctttttgtaatagatcatgttaaaaagcatgtgacttttatcgactttacaccgactcaagattggtgtaaacacatgccatacagaggttcgcggaagcgatatcatggcctcaaaaaaaatataagattgcttacagcaagaaacgttctgatgggcggaggatatcttaagtgggaacatacaattcagactggtgttccaattgacttaagagggtttaataccagctacctcgttctacaagctatggccatgtgggggaatgacagacgactgaaatttgttggggatgcaaagactcttcgaaagaactttgtgattgatctgttaagttatgaggataattcgtgctga

SEQ ID NO: 40207 - DNA, 135 bp, Zea mays
  Peptide Sequence Number=SeqID_83582
atggctggctgggtgattggattctcagctccggcggtcttgccgccgcacgacgagcaagccactgtggaatctgaggttgagcaagtagagatagctgagcaggagctcattgaaggcaagttgtgcccttga

SEQ ID NO: 40208 - DNA, 78 bp, Zea mays
  Peptide Sequence Number=SeqID_83583
atggcgcagagggtcgtcttctttgtagcagacatagatctcgcctctcgaggagaagagatcctaagggggttttaa

SEQ ID NO: 40209 - DNA, 696 bp, Zea mays
  Peptide Sequence Number=SeqID_83584
atgcccgaaggattcggccccgaggcttccaggtgggagatttggtgcttcggctacgacaagacgcccaagggcgccacaagcttactcctccctgggaaggtgccaaaggttcaactcaaagccaatacaaagactaaaaagggtttaagaagaaaggagcaaaggaaaccgaagtgctccctggtctggcgcaccggactgtccggtgtgccaccggacagtgtccggtgcaccaaggaagatcgacttcaaactcttcaccttcgggtttctcaggtgcacctccgctataattcaccggactattcggtgggccaccggactgtctggtgcgccagcggagcaacggtcatctgcgcgcaacggtcgactctaacagtgaacagcgcaaaaagaacgaaagatgatacatatcaaaagctcaaagaagaaaatgagaggctaaaaatgagcttgacacaactaaaagggaagtgcattgctcaaccttctcaagataaccgtgatcacatggtgaagaagcttgagaagggaacaaccgtggcatgcactaattcccttgaagaaaatgtcaaggacttgaggattgccaagaggaaggaacaaaagaagaaaatcaatacctcttccaaaagcctcaaccacgcctccataaaaggagaaagagatgatatgaagctttggggtacttga

SEQ ID NO: 40210 - DNA, 516 bp, Zea mays
  Peptide Sequence Number=SeqID_83585
atggagcacgcggggtgccatcattacttgttttaccggggtgagccagatgggacgctggtcaggcgaggcgatggctcctccgaggtcgaggctgagtccaaacctgggggtcgggcgaggcggagaccgttgtccgaggtcgaggtcgagtccgagccttggggtcgggcgaggccgagaccgtcttccagaggtgaggtcgagtccgagccccagggttgggcgaggcggagaccgtcttccggagtcgaggttgagtccgagcccgggggtcgggcgaggcgaagatcgtctttcggagtagaggttgagtccgagccctggggtcgggcgaggcggagattcctatggcacccgaggctggacttggctgctgtcagcctcaccctggcgggtggcacagcagtcggagcggcgcaggaggcgctgctttcctgtcaggtcagtcagtggaggggcgaagtgactgcggtcacttcggccttgtcgactggagagcacgcgtcaggataa

SEQ ID NO: 40211 - DNA, 303 bp, Zea mays
  Peptide Sequence Number=SeqID_83586
atggcgccaagccaggtttcagaagtgtcagcatgggcatgcagcgggactagtaagcgtcacccctctctcactggtttggcactggactttggaaccatctgcaggcatgtggtacagaatccagatagatataagaaggccgttaggggtgtagtacaattgaagaccatctatctactgacgctgatggatgaaaaagtccatctagggcttgttcggttctacctcaatcagtatggattgagtgggatagaggagatttcaatccctagtatttatgcaattcgttacactgcgtaa

SEQ ID NO: 40212 - DNA, 573 bp, Zea mays
  Peptide Sequence Number=SeqID_83587
atgctgcgcgggggcacgggcatgctgggggttgtcaacttcataaccttcctgatctcgatcccgatccttggcggcggcatctggctggcgtcgcgggccaactccaccgactgcatccgcttcctgcagtggcccatcatcgtggtggggctcgtcctcatggtcgtctccctcatgggcttcgccggcgcctgctaccgccagacctggctgctccgcctctacctcttcgccatgttcttcgtcgtcctcgcgctcctcttcttcgtcgtcttcgccttcgccgtcaccgaccgcggcgccggccaggtcgtcatgagccgccgcttccccgagtaccagctctccgactacggcggatggctccgcgaccgcgtcgccgacccgcagtactgggccaccatcagcgcctgcctccgcgacggccacgcctgcgccggcatgaggcgcctcgcgcgggaccccaacacgggcatgctcgtgccggagacgcccgccatgttctacggccgcaacctctccccgattcaggtctcttcctcgcttcgcacccttgctttacatgcctag

SEQ ID NO: 40213 - DNA, 228 bp, Zea mays
  Peptide Sequence Number=SeqID_83588
atggggccggggattgatttggagggttcacggatgtcctcgtcctccctcaccgccgatgacctcctcagacgggtagcgggcatggtggggaggttggacgctgggaaggatggacttgccttcgtcgaagctttcctggcacaagaggttaatctcggaggggtcgggctcttgcccctcttccggagctataagttccagaggatccgatccctcttccgctaa

SEQ ID NO: 40214 - DNA, 1050 bp, Zea mays
  Peptide Sequence Number=SeqID_83589
atgaccgccatcgcagcaaaatcatcccgagggcctccctacactgaccactcccctactgcccttgcccctttcgggtaccagggtgatcttcagatgactcgtgacctcacgctagtcgtagcaatacagacaaacatctgcaccaccggacaaggcaaccaaacgcccccttacactctcggtggccagtggcctggtctgttcggctccgagcctccgatttatcgattcgattccatcatccctctcccggcgccctgccgtcctgcgggagggaggtgcaagcggaaccagcccggcaatggcaggcgcgggtgggtcccgcgcacgcgcttgtttccaggagcggcccgcgcacgcgtatctgacccgcggggttctcctctcctccctctcgcagctgcgcggcggccgggggcgaagcccaggggcggcggcggcgcggggaagaggagcgcgtggttggcggcggacggcagcaagcgctggggggaggccttcttcctgctctacacgcccttctggctcacgctctgcctcggtgtcgtcgtcccattcaagctctacgaggtgctcctccatctcgtcaccatcgtcttgtgtagccagccgcatgattctcggttggttgttggccggtccatggatcgggttctcgattggatcttggacgacaggttcacggagctggagtacctgatccttggcttggtgtccaccgtcccggcgttcgtcatccccctattcctcgtagggaagttcccgtactatgaattcgttgaccgggatataatgtacaaagtaggttccttgttctacgcaatatacttcatcgtcagcttcccaatgttttcaaggattgacgagaaagacgagaagtggagcctgtccagggtagccgtcgactctctgggcgcagcaatgctggtgacgataatactggacctatggcgcatatttctggggccaatagttcccgtcccagagtcgaggcagtgtggccaaccagggctcgcatggttccaagcgcagaacggaagcacctga

SEQ ID NO: 40215 - DNA, 855 bp, Zea mays
  Peptide Sequence Number=SeqID_83590
atggaagactcctgggttattaggacatcctattgctcaggggaagaaggattccctcacctcttacggagttgcgcgctacgcatggggatccgtaagaagcccgaatatgtctggaaggaataccacgataatggtatagaaaagtgctctatggtagtctacctgggagaaagccgaaactacccaaaccaccctcccttccaagtcaacttcaccggacaccacttcccagacatttgccaaggtgtagcccgaaaagaccttaaacagctatgccaaaactacatccaagagatctctgaaaccccccttcgttatttcccacccagcaacaaaaatacccccacctggaggaaaagacttcaggctctgtcagggagagatcccaccgaggatgaccccaccattgtctacatggccggatacctccacaccctcgacaaccactacgatgacctctcctcccactgcacccacctaaactcccgggtggaaagcctagagcggcaagtcagagaacttaagcaagagaaggcatccctccaagagtgtctcgacatagcagaaggcgaggaggccaacacccgtgaggcttatcgaaccttaaagatggactatgacaagaagctaaagaagctcgcccccaaaaagaaaatccagaagaagaccaccaaccaaggatgtcaaacggagaagaagaagaagacccctccagccccacctccccccagggtagatgattggtccgacgccgaggatctatccctagcaagccttgatgatcttctcaaggagtttggggacaccttagagaaggagttcggtagtacctcggggaacgctctcgtgtag

SEQ ID NO: 40216 - DNA, 801 bp, Zea mays
  Peptide Sequence Number=SeqID_83591
atggctacagtacgaggacgaggactctgtcatcaaaagcagatgggaacccagggtcgggacctagtcctatggcaagtaccaaacctagaagggctccacaacgctcccccagctaggaaggatccttcaagtactcaaaggtaccttacaaaaagaaaaagtattacatccgccttcaagcggaatcctagttccatctctactctgcagcctcaccagcggcagcaaccacctctgcaatgggcagcccccgccagcggaggcgaccacctcagcgccgacaacagcggccacctctgcaccggtggcttaccggcgacgacggacgcctcagcgcgtgcagaaaggtcctcgtccccgtcctcctgcgggggtgaggacaagaccatccaagagcgtggccgccacctccacggcgtacgacatcttgtacaaccccccctgggtggtgtcggaacagcgtggccggcagcgcaggggacgctacgggtgcggcggacctgtgcacggcacgaccgtcgcccgtgcggtggacagacagccacgtcccacttgacggcgggaggcagcattggaggtggcaccaaagccatccaggccaaggagccagacacgcggcagctgacggcgcctgcagccggccgaccccgcgtagctgaggttcgcctcctccgcaaggctggtgaacatccttctcctccaaatgctggaggaagaagcgggtcaccaacccatgtggagggcagggcctcgactcggctcgccttccaccccagcgaggatgatgaacacccttga

SEQ ID NO: 40217 - DNA, 1485 bp, Zea mays
  Peptide Sequence Number=SeqID_83592
atggctaccacccaggaggtcgatccctttttaaaggcgactctccccgctcgcgtcctcagccgtcgcggactaagtcttcaccaacacgctccaaggtcctcccctacggcatgggggctgggccccacgcgtcatgcaagctggcccagaacaaaagaggccaaaccgccacgcgtggagcgtgtaaccgcccagcggttacaagcatccctccgtcttcgcccaaaccagcgggtgaaagggcggaccgccatgcaggcggcatgcaactgcaccaagggggcgcaccctttcgacttcgacgcatccagcatggaggcccaggcccacacgtcatgtaatcggcgcgctagttactacatgcaaaaaactgcagcgccacttgcgccaacgccgtgccttctcgactacggaaccggtgccgcgactcgaggcaaccctgcgcatgggccagcagtgccaaccaggcacgtcggtcacgggccagtcagccgtgggagaaggcgcgatggtcagtatggccagaagtgggccggcagtaatggcggcggcaggcgggcggaagcagcagtcaaatcatctgcaagctcacgtcccctcctagaacagcgagagagccctctcccacagcgtgaagacgacgcgcccggcagacgacacctttggcaggcgaagcgggcgacgcttcacctcctccataatgaccgcgtcaaaaaagggaccgggaaaggggatactccgaaagggatccttctccgcgaaggaagcgggcctcgagcccccctactgatcagaggttcgaaggctggcccctcggaagggttcgacagccgcctcagagcattcgggctccgcgcccactactggtcagaggttcgaaggctggccccttggaagggttcaactgccgcctcaggccactcgggctccgcgcccactactgatcaggggttcgtaggctggccccctgaagggttcgacagtcgcctcagagcacacagagcaagggatgactctgggtacgttcgatacataaccaaggctcaggctacgctcccgagtcgacaaggccgaagtgaccgcagtcacttcgcccctccactgactgacctgacaggaaagcagcgccgcctgcgctgctccgactgctgtgccacccgccaggggctcggactcaacctcgactccggaagacgatctccgcctcgcccgacccctgggctcggactcaacctcgactccggaagacggtctctgcctcgcccgaccctggggctcggactcgacctcacctccggaagacggcctccgcctcgcccgaccccagggctcggactcgacctcgacctcggacaacggtctccgcctcgcccgaccctcgggttcggactcagcctcgacctcggaggagccaccgcctcgcctgaccttgggatcggaccgaccacgccacaaggggggccatcattaccctacccctag

SEQ ID NO: 40218 - DNA, 750 bp, Zea mays
  Peptide Sequence Number=SeqID_83593
atggggagctcccgcgttgtcttcgtcttgttgtggaaggagcgcaaccttatggaggttggtacctttcagccatcgctcggcttcaaggattttcgtcgtgcggcccggctgcgttcccccaccaattggcagtttggtggagagaagcgagccgggctgcggcctccgccctgccctcagcttcaaggattttcttcatccgggctgaggcggaggagcgcaccgagtggggggttgcctctgcgtgggccggtaacccttttcttcccccagcgtttgggggagaaaggcatcctccagccccgcggaggcttccctcagccatgcgggggaaggcgaactgctgcttcctggacagggtgcagcgttccgtccttcgtccgagcggtggtcgcgccgcgtacgagccggccacgtccgggtcttcctcgcgtcgatagccatgccagaaggttgcccagcatgtcacacgccgcgagggcggtgctcatgttctggggcggcctcggcgagggcgggagtgaggacctgccggtgcgctttggggtggccggcgcccgctggtgcggtgttggcggacaggtggacgctgccgtcggtgctgtggtggcagcagccggagaaggtttctctaccgatgagatctccaactccgcctgcacccctggacctccgtctccctggcttgaatggctggagcgagcggcggtgagccgctgggagttcgtcgtcccacgagccccctag

SEQ ID NO: 40219 - DNA, 2712 bp, Zea mays
  Peptide Sequence Number=SeqID_83594
atggaagatagtaatgccctgattttgccctgcaaaaggaagaacaaggcgcaagtgaaagccaaggatggtaagaaagccaagaaggaagacccaaagatgagcaagacgaagctcaaaaagctgcaaaaattggaggtgcaccacttagcattgccaattggaagcacaagatctcagaggatgcatattcactgcttcatgcttcagggactattggtcaactctattctactgcaggctgagactttgaaagaaaaacggaggcgtgctgtgcaattctcaaaggctggcctggatgttcctgaagaactctcactgttcaagaaaagcggtggtacgaaagttcctgaaaacagtgatgttggggagcaagtttccccattaaagtttgttgagccagcaccaattgtggattctggtagagaatgtaataacaaaatgaaggatctagtgaaagctattgaatgccaaccgattatgggttttggagctggcattccagagccagaaactgaagagcctagtgatgatgctcatatgttgacaaatcagaaaattcagttgtcaattccaagttgttctggagcagaattagatttgcagggtaaagaactaggacaagggcagcattctgtacaggagtgcataaatcctccaattgttgtacctgtgtcaagactgcatgaagttgagaaggcaaggagggatctcccaataataatgatggagcaagaaataatggaagctatctatgaaaattctgtagtaattctgtgcggagagactggctgcggtaaaactacccaggttccccagttcctatacgaagctggcttcggcactagtgaccgagctgatagaaaagggatgattggtatcacacaaccacggcgcgtagctgttcatgccacagctaagagggtttcctatgagttaggacttaagctgggaagagaagttggttttcaagttaggcatgatagaaagggtgattttctgttgaagcgctattcagtgatcatattggatgaggcacacgaaaggagcttgaacacagatatacttattgggatgctttctagaattataaagattcgcaaggatttgtatgcaaagcagcaggaaaaattacggtctggatttaagatcaaaccagaggataagatcagtcagttaaaggtggtgctcatgagtgctactctgcagttaaaggactttatttcaaatagaaggttgtttggcgtgatcccaccagctgttaaggtacctgtgcggcagtttccagtatcagttcacttctcaaagaggacacatgatgattatttagggctagcttataaaaaggttatgtcaatccacaagaggcttccaccaggtggaatcctcgtatttgtcactggacaacgggaagtggagtacttgtgtaagaaactgcgaagagcatccaaggtgcaaactgctaagaatcctgggaaaactgatggtgaagacaatggtccatgcccaaaagtagatgaaaaggaaatttttgaagcatatgatattgacagagatgaacccgagcaccgatatgacatgttttcctcgtatgatgacgatggtatgtatgatgacgatggtatgaatgttgagacaaatattgattcttctgacaacgaaacggagagcgaaatggatactgaaaccgatgacgaagagtctgttactattgaaactacagaagaggatgttccagtattagcatttttgaaagatgctgagagctcatctgcgttgaaggcatcatttggagctttgtcgggaataccaaatgtgctggaaagtgtcgaggaattaagtgatgctaaatgtgaagaaaagaccagcacttcacttcgttgttttagtaaatgcacagaacataagcctgtttcacatggtagacttcgtgtcttgccactttatgcaaagttatcagcttcacaacagcttcaagtgtttgaagatgtcccagagggggaaagattagttgtggtggcaactaatgttgccgaaacctctctaacaattccaggcataaaatatgtagttgatactggaaaagaaaaggttaagaattatgatcatgctactgggatgtcaagttatgatgtccaatggataagcaaggcatcagcatcccagcgtgctggaagagcaggaagaacagggcctggccactgttaccgtctctactcagctgcagcatatggtaaagatgatttattccctgaattcgctgaacctcagattaagaaaattccagttgaaggtgttgtcctgatgctcaagttcatgtctattgataaggttgagaactttcctttcccaacaccaccaaacaaggaaagtttggttgaagctgagcgttgcttaaagacattggaagcacttcatagtgatggaaaacttacacctatgggcaaggcaatggcacagtaccccatgagcccaagacattctcgtcttcttcttacagtgattaagaatttgaagaataagcagcaaggctttgctagatctaacttcatattaggatatgctgctgctgctgcatcaggtttgaattttactaatccttttctcaagcaattggatgaatgtgacacttatggtgaatcagtagaaaacactaatctggaagctaatggtccatgggaaaggaagagacagaagaagctcaaggctgtg

SEQ ID NO: 40220 - DNA, 929 bp, Zea mays
  Peptide Sequence Number=SeqID_83595
atggagtgtctccacgtcggcagcggagccccttgcctgtccctccatcctggaattgaagaggaagccaccacagctagcgcgcgccgtcgcccgtcgctcctccatccggtgcgccgcgccgccgcctcctccatccagcggctggctcctccatccggtggcactctgctccatccagtgcgccactctgctgtctgctcttcctcttcctctgcttccttagctgctgactgctctgctgctgctcgcttcctcttcctcttcctctgcggctttgctttctcagttcatctactgactgctctgctgcttgactgcttcctcaggccaacagcaccctggcacctttatcaatcaatggctagcccatcttcagtcaacaatgttaactatgatccaaagacagacaaagcaaggaaggctagctcaaatgatccaggttggaagtatggttattgggcaaatttggcaaatagagatcaagtgacatgcaccctttgtgacaccatagtttccggagggataaaaaggctaaagcaacatctagcaggtggctatggagatacaaagatatgttcaaaaaccactactgcaattagaaaggagatgagggattacttggaatccaaaagaaggaaaagagctattttcctagatgataatgagcagcaagaggaggaagaggatgtaatggtggtggatgcagcagctgaatctgttcaagttcaacaagatgcacctatagaatcccaaggctctaaggtacaaccaagttcagggactgcagccaaacataggcgtgcgacctatctgtacaaggatacaacatcaatcaagaccaaggcaaatcaagtaagcaagcaaaagtcaattgtggagatgcttcggaaatcacctgaagatgtagttgatgaaatgcgtaaagg

SEQ ID NO: 40221 - DNA, 1320 bp, Zea mays
  Peptide Sequence Number=SeqID_83596
atggaatcgctgacgcttcgcgcttcgacggccgcctcgccgctgcagcgacgccggctgctccccggacggcagcgcgcgacgtacgtccgcgccacggcctccgccggcgagccggacctctccgtgcgcgtgaacgggctgcagatgcccaacccgttcgtgatcgggtcggggccaccgggcaccaactacaccgtcatgaagcgcgccttcgacgagggctggggcgccgtcatcgccaagactatcttggaaccatggacgtgttgttcacgttactttcattggttccgggacagatcctatgtgggtacccaagtgtcattggatgctgaaaaagttatcaacgttactcctcgttatgcaaagcttcgggcagaaccaaatggggctgccatggggcgcatcattggctggcagaacattgaactcatcagtgacaggcctctggagaccatgctgaatgagttcaagcagttgaagaaagagtatcctgacaggatacttatcggttcaattatggaggagtacaacaaagctgcatggcatgagcttattgaacgtgttgaagagtctggagtggatgctcttgaaattaatttctcatgtccacatggcatgccagagagaaaaatgggtgccgctgtggggcaagattgtgatttgctagaggaagtttgtggttggattaatgagaaggccactgttcctgtttgggcaaagatgactcctaacattacagacattacacagcctgcaagaatatctcttaagtctggatgtgaaggagtttctgcaattaacacaattatgagtgtaatggggattaatctcaaaacactgcgtccggaaccttgtgttgaagggtattctacacctgggggttattctgcaagagctgtgcaccctatagcacttgctaaagtcatgcagatagcaaggatgatgaaagaagagtttgctgatggacagtctctctctgccattggtggtgtggagactggcaatgatgctgctgagtttattcttcttggtgctgatacagtacaggtatgtaccggtgtgatgattcatggttatccccttgtgaagaagctttgcgcagagttacaggatttcatgagagagcacaacttttcatcaattgaagagtttcgaggggcctcgcttccgtatttcacgacgcacacagatctggttcaccggcaacaagaggcggtcaggcagaggaaggccatcaagaagggccttcaatcagacaaggaatggacgggtgatgggttcgtcaaggagaccgaaagcatggtatccaactga

SEQ ID NO: 40222 - DNA, 2073 bp, Zea mays
  Peptide Sequence Number=SeqID_83597
atggccgtggcggcggccgagaaggcggtgaggtgcctgggccggggcttcgacatgacctgcgacatgaggctcaagtactgtaagcacgccggcgggtgcctcgtcgacaggggcggcgtcgagacggcgccgctcgccgtgcccggcgtcgggaccatcggcggcgtgcccgtcgacgttaagtgcggcaagggcgaccgcgtccggatcaagtccggcgtgctcgagttcaacaagatgtcggagctgttcaaccagcggagctcggtggaagggaagatcccgtcggggctgttcaacgcctgcttcgacctggacagcggcgcctgggcgcaggacgcggccgccacgaaatgcctcgccatggacggctacttcatctccctcttcgacctccgcctggaccgccgcccgctcgcgctcgccgaccgcgtcctccgcgacgccccggccgcctgggaccccgccgccatcgccagtatagtctttggagtgttcacgatcgagcctcagtttttccacgagacgggaccagggaggcggcggcggctctcgcggtacataccggccgtgtcctgggacgacgtcggcgtcaccatgcgaagttatgggatgatcttgcattggatggactcgttccaggtctggactgatctgtcgatgtcgaagtcgaagtcgagcgagacagtaaccaggttcatcgacaagtacgggacgcacgtggtggtggggctgagcgtgggcgggcaggacgtggtctacgtcaagcaggacggctcgtcggcgctgccgccggcggagatcaaggagcatctggacaggctcggggaccagctcttcaccggggcctgcgccatgcctcccctccgctgcaagtccaaagacaagctcaaggtggaaatgccggaggccttcaacgtgttcgatgcccagctggtggcgcagcagcggctccaagcagcagggatgatcaccacgctggtctcctccaaagagggcgtgacggtgatatactccaagaggggaggcgacacgacggcgggcagccactcggagtggctcctcacggtgccggcgacgcccgacgtgatcagcatcgaggccgtgcccatcacctccctcctcaagggcgtgcctggcgccggctacctttcgcacgccatcaacctctacctcagatataagcctcctgtagctgacctcaagtacttcctggatttccagcatcacaagatgtgggcgccggcgctcggcgagctgcccctcggcccgtgctccaaccggcagcagggctccagcccggcgcttcatttcagcccgctcagtgccaagctctatgtcagcccaacacaggtcagggatctatctgtacccaatgctcgtttttctttccgaaatggcatgcatgatcaccgacagaacaaaatgcaggcgattgtccctaagttgccggtcactgggatgcggctgcacctggagggcaagaaacacaaccggttagccgtccacctgcagcacctatcgaccaccccgacgttcatcgccgccgcgcggcacgacaaaccgccggtgtggcgaggttcggacgcggcctccgacgacaggtactacgagccggttcagtggcggatgttcgcgcgcctccacgtcgcggcgcacgacgccacccacgtgctgcacctcaggctcctctacgccgagctccccggctgcgccgtcgtgcagtccaggtgggcgcgcggcgtggcgaggctgtctgggaagtccagcggcttcctgtcgccctcctcctccccgggctcttccggtggtggcagtggcagtggcggatcgcagaaggagaggcacccgccggagggcgtcgtcaacatcaactccggcgtgctcgccggcggaccgcctgtgcccgtcgccgcgcagaagatgctcaggctcgtggacacctcgcaggtgaccatggggccgcaggacagccccgggtactggctcgtcaccggtgcaaggctcgacgtcgacaatgggaggatctcgctgcacgtcaagttttccctgcttgccccggcttcctga

SEQ ID NO: 40223 - DNA, 2358 bp, Zea mays
  Peptide Sequence Number=SeqID_83598
atgacatatttgaaaagcacctgcttgaacccaacagattggttatctgtgcaatactccagaatacggaaatcacgccatgcatcacaaaagttatctaatatatctctggatgatggcttggtctatgtccacagggtgcaagttacccctgctaaagtgtatttttatggacctgagataaatgtctccaatcgcgttgtgcggcatttctctgcagacatagataacttccttcggatttcatttgttgatgaagactgtgagaagctccgttcagctgatttgtcacctcgatctacttctggaaatgatgcaaggagaactgctctgtataatagagttttgtcagtcctttcaaatggcatcaatattggtgacaagcactttgagtttcttgccttttcttcaagtcagcttcgagataactctgcatggatgtttgcttctcggcagggattgactgcgagcgacataaggaagtggatgggggactttcgagatatcagaaatgtggcaaagtatgctgcaagacttgggcaatctttcagttcctcaacagaaactttaaaagtacacaaatctgaggtggaacgaattcctgatattacaaatggcacaaagtacatattctctgatggagttggaaagatctcagctaattttgcagtggaggtggctatgaagtgcaaattgaaacgctttgctccttctgtttttcagataaggtatggcggttacaaaggtgttgtcgctgtagatacaagatcaaatcataagctttctttgagaaaaagcatgtcaaagttccagtcagaaaatatcactcttgatgtccttgcatacagcaagtaccaaccatgcttcctgaatcggcagttgattactcttctctcaacacttggggttagcgataatgtctttgagctaaagcagaaggaagccttaaggcagttgaacagaatggtaactgaaccacaggctgctcgtgaagcagttgaacttatgcccatgggagaagtaaccaatgtagttaaagaattgttgtcatgtggctaccagcctgatcatgagccatatctttccatgctgctacaaacttttagagcatccaagcttctagagttgaaaacaaagtcaaggatattcatcacacaggggcgagcaatgatgggttgcctggatgaaacctgcacacttaagtacggccaggtattcgtccaagcttcttacagtgcagatgaccatcgcaaggtcgttgtaactggaaaagtagttgtcgccaaaaatccttgtctccaccctggtgacatacgggttctccaggctgttgatgttcctgctctgcaccacttgtttgactgtgttgtctttccacagcagggaccaaggcaagtgtttaacaatatattgccgcaccctaacgagtgttcagggagtgatcttgatggggacatatattttgtttcttgggatccacatcttattccgagtcgtttggtggatcctatggactatactccagcttcagcagaaacattagaccatgatgtcactattgaggagatacaggagtacttcacaaactacatagttaatgagagtcttgggattatcgccaatgcgcatgtggtctttgcagatcaggaacgtatgaaggctgagagtccaccgtgcgttcaactggccaagctcttctctatagctgtcgatttcccaaagactggagtgccggctctgattccacatgagctacatgtcaaggagtatcctgacttcatggagaaactcgacaaagtcacctatgaatcaaagggtgtgatcgggaagctctatagggaaataaagaagcacacaccacacataaagcacttcacgagggaagtggcaaggcggtcttatgacaccgatttgattgttgatggctatgaagattacattactgaggctatagagttcaaggaagagtacgatttcaggctgggtaatcttatggaccactatggcataaaaagtgaagctgagataataagtggatgtattctaaagatggcaaagaatttcaccaagagtagtgatgctgatgcaattagaatggcggtgagatctttgaggaaagaagctaggtcgtggttcaatgagatgagcacaggagaggatggccaagatgccatggaggccaaggcctctgcttggtaccatgttacttatcatcagcagtactggggcagctacaatgaagggtatgatcggccgcatcttattagcttcccatggtgcgtatatgacaagcttgtggccatcaagcaggggaggaatctcctcacgcggatggatcgaaacttgaggttccgttga

SEQ ID NO: 40224 - DNA, 426 bp, Zea mays
  Peptide Sequence Number=SeqID_83599
atggcgcctcctgttgacatggctggtctgcgccctaggttgggcgatgtggaagctcctccgaagccgaggtcgagtctgtcttccgtggccgaggtcgagtccgagcccctgggtcgggcgaggcggagaccgtcggctgaggccagggcggagtccttgccctggggtcgggcgaagcggagttcgtcgtcttctggggctgagcccaagtccgagccctgggtcgggcagagcggatcttctggggctgagcccaagtccgagccctgggtcgggcggagcggagttcgccgtcttccgggacttagcccgagtccgagccctgggtcgggcggagcagagtttcctatggtcggtcagtggagcggcgaagtgacggcggtcacttcggctctgtcggctgaagggcgcgcgtcaggataa

SEQ ID NO: 40225 - DNA, 390 bp, Zea mays
  Peptide Sequence Number=SeqID_83600
atgcaggaatcccttgcaggaccgccattgcagcaaaatcctcccgagggcctccctacactgaccactcccctactgcccttgcccctttcggtttatcatggcactggactgggcgtcaaattcataaaagtcaagggggctcggggtaataattctaaggcacaaagaatagcactggtggacggcgggttaataccccaaaacttcaggggtcccttaataaaactgcctggcccaaagggtatggggacacaacggtcgttagatctaaagagtgcggtccagattagggtgtgtttggcatggctctgctccaccccagagcagctctactctaaaactctgggtggagcagctctgctccagagtttagattgtttctcataa

SEQ ID NO: 40226 - DNA, 504 bp, Zea mays
  Peptide Sequence Number=SeqID_83601
atggctaaagggagcagcagcaccctcggcgtcgacaacaccttcggcgaggtccgacctagcctcggacggcgacgcggtccaagggtctccgctctgaaggaccacgtcatcaccgagcccgggccatcgccgccagggtcttccccgagaacccggcccgagcaggcggctcggccggacatcagcccgacccgaggcctcgacaggtcaattctggcgtcggtcccgctaacggatgacccggccaggctccggccgaccaggttttcttttcgagccaactctgcctctgttcgcgctgacaccgctacccctggcctcggctcatcgaagagcgaccgaggggttcctttaactgagcgaagagaagcctcgggcaacaaggctgaccgagccgagggactcctacgcctccgggatacggatacctcactcgtcacctttacacggggcgactcacgcttggtgaagcggttcagacaaccaacaggcgagtcttag

SEQ ID NO: 40227 - DNA, 573 bp, Zea mays
  Peptide Sequence Number=SeqID_83602
atgtacagaaagtgcctgaaggatagggcgctggagtatgtgaggatggccactgctttgtacagaaacttgacaaaaggcctgagtgtgattcaaagggataaatcctgcctagctagagagtgggcagcgagattttgggttctagaaaccttggagttgaagtcccgagtgagaagtttcatcctccaatctagtagagtattttggcttgctccattgaggagtatatggttggatcagagctgcaaaaatttcctggactccatcttgttcctgagggagctcaccgctgcgcagcaattgtgggccgccattcgtgtggacagagagtggtgggaacgagaatggttggccgaggtcctacgcgccgctgcggcgctcgagcacggctccgacgatgagatggatggcgcggccgaggccctccgtgccgccacatccccaatcctctgcatccacttttcgctcctctccggctcctctccggcgagcgaatcgccgtggatctcgatgagaaggatgctggagcatggcacgaacgcggatagcgaacgcaagctcgtccgctag

SEQ ID NO: 40228 - DNA, 330 bp, Zea mays
  Peptide Sequence Number=SeqID_83603
atggatgtcactgttgctattgctttggtgcccagcttcagctcactccagcagggaccagcagctgcgcgcctttgcaacacgaacaagcttggaatcctaaactggaaagcagtggagtggagcgccgaccggctgcccgggtggaagttaaagtctgtcagtacaggcgtacaaccccaaccggcagcaccagcacggcaccagctgactgctgaccagcagataaacaggcgtagtgcagtacaacaccatcacacggcagcactccaggaaggcaggaaccgaaccaagattattacacacagcggcaacaacagtagtcagtag

SEQ ID NO: 40229 - DNA, 627 bp, Zea mays
  Peptide Sequence Number=SeqID_83604
atggttgggagaactattcaggtccaaggttttgctctaactgacagtgccgaatctgtcaaattgtttttggagcgaattgctggtgctggaaccatctgtgctctcaagctcaggcatccaaggaacatctctgccaactcaagggcatttgctatagttcagttccagtcacaggaaagtgcttcattggtagagaatgcggctcaaagacaggttctcaagattggacggttttatctgagaaccagacctgcagaccgggacattgttccaagaccaaggattccaatgttttctctagaggacattgtgctgcatttgggatgcttggttaaggaaaatatcctatctgctctttttagagcaagtaatgtttcggttcaatttggatttgatatgaaaaagatctacttctacctctcctacaattttactaaatttaaacttgaactttcttacgaaagtatatgggagatgcagcttcaccgtccacctgcttataggtcacggacacagttccttttgattcaggttggtttctcatataatttacccttcttggacattttagcagattttaggctctacctttttaatcttctgaaaagatacataagtagatga

SEQ ID NO: 40230 - DNA, 207 bp, Zea mays
  Peptide Sequence Number=SeqID_83605
atggaaaggacaagggacagcggaccgccagccacaggaagcaaggtcggtggcccgtcaagccctggatatttgatgaccgttggaaggggcttggttgtggtcggggtggggatgtggtcgtacggtgacttcggcgtcaagacctgtgacaccaagggttgccacatcagctaccacgacaacatgggcatccaacctcggtag

SEQ ID NO: 40231 - DNA, 360 bp, Zea mays
  Peptide Sequence Number=SeqID_83606
atgaaagacatcggcatagagttagatgattatgatgatcaaatagatgtttttaaagaggaggagaagttgagggcagctattgcagaagccaattataaaacacatgtagaaaagattaacaataggaatgctcctcagacggaagaggagattcaggaatatgccatggaggctattacaaactcagataggaattatgaatgggagggggcccaggatggacctatggtaccagtaacccaaaaaggaatgaggtccttcctgttgttcttggggagacttcaatcttataagggaggaggagatgatgagctgttagaggctcttgaggctagggacaacacggaaattcattag

SEQ ID NO: 40232 - DNA, 1524 bp, Zea mays
  Peptide Sequence Number=SeqID_83607
atgctcactgctgaattagagaaggtggatgagaagctcaagttgacagagtctctccttgaaagcaaaaacctagaactgaagaaaacaaatgatgagaaaaaggctgctatggctgctcagtttgcggcggaagcaacactacgaagagtacatggagctcagaaagatgatgatatgccacctattgaagccatccttgcgccgcttgaagcagagttaaagctttgtaggaaggagattgcaaagcttcaagacgacaatagagctttggaccgtttaacaaagcaaaaggaggcagcactgctagaagcggaaaggactgtacaaatcgcaatggctaaagctgctatggttgatgacatgcaaaataagaaccaagagttgatgaagcaaattgaaatttgccaggaggaaaataagatcttggataggctgcaccgccaaaaagttgcggaagtggaaaagctgagtcaaactgtgagagagttggaagaggatgttctgcaaggtggtgcagctgccaatgtcgttagggattaccaacgaaaagttcaagaaatgaatgtaacctactatctttcatctcttagggaagaaaagaaaattcgtgaccgtgaacttgctcgagctaaagttactgcaaatagggttgctgttgtggtcgcaaacgagtggaaagatgctaatgacaaagtaatgcctgttaaacagtggctggaagagcgaaggttcctgcagggtgagatgcagcagcttcgtgacaaacttgctattgcagagagaactgctcgatcggaagctcaattaaaggaaaagtatcagttgcgcttaaaagttttagaagatggcttgaggggcactccaagtggatcttgtcgtccttccatggaaggaaaatgtataagtaatggacctccccgtcgactttcactaggtggtgctgatagtatatccaaaatctctccaaacggaagaacttcaaagtcatttgatggtggtaccaggtcattagaccagggaaaagttctggggagtggacctcattcactcaatagatctacggatgcagttagagattgtgagacagctgatagttggaaggctaatgcagaagaaaaaagtaatgaaaccgcaaacaatgattcagctgacatggtctctggtgtactctatgacgtgttgcaaaaggaggtggtttccttgagaaaggcatgccatgagaaagaccaaactctaaaggacaaagaagatgcaatggagaaacatagatctgatgatgataaacaatacaaatttctagaatttgttggtttgatgctagcaaagaaagtagatacattacataaagcaaaggaagtggaggctaaaaagaagaggcaagagatagctgctttggagaaaaaatttgccgcggtgtgccttgaacaagaacggcttggtaatttgagaggacctggaacttctcagactgtttcgggaagaactgcatcacgaggtggattgacgcgcaacctccaatag

SEQ ID NO: 40233 - DNA, 663 bp, Zea mays
  Peptide Sequence Number=SeqID_83608
atgggccataaatccataacaaccgaagttgttgtggtaccgttctttacctatggccttagtctcatacagaagttcgtgcatgctgcagaagcatttcgcgcttggctctcacccttggctccttcctacccagacgaaaacccccatcacataggaaaagttggcgccaattatgtcggcaccactatgtgttacctcggcgccaatgatgatagcgtcgaggtgacgcagaagatcgatgttgccgataaggcaatcggaatcatgcaggagtcgattaagtgtgtcctccgtatatgccaggagaagctacctctgggcaagccactaaatgcttttgatgttagggtactccgagaagcgcttgaatttgttgtcgaagtattggatcatgtaagcttctttttcagcatacgaggacctgggactacatctttctgggcagctatttgttctccacttcgaccaactagagtagatgattgtgctccactttggctatctgcacatgggagtgcaggcacctgggaaccatgggattccacaacattttcgggagctcctcacactattctcgcctcacaagcagcagtagccacacatgaagatgggcctccagtcaatgaaactagcataagagaaccgcatgggaatgaataa

SEQ ID NO: 40234 - DNA, 735 bp, Zea mays
  Peptide Sequence Number=SeqID_83609
atgcgcctaggggtcccttttatagccccaaggcagctaagagccattggaggcattcttggaaggccaaagttgccttctgtcgggtggcacaccggacagtccggtgtgccaccggacaaccactgttcatgtccggtgcgcgatttccttccattcctggcgcagccgaccgttgcaacttcgtgctggttggcgcaccggacagtgcggtgccctcagccgaccgttggagcgggccacgcgtcgtacgcggatttggcggccaaccgttatgctggcggccgttggcacaccggacagtccggtgcaccaccggacagtccggaaagcagcaccgctcgcccctctccgactgctgtgccacccgccagggtgaggctgacagcagctgagtccagcctcaggcgccacaggaagctccgcctcgcccgaccttgggcctcggcctcaggagaagtctccgcctcgcccgaccccagggctcggcccccacctcgacctcggaaggtggactccgcctcgcccgaccccagggctcagcctcgacctcgacctcggaaggtcgtctccgcctcgcccgaccccagggcccggcctcaacctcgacctcgggcagaatcacgtcctcgcccgaccccggcctcggccttaggaggagtctctgcctcgcccgaccttgggctcggaccgaccacgccgcaggaggcacatcattaccctacccctagctag

SEQ ID NO: 40235 - DNA, 984 bp, Zea mays
  Peptide Sequence Number=SeqID_83610
atggtcgtcgcagcgacccatgcactgcctggttgctgctctccagtccaggtcccagctctcccgtactacacaaggtttaccgcggtcaatggtagtctgacaagagtcatatgtgcggttctggtggacaagcttgcgtgtattgctactgtgcactcggacacgtacgcgctggtggtgagcacggagaacatcactctcaacgcctacatgggcaacaaccgccccatgctggtcaccaacacgctcttccgcgtcggcggcgcggccatcctgctgtccaaccgccgcgccgaccgccgccgcgccaagtaccagctcatccacacggtgcgcacgcaccgcggcgcgcacgaccagagcttcggctgcgtcacgcaggaggaggacgacgcggggtgcgtcggcgtctccctggccaaggagctcatggtggtcgccggcgaggccctgcgcaccaacatcaccacgctgggcccgctcgtcctgcccatgtccgagcagctccgcttcctggccaccgtcgtcctcaaccgcgtcttccgcgccagagtgcgcgcctacctgccggacttcaagctcgccttcgaccacttctgcatccacgccggcggccgcggcgtgctggacgagctggagcgcagcctcaacctcagcgcctggcacatggagccctccaggatgacgctctgccgcttcggcaacacctccagcagctcgctctggtacgagctcgcctactgcgaggccaagggacggatccgcaagggggaccgggtatggcagatcgctttcggctccggcttcaagtgcaacagcgccgtctggaaggcgctccgcacggtggacggcggcgaggagggaaacccgtggacgccggagatagacgtgctccccatccacgtgcccaaggtttcgcccatcgatgagaccacctacaagttcgctgacggcgccacgtacaagatctctcttggttaa

SEQ ID NO: 40236 - DNA, 849 bp, Zea mays
  Peptide Sequence Number=SeqID_83611
atggcagcaaactccaacctcttccgcgactacatcggcgccatcttcaacggtgtccagttcagcgacgtgccgatcaaccccgatgtcgagttcgactacatcctcgccttcgtcatcgactactccaccgaaaccgatcctccttccccgacgaatgggcagttcagcatcttctggcaggactcggtgctgacgccctccgcggtggccgccatcaagcagagcaacccgaacgtgcgggtggccgtcagcctcggcggcgccaccgtgaacaacagcccggtgttcttcaacgtcacctccatcgactcctgggtccagaacgccgtgtcctccctgaccaccatcatccagcagtacaacctggacggcatcgacatcgactacgagcagttccaggaggacccggccaccttcgccgagtgcatcggccgcctggtgaccacgctcaagagcaacggggtgatcaagttcgcctccgtcgcgccgttcgccgacgccgacgtgcagagccattaccaggcgctgtggtcgagctacgggattagcgtggtagactacatcaacttccagttctacgcgtacgacgcgagcacaaccgcggagcagtacgtgaactacttcgacgagcagatggcgaactaccccggcggcaacatcctggccagcttcaccacggcgccaacgacgacctcggtgccagttgacacggcgctcagcgcctgccagaccctgcagtcgcagggaaagctctacggcatcttcgtctgggctgcggattactccaaggaccaagggttcaagtacgaaacacaggcacaggcactgttggccaacagtacgtag

SEQ ID NO: 40237 - DNA, 213 bp, Zea mays
  Peptide Sequence Number=SeqID_83612
atggggctcggtgtatgcggctcgctctgccaagcttgggttcgccccttggggaggagtgcggtgcatttaggaaacctaacaggtggcaatgagattgatggttctggttatgactatggtgctggttgtcagcattgcaaccactgctcaggcgaagatgaagctgtggaaggagacttccaggagttccaagactacgacgagttctag

SEQ ID NO: 40238 - DNA, 984 bp, Zea mays
  Peptide Sequence Number=SeqID_83613
atggctcgtcttaggcacactgcacggaagtctgtcattcccttcttaccctcccgccttgctgagcgtccgcttcgccgtcccgtggccggtcagtccagtcgcttggagaggctgcaccaccgcctgcatgaggagcaggagcgtcgacgacaggagcagcagggctcttccttctcgctccagcaggagatagagtctatgaggagctgctcccctgtgcttcccatggaggcgccccctgcaccaccactgggcgccccagcctctggagtagctgctggaggagacccagacgacggaggtggcgacgacagctcgagccacgacaccgacttctctgctgaccaggagccggaaggatgggttgctcgacccatcactcgcgacgctgctcgcgggtgtcacttccatgatgcgctcgacaccctgctacgtcgggcacttaaccggcgtacttggcatagtcgcggggtctacccggaccgctgggaggcgacctgcttggtgcgacgtccggagaacagtctccagggtgcgaaggcctgctcagagcactattctatctctgagcgggactcagttgaggcggccatgcaagatgctgcacggcgtgcgctttcgcactactgctcggttctcagtggggtagctgacggtctcaacctgaagtattacccccgccgtccatctagcagcacaggaggcgtgattgtctcacctgttggtgaggacaatcctaggttgagcagcacagtcaacctagccgtcgtgctaaacacggagctggaccatgcgctagacgagctaagtagggctcatgctgagatcgccctgctgcgagctgagcgtgcggagcgtcgtcacctggacgatggttcccccgctcccgtcgggactcagcacccgtaccgctcacctcggcgtggacgccagtcttatggcaatcccgactacaagaccaagataaatctagaaccatag

SEQ ID NO: 40239 - DNA, 1239 bp, Zea mays
  Peptide Sequence Number=SeqID_83614
atggcgttcaacgccggtggtggcgccgtcaactggttcccgggccacatggccgcggcctcccgcgccatccgcgatcgtctcaagctcgccgacctcgtcatcgaggtccgcgacgcccgcattccattatcctcagcaaatgaagaccttcaaccagtgctctcagcaaagaggcgaattcttgctctaaacaagaaggatctagcaaaccccaacataatgaataggtggctgaatcattttgaatcatgcaagcaggattgtatctcaataaatgcacatagctccagttctgttaaccagcttcttggttttgctgagctgaaactaaaggaagcaatctcaaaggagccaacccttctgattatgcttgttggtgtccctaatgttggcaagtctgcactcataaattctattcatagaattgctacttctcgatttccagcgaaagataaaaataaacgggctacagtgggggccactgccaggtgttacacaagatattgcaggatttacggttacgactgtagtttcctgaggtcgatagtgtccagacatgctgatcaactactgccagggcttctgcaacttgggatcctccttgacggccgggcagcgatcacgatcggcggtggtcggtccatcttcggcttggtccgcagaacctcttgggaggcggatgggcggcgggggcgcgtgcaacggatgcctcctcgtcagtggtcaccatgcgactcgggaagacatgaccaaataatcattgatgccgctggaggatgtcgccttggcctgcgggaagggttccgcacagtaagtgctgccacctcctcgagctcggggaaggagatcttcagggcctatctcggagattcggacccatctgcagaagcacacatgacgtcggcctccgacaatcatcattatttaaattcagttcttgaggaggtcgtcccgatttgcgaggactcagctgcggctggtgcggaaagggcgcagagtcctgatgctattgcctcgccatcggtggagaagatcaacagtccacctattatgactttgttgggccaacccaaagatacatgtgggccgcctgatggctttgatggatggtcttctggggctcttgccccagtttcgccccagcaccaagaatctggtgctgggctgctggaatgggccagctcaagttcgccccatcctgctgaacatccagcctggaggactgccaatccctga

SEQ ID NO: 40240 - DNA, 1045 bp, Zea mays
  Peptide Sequence Number=SeqID_83615
atgccgactatgtcgaaggtcacttgctcgcttcttgcattaggggctatgtcgagggatagtggcgcaactgttgggggaatgcatggttgtagttctggtgttgttaggggtgatatgggtggtcgtttttataatggtgatggtggtattggtgagggtggctctatcaacgcgcgcgacccacccaccgcccagcagccgcgccccccacgtgccctagtgtcgcacctcgttccccagccgctcgcgctgctgggcccacctatcaatagcgccccgctcgcggcccacgcgctaaacgtaggcacgctccccgccgcgcttgcccaccccagcggccacaccgcacagcaagcaagcgcgctccccgccacgcctttccactcgtcgtgcgcaggtggaagacgaaaatcatggccacgatctcgcccaagtcgtggaagtaaggccctcggcccccatgcagttcctcactccccttgccttgcctcacgcccatacacggtagcccctcggcgcggctcgcccaacgcagtggtccggcgtcccgtggcggccagcgggtgtgcgcggcagcctgcgcgtgcccagagcggtggtcaggtccggcgtcacggcaccccgcaccgagtgcctgctctggtcgcgccgatggtgcccgccagtcgccgccgcatcggcatcgtctcaccacgcccggagccgcctcacagccattcaccaggcatcgtgcccgcgcagctgcctcgccgacgcgtccgtgcatgtcctgttgttatgtggaggagcctgcacaacatccacaatcgcaagtccgcatcttgtcgtacgtcgttgacttgccttgctgtcgagtggtcgtcgagctgggaaccgcacctcgtcatggtcgtcacacccggcgtaactcgtctgcgcagccctggcgcagtccgcgcggcctgtgtagttcagcccaaccctttgtgcgaccccgacgcaatagcctcgccgtcgtcatacctcgccatgagctcacctagccatccatcatcgttgcgag

SEQ ID NO: 40241 - DNA, 519 bp, Zea mays
  Peptide Sequence Number=SeqID_83616
atgacgatgtgcggctcccagctcgacgaccactcgacggcgaggcaagtcaacgacgtacgacaagatgcggacttgcgattgtggatgatgcgcaggctcctccacataacaacaggacacgcacggacgcgtcggcgtggcagctacacggggcacgatgcctggcgaatggatgtgaggcagctccgggcgtggcgaggcgatgctgatgcggctgtaatggcgagcaggtggcctgaggaggggttgcggcgcgccgtggccgacgatggaggtcgcgcgaccggcgactcgacacgaccaggggaggggaggacggcgaggagcaggcgcgggtcgaggcgatgcgaggactgccggcgactggcgggcaccatcggcgcgaccagagcaggcgcttggcgcggggtgccgcgacgcctggcctggccgccgcgctgggcacgcgtaggctgccgcgcgcacccgctgtccgccacgggacaccggaccaccgcattgggcgagccgcgctga

SEQ ID NO: 40242 - DNA, 114 bp, Zea mays
  Peptide Sequence Number=SeqID_83617
atggagacagggttaaagcttgctttaacaggccaacattctgcaccatataatataataggtctaatagttgtcctccaaatgcttgatgctacttcatccaccttgctttga

SEQ ID NO: 40243 - DNA, 831 bp, Zea mays
  Peptide Sequence Number=SeqID_83618
atggccttagggcaaacgctactgccaaatagccctcattcacgtcccctcacaggggacaagaaccagccattaaagccaaagagccggaggcccggagcgcaggtggcactgacggtctcgtcggaggaagcaaccaccgctgcggtgggaagcctcaccagcggcggccaccacttcagcaccggcgacagcagccacctgcgcacggcacgaccgtcgcccggatggaggacggacagctgcaccctgaccaggcagcagcagttcgccctcccccgcatggctggaggacgcctcctccacagagctggaggatgcccttctcccccgaatgctggaggaagaagcgggtcaccggcccacgcggaggcaggccccaacttaggcaagcgacacctccggcaggagaagcgggcgccgtttcgcctccatcatgatgaccgcatcaaaaaagggaccgggaaagggggtatttcgaaaaaggatccttcccagcgaaggaaacgggccccgagccctcctactgatcaggggggttcgaaggctggccccttggaagggttcgacagccgccctagagcacgcagagtcagggatgaccctgggtacgtccgttatatggccgaggctcgagctacgctcccgagcctcgggtgcaacagggagctccgcctcgcccgacctcaggccttggcctcagcctcggcctcgggaggagtcacaacctcgcccgagcccagcctcggccttaggagaagtctctgcctcgcccgacctaggccttggaccgactacgctataggggatacatcattaccctactcctag

SEQ ID NO: 40244 - DNA, 1320 bp, Zea mays
  Peptide Sequence Number=SeqID_83619
atggtgtgtttgggcctcggcggccgcagaaaacacacgctacaagataatccgatcctgcaggctcggatcttgacaattgaagggagcagcagcaccctcggcgtcagctacaccttcggcgaggaatccggctcgagcagacggctcggccggtcaccccgaggcctcggccagctgtcccccgaagacatcagcccggcccgaggcctcgacaactcaattccagcgtcgatcccgccagtggacgacccggccaggctccggctgaccaagtcttcttttcgagccaactctgcctttgttcgagctgacaccgctacccccggcttcggctcatcgaagagcggccgaggggttcctttaactaagcaagagaagcctcagacagcaaggccgaccgagccgagggactcctacgcctccgggatacggatacctcactcgtcacctttgcacgaggcgactcacgcttggctcgacagccacaatgaacaaaggaccggcattcaaggtgccattacaaacggaactccggttccgtccccacgggacgggcgcggccaccggaaggctctcgttcgcgtccccgctcaagggacgcgaaccagacatcaaagccaaagagccggaggccggcccgtaggcggcactgacggcctcgacggtggggaagctttccccggctgccaccacgtcagcaccgacaacggcgtccgcctctccaccaacgccgcaccggcgaacgcgggccgctccaaagcgcaccggcaggtcctcgctgtcgtcctcgccacgaaaacgaggaagagggcggaatgttgcatcctagctgggcagcaacagttcgccttccccggcatggctggaggacgcctcctccgcagagctgggggatggttcccaccaccagaagctggaagaggaggtggccagccgacccgtgcgagaggtagagccccggctcgcctcgctctccgccccagcaaggatgcgacaaggcagaaggattgcgggtgttccccatccgggggctcggaaggtggaaagacacgacacatgagggagcgcgaaggcatggtcgctttccaagggggtcaccctccttttaaaggcgattctccctacttgcgtccccagccgtcgtgggctgagtcttctccaacacgctccaagttcctccccctatggcgcgggggctgggtcccacgcgtcatgcaagctggcccagggcagaagaagccaaaccgccgcgcgcggtgcatacaaccgcccagcggttacaagcattcctccactttcgcccagaccagcgggtga

SEQ ID NO: 40245 - DNA, 426 bp, Zea mays
  Peptide Sequence Number=SeqID_83620
atggctgctgtaccaaagatgaagatgtgcccaccggatcagaccgccagcgcgggctgtcttcaccgccgacgaccggtcttcgccgtgattcgcgccaccgccgttgtgattcacgtcgacgatgacccgataaggccgccaagtaaaagccatgcacctggggataactccggtgactcaccgccgtacccctcgtgctccgcggctgtggaggataagttcaccgacgagagccgccttccggccttgtgccacgtgcctgagtacctccaccgcaccgtccatacccttgagagtcttttccttagtcgggtgaggaagcaacaaatttttgttgcttttgctccaaggtggtaccaaatgaagaaaaacaagactgaagtgcgggaggacttggtcctccacataggatcttttgcttaa

SEQ ID NO: 40246 - DNA, 444 bp, Zea mays
  Peptide Sequence Number=SeqID_83621
atgggaacaggcagagagcgagcaggacgcgcggaggagatgctcgcgagcacagctaggcaccgtacatggggagccgcacagggagagcagggagcatggcgcgcagggcagagaaccgctcggcgagcaggaacagcgcgcgcacaggagctccgcggcaagggagagagaggagcagagctgggcgcggctactcgcggcaacagagcagaggggcgcagtccgatagaatctgagcagagggcagagcgacggacgcacaggaaacagcgccggcaactcgccatgggagcatggaccgctcggctgggaggagaactgctgccgctgtgcggcagagggagatgccgagcgctgaaatatccgagtagagcggcggctggggaaagagatgagagcgttcgggataaggccaaaggccaagcaacggttggaagatag

SEQ ID NO: 40247 - DNA, 246 bp, Zea mays
  Peptide Sequence Number=SeqID_83622
atggcgatacctggaggagttgggaaagctaaggggtccctaacgacgtctccaaggaggttagcggcttcgaaggcgtcactgtcgctgcacatactacatatggcatggctttcgcatggttaccccaaaccccggtctcctggcaacgaggaaggaggcccagaccatactcctctcaggcgaccagagacgacgatgacggtcgacggtagaagtgcaaccatgaaggcgaggagacgatga

SEQ ID NO: 40248 - DNA, 366 bp, Zea mays
  Peptide Sequence Number=SeqID_83623
atggatcatcgtcagccgccgccgaataagacggcggagcttgaccccgtgctgcactccatcggcttccagatcgaggaggtgtcgccgtcgcaggtcaccggccggctccccgtcacacccaggtgctgccagccgttccaggtgctccacggcggcgtgtcggcgctggtggcggagggcctggccagcatgggcgcgcacatggcgtcgggcttccgccgggttgccggcgtcagcctcaccatcaaccccttccgcagcgccaaggtgggagacgtcgtcctcgtccgcgccgccccgctccacgtcggccgttcgacgcagtggtcggccgacgctgaacgtgtatcatttaaggcttaa

SEQ ID NO: 40249 - DNA, 288 bp, Zea mays
  Peptide Sequence Number=SeqID_83624
atggccctcaccatgcccacacacgaccctaaagacgagagacgacacaaacctccacttctggttggtttggacaacagtggggaatcgggtggagcgcgggtgaagcggcgacttgggtgcaagaaggcggactccaacccggtggaggtcgccggcgagcaggaccgcacacacgaggggcacgctaaggagacattgtcgtcggtcgacttcgagcgagctccgaaacaactgtcgtcgccgtcggtgttcttcggctccaatggcggacgccgacattcctag

SEQ ID NO: 40250 - DNA, 381 bp, Zea mays
  Peptide Sequence Number=SeqID_83625
atgccgtgtcttctcgactgcggaaccagtaccacgactcgaggcagccctacgcgtgacccaacagtgctaattgagtgcaacgatcatggggcaagcgacacctccggcaggagaagtgggcgccgtttcatctcagtcataatgatcgcgtcaaaaaagggactgggaaagggggatatttcgaaaaaggatccttcccagcgaaggaaacgggccctgagccctcctactgatcaggggttcgaaggttgcgccctccggggttcgacaaccaccccagagcactcgggctccgtgccctttactgatcaggggttcgaaggctggcccctcggaagggttcgacagccgccccagagcacgcagagtcagggatga

SEQ ID NO: 40251 - DNA, 1383 bp, Zea mays
  Peptide Sequence Number=SeqID_83626
atgccgccatggccgccgtgtctccagcctaccctcaccaccgctcgccgcgccaccgtattctccaggacgagatgtctctcttctacccccgcctctcctacctacgagcaggggcagcacgaggaggagccatcgttggtcgttgtggggggcggcgcggcgggcgtgtacgcctccataagggccaagacccttgctccgcacctcaacgtcgcggttgtggagaaaggcaggttcttgtccaaggtcaagatctccggcggtggccgctgcaacgtaaccaatggccatcaccttgagcccatgggactggcgagaaattatccaagggggaacaaggagctccgaggatccttctttaccgctcacggtccgcaggataccatgcgctggttcacagatcacggtgtaaagcttaaggccggcaaaactgtgtctagtgcatctgttgctcaagacgggaagtttgttctcaaggtggagaagcgtactgccgatcttgttgattatatcaacgctaattacatcttggttgctacaggtagcagccaacatggctattcaatcgctgcacaactcggtcattccattattgcaccagttcccagcttgttcacatttaaaatcgcagacaagcggctggctgatctcgccggggttacatttccaatagtcaaagcaaaactgaagctagatggtgttcaaaaaagtgttcccgagttaactcaggtgaacatgccatttcttttcagcaattggcgggctcttagagaggtagtcaactggttatacacatcgcttgcaacaagtgacttgtctttacagactgggcctatgttagtaacacactgggggcttagtgggcctgttgtgctgcgattgtcggcatggggagcacgtgagctacatcagtgcaactaccaaggaaatcttatggttgactttgtacctgatattcatatcgaggacgtgaagcgcgtcctattccactacaaagatcagcatgcgaagcacaaagtgagtaacacgttccccacggagtttggcctggtgaagagattttggagattcctgctagaacaggagagtttaaatggtgatacacactgggcctccatgccaaataatcatctaaacgcagtggccttccggttgaaacaatggacgtttgaggttgttggaaagggccaatttaaagatgaatttgtgactgcaggaggtgttccaattacagagatatcgcttggcactatggaaagcaagaaacagccaaacctgttctttgcaggagaggttcttaatgttgatggggtcacaggcggattcaattttcagggataccaacaagtttgcaatcaagataaggatattccaagatga

SEQ ID NO: 40252 - DNA, 561 bp, Zea mays
  Peptide Sequence Number=SeqID_83627
atgggaaccacggtgatgactatgtgcagtcgttgttgcttcttcccaccctactgcgaggcataccatccggcggcgaggccctttttgatggagtggtgtggtagtcgtgaaggccgaggctgcattgcgagggcagtggaggagctgggcgacgtggtcagacgaatgcagggcaaagccacctccagcagcgacgaggctgcatcgcgagggcggtggaggagctgggcgacgaggtcagacgaaggcgaggtgaagaatcactgttgggctgctcgtaagtctccaatccgtcgtgagatgttcatgttccctcctgctcttccacgtatttgggttcatgatgctgctgaagtctgtggccatgggggagattatcgtcttcatggaccaattcgcagaaactgtatgacaagagtcagggatgctcggcttggcctctttgtctggttcattgaacggtgggttgtgccattctcgaactgggttcccttgctgctgtcatttgagcaaccattcagtttcttcgaatcagaggacattcaagcttctgagtag

SEQ ID NO: 40253 - DNA, 1170 bp, Zea mays
  Peptide Sequence Number=SeqID_83628
atggggcggttacatgcttcgtgtgcggcgatttggcttcttccgtttcgggtcagcccgcatgacgagtgggacccagcccccgcgtcggagggcagaagccatgccttcacactcctcgcattcatcgcgcccttccacctttcgagcccccagatggggtacacctgtgttgccttctttttgcagcagtttgaggagcgcgaccccatgggggttggtgctcttcagtcactgctcggcttcaaggattttcatcatgcagcccggctgcagtccctcaccaatgcattcaggggagaagggcatcctctagctctgtggaggaggcgtcctccagccatgcgggggaaggtgaactgctgctgcctggccagggtgcagctgtccgtcctccatccgatcgacggtcatgccgtgcgcaggtggctgctgtcgccggtgctgaagcggcggccgccgctggtgaggcttcccaccgcagcggtggttgcttccgccgacgagaccgtcagtgctacctgcgctctgggcctccggctctttggctttaatggctggttctcatcccccgtgaggggacaggtcgttgtcgcgctgctggtgcagtggtcgccggcgagccacctggagtttgttatcccgcaggccttccaatcgggacaaccgtcgagggcgctgccgacgtctgagtctaggtaccattgttaccccaaaatcacttatccgagcgtgagctacctttcacggaaggtgacgagtgaggactccactatcgacgcagtcgaaaggcacaaaagtcattttggtgaaaaacttttccgaggaaagttttggcgcagagggggcttcccctctctagacccgaggcgaccgctcgggccgggacccttgcagagggtctggccgtggtcgtcgggtctgtccgagctacccgaggcatggcctcatagcagcgtgcccgggccgagggtatgttttgtccgctctgtgactttgtttttgtctccattcttcaccttgcgtctgaagaaagttgtcctgccatctgcagggttcgagatggctcttgacgaggccgtcaagaactgcaaggcgcttgccgaggcggctgagcagaaggaggccgagcgtgtggccatgtccgaggctatctcggctttctgctag

SEQ ID NO: 40254 - DNA, 297 bp, Zea mays
  Peptide Sequence Number=SeqID_83629
atgtttgcctcatttgtttgtatgctcaggaatcttaggaatcttggtctaaagttatcagttgtacaaattaaagtttttagtgaaattatttgcagattactcaactgtattggttctatgacaatgcttaaggaaaggttggtcttcgcctttgcagccctacgtggtgcggtgactctcaggaccaaggcactgaaggaggtgaatgatttcattcttatatcagtgcatacagtaggaatgcagatggaggacatgaccttcttctttgctgaattggcactgatgcaatag

SEQ ID NO: 40255 - DNA, 297 bp, Zea mays
  Peptide Sequence Number=SeqID_83630
atggggaagcctgtcccatcactcctcatgctcctcctcagccgaggcagggtcccactcaacagtccaacccggtggcaaggtggacggccaagttatcccagcaaccatctcctccagagaacctgtaaaaattatgccacaagcaaggctgagtatactaatactcagctagacttacccggttacaatggatcaagcagtctcattagctgcgagaagcagacgattcgaatcgagtttttatccttgcaaggtatccgcacgttaatccttattccattttccatctcgtaa

SEQ ID NO: 40256 - DNA, 144 bp, Zea mays
  Peptide Sequence Number=SeqID_83631
atgtctagaggtagaggagtagattcctcacacccgggttctctggaggagatggttgctgggataacttggccgtccaccttgccaccgggttggactgttgagtgggaccctgcctcggctgaggaggagcatgaggagtga

SEQ ID NO: 40257 - DNA, 660 bp, Zea mays
  Peptide Sequence Number=SeqID_83632
atggccgcccactccgacaccgtggccacgctggcagccgacgacgccgcggacgtcgacgccaccgacaccgacaccgacgggctgcctcaacacgtgcggcccggcctcgttcttgtccgcgtcgtccgcttcggccgcgtcggaggtttcgaaccggaggacgaagacggcggcaaccgcgtccgggcagaagagtcagccgtggaggtccagcctctcgctgtcgtggaacttccaccggagcccgagcttgccgcgctcctggatgtcagctccagagccggggatgcggacaaggtgtatgagtatatgcataagctgaggcaagctgtcagcgaggagactgccggagttgtggaaacctggttcaggagcgacgaggcggcaactgcctgcaagcctcaatgggatgccgctcaggtggagcatcagcggcggcgagaaggctggagcaaaattcaccaccgcattggcaaagagctatcgcgatgggaatatgggattgggaagaagaaaccctggtcggccgtccggtcgttgcatacctctgacggcgttgaggaggaccttattggagagatcctgggcgagcgagaggacagaaactgcgcgtcagctgagcagagctcgcgcggcgtgtgcgtgtcctctggatga

SEQ ID NO: 40258 - DNA, 471 bp, Zea mays
  Peptide Sequence Number=SeqID_83633
atgggcagaggcaagagaggcaagggatggcctcgccgcgctgatggcaagcacaagcgtcctccgagtccaccctcggaggactttggtgactcagagtactcggagggggtttcctccgagtatgaccggtcgcctactccagcgtcccccgtggtgtcgtctgaggattcggacactccatggggttgtccggtgcggcgcgcgagtactggcgatccatcgagcgtgccgggcttggtgggtgagatgactcggaggaggcctcctcggaggcggtggaagattcctctgactccgagaagtggagtggcggcgacaaggacgacgacaagggcagcaacgacggtgacggctaaggtggcgacgacgagggcgacggcaaaggcgatggcaaggacgacggtggcaatggcaaaggtgacggcgatagcaagggcgatggtggcgacggcaaggccagcgacataa

SEQ ID NO: 40259 - DNA, 324 bp, Zea mays
  Peptide Sequence Number=SeqID_83634
atggcgatcactcgaaagaaggaagtaaacatcccatatcggggaaggagaacacaccaagccatcctcccaatacctccgccctcaaaggaggatgggaagaaggagaggaacctccccagcgtgatgcccggtgacggagaaacagatgccgaaatgtgcggcgacatcatgaagctagagaacaggatccagcacaacccgtatcccgggacgaagcctcggaagtgggggaaactcccgatgaacgagtacaccaagaaagacgcaactcctaccgccgcgatcgccgaaggcttaggagcgagagcgagaactagctaa

SEQ ID NO: 40260 - DNA, 363 bp, Zea mays
  Peptide Sequence Number=SeqID_83635
atgccgaacacccacgatccctccacggtcaccaatcaccgacataggcccaagaacacgacgatggacgtcaccgacccttttccccctccccggtttgttctctcggtactgggtcgctatggaggtggcaaagaggaggtcgcgaggcacccgaggatcaggttcttattaccccatccgagcctggttggttggcgcgttttccagatgacagcaatagcgacagcagcaagcacgcaggtttgttacgacgacgaagctgacgaccccgacccacccttcagtgagactcatgagcagcgcacgcggaagactcaagttgatgagcgggcccgcgagccagtgtgggtacgcgagtga

SEQ ID NO: 40261 - DNA, 324 bp, Zea mays
  Peptide Sequence Number=SeqID_83636
atgtctggtgctccaaggaggagcggcctccggaactcgtcagcctcgggaattcacttcggccactccgctataattcaccggactgtccggtgtacaccggactgtccggtgcaacagcggggcaacagctatttcggcgccaacggctacctgcgacgcattaaatgcgcgcgctgcgcgcgcagagatcatcccatcattcgtaaattaggcaagagacaccaaaggtgtggtggtccgtgggggaaggccgattggcaagtgttcggagaagagaagttcattcggtccgaggggccgtttgagagcggcaaggcttga

SEQ ID NO: 40262 - DNA, 627 bp, Zea mays
  Peptide Sequence Number=SeqID_83637
atgcatcatcaggtccggacctccactgaggatccccggacccctgtacgcatagcccggaccctcggatgcggtccgaaactcccaagaaggcatgccgatgggctccaggtctctccaagcaaaacgcttaggcccctcctcatcttaggatttagggcgggtgcactccgccacccggctggagatttcctctccgacatttggcacgccagcagcacacgcctgcacaagcgtcccagactccgtcaagggcagcgcctacggcgttgtctgcagccagggagttgctacgccacccctagctccacggcctcactgggggccatgaatcagtggcgtgacgatgtcgaccgactactcggcatggcacattctacttcgaccaggtccagacctcggtcatcctggcaccaacgtgaggcgatggcgtctgtgcgctcgccctccgtaaggggtgcacagaccgacaacctctgggcagaactcaaccacaggcgtgccggagaggatgcccaagtctccctagaaagggtgcgtgagcaccgacaaaacatcgagggccacaacctcgaccaagattttgctgtggaatcaccacgaacactagtgggtgcccggttctag

SEQ ID NO: 40263 - DNA, 615 bp, Zea mays
  Peptide Sequence Number=SeqID_83638
atgcctcgcttttcttgcattcaccgcgcccttccgcctcccgagcctttggatgaggcgcgctggtgtttgctgggaggatccgcgtcagggtcaccccctccagcgatctcaccgccggggagcccgcgctcttctgccattgcttggcttcaaggattttcatcatgtagcccggctgcagtcccccgccagtggtcatccagaaggatgaccaccagcctcgtggtggggagaagcaagtcgggctatggcctccctcctgccctcagctttaaggatgttcatcatcctcgctggggtggaaggcgaggcgagtcggggcccttccctccgcatgggctggtgacccgcttcttcctccagcatttggaggagaaggatgttcaccagccttgcggaggaggtgaacctcggctatgcggggccggctggctgcaggccgtcagctgtagcgtgtctggccctttgggcttgatggctttggtgctgcctccaatgctgcctcctgccgtttggctggggcgtgggtgttcgtctaccgcacgggtgacggtcgcgctgtgcgcaggttcgccacatccacggcttctcctgcatcgccggccgcactga

SEQ ID NO: 40264 - DNA, 402 bp, Zea mays
  Peptide Sequence Number=SeqID_83639
atggactacgctacaccagcaggagtcgcgctggaagctggctccgggcagcctcaccagcggcggcgaccacctctgcaccaacggttcgccgacgacagcgaccacctctgcaccagcagcgacaaccacctccgctccgagcggccccgagcggcggcgaccacctcagggtgtgcgccattacggagaggtcctcgcccccgtcctcctaaggggggcgacaacgaggccattagagccaaagagtcggagactcggcgacaggtggctttgatggtctcgccagcggaggcaaccacctctacaatgggtagcctcaccagcggcggcgaccacctcagcaccaacgacagcggccacctctgcactggtggacggcggctgcctcagcacgtgtga

SEQ ID NO: 40265 - DNA, 492 bp, Zea mays
  Peptide Sequence Number=SeqID_83640
atggctgacaagtgcgccagagccgtcgagggccgtgcatggcactcggccccacaaaccaggactacccagacgggtggctcgggtgctgtcccccgggacggtaaaaagaaaaagaagggctgcggctacgagaggccgcagtctaccgtgctagtcgtcgcagctgcgtccgagagctggggcgattgcaacaaacgcccacgaccgcagaggggtaatagcggctcgtgccctatacaccccaacggtcgccacagcgccgcagagtgtcgcgagatcattgatctcatgaaacgcgtcagcgaacacgccagtaagcggcgtgagcagtcttccaaggacggctccccacctcgtcaccgtcctggcaaggaaaaggtcgacgacagcgaggtggccgcgactgagcgagacctcgggtatcagtcacctgaaggggacctgaaggacgtcttcaccagagactcccactccgatggcgatgactag

SEQ ID NO: 40266 - DNA, 894 bp, Zea mays
  Peptide Sequence Number=SeqID_83641
atggattactggatcactcccccagatgatcaagtgttttgtgattggtggatgagagttaaatttggtctctgctcatccttaagcaaatccttgaagaggcacccctatggggccgtgtgggcgctagaggcaacaatgttgtacaagtctgttgctgagaggggaccctggagttcattgtccagatgggctttggaatcttatttgaaaggcgatgtagggaaagcattgctcttgtattccagaatggccgatcttggatatgaggttgcacagagcaatgctgcctggattcttgataggtatggtgatcaaagtatttgcatgggagaatctagtttttgtacagatatggaaagacatcttcgtgcgcatgctttgtggtggcaagcatccgagcagggtaatgagcatgctgcattgttgattggcgatgcctactactatggtcggggcgtagcaagggactatgaacgtgcagcagaggcatatatgcatgctcggtcacagtctaatgctcaggctatttttaaccttgggtacatgcatgagcatggtcatggacttccccttgatttgcacttagcaaaaagatattatgatcaagccgttgaggtggattcagcagctaagctccctgtcatgcttgcactaacaagtttgtggctaaggaagaactacgcagacagttttttggttcgctttatcgattcacttccagaaatatatcctgttgttaacaaatgggtggaagatgttctcctggatgaagggaatgccacaattttgactctctttgcttgccttgtaactgtcctctacttgcgagagcgtcaaaggcgtcaagtggcagcagccaacccccaacaacctgatgatgtggtcatgtaa

SEQ ID NO: 40267 - DNA, 336 bp, Zea mays
  Peptide Sequence Number=SeqID_83642
atgaagggccttaacagcgctgtcatcctaggggcttggtgtctttggcttcagaggaaccgggttgtctttgataaagattcaccctccatcggaaagatgaagagtagcttcctaaaagaatcttcctactgggtgttggctggagctaagcaactaggagtattgggcctagctgatgctcttagggaggtgtccctaacctgtacctctcttcttcatccgaagccagagcagaagccctttgagaatgagaagccataccaaagggggcgtagtgtcacgataacagaaaggtcgcagctggcaacaatagcatcactgggaaatcactag

SEQ ID NO: 40268 - DNA, 258 bp, Zea mays
  Peptide Sequence Number=SeqID_83643
atgagttttgaaagtggaatggagaagcaggcaaaggaactttttgaacttgcagccgagaataaggaagctgggggacattataaccttggtgtgttgtatcttaagggtattggtgtgaagagggatgtaattagagcatgcaatctcttgcttcatgcagttaatgctgggcaaccaaaagctatttatcaggtggcgaaactgttccagaaaggcattggtcttaagaggaacctccatatggtaaatgactaa

SEQ ID NO: 40269 - DNA, 1086 bp, Zea mays
  Peptide Sequence Number=SeqID_83644
atggcgccttcccaatccagagccgttgccattcttctgcatccgatctgcagcctctctgacatccaccagtggcctgctggtttgtcgtggccgtgcctcgcggcctccgccttgctggtccaccgtggtcgtgcttccccgccaccggcctgcatgttttccgtggactgcccgtccgctcctgtgctgtccggtgtccgctgcgacctccctgtccgcgccatccgtccccgccctccgtcatcctgccagttcatcgggtgcactcgtctgctgagcgctgctgctccccccatccaaagctccacactcctccagaaagtctggatagctctgctcgtgctgtattctgctcactgctctgttgctgtgctctactctgttcactgctgtgctgttgtgctctactctgctatcttcataggatggctaagacagagccaggctgctgttgttccccctgctgtgcatgccccaattgctgtgggagagaatcaaagtgatcctaagaagtgcaaagaagatcttgatcgtccaaaaaagaataaaagggacaagctaagggcggagacagatctcagagatgatgtgataattacaggaggcagagaagggtcagaggctgaatccagggctgggagcttatcagagggttccccaattcaaaatctaggtcctatggatagatgggcacgacctattgatcctaaagcaaccaaagaagaagttaagatgcaacaaagtttaaatgaaacgctttggaaggagaggacacatcaagtgcatcaagccatcaatatagtgctacattggtatacactcatgaggggtaagttttatgaagtccaaggagatttcagatgtatcgtatcacacacaattgaggtcatatttgaaatgatggacaaaacaattaatgaattagaagcagacaatgtggtgcatgttgtgaaagataatgcctctaataacatggcagcaaaaacattgctgttagagaagaggcctaacatttttcggaacacttgtgcaactcacaatcaatttgatgctccaaggtattggcagcctgccgaggtttaa

SEQ ID NO: 40270 - DNA, 1191 bp, Zea mays
  Peptide Sequence Number=SeqID_83645
atggctcgcgtcctgcaccgccgtctcctcctcctcgccgccgtctccttcgccgtggtcgcttctctccttcgcccagctgctgcagtgcgcccgtttgttttggttctctccggtgaggacttcctcaaggattcggccgcgcacccgtccctcccctctgccgactccaccgacgacgacgggtgggacgacttcgccgacgattcaccagccgccgacccgctcctctccccgtcctcctgggtccctcttcttgacccagcaagccctcccctttctggcgatgagacggactcgtcggccgacgcgctcttcgtcgcgggcgcccgcgcgatgctctccgcagcgtccgatggggacgacgcggcgttcgccacggctgccgcgcagatcgaggccgcggcagaggcggggcacccgggcgcgcagtccgcgctcgcgttcctcaccggcgccgggatgacgcgcccggcatcccgatcgctcgcattcctgttgcacaagttcgccgccgacgcgggagatcttcagtcaaagatggccctcgcgtactcctacttccgccaggagtcatcttacaagttggagatgtatgaagaagctgttatactatacgctgaacttgcagaagctgccctaactagctccttgatatcaaaggagccaccagtgattgaaccaatccgtcttcacagtgggactgaagaaaataaagaggccttgaggaagtcccgaggcgaggacgatgaagattttcaaatcacagagtaccaggcacagcgaggcaatgctgctaacatgtacaaattagggcttctgtattactatggactacgtgggctccgccgtgattatggaaaagcttttcattggttttctaaggctgttgagaaaggagagacacgagcattggaacttctgggtgagatctatgctagaggtgctggagtggaaaggaactatactgaagcatacaagtggttggcacttgctgcaaagcagcaacattactcagcttacaatggattgggttatctatatgttaaaggctatggggtggagaagaaaaacctgacaaaagcgatcatattggtgttacctttacctgttagtcgtaccagccaagattcaagaaagggttacgtgctcttagcgtgctcgagcagcgaaaattttaatcttgcataa

SEQ ID NO: 40271 - DNA, 348 bp, Zea mays
  Peptide Sequence Number=SeqID_83646
atgacggctagcaacgccatgtccatcaccggcgccgccacgcacggcacgacggggtccaatgggggcatggtggtgaggtcgagggggagccagcagattgggctccggtacggcgacggctaccggcagtcgcagactcacgcgcatgaagcgtcgtgggagggggtgtcgcgcgggggaggggtggtgggggcggacaacggttgtctcgcgaagtcgcgggcatcgcgtgggggtgacaggatggacgacgtgcggggcgaggcggggcacggtattgcacctgcttgccggccatggccgtcgtcgaggtcgtgggatcggaggtttcgtgcggtgcggtga

SEQ ID NO: 40272 - DNA, 669 bp, Zea mays
  Peptide Sequence Number=SeqID_83647
atgacgtgtgggacccagcccccgcgccgtgggggggagaatcttggagcgtgttggagaagactcaacccgcaacggttgaggacgcaagtggagagagtcgcccttaaaaggggggcgacccccttggagggccaccatgtcttcgcgctcccctcatgcatcgtgtctttccaccttctgagcccctgggcgggggacgcccggaacccttccgtcttgtcatcggaggaacgcaactttgtagaagttggtacctttcagccatcgttcggcttcaaggattttcatcatgcagcccggctgcacccctctgccggcggtcacccaagacgcatccgccctgaggtcatcgctgctgctagtcggccccccggagcagaagtcgtcgtcgtcgccgctgctggggcgagcgacgacaagccgttcgtcggtcttctgttgctccgcaggcccccccgcactaagactcgccttgttgattatctgaaccgcttcaccgagcgtgagttgcctcgtgcgaaggagacgagtgagagtgggggccctccgaccccgtcgccattcgaggctaggtcagaccccgccgaaggtgtagttgatgccgagggtgctgctgcccccttcggctgtcgacgtccaagcctgcaggatcaggttgtcttgtag

SEQ ID NO: 40273 - DNA, 453 bp, Zea mays
  Peptide Sequence Number=SeqID_83648
atggagcttcaatttcgatgggaccaggtcgcaacattcgttaagcagacagatggctcccctgttcagctagagaggacgatatctattgatgtgattgaaatacatacgtacggatgcatttttaatgtttgcttgtatggtctgcattgtgaagcagggcagaacaagaagaggcagagaattggagatactttagactttgaaattaagaggtggtctactggaaaacagggcaacttgcgcgctttgttatcaactttacaatatattcgtccaagtgacaagaaggtagattaccaaatccagaagctcaccaatgcggttgacaatgccactgctcgagagaaatcaggaaatgcagaggcgaatgggaaggataggcattcggatgaggaagacctcctgaagtataggccaaacccagatatgatggacacagactggtcctga

SEQ ID NO: 40274 - DNA, 333 bp, Zea mays
  Peptide Sequence Number=SeqID_83649
atgagcaaggacacaagagacacaagatttatcccgaggttcggtcacaccaccaaggtgccctacttcctcgttgaggcgcccacaaagagctgggtctctttcaaccctaatcctccctttgccgaccacaaaggtcaagctcacacactaatctttgctcaaacgagcggatcagaggtcagaggggtcagagaccagctgaactgcccctcaggaccagttcaaccggtcttgaccagtgagtttaggagagaaaaccccagctcaactgcccggaggcaagttcagctgctgaagaagctcaactcagctgaagttcagctcagctga

SEQ ID NO: 40275 - DNA, 387 bp, Zea mays
  Peptide Sequence Number=SeqID_83650
atggatcatatactggtcattatgcggcagggggccttggttcatatggcatatgtgttcttttttaggacaaacagctggctccatgtccattcgaggtcactgttcttgcagagaattggagacactttagactttgaaattaagaggtggtctactggaaaaagggcaacttgcgcgctttgttatcaactttacaatatgcagatcaaggacctcaagcacgtagaaggtgtcgagagcaggaccctcaccgtcgacggcgtccccgccgacactgttaggcacaatgaaatgcaaggtgcacagtccatgaggaacaatactgagaggcacaattctgcatttcaatttgttatattgataggacttgatcgtcttgcttga

SEQ ID NO: 40276 - DNA, 414 bp, Zea mays
  Peptide Sequence Number=SeqID_83651
atgagcaagaacacaagagacacaagatttatcctgaggttcggtcacaccaccaaggtgccctacttcctcgttgaggcgcccacaaagagccgggtctctttcaaccctaatcctccctttgccaaccacaaagactggttgaaccgccccctagggcggttgaaccgcccctggcaggtcaggcagactgtctgccagtctgactgccagactgactggcagactgacctgcaggctgaccaggactgcagatcagaggtcagaggggtcagagaccagctgaactgcccctcaggaccagttcaaccggtcttgaccagtgagtttaggagagaaaaccccagctcaactgcccggaggcaagttcagctgctgaagaagctcaactcagctgaagttcagctcagctga

SEQ ID NO: 40277 - DNA, 921 bp, Zea mays
  Peptide Sequence Number=SeqID_83652
atgggtaacaaacagttggatgcttatgtagtgaacccttcactttctcaagaccaactattcagcattctcgatgtttcaccaagttgtgcatatattggtacaaatacaaaggtttcagttactggtacattcttggtgaataaagaacatgtggaaagtcacagggtggcttgtagtgaagtgcgagaaattgagtatcgtgattctgaagctcattacatggagacttctcattcccaagccaatggtgtaaatgaaatgcatctacacattcgacttgacaagctacacactttgggccagatgaccatcaaatgcttgtttataaattccttaattcttgatgggaaatggtcaaatcaagaatcttctgtcaaggaagtagtttccactgctagggtccaaagtttaaagaaactggtgaaagagaagttgcatcaatggctcatctgcaaagtaaacgacgatggaaagggtcccaatgttctgtgcaaggaaggacagggtgtgattcatttagtagcagcactgggttatgattgggctataagaccgataataattgttggtgtcaatgtgaacttccgggatgctcatggatggactgcactccactgggctgcgtctttgggaaggattttgctgatcagaaagttcaagaaggtggcctgccagaggatgagaaagaaaaattcaaggctaaagaagccaggaggaaagctattgatgatatggatcctaaggggaaagggtaaaccaaaatcaaaatcaaatccaaaggatacaggttcatggtttgatggcgacagaaaagccataatccaactagctggagaacttttctggaaaatgggtgaagacctggatagcatcgcaaaagattatactgcttcttttcaggagtggcatgtctgttag

SEQ ID NO: 40278 - DNA, 732 bp, Zea mays
  Peptide Sequence Number=SeqID_83653
atggcaccggtagatctaacccccaggcagccccggaaggcgtatggcggcgacgccggcgcctactacgagtggagcccagccgacctgcccatgctcggcgtcgcctccatcggcgcagccaagctctccctcgccgccggtgggctctcgctccccagctactccgactcttccaaggtcgcgtacgttcttgaagctcacggtcctcttctcggcgacacctccaagggccacaggccggggcagttcaccaacttccagctgacgggcgcgagcgggcatcttcacgggcttctccaccgaccggcgtcgggcatcgtcagggcctcgtccccgctgccggcgccctcggcgcaggaccgcgagggggtggcgctcaactgcctggaggcgccgctggacgtggacatcccgggcgggggccgcgtggtggtgctcaacacggcgaacctgcccctggtcagggaggtcgggctgggcgccgacctggtccgcatcgacgcgcactccatgtgctccccgggcttctcgtgcgactcggcgtaccaggtcacctacatcgtgcgcggcagcgggcgcgtgcaggtggtcgggcccgacggggtgcgcgtcctggagacgcgcgtcgagggcggcttcctcttcatcgtgccccgcttccacgtggtgtccaagatcgcggacgcgtcgggcatggaatggttctccatcatcaccacccccaagtaa

SEQ ID NO: 40279 - DNA, 624 bp, Zea mays
  Peptide Sequence Number=SeqID_83654
atgcaggcggcatgcaaccgcgccaagtgggcgcaccccttcaactccaacgcgcccagcatggagacccaggcccacacatcatgcaaccggcgcgccggttgctacgtgcgagcaactgcaccgccactcgcgccactaccgcgcctcctcgactgcggaaccagtaccgtgactcgaggcaaccctgcgtatgacccaacagtgccagccaggcgcatcggtcacgggacatgcggcacctttggcaggagaagcgggcgacgcttcgccttcgccataatgaccgcgtcaaaaaaggctggcccctcgaaggggttcaacagccgcctcagagcgctcgggctccgcgcccgctactgttcagaggctggccctcgaaggtttcacagccgcctcagacgaagagcgagggatgaccctgggtacgttcaatacataaccaaggctcgggctatgctcccgaggggctcgggggctgctctcgcaaacgcggcgccggccaaaccattgacagtgtcaacgtaccagctcgagaacttgggacccgaccgtgcacccgggctacggccagctcgcatgagggaacaaccagaccggccgaagcatcgcaaaacgcattaa

SEQ ID NO: 40280 - DNA, 786 bp, Zea mays
  Peptide Sequence Number=SeqID_83655
atggggaacacccgtgatctttccgccttgttcgttggaggaacgcaacttcgcggaagttggtacctttcagccatcgttcggcttcaaggattttcatcaggcagctcggccgcatcccctcgccggtggtcacccaagacggtgaccaccagcccttgggtggggagaagcaagccaggctgcgatcttggtcccgccctcagcttcaaggatcttcatcatccttgctggggcggaggccggactgagccggagctctacctcccgcgcgggttcgtgggtcagcctctccctcagcattcaagggagagggcgctcaccggcctagcgggagggtcggactccaacaacgcggggccgatcggcggcgagcgtcgtcagcttcagcgcgttgggctcgctggctcagctggctctggctcggctcccggtgccccctctcgccgcaagggcggttgtcgcgccgtgcgcaccggaggaccgcccaagacgtcgcgcgctgctagggcgacgttcgtgttctggggttgtcctgcctttgccccggtatggcgcctctgcgcggaggtcggtgctccgctcgttcgggaggatccgagtggggatccgccggtgggcagatggctcctgtcgtcggtgctgaggtgcttttccctctcgctctgcgtcactgccatgtcggccatattggtcggcttcttcaaccgtgagctcaggctcctaatcctcgtaacaactcgtccgccgcacctattccctccgcgatcttcgccagttgggtaa

SEQ ID NO: 40281 - DNA, 207 bp, Zea mays
  Peptide Sequence Number=SeqID_83656
atggggacgtattcttggctaaggtacctcacccagggggcctccaccatcgacttaaaccttagcgggttgcttagtattaagagcgaagactactgcttgcaagccgagaatcgggaatttacccgcccaaaggactccgctgcccacttcgcccacaagggagtggacgcggattacaagaaagaaataagcaagcattcttag

SEQ ID NO: 40282 - DNA, 210 bp, Zea mays
  Peptide Sequence Number=SeqID_83657
atggagtgggaggaagctgggcacatgccgcccaatatgtaccgctgcttcactggcctatgcgaggctgcctcgcagggaggcgccataccggttgctgctgccaggggtaacaataaggtcaaagttttcaaaggcgatgggaaggtgtggttcggagcgtatggccattgtacaggctctttggctcgtgtgttgcgacagtcgtga

SEQ ID NO: 40283 - DNA, 291 bp, Zea mays
  Peptide Sequence Number=SeqID_83658
atgagcgcgcgggctgctaagagaaaacagggcggctgggagcgatgttcacggtccactgagataattctagaggatcccttggacttacaaaacttgcaaggcgtcaaagaagaggaagcaaccaatggtgaagtgggggaggcattatccccgaacaaggatggaaaagaggaggctttaaaaggggatataagtaccaaaaaggatgaagttaagacaggacctgcaaatggaaaaggagagggtacgtccaagggccagataggtaaactgcccctctccaattaa

SEQ ID NO: 40284 - DNA, 393 bp, Zea mays
  Peptide Sequence Number=SeqID_83659
atgagtttgcggtatggccgtatttatacgccaagtgcgttgaaaattgaaagaccccgcttgtcagtgaatgttgctattctagcaaagggaaggtatcttcggattcaagtcagcatcacagtagaccagagtaatacgaaggttgatacagagccgaaggagaacagtacccccgtactgttcgggctgacttggcattcgctttttgcgtcacgcttgtactatcatctccttccagttggagattgtaatcttgccgacggagagtacgtgctcatccccgagcaaggacctgtccaagaggaggaccaggagcaggcttcagaggctgctattgaggatctccccgcagccccagcaattgaaggcaagccccggttttatgcataa

SEQ ID NO: 40285 - DNA, 291 bp, Zea mays
  Peptide Sequence Number=SeqID_83660
atggggcagccgacgacgccggctaccgtggagctcaccggcagcgaagacgaggactggcacgcggccgcgacggccggaaggacgcagcagccgccgccgccgctcacccacgacgacaaccgcagcttccttcggatgctgcgtgacatgaaagagaagctgggcgtggacgcgcccaaggtggaggtgcgcttcgagaggcttaccgtggaggcggacgtccgcgtcggccgccgcgccgtcccgacgctgctcaacgccgccatcaacgccgcccaggaaagttag

SEQ ID NO: 40286 - DNA, 852 bp, Zea mays
  Peptide Sequence Number=SeqID_83661
atggatactcataggccaccacacttcgacgacactaacttcccatattatagtgctagaatgacttgttacctagaggtcgttgatctaggaaatgagcttgttagagacatgtactctcgtttgaatctaaccatcaatgagctcaattctgttgacattaataagctaggtgatgcagacattgtggggaagattatctccctactaccacaacaaagatatgagagcatcatcattattcttcacaacatggaggacttgagtcaaatgactctgaccattgttattggaaaaattgttgcatttgagatgtcgcgaaaaatgggtcgacaagatgagccaacttcttcaaggccatatgcttttgcatgtgatgaaaagagcaaaggaaataagaaggctcgcactccaagttcctcaagtgaagaagaggaggaagaagaaagtgatgatgatgaagataatcaaccatcaacatcatcctccgaagatgaagaaataatccgacgtatcagaaaggtcaaggatcttctctttaacattgacaagaaaaagcaaagaaagagaggatacttcgcatgcggggaaaagggccacttcagggacagctgtccaaacatggctaaacccacaaaggggaggagcaaaggcaaggcgcttagaagtgttaaaacttgggatgactctccaagcgaagatgaacctcaaaggacacgcagccaccgatcctcatcacgctcatcatggtcatcatgcaagtgccttatggcaagaggtaaaatgagtatcccaacctctagtgatgacgatagtagtgatgatgatgaaggtgagggaaagcctccttag

SEQ ID NO: 40287 - DNA, 1056 bp, Zea mays
  Peptide Sequence Number=SeqID_83662
atgagcctcatcgaggcgccgtccccgtccccgtcgtcgtcgagcgggagcgatgactttgcggccttcctcgcctccgagctcgagctcgcctccggtgctgactccgccttccctggtgacccctcctccgttttccccgccaccgacgacgagggcgaggacgaggatccggaggagctagaggttgaagccatagaacaaaacggggataagcagatttgccccgatttgagcttattagggtttcgtgcttcatctgctggaggtgatgatgatgtcgaggacgacagtggcagcatagctgcttccatcggcctctacttcctccgaccgtcgctttctaggctttttatatgtcgttttctctcatacaaaatgagattgaggtataatatttccaaagggaagggatattcttttaccgctaaaagtgaccttgagatcagggagcttgcccgggctcaacacactaatcataggaccaagttgcatctgaggattttcttgaacaactcaaaagggaccggcatggtcactgagtatctgagcaaaatggagaaagaggttggtaagaaggaactcttctctttgccagtagaagaatttctcatcagcagttttacctgctacttgaagaggaaattgcctacacagggtcaagttttcttatctccaagaacaattgggttttattcaagcatgtttgggaggaaaacaaaattttactttctatgggaggatattgaagacatacagggaatacctcaatcaatatcatcatggagtccatccattataataactcttcacaaaggtagaggcatggatgcaaagcatggtgcaaagagcatggacaatggaaagcttaagttctgcttgcagtcttttgcatcatttagtgtggccaataggacaataatggcattatggaaggcaatatctctgagcatagagcttaaagtacagcttgctgaagaacaatcccaaattaacacccttcagagtgaggacagtggggtctttgttggtattgaggatgccaagagcctttag

SEQ ID NO: 40288 - DNA, 387 bp, Zea mays
  Peptide Sequence Number=SeqID_83663
atgcagtaccagcgcaaggaggaggccgtggatgtttccactgtggggaacaaggccactgggagaatcacagtccgaagaaacagtttcaaggatttcatggacaccaggccaccaatattcaaggaggcaacagaaccattggagacagatgagtggatcaacactatggagcaaaagttccgtttgttgagactttcaaataatctcaaggcagaagggaactatatcccaccaggtctaatggcaatgaaggagcaagatttcgacctcctcttccgaagacgattcaacagcaaggatttaggggtcagaaggctttcaaaatggctttacctcatgcgaagactagaccaggaagttcaacgggaagtaccactcaagtga

SEQ ID NO: 40289 - DNA, 432 bp, Zea mays
  Peptide Sequence Number=SeqID_83664
atggggttcaacaaagagagcaagggacaaccgaaggcacctctggtctgtttcgccctattcacccccccctctaggcgactatcaaccacgataaacggtggcggagctccctgggtgtgcgcacggtgcgaggcgagtgctgagggctgtgagtgcacgagtgggggaaaggagagcgagtggggcactgggcacctagaaatgggccggggtggggacgagcgtggcctcgacgtgcgtcatgggcgaggagtccacgacgacgcgcgggtcgtgcgtgggcagtttgggagggaagggtcagacagacgggacccatgggtcagtgagggaaggtgcgcgtgcgtagaggagatcggcgccgacaagtgggccccactgggcagcgagagggataagggggagagagcatgcgcggatcggcgctga

SEQ ID NO: 40290 - DNA, 75 bp, Zea mays
  Peptide Sequence Number=SeqID_83665
atggccgtgatgggttcaacattggataagatgtacctctgccaggtggtacctaaggatgagccccagcagtga

SEQ ID NO: 40291 - DNA, 336 bp, Zea mays
  Peptide Sequence Number=SeqID_83666
atggacctcctccaccaccatattcaaatttatcagatatgtatccacgaggactacaatatgggtatggacaagttcccgctgcaccgacctatcactatcagtatgacgaattggatcaatatcacgacccttccaacatgcctgagtactatcactatgactcgagctgaacatgtttggacctcgaggggcctaaacttgtggagtcctaagattattgcttcctattcagcaatgttattagtgcatctgtcgaagtctaaggtgaaactaagtcgagtggcatatctgtatttagcgcatgatagtgtggtgatgactgttgcgccctag

SEQ ID NO: 40292 - DNA, 768 bp, Zea mays
  Peptide Sequence Number=SeqID_83667
atgtcgaaggtgatctgctcgcttcttgcatttggcacggctgtgaattatgcccatatgatcaaaggagtgcaggaaaatggtgtctgcctggttgccgttatcgacgagtactttgtgcagatcccaccctgcaactgtataattgatcgccaacgcgtctgcatggggcacactatgaatgtcgacatctcttgcatcgaagttgagtggcacatgggaccactttgtttggatgatgggccgcgaagtcttcttgctttggtagtggtgggggaggtggtaggggttggtttggatgttgaggtggtggaggtggcagcgctaggatttcttggtgttgaaggcgttgttgatatggaaaaagattgtggttttgctgctggggctggcatcgccctggccattcagtcctttgttggtttagtctctgggcagtccatggtcgggggaggcctagaggtgtggttcaagacggcttcgctcatcatgccttcgagggggttaaagcctagcagagggttccgagggaggccttcagagctccacgtgcgaacggtgccttcagggcgaaggctgccttcgccacgtcttctagagaggtggtggccttcgaagtcgctttcttgggagccatcgtgggattgctttgtcaaagcgccccacgggtgccgggtctttgatccttgcaaaggccgcgactcggagccgcccaaggtggcggtgacgccgagcgaagtcctgaggagccctcactttaaacggtag

SEQ ID NO: 40293 - DNA, 669 bp, Zea mays
  Peptide Sequence Number=SeqID_83668
atggaattctccactgagcttgttgaagctgacatcgaggacagtaatgctgctggagagcaacagtttcgatgggagtccactggagagcaaagaaatatgatatgggaggcaacaacgtttctgttggatgttctgaaaccaaacttgccagagcatgcttttattcaaaccaaggttttggagataaacttagtgacttacccgaaagttgttgatgccattcttgctaatggtatgttcagtcattatgatcgccctcgtattgctcagctgtgtgaaaaggctgggttgtacttgcgagccctccagcattactcagagttgcctgatatcaagcgtgccattgtaaatacccatgtcattgaaccacagacacttgttgagttctttggcacattgtcaagagagtgggctttggaatgcatgaaagaccttctactggttaatctgaggggaaatcttcagattgttgtgcaggccatgaaagaatactctgagcagctaggggttgatgcttgcatcaaattatttgagcaattcaaatcttatgagggcctttactttttcttgggatcctatctgagctccagcgaggacccagatatccatttcaagtatggatttgctaggagtttttccaactggccttgcaacttcaacacctga

SEQ ID NO: 40294 - DNA, 390 bp, Zea mays
  Peptide Sequence Number=SeqID_83669
atgcagtttcccgaagctggcgagttcctgaggccgcccttccttggagcaccggacactgttcgctgtacaccggtcagtccggtgaattatagcggagtgcctctggaaattcccaaaggtggtgagtttgagttggagtcctctggtgcaccggacactgtccggtgtacaccggacagttcggtgtaccagaccagagctccgccgccgtcgacccgtgtcctcgtcgtgccccggacgccgttcgtgagtcctcaagccttctctcaagacaacgagcagctcgtgattcctgagtgtgttcccgaagaccttcctgagcaacaacctggaggagatgaaggcaacatggaggactttgagttccaggactacgacgagttctag

SEQ ID NO: 40295 - DNA, 390 bp, Zea mays
  Peptide Sequence Number=SeqID_83670
atgaagctgaagcagctggagggcctcttgggtggcctgacccagttctccgaccccaaggtactgctgactgcgccaccgccaccgcccccacctcttgggtggcctttctttcttcctttctcgtaccctgctcgatttcgcctcgcccaaccccgacaaaagggagggggaaaagcggaggagtatctgacttttgccaccaatggcgtgtttttttacaacgagatggcgttgttgggtgtagctggagctggagcagtatgcgacgggccctcacatcgcgtcgcggatgctctacatgctttggcaaaacagaacacctataattttcaccatggcatgaaaggttcatcaatggaacattttgagacttccattgaagcctaa

SEQ ID NO: 40296 - DNA, 1134 bp, Zea mays
  Peptide Sequence Number=SeqID_83671
atggccccgcacgtcagtcaaagaacacacgagcgcaaccgacctacgcttgtcgagttgcgacttgcgagtccagattccatcgccttccatgaaataacccgcctcgcctcggcgtgcaaccgtcccattgcattgcaaggaaggaacacctgctctgctccgctctcgcccctcgcctctccctccaagcaacaacccgccggctgcctgccgtcgccgccgcgccaccacaacaccagtccaccaccacgcggccgcgcggcggacgccacgacgatggagctcttccctcacgggggcttcgtgcggctgcggagccgagcgcgggacaagtacatccacgccgacgcggacgcgagcggggtctccctgcgcccgctcggcgccgcaccctctgtgaacgcggtgtggaaaccggagcgttggcccagcgaaggggacttcttaatcctccagggcgtcgcctacggccggtacctcgctgtctcggacaaggacgcgccgcccggccaccgcggcgtccgcgccgtccagcgcgactacaactcgccgcacgcggaggctcccttcttgtggacggcctttagggtggatgccgaccagaactacgtccgcttgcacaaccaccagcgctggctccgcgccaacggcaggcatcgctactggaacaacgtcgtcaccatcgataccaggaacgccagcctgaccacgatgatgcagtggagggtcgaggaaatcccagtgagcccggagccgctaccccttccgcctccacctcaacaacctacgattcatgtaagccgtggcctattcaagcggcgggctaaggtgcatccatcgggccggatgatccagcacgtgcggatggacgatgatgggtttattcttgacaactggcctgatttcaacttcgacgactactccgtctccaacctgagggccgaggtggcgctccgtcaggatgacgagaacatcacgttgtgcctgcgggccggcaagcatgcgctcttaatccctcttatcacagacctgcctcataacacagatcccctggacatcatcgtgatgcccaccggatcaccaggtttagatgcgatagagtacccacagtttgatgcgccagaaccgtag

SEQ ID NO: 40297 - DNA, 882 bp, Zea mays
  Peptide Sequence Number=SeqID_83672
atggccaaaagtggaccggcagtgattgcagcaacagacgagcagaagcagcggtccaatcacctacaggctcgcatcctctcccgaaacggtaggggagccctctcccgtggaggaccgggaaagagggtatttcgaaaaaggacccttcctagcgaaggaaacgggcctcgagccctcctactgatcaggggtttgaaggttgcaccctccggggttcggcaaccgccccagagcactcgggctccgagcccattactgatcaggggttcgaaggctggcccctcggaagggttcgacagccgccccagagcacgcagagtcagggatgaccctgggtacatccgttacatggccgaggctcgggctacgctcccaaggtaccctaggacatttccgagaccagcaggaacgatttgtaacggaatcccaccggagggaggcatcgagccctcggaccctatcgaatgggtccagggagctccgcctcgcccgacctcaggcctcggcctcagcttcggccttggaagaagatctctgcctcacccgacctcaggccccggcctcagccttggcctcggaagaagatctctgtctcgcccaaccctaggccttggcctcagcctcggactcggtaggagtcaccacctcgcccgagcccagcctcgacctcaggagaagtctccgtcttgcccgacctgggcctcggaccgactacgctacagcggatacatcattaccctactcctagctagctgccttaggctacgaaggaacaagaccggtgtcccatccaaggtcactccgggctcaaggaacttctccgacggccacgttagctcgtgtacagggctcaaggcgcttctccgccagccacgatag

SEQ ID NO: 40298 - DNA, 249 bp, Zea mays
  Peptide Sequence Number=SeqID_83673
atgatcgttgcactcaactggcactgttgggtcacgcgcagggctgccttgagtggaggcactggcctccatgctggaccgccggatgcgacgaagccgaaagggtgcacaaccgtggtgcggttgcatgtctctcgcatggcggagcgtgaccccgtgggggttggcgctcttcagtcatcacttggcttcaaggattttcatcaggcagcccggctgcagtcccccgctggcggtcacctaggatga

SEQ ID NO: 40299 - DNA, 495 bp, Zea mays
  Peptide Sequence Number=SeqID_83674
atggctaggacaaccgaggccatcacggcggcgcactccggtgggcagcacgcccagggttccaagcctccaacccaagagtcccctggtgctctacgatgcgctaacgaaggcggtcacaaggggagggagacataccatggattgcgcggtcaatgctccggcttcgaagcgcaacggagagctaattccggccaccgccttccccgggacaccgggtttcttctgcgcacagcccagcgtgatcttgagaacacctgggtacggtttcgcgcaccgaaccatgccgagtcctccgatcggccactggcctgctcccgtgaagtcccggcggtgggcaagaaaccaacggatgcaccccagcccccgcgggtggtaaacggctgcgccgccggcaatccgccatactcccagcgccacaccggtgaggcatctcccgcgttaggccagctcacggagccacacgctcaccacatgaactggcgaggcccgtga

SEQ ID NO: 40300 - DNA, 993 bp, Zea mays
  Peptide Sequence Number=SeqID_83675
atgcgaactcttctttcccccatcgtcgaggcaaaaagctccacggagaagagatgggtccacagatcccagtgggggggcaatccccaaaaacccttcgcaaaccgccacgaagatggctgcttgcgcgatggatttggggctgagattgtgcagctccaccccgtagaagtgcagaattgcccgcatgaaacgacttgctggcactccgaacccccgctcgtgaaaagagacgaaactcagcacataccccgacggcggggacagggcggccctgctcggaggggccatccactccagctgtgggtcaccggagaggcgacgaagaaagccgtcggcaacgagggcctccagatcgtccgtcgtgacggtggagaaaggccacgggtcgcacagcagaatgacggtcacccgatcggccatcaccaagcgaaggaagtggcggcggagcggacaaggtattcattgcatgccctacacggatgtgacagttttgaaaaatatactgataattcctgggcgtccccccaatgggtgtgggcaagggacagcttgagtaacaaacgcaagcgagagtcgactcctccatccgaggactttggcaactcggaatactcggaggaggagttctcctccgagtccgaggggtctccggcttccatctctcccccggcgtcgtctgacgattcagacgactcccaggggcttgccacggaggtctggacttacatccgggccgtcgagcgctccgggctcgagggctcggatgagtcggagtactcctcgaacgaagaggactcctcggactcgtccgaggagggcggtggcggcgatggcggagacgacgacgacgacggaggtgacggtgacgacggcgacgatgacggtgacagcggcagcagcaggggcggcaacggcggcagcaagggcggcagcagcaggggcagcaacggcggcggcagcagcaaggacatcaacaaggccagtggctag

SEQ ID NO: 40301 - DNA, 216 bp, Zea mays
  Peptide Sequence Number=SeqID_83676
atgtcaagtgcaccaacggctcccaggctgccaacggtcgactgcgctgtttatggaaagaaatcgggcaccggacatgtccggtgtgcaccggactgtccgtggagtgagaagactcttcgagtaggttgcagcggaatggaagatcctgtctcaaaatgtcctgcacttcaaataaagcttataccacagataagtattgaagtgcagatataa

SEQ ID NO: 40302 - DNA, 328 bp, Zea mays
  Peptide Sequence Number=SeqID_83677
ctcggagacaactgatcaagccaaggacggaggcaagaagagcttcgaggtaccaagtgcacgggagaaggtcaaggaggctgaggaacccaaagccaagggtgaagaagaaggctcgcaaagtcaagggacagtgtccggtggtgcaccggacagtgtccggtgcgccaggctgaactctgacgaactggccgctctcgggaattcaccggcgacgtacggctataattcaccggactgtccggacattttgagacaggatcttccattccgctgcaacctactcgaagagtcttctcactccactgcatacaaagtcttcgagtag

SEQ ID NO: 40303 - DNA, 369 bp, Zea mays
  Peptide Sequence Number=SeqID_83678
atgtgttcacgattaagtgttctttgtaggctaaatgcatacagcttgtttgaggtgagagtatctggtgatggaaattgtcagctcaaggaatgtaactccttatatgaaggttacattcctatgaaatataaacattattgcaagaaaatgaagaagtatggatattactatattaactttgccgcttcaataatagaagtccctgaatttgtgatttttctgactgttgtattattgaaaataatcttttccaggtatggtgaatggggtgaccatgtcacgctacaagcagctgctgacaagactcaggatcagttctccaagtactcctgcacttggaaccatcaacaaagagtcaaagagtaa

SEQ ID NO: 40304 - DNA, 375 bp, Zea mays
  Peptide Sequence Number=SeqID_83679
atggctatgagaatgagattcaacttttggatataccaaaatcgtacagaattcgatatgataaaatatgttgcagttgttgtagctcatgaattagctcatcaatggtttggaaattttgtcacaatggaatggtggacacatatgtggcttaatgagggctttgcgacttggtatctagaggaatctacaataggtttcaagttggatgctcttgcaggttcacatccaattgaggcagcaaatattatcactttgtatgatgtttccaatatctggcgcattcctttgttgctacatgaacaaaaggctcatgaggctattcttaaagttctgaatctggaaaggatggacaaaaggctcatgaggctttga

SEQ ID NO: 40305 - DNA, 375 bp, Zea mays
  Peptide Sequence Number=SeqID_83680
atggcgcgcgccggaatcagcagggttgacgacgtcgaagcagcgaaattagcagggtcgacgaggtcagaagatcacgagcagtcgcgtgaggacgcttcccaaaaaccttattcgccctctcccggtgcaggatctagaaggcgaagggttccgaagacctgctctcctgatcgcagatgcacgtctgcggtcgggatgaagagaactggaaggcggctcagctgtgaagagaggcgaaagcgaaactgggatgatttggatgctggctgccaggctccttttaagggtcgagtccgcgaccagataactatcttcgatcttatccgcccacgaaatctcgcgttcagtttagattttatagcgatcggttag

SEQ ID NO: 40306 - DNA, 1338 bp, Zea mays
  Peptide Sequence Number=SeqID_83681
atgggggacgcccgcaatccttccgccttgtcgtcggaggaacgcaacttcgtggaagttggtacctttcagccatcgttcggcttcaatgattttcatcatgcagctcgaccgcatcccctcgccggtggtcaccccaagacggtgacctccagcttgatggcggggagaagcgaaccgggctgcgatcttgtccctccctcagtttcaaggatttcatcatcagtgcaggggaggggagtgtgccgagttggggtaggtccctgtgcgggcggcggcccgctccttccctcagtgatcggggggaagggcgtccgccgtccatggcatgggcagctgccgcgttcccggctctctgagccgagcggcttcggagccgctcccggtgtcgccttccgccacggcagctggaagaggttccgccaccgacgagctagccggcgccacccacggactgacctccaactcttcggccttctgcccgtccttgcctctcgagttgggggcatgggcgagggcctcatggcagcagcatccgccctgaggtcatcgctgctgctgttcggccctccggggcagaagtcgtcgtcgttgccgctgccggggcgggcgacgacaagccattcgtcggtcttctgttgctccgcaggcccccccagtcgcgtggggttcactgagactcgccttgtcgattatctgaactgcttcaccgagcgtgagttgcctcgtgcaaaggtgatgagtgagagttggcttcgaaaaggaggtgtagttggccagagcctggccgggtcgtccactggcagaatcgacgccggagttgagctgccgaggccacaagccaagctgatgtctttgggggacagctggccgaggcctcggggtggccggccgagccgcctgctcgggccggattctcgaagaagaccctggcggcgatggcccgggtgtggtgccgatgtcgtccttcagagtgggggcccttcgaccgcgtcgccgcccgaggctaggtcagacccccccgaaggtgtagttgatgccgagggtgctgctgcccccttcggctgtcgacgtccgagcctgcaggatcagtatccggactcatttgtcggtaacagaattgtttgtgagggcaagagttgcttttcacggaaggcgatgagtgagggttctgttaccgacgcagtcgagaaggcccgaaaaatcatttcggcagaggagctctcgagcatgaagacttgttcggtccgcggagtcacttatccgagcgtgagttacttatcgcagaaggtgatgagtgaggaaaatttcgacgcagagggggttgcccccttctag

SEQ ID NO: 40307 - DNA, 540 bp, Zea mays
  Peptide Sequence Number=SeqID_83682
atggcgcctcacatgccctgtgatgacggcggctctcagcccccttacggaagcaagaggacgtcagcaaggactcgacagccccaacagttgtccctccgccaggctccagcgctcctccgacagacacgacaccacgctggttcagctcgtattcaaatactggttcagctggtattcaaatactggttcagctggttttcaggctggttcagctggtattcaaatactggttcaactggttttcaggctagttcagctgatgttgatcctagggcaatagatcttgccctgagaatcaccgaaaggatgttcctcaaaatgaaggaagctgaggcgaagaacaagattgaagaagaaaatgatcgatggagaccaaacaacaaatccacctcttcacaaggttcttctttcaaatccacttctcatatgtgctttgtcgctaatgggagtgacagtgaaagcgaaagtgaggatgaggaggagcaagaaagtgatagtgaagatgaggatgatcttcaacaatctttgctcatctaa

SEQ ID NO: 40308 - DNA, 1638 bp, Zea mays
  Peptide Sequence Number=SeqID_83683
atggacaaggatcgccaagcggcggcgcggaaacgccaggcgaccgtgagggttcatgaagcccggccgaaaaggcagcggggagcatcgaaggctgaggcctccggcggaggcaagccgccattgccggcgaaggcgggtgcctccgcgcctggcaaggcgccggaggcgacggtgggcgccggaggccccaagctgtcgaaggtggtgccgtccgccagcggagtggcggaggctgcgaaggcggcccgatcgctaccgccgcccggcaaacgcgttgccgacttcggcactgagattgatgtggaggattatcttggggggttggacgagggcccgctcgctctagttgtgcctggcgcggcggtcgcgacggctgcgccagcgccgaaggcgggggtagagacccttggcgctggaggcgaggtgactgccctcgcgttggtcagagacgaggcggacgcggcgacccgccggctgaaaggagcaatggaggcgctgagtcaggtggctgacttcaccagccgtactgcgtcgggggcccttacggcgacgttgtctgccgaggtcgagagacttcggacgcaacacgcggacgctgtccgtgagaagtcggcctccgacagcaagtgccgcaagctggcggagaaggtggccgcccttgagaaggagaaggcagacctccggcgccagctgatggaggagagaagggaggccaacgaagccatcgccaaggagcagtctgcgcaggcggaggccaggctggcgcgggcggagggcaatgtcgccaaggagctcgccggggagctgcagcggcggcttgctgccttcgagagccgcgcggagggggccgaggccgcggcgcgagcggaggccgaacggacgcgcacgcagctcatgacttcatatcgcgagctgggtgtgcggacgagcgacttcgaggtgccggagcgagaggccggacttcgctgtctggagtgggtgcaggaggaactgcaggagctccccactgtcttggcggggttgatgtcgttcacctccctggtcacctgcgaggcagcgatgaacgcgctctctcgcgaaggctgccggcactttgaggccctcgaccaggtggatgaagattttgggcgagatatctttgaggtcgaagaccccgtggtgaaggagtccggcggggccctctatgaccggatgtggggttcatacggtcgagaggtggtccgggcgcgggccgaggctgcaagggctcaggcggagcgcggcgagcgggtggacgattttggggcgctgaacagcgcgccgcctgagccggagaccacccctgcggaggccgccactggagtcgccccggttcaagattttgggcctgcgcacgcaaccgctactactggttttttggcggcttcgaccgcggaaggtggaaatgaatgtggtgggtctgtttctgagttttttgattttactgactctgggagctcgactgaatggaccgaggagtcgtcggaggaggacttggactattttgcggccctggacgaggctgcggcggaggctgcgctacatgctgcggacgcgccaggcgtgcccggtcctagcaccgggcacccgacgacgaagggcggttgcgaagcgtag

SEQ ID NO: 40309 - DNA, 441 bp, Zea mays
  Peptide Sequence Number=SeqID_83684
atgcaggcggcatgcaaccgtgccaagtgggcgtgccccttcgactccaacgtgcccagcatggaggtccaggtccacgcgtcatgcaaccggcacgtcggttgctacgagcgagcaactgcaccgccactcacgccactaccgcgcctcctcgactgcggagtcaataccgtgactcgaggcaaccctgcagtgccagccaagcgcgacggtcaaatgcggacaggcggcgcctcaggcgggagaagcaagcgacgcttcgccttcgccataacaaccgcgtcgaaaaagggaccgggaaagggggataccccgaaaaggacccttctccgtgaaggaaacaggctccgagcccccctactgatcagaggttcgaaggctggcccctcggaggggttcaacggccgcctcagatcaattgggttctgcgcccactactag

SEQ ID NO: 40310 - DNA, 927 bp, Zea mays
  Peptide Sequence Number=SeqID_83685
atggggtccacttctccttcaggcctggagctcaccatggctgtcccgggcctcagctcctcctctggctcagaggggtttggatgcaacaacaacaacgggagcgggaacgggaacaacatgagggacctggacatgaaccagccggcgagcggcggcgaggaggaggagttcccaatggggagcgtggaggaggaggaggacgagcgcggcggcgccggcgggccgcaccgcgccaagaagctccggctgtccaaggagcagtcccgcctcctggaggagagcttccgcctcaaccacaccctcacaccgaagcaaaaggaggccttggctgtcaagctcaagctgcggcccaggcaggtggaggtctggttccagaaccgcagggctaggacgaagcttaagcagacggagctggagtgcgagtacctgaagcgctgcttcggctcgctgaccgaggagaaccggcggctgcagcgggagatgatttgggataacccacggaccgtccgagacgcggaccgtctggccttcccagaggcaacgggtaactcacagcacgtagattgtctacgtgggaagaccagctcagcgaacacgaggttctgtcccagaaaaccaattccgccgcccacgtccggacctgcacggcgggaggttgacggagatactggagccgctgccggagccgagggagacgtcctcggcaccagcccgagaagaggaacaccgcgcagcagggagcccaagcaccaggccacggttgacagcgatcagaggaacacagcaccacacagggaccgaacggatcgatcaacttgtgactggaacagcaaactggagaaagaaaaaccgagaggagccgactctggttacacgcgccatgcctttaaggagctgaagaaaggggaggagccaaccggatga

SEQ ID NO: 40311 - DNA, 204 bp, Zea mays
  Peptide Sequence Number=SeqID_83686
atggcgttcgtgccggtgtgcgtgcagtgcgggacgcggagcaacccgtgccggtgcaaggtggtcgggccgacgctggggttcgtcgcgttcgtggtggccggggtcatcgagtggccgctgggggccgccgtgtacctgttccgccaccgcaagggacgacgcatcatggcgcacccggccaccgtcgttctatccgagtaa

SEQ ID NO: 40312 - DNA, 300 bp, Zea mays
  Peptide Sequence Number=SeqID_83687
atggcttatgtccgacggcattctataccgtcggacataagggatgcttatgttcgacggcttgccgctgggccgtcggacttaaggttgtggggcccactggctggccgggaaaaaacattcggtccactgcttggcaaaaatgcctctttaaggaagggcaaggaggaagcaatgaggaaggaagcggcaaaagacttgcctcttcaatatattagaagagaaatagataacagtcttcagaagacggagcaaaagaaaaaacaaaaaaggagaaaaacatacactaactcaatctaa

SEQ ID NO: 40313 - DNA, 222 bp, Zea mays
  Peptide Sequence Number=SeqID_83688
atggcatggcggtgcaatgattacggcggccaagctgcggcccgacaggccgactcgcctacccccgagctgggggacctgccggcagttcccctgcactgcactgcacccgccccgcgccaggcgccgctcatctccacagccaaatgctatggccaccagctgatgctagagcagagcggctttacacttctcggcaactactcgtgtgatcgtgtctga

SEQ ID NO: 40314 - DNA, 384 bp, Zea mays
  Peptide Sequence Number=SeqID_83689
atggctccaacatatatctttgcctttgtgtctttattgaacccctgcaaccaagaagaccccatatcctgcaagctagttggttctctaataccaaagatgaagttggcaattggcatgcgtcaacctggcgaaagagtacatcaagagagtcgtctcgtgtctgaggtcgaaggcctcatcagtgacaacagccaacagcttgggcagaacaaggaagacgacgtttttcaaacgtctgaaagagcagaacgggaaagtcttgctccatcatggctgaagttcgccttccgtgttctcccatatgttgggtttatttttcttttcttggttgacagttttagattagttttcatggatccttttgctgatggaacaaactga

SEQ ID NO: 40315 - DNA, 531 bp, Zea mays
  Peptide Sequence Number=SeqID_83690
atggcctcatctctcggtgctacagagatactggaggtaatgactcgacccttttctttctctacattgagcccgttggggtcaaatctgactagcctattgctgataatgaaggacaagaatgccaaaggggaggcaagtaaaggtcctttggaagcggccatagaggaatcaacaaaggcgtggggtaaaaacgttccgcagaagaagcgccaaataaaaatggtgatcaaagctatttgtagaactccatcggtagtggcgaaaaagaaggctttagttgttgaggagaatgttggagtgggcataactgttggaacgggtcaagatattgaagatagcagagatgtgctagaatgcatccttgacagagatggagctagagtggtcaatactctgacgaagtctattggcttttcgaagctggagagcaagttgagtaatataagaaaacaacatatcaccggtgttggtcacttgttctcaattgctatggatcaagaacaaggcaacacatttgttatacattaa

SEQ ID NO: 40316 - DNA, 369 bp, Zea mays
  Peptide Sequence Number=SeqID_83691
atgggggagaagaagatgttcaccttctacatcaagaataaggattctgatgacacgatcatctttggagatgggaataaaggcaaggagataagtttacctagtgagagttggtctttggatgaaggaaccaaaggaagattgatccctaagagtttcttggaaactattggttgcattgactaccttgatatccattcccgttatacatatttccttggaagtatcaaatattgtttacaaaaattgcttagccctgccaagagggatccccagctgggtaaatcgattcagatcaccgttatatcctcggataagggacacttgatcactgacctgcaatctaagtcatggatggaatcacaatga

SEQ ID NO: 40317 - DNA, 567 bp, Zea mays
  Peptide Sequence Number=SeqID_83692
atgacggtggtagggcttgattccatcggctggggagcttcattggaggtcggggatgctgctggtgcaaggaatcgggcgacggcatactgggtggcgctggccacgatcaccagcgagcggatgaagtacgacgagcggtggcacgctcctagaggggagttgagagtgagggggctggccgagaaccttctccgtgactcaaggaagctaacagtggagcttactcggttgaagggtggctgtgatggccgaaccacggtggccggggctcaggcaacaagggtgagcggtggcacgctcaactgcggtgaaatctcggtgagactattttcaggatcacctgttcaccccccctgtaggtgctctcaattggtatcagggccactctcttcatcaagggactcaccgaccaaagagatagatcctaaagtcaaggggaaggtgaccgaggagaaggagataatcaacaataagccctcgagggacaaacccgttgactcaagctcaaacaacaagaagaaggacgggaagaagaagaagcgcatcaagaagattgtctactaa

SEQ ID NO: 40318 - DNA, 435 bp, Zea mays
  Peptide Sequence Number=SeqID_83693
atgaccaatcccggcacactagacgacggtgtagaggagaagcagcggcagcggcaatttcttttcggctctccgcggcagtggttatgccctaggcgcaaatcgggttgtagagtcgcgactctggaggatttatactccggacgtgtccacggtagcaggggtagtggaagtaaccaatcatggtcgagttttgcggagcaaggcgcggtcaacggccatggcggagaaattggtctgttcggccacgaccagctggggcgacaagatgacaggcgggtcccacatggcgagaggctccaagttgtggagatacctcgcaagcgggatatagtgaaacaaagcaaaacatcgtggtattcaagtgggtctttggaccgcttgagaggggttgagtgcaaccctcgtccgttgggacgccacaacgtggagtag

SEQ ID NO: 40319 - DNA, 105 bp, Zea mays
  Peptide Sequence Number=SeqID_83694
atggcgcccgtgtactcgacaacaccggaacaggtcaccgccggagttaaggatttattgggcgcactagaggtgcacccaatgggtgtagcccccgagctttga

SEQ ID NO: 40320 - DNA, 390 bp, Zea mays
  Peptide Sequence Number=SeqID_83695
atgggggagaatcccgagataggcctcacacagatgaataaaaatggaaacttgcaatatagaattagggttcaagtgggtcaagttcagatcgtagaaatcaaggagtttgcgaaagaagggagaaatggggagagcaaggccacgtgtaagaaaaggaacatagacgacagactcatgggtgtgctccgtcggaacagtgacccgcgacaaattcgccaagagcagagttctttcggagcggagctctgcctcttccgcttcggcgccatcgcaatctcgtcggcggaacgaacaggagcggaatctcaaggaaacagaggagtggttcgaggcagaaatgtgaagttagggctcagaaaccaaaagcgcatgccgacacgagtataa

SEQ ID NO: 40321 - DNA, 462 bp, Zea mays
  Peptide Sequence Number=SeqID_83696
atgggcaaagacaagaaaggtcgaggttcgccgggtcgctccggcgacaagcggaaacgtgagccaagtcctccctcgaaggacttcggagactccgagtactcggaggaggagttttcctctgagtacgagggatcgccggtctatgcttccccccccggtgttgtccgacgactcggacgttcccaggggatagaagccgaggtgtggacgtacatctggtccgtcgagcgtgccgggctcgagggctcggatgagtcagaggtctcctcggacgaggagaactctttcagctcgtccgaggaagggagcggcggtgacaacgacaacgaaggcaacggcagcggtggaggtggtggcggcggcagcaagggcggcggtggaggcagcgacggcagcaggagcaacgatgatggtaagggcggctgcaacaaggctagtggaaaagcgccactggcttaa

SEQ ID NO: 40322 - DNA, 438 bp, Zea mays
  Peptide Sequence Number=SeqID_83697
atggtggcgtggcttaccggcgcaaggaaggtccggcgaagggcggggttagatcccggaggtcctggcggtcacatcgaggtgcgactcgtcgacggtgttggccagaatcggtcggtccacgtgcgcagatggtcgggctcgtcggcggcgtatgctccagcctgctcatggcggtattgctcaatccagtggcacaggaagctttacggggtgctaaggacgctaccagtacaaggaatcgacggaaggctcaccgtggagctcggtctacaggctatcccgagggtcggatggggcggggagtggctaggttggccggtgtacggttgtcgtggctcgcgtggccgctggcaccttgctcacggggcaaactctgggatcacaaacgtgcgaatctcgccaagggtcttatgcaaatctcttcctggcacctag

SEQ ID NO: 40323 - DNA, 477 bp, Zea mays
  Peptide Sequence Number=SeqID_83698
atggatgaagacgacggcagaaaggataagcgaggaagagagaagtcgggcggtgggaaatatctccagccaaaagaattgcgtagagagcggtggctggacactaggagtacagggaagctaggcgtggagataaaagagaaatatgatttcgcttttcttttttttaagcgtaaaggcggtgatgcgcacattcatggagcgggtctgcgtcgagaaccgaaggccttcgccaaggagggtgtggtcgccggcagctacaaggtgcgtatctttcagagttgtaatgactgttgtacacagaagtttggcagtcacacaaggtctcagttgttcactaagatggagtgcttttccgatttggatgttaatgttcacttagttgaagtctatgctggactcctgagatattcaggatatgctggcctgataatgttgctctccctcgtgtatgcgaaaatcagatatgagaattga

SEQ ID NO: 40324 - DNA, 642 bp, Zea mays
  Peptide Sequence Number=SeqID_83699
atggacaaaaactccaaaaataaggataagcagttgaagtctcatcctccaaagaacgttgaatcggaaatcttgcgtgagcatatcaagaaagagagggaggcagcaaaggctggaaaaagaccatattatctgaagaaatatcgcgcgtgcctttctgtgtttgtgcagttggtgatcagcgagatcgactcgtcagccgctacctcgctgcaggtcgtgaagctgctcgctctgtacctcactggagacaaggaaggtgctatctccagtctcaaggaatggttgagtgattcagcaattggaagcaatcctgttctgcgattgattgccggaattatatttatgcatgagcaggactacaatgaggctctcaagcacacacactctggaggaactctggatttggaagcgataattgatcctgcagcaatttttgaacagttagaaaagagaaaattgatcccccaaccattagcagcaaaaagaaaaaatcgatactgcaaggaggccaaagcctgcaccagtgaccccctcaagcatcctgctacggtgctacaagcgcagccgcctcgcaagttcacgttccgacggggcaaagtactgaaccctgaagagagcagtggcagcaccccaaaatga

SEQ ID NO: 40325 - DNA, 432 bp, Zea mays
  Peptide Sequence Number=SeqID_83700
atggtggctcagctccagcccccggcgttctggtcccttcaaccgcagaccatcgcttctaggtcatcttggccgagcagcccctctgcattgagcttctccttttccccaacgctgcgcagctccaccacggcgaaacgccgctgttcctgcagccccgacacctccccttgcttcctcgctgccggcgctgcgtgcgtgccacgtgttcggcgaactgtccaatgttggaacttgatgtcggtgcaaggtgatccaacgggggtgtctgagtgcccagcgtcctgtgttaaggacgcatgtgccctcagtcacctaggttatccctggaatattcccataaagcgggcgagggcggcgaaggcctcgagcgaagggtggcgtcttcgccttcgccccaacatttgcccttcgagggaccagttcgactaa

SEQ ID NO: 40326 - DNA, 348 bp, Zea mays
  Peptide Sequence Number=SeqID_83701
atgacccaaaagcgatggtctgcggttgaagggaccagaacgccgggggctggagctgagccaccattggcgcggttgagggagcaaggaggagaggcggattccacagcgaggcactggagcatggggggagggagagggatgggaagattgcagcgggcgctatggagaatagggaagggcgctgcatgcttgaggaagaagaaggggagggggaaggacgccatggctgctggaggtgcctgctccaagggagattggccatggaagaagatgggcggccatggagaggagcacggctccctgcttgctgccgtgggaaccacggaggaagaacgtgctggctga

SEQ ID NO: 40327 - DNA, 282 bp, Zea mays
  Peptide Sequence Number=SeqID_83702
atgcgcgacggcggaggtaaattggacacgctccgatcaccctcctgccctgcaatcgccaccaacgcgaacccggagacacgggcgaagcctcttggcccgctcgcaaggctccaatttggcgccgagcactacggacgagggtggcacacgcattcggtgcagcgacgggttacggctcccacggctcacaatgattgtgctcaacgagggacggtcaaccgagctggggagaggcgcgacaatggcggcgagcgaagcggctcggtggttgcggcgtag

SEQ ID NO: 40328 - DNA, 213 bp, Zea mays
  Peptide Sequence Number=SeqID_83703
atgggcagggacttggccgagcgggcgctatggagaatagggaagggcgctgcatgcttgaggaagaagaaggggagggggaaggacgccatagctgctggagtcgcctgctccaagggagcttggccatggaagaagctgcgcagccatggagaggagcacgactccctgcttgctgccgtgggaaccagggaggaagaacatgctggctga

SEQ ID NO: 40329 - DNA, 249 bp, Zea mays
  Peptide Sequence Number=SeqID_83704
atgaccactaagcaaacaactggcttatcggccaaatgggctatagggacagaggttgggcagttggttgtggcaccgacgaagcctgttgaagagagggctccggggaagaccgtagcggtgacttcgctgtacccatgggcacaattttgcgtcgcagctgacgggggcaaagaagttgtcgatgcttctgcggccgacggcgtggtggcaactgtcgcacgagctgcgctatgtgagtttttttaa

SEQ ID NO: 40330 - DNA, 156 bp, Zea mays
  Peptide Sequence Number=SeqID_83705
atgggagaccacgtctcaagtcgcgtgaggggatatgtctacgggcaggttcactcaggtggtttgaactacaacagtgattttaaaattttcaaaaatcttgtaaaagttacagtgggtgaatattgggctctgaagtctgtcctaaaattttga

SEQ ID NO: 40331 - DNA, 315 bp, Zea mays
  Peptide Sequence Number=SeqID_83706
atggtgggtacaagtgcggtcactgcacggcggcagccggggtcagtggagcattgtatcattcaggaaatggttgatggtgtgacttggcctaccaccctgccaccgggttggacggtcgagtgggatgttgctccgggtagctccgaccacctccgacgccgacccgcacaccgacgtgaccgtcgtgacctccccgacgtcactgaccaccccgccggagatctgctgccgccgggttttgaattaaataagaaaactgctaaaaacttaatattagaaggaaaaatagaaatattgttagacaagggttaa

SEQ ID NO: 40332 - DNA, 591 bp, Zea mays
  Peptide Sequence Number=SeqID_83707
atgtcgagggccacggcgatgcccacgcccgattgcaagctctcgcacgctccttggttgcaggcgaacgcccctgaccccaccgacggcgcgattttcttcctcccgagacagcgaccacaccaagcagcccagactcctttggattcgattttgggccttacaaatcctaccccccttaacagaaatctcgtccttgagatttttaagaaaaagaatgtagaagaaattgtttgtagtccatgggtgattaggaaagcaggggtctatatgagtatagccactttattatgcaggataaaagatatctttaaggcagttataggtttgggagtaggcctcctagttctaaaggtcactttaggcacgggatttcaaagtgtgaaatccccatttatctttagaaggaaaaggtttcgtcctacagtcaacattcctctgataccacttctgtcacacccggattttaggggtccaaaacccgggcgcgaacataaacaccaggactgggcgtcaatatctgaagaactcaggggctctggcgcacttttccctaagactcagacgaatcttatatggacagcgggttga

SEQ ID NO: 40333 - DNA, 378 bp, Zea mays
  Peptide Sequence Number=SeqID_83708
atgtggatggcgcaacggatttcgccgagcctgggggacgcatccgttgatcccggcgcatttggttggggaaaatgcaggaagaaaatcgcgccgtcggtggggtcaggggcgttcgcctgcaaccaaggagcgtgcgagagcttgcaatcgggcgtgggcatcgccgtggccctcgacattgctagtgggcgtttggtgcctaggagttggcgaattgcgcatcggtgtccccttccggccgcagattcgtggagcttcacggagtgggcgctgcgtcagacagctgcggatgtgaagccttctgggggtccgctggtacatatggacgtggaccacgccctcctcgtgcaggctcgtggcggtggctgcgagtaa

SEQ ID NO: 40334 - DNA, 2112 bp, Zea mays
  Peptide Sequence Number=SeqID_83709
atggagggtaccgtcgaagaccatgaggggctccccgtgtctgagatgtgttcgcatttttactcagcatacccgccctttgaggtggcggaggaggatgcagacaaaggggcccttcggtgcgccgccggcctgagcagtgggcgcgatttggttgaagaatttgtggcgtacggggatggggcggtgcggattgttggtcggtacgtgccgaggacagagggccagcgtagctgggatatccacgggtcgaatgaccgtttgaacaggagaattgatgaggacatgcacggccccggggggaaggatgtcttcgccggagctccgggagtcttcggcgcggatgctgaggtgatggacaaggatcgccagggagctgcacagaagcgccaggcggttgtcaggcttcatgaagccaggccgaagaggcagcgaggggctgcgaaggctgctgcccccagcggaggcaagccgccgctggcggtgaagtcggccgtccctgcatctagcaaggcaccggaggttgcggctggcgccggtggttccatgtctgcgaagactgtgccgccgtccggcagggtgccggaggtcgcgaaggcggcccgagggctgccgtcgccgggcaagcgcgtcgccgacttcgccaccgatattagtgtggacgactatcttggtggcgagatgccggcactcgctgctgtcagggacgaggcgggcgctgtgtcccgccgactgaaggagatgaaggaggcgctaagtcaggcggttgacttcgcagaccgcgcggcgtcgggggccctcacggcagttgtgtctgccgaagtcaagagacttcggacgcaacatgccgacgccgtcagggaaaaatcggccgccgatagtaagtgccgcaagctggcggacaaggtggccgcgctggagggggagaagactgacctccggcgccgattggtggaggagaggagggaggccaatgaggccctcgccaaggcgcaggctgcgctggcggaggccaatttggcgcgggcggagggcaatcttgccagggagtgcaccgagcagttgggggagcggctcaacgctctgcagagccgtgtggagaggaccgaggccgcgacgcgtgcggaggctgagcggacgcgcaaacagcttatggattcataccatgagctaggcgcgcggacaggtgagttcgaagtgccggaccgagagcccggactttgctgcctggagtgggtgcaggaggagttgcaggcactccccactatcatggaggggtttatgtcgtatgcctccctggtcacctgcgagggggcgatgaacgcgctctctcgcgaagggtgccggcactttgaggtcttcgaccaagctgatgaggattttgaacgagatatctacaaggttgaggaccctatagtgaaggaatccgccagagccatttacgaccggatgtggggtccgcacgatcgagaggtggtcagggagcgggccgagacggcgagggctcaggcggcgtgtggcgagagggtggatgatttcggggcgttgaacagcgcgctgcctgacccggagtcgaacccggcggaggccgtgtccgaggccgccctggagccgcccccggaaactgccgaaggcactcctaatgcccctgcagccgctgcggtcggcggaggcccgcccccagagaccgctgaaggcgctcctgatgcccccgcagccgctgcgccgagggctgagggtcctgcgacggtggcggcggaggcaacagcggaggcgacagcggaggcgacagcggaggctcccgcgacggctgggtcctcgcaggtggttcaagattttgggcctgcgcacgcaaccgccactactgattttttggcggcttcgaccgtgggtgatggtaatgaatatgatgggtctgtgtctgagttttttgattttgctgactctgggagctcggttgagtggactgaggagtcgtcggaggaggacttggactactttgcggccttggatgtggccgcggcggaagcttcatcgcacgctgcggacacagaagatgtgcctggtctgagtaccgggcgccggcggcgaagggcggttgtgaagcgtaga

SEQ ID NO: 40335 - DNA, 285 bp, Zea mays
  Peptide Sequence Number=SeqID_83710
atgagcagcgaccgcgatttggtggaggaatttgttgcatgtggtgtgtggccgctggctcacgactgggatctgggtgaagtcaagctgcgcccgatgcccttcttaaataatttgatggtacagagccccgccttcaccattgagctgcgagggcgggatgaggtcgcctttgtcaggctgactaatagagcttgcgatggtatagtgatcggattggatcgccagctcagagacctcgtcgctgacgggctgtgcgctcggattcgtgctcgccgttggtga

SEQ ID NO: 40336 - DNA, 312 bp, Zea mays
  Peptide Sequence Number=SeqID_83711
atggccatgatgggttcaacattggaaaagatgtacctctgccaggtgatgaagcagcaaacttttgttgcttctgttacaagtgatggaaaaggaccgtcaagagtccccacggaagaagcggaaggccccccttcggctggtggatcctcgttgcatcacgacacgaaggcaccatgccccagcacgaaggggactaccgtggctgctgcgatgcctcctctagaaatgtcggcgaccaggagggtgccttcgccgccgcaggttgctgaggtggcagcggcggaggagactgtagaggcctaccggtag

SEQ ID NO: 40337 - DNA, 912 bp, Zea mays
  Peptide Sequence Number=SeqID_83712
atggcgctcatcattaagagcttccgccaaatcctcaagcaaaggagggggaaaactacaagtcgcactccaagaaggtttgctaccggtgtgagatgtcgccggcggggaggggaagggactggaccgctgggaacgagcaagtggtgtggtggcgaggcgcatgggcaatgcagaaccctgccccgcctgcggagggccgaggcacaacaagtgggtgatgcggagaagaagggcatccggttctccgactctgtgaggagagggcacatgggtggttgccatgaggacgacattgcctccaagtctgctccaccggcatccatcgacggtgcaaggtacggattcgagcctctggtccttcaatctagccaccaggtcataatcgaagggtttacagggaggagatctgaacatagctcttcaatcccaaagttaacatcgttggtaaaccccttctggtgttacctcacaaatatcactaaagtcattttagctttttgctactccttatgtgctttagattcagcaagagctgggattccacaccttaagtggtttggggtggaggggcagtacaatgtcatggtgattgatctgcttggtccaagtctgaagggattatttaactactgcagcagaaagttctcacttaaaacagtactaatgcttgctgatcagatgaatcagggcttcatgacaagaaatgatctccttctcaagtggtgcagacgtgcgttagcatccatgtcgatgcctcgcttagatgctgagatggtggttacagtccctgttgcaacggccttcgtggtgctcctcccctgtaggcacctgtccctctgcggcgccgccatgccgtgcctcgtgtgcctgtgcgtgcggacggggagtgtggaggccatcctctactga

SEQ ID NO: 40338 - DNA, 441 bp, Zea mays
  Peptide Sequence Number=SeqID_83713
atggggaagcctgtcccatcactcctcatgctcctcctcagccgaggcggggtcccactcgacagtccaacctggtggcaagatggacggccaagtcactccagcaaccatgtcctccagagaacctgtaaaaattatgccacaagcaaggctgagtatactaatactcagctagacttacccggttacaatggatcaagcagtctcattagctgcgagaagcagacgattcgaatcgagtttttatccttgcaagtgaccgcacttgtacccaccataaccggaatgggagaccacgtctcaggtcgcgtgaggggatatgtctgcgggcaggttcactcaggtggtttgaactacaacagtgattttaaaattttcaaaaatcttgtaaaaattacagtgggtgaatattgggctctgaagtctgtcctaaaattttga

SEQ ID NO: 40339 - DNA, 249 bp, Zea mays
  Peptide Sequence Number=SeqID_83714
atggcacaagcgattgaaatggcgcagcagatgctgtcgctgtgggtttctatttatatgcctagtgcaaggcaacttggcgggccccatttgtcattgactttcgctattctagtgaagggaagcatgatcaggatgaaggatgagctaactccgaagctttggctggagaagcttcagcttaacacaaggatgatgatgaaagatgaaaccgacctaaaggagaaaagaccacttagtcctcgatag

SEQ ID NO: 40340 - DNA, 351 bp, Zea mays
  Peptide Sequence Number=SeqID_83715
atggataccctgaccaggctgactacggcgtttcacagcgccgcggcggtgatctcaccgactcaattcattaccacgccagggtgcactccccaccccgagacctactgctacatcatgttgaggcccaggcgaacaatctcaaggtgtcttaccgaagatttggagctgtgcaggtgcctgaccatgacgagatgcggcataacgggctttacagacgctgtcatggagacgacaagggcattgactcctgcccctgcaaaaaaggttgccgaaactattacggctcatgctgaaaccaaaggtgggcccttagtgcccacggaggcagagcctaccgcaactgagtag

SEQ ID NO: 40341 - DNA, 567 bp, Zea mays
  Peptide Sequence Number=SeqID_83716
atggaggtttgctgctgcgccatgggagaaaggagctgtgggcgccgagcagcgaaggggaggacgccgttggaggaggaaggagagcgtggggagggtcgttggcttcctgcgcggcgtccatcgcagggggatccggccatggagggaaaagaccatgctccctgcgcgctgcttcatagaatggggagcgcgagcagaggaggccggatggagcaaagggagttggattctatggctgttggccgagctcctagcagtggggattgctggcgaccgcagagcagaagggggcgctgggagagggagagcagaggcgccacaccatggacgccggcgagctcgctgctcgagctcggaccagaggagatgccgcgccctggctggagcagaggtggcgttgggggaagaaggcgatgctgccctgtgcgctggagcttggggaaggctgggcggccatgggattccacccttgctgcgggaggtgccgagctccatgggagaagaaggctccctgcttgcttcgtggggaagaaaaaaagtggctggcggctgggggaagtgtag

SEQ ID NO: 40342 - DNA, 621 bp, Zea mays
  Peptide Sequence Number=SeqID_83717
atggaggtttgctgctgcgccatgggagaaaggagctgtgggcgccgagcagcgaaggggaggacgccgttggaggaggaaggagagcgtggggagggtcgttggcttcctgcgcggcgtccatcgcagggggatccggccatggagggaaaagaccatgctccctgcgcgctgcttcatagaatggggagcgcgagcagaggaggccggatggagcacagggagttggattctatggctgttggccgagctcctagcagtggggattgctggcgaccgcagagcagacgggggcgctgggagagggagagcagaggcgccacaccatggacgccggcgagctcgctgctcgagctcggaccagaggagatgccgcgccctggctgtagcagaggtggcgttgggggaagaaggcgatgctgccctgcgcgctggagcttggggaaggctgggcggccatgggattccacccttgctgcgggaggtgccgagctccatgggagaagaaggctccctgcttgcttcgtggggaagaaaaaaaagtggctggcggctgggggaagtgtaggggtgggaatgcaaaaatggccaagtgcaaggaaggaacacccctatttatag

SEQ ID NO: 40343 - DNA, 273 bp, Zea mays
  Peptide Sequence Number=SeqID_83718
atggctcactggatagctcagtctacgcgtggcggcgggctaccaaagtccgacaatgatgatcttgctattccggtgaggcagggcttcgattctcgcttggacaaggttcacgcctcctcggggaagctgtccaaaggctcggttgaggctgaaggtctctggaaatggctggccacggcggccggcgctcgggtggctcgggcgggtggcgcagatctcgctagagctaagggtggtgtctggccagcgaaggcttatgagttttgctga

SEQ ID NO: 40344 - DNA, 195 bp, Zea mays
  Peptide Sequence Number=SeqID_83719
atgaagactctgacgactttctgcagctaccatcccctagagatggtgatgcacccactgggactcttccccgctgagaagagggatgaccctatgtggtgcaaccatatggcagctaggaaacgtcgcgggcagaatgagcaagttcccccgccacctcctccagctcccacggtgcagaagctgatggcttag

SEQ ID NO: 40345 - DNA, 594 bp, Zea mays
  Peptide Sequence Number=SeqID_83720
atgctcacccgcgatgacggtggacgaccggacgagctcgcggcgaagcacgaggacgacgatgctgctgctgcaccagggtcgtgcaaagacgagtcagggctacgcagagggctgcgcaggaggaagcgggggcagctaggccacgccacgggctgccatggccgccgagctgagcgagctcgcggggagaggcttggacgcgaggcaggcgtgcaggaggaagcttcgctagagatcgggctccggccgtccatcagaggcgttcacggcgattatcgatggcagggcgagcacggcacggtggaactctgggcgcaggtttctgctcgactactgctgcgcatggggaaagaggagaggcggggtggaactgcatggagtggggatgtggggcaaagcggttccagatctagggggaagatgaacagagcgatcggcggcgggttcctcggtgcgggcgcgtacatagctgagggagttgtgcggctgaccgggtcgctgggcgcctgtgcgtctgcgcggctggctgcgcaagaaataaaacgcgcttgctggaggggaaaggggcgcgggagtgggccagaggggtag

SEQ ID NO: 40346 - DNA, 266 bp, Zea mays
  Peptide Sequence Number=SeqID_83721
atggatcttgacccggctgcagaggatgaggaggcggagcgacaacttgaggaccacaatgaggcgatggatgctagacaagccttattgggtgttggtgtcactcatttaactgataaagtatttgcaatcaccttagataatgcttcatcaaacaatactgccatgaaatatctcagacctttcttgtctggttaccttggtgtgcatgctcctgttgtgactgatgatgatgatgattcttttacacctactgatgatgactt

SEQ ID NO: 40347 - DNA, 180 bp, Zea mays
  Peptide Sequence Number=SeqID_83722
atggctcgcgcacgcgcaacgaccgccccgcgaaccgcacgccccgtcgcactaactccgcggcgggaaaggcggcgcctctggcaggagaagcaagcgacgcttcgccttcgccataatgaccgcgtcaaaaaagggaccgggaaagggggataccccgaaaagtatccttctccgtga

SEQ ID NO: 40348 - DNA, 615 bp, Zea mays
  Peptide Sequence Number=SeqID_83723
atgaccgagaccgggtggcccacggcgggcgacctggaccagttcggcgccaacgtgcggaatgcggccacgtacaaccgcaacctggcgcggcgcctggcgtccggggccggcacgccgcggcggcccggggtgccggtgccggcgatggtgttcgcgctgttcaacgaggacctcaagtgggggcccgacacggagcggcactggggcctgttctaccccaacggcagcgcggtgtacgaggtggacctcacggggcgccgcccgctggcgtcgtacccgccgctgccgccggcgacgaacgaccagccgtaccggggccccctgtggtgcgtggtgaggacggcgggcattaacgagacggcggtgagggagcaggtggcggcggtgtgcgacgacgacgaggccgaggatgcgctgtgcgaccccgtgcggcccggcggcgcgtgcttcctgcccaacacggtcgccgcgcacgccagctacgtcttcagcgcgcactggaacaggttcagcgaggactacggagcctgctactttgacggctggggcatggagaccaccatcgatcccagccatggatcatgcaaatttccaagcatccatctcaaataa

SEQ ID NO: 40349 - DNA, 522 bp, Zea mays
  Peptide Sequence Number=SeqID_83724
atgaagtggctcgccaacactccaaaccccctctcatggaagggggtgaagctcaccacacagcccacgggcggagccggctcgtgctcgtcgcctggtacaatcaactccagctacggcccgtggaggcgggggcggaggctcgacgtccaccaatgcttacaagtcattgttggtgatggaggagatcggtcatgggttgcggggagaaaggacatttactttctaggccatcagagatggggaagaagacaagacaagaggaagaaggcggctagggcaggaaggcgaaagcagaaggtcgggccctcaaccgggttcgagaaactgcctcaggacaacatgggctccgagcccgttactgatcacgggttcgaaggttggcccctcggaagcttcataaccacctcagagcacagagtcagggatgactatgggtatgtccgtacatggccaaggctcgggctacaatcccgaggtaccctaaggcatatccgagaccactgggagcgatttgtgtag

SEQ ID NO: 40350 - DNA, 204 bp, Zea mays
  Peptide Sequence Number=SeqID_83725
atgcacccttcagatggggatgcttggaaggctctcgacacgtttgatccagactttgcagctgatctgaggaatgaagaggaggacaaggaggaggaggtgcaacaccatgaggaggaggaggtgcaggcccatgaggaggaggaggtcgcgggcatagatgctgaggcggatgacgataacaccgaggctcctgccgtttga

SEQ ID NO: 40351 - DNA, 519 bp, Zea mays
  Peptide Sequence Number=SeqID_83726
atggagaagaccaacacagaaaagatcaccaatgagatgctggttggattgtctgaagattccagcgatagcgacagttttgacgtggagaaccgcgcccagctcacccccctctcacccacccatgctgtgctgatcaacgtgaccacgccgcgccagtgccccgtttctgcctcgtccggtgtcgctattgcgtccgcgcccaaaacccgcggcgccgcccgagcttcacctcgcctgagctcctcccgagtgtcacttcggccaaccgccgacgtccgcacgcacccctctctccctgtgtcgtcgttggccgtggccaacgagcggcactctattttgcggccaggaaagacgaggaacccgacattcggggcccactggcgccagtgccctggtgtccccgtcgctcccccctgtcgtccgagccgctggcctgtggaccccgctcggcagagcgcgcccgcgctcgcgtcccgcaccgaggatgccctggccgctgacgtgtgggacccaccg

SEQ ID NO: 40352 - DNA, 183 bp, Zea mays
  Peptide Sequence Number=SeqID_83727
atgaagctttccccaagagcgtgtgcacaggtccatgttggagcaatcataggagtcaagggggctgcagtcatagatcctgctagatatggtggagcagtcataggtggacctcctagcagtccaaggcaaatttgccagatggcaaatgatgaacctgtgaacttgagtgtgaacctttga

SEQ ID NO: 40353 - DNA, 605 bp, Zea mays
  Peptide Sequence Number=SeqID_83728
atggaggtgtgtgacctgcgcaaggtgcccgacgcggccgcctcgggcgaccctcgaccgtgtcgccaatcaggggatggtggtggcagccaggtgacggaagccatactcgctttcgacctcctccagcagcgctgcgaagacgaggtgctcgaggtggcccagcgggaccacgaactggtgatggaacctgctcaacaaccacgcgcgcttgacctagcccccaccggagaccctcgccgtggcctcctgagccggatcacgcctcaccttgaactgcatcgacgcctcaacctgccggggcaaggtcacgtgccttgcggaggtacacgcattggtcagcccttctccaacatcctcatctccttccccgatgctgcctatctctcctcgcccttcccccccccatcctcctcggatgtgcagaaatatcgaacatcactaaggtcttcaatcaccagtttcaattatgttgatttggagctactgcatgagcacgtcgtcacggcgctttcagtggagagctactacagtttcagttgtgttgatttggagctgctgcaggagcacgtcgtcacgacgctttcagtgaagagctactacag

SEQ ID NO: 40354 - DNA, 594 bp, Zea mays
  Peptide Sequence Number=SeqID_83729
atgggggcccagccaattagtgggacactcgccgcacggtggcacgaaaacagtatattccttaataaggaaagagttagcttagatctctatcagtttggatttatacctagatatgaggtgtgggaacatcatggtgaggcagtacccaacccgaatgttgaagaggaggagaacaatgattgggctagcgatgatgcgatgcatgagatgctagattcgcaacttccagagttaaacctaagctctgaggatcctcccacaccagaggagcatgagggagataaaaaatgtctaaaatgtggacaatatagatttgtggaagttgttaatgatgagggtgacaaggtagaaacaatattgaattacaaaagtaccttcggcttgacagaaggtaaaaagtacaattgtgacgcaaaagcaagtatccgtcagcgtgaacagtacgggggtactgttcacctatttataggcatgggacacagcccgtgtaaaattacatccaagccctttacatttgctaataactttaaggttgtgaacgcatacatgaaacgtctaggacattctatcaacaactttcaacaatattag

SEQ ID NO: 40355 - DNA, 432 bp, Zea mays
  Peptide Sequence Number=SeqID_83730
atggcgcctgcggccgggcctgactgcctgtcagcctcactctgtcaagtggcaccgcagtcagagcggcgcaggcagcactgtctttctgtcaggccgctttatgctgatgggggttaccagctgagaattaggagccttgagggtacccctaattatgatccccgacaggaagcacatcagcaaccattcggtttccctcaatttcagtcgtcgatgcctcagtggagattacatgctcagacacctccacttcagggatcaggggttatgtgccacaacacgccaccaccggtgataccagcactagaaggagctttcgaaggggagggaactactacagaagagactccaaaccagacagacgactttgtcaaaatctttttcgcttctagaggtaatggccacaactcaaacgacccttatatgtga

SEQ ID NO: 40356 - DNA, 843 bp, Zea mays
  Peptide Sequence Number=SeqID_83731
atggcggtgtcacaactccatctcgtggtgatggtgatcctagtatcagcagtagcatctgctcccgcagtagcagcgcagtacctgggcgtcaactacggcacactgggcgacaacctcccgccgccgcaccgcgggatggagctggcccgctcggcgggggccgtctctgtccgcttctacgacgccaacgcgaccctcctggcggcggccgcggcgtccggcctcgacttcgtgccgagcttccccaacgagctcatcccgtctctcgccggctcccagcgcgccgccgacgcattggtggccgccacgctgctcccgttccgcggcaacccacgcctccgctacctcttcgtcggcaacgagttcctctccaacccgaccgccaagcccaactgggcgctgatcgtccccgccatgaccaacgccgccagggcgctgcgccgccacggcctcgcgcacgtgaaggtgagcaccacgctcagcatgaacgacctcggcaacaccgtgctcccgccgtcggccggcgcgttccggccggagatcgccgaggccgtgatgggcccgatgctggccttcctgcagcgcacaggctcctgcctgttcctgggacgcctacacctacttcacctggtcggcgaaccacaccatctttccccgctgccctacgcgctgctggagcgtcgccggggttcgcgtaccacgacccccggcacggctctcgtacgccacctcctggacaaaaatctagacacggcggggggccgccatgtgccccctgggcctattgcggctgggtttgggccctggcggaaacgggggggcccccggggggcaacttga

SEQ ID NO: 40357 - DNA, 585 bp, Zea mays
  Peptide Sequence Number=SeqID_83732
atgtccggtgcacaccggacagtccggtgccgtcttccgaccgttggctcgaccacgtgtcccgcgcggattgcgcggccgaccgttggccctggccgaccgttggctcaccggacagtccggtgcacaccggacagtccgaaatggcccaagggcacatttccctttcagcagcgcgatgctgtcgctaggttgggattttctagtatatttgatttgcgaactgatgccttagagagcagatcactcatcaggtggttgatggataaattggatccacatgacatggtcatacgcccaggggctggcaaggaactaaagataacaaaagatatggttcgtctgattttgggtttgccatgtgctggaggaggcagggagtttactgattggtacggtgaagtggatgctgctgcaaaactgagacgtgatctcaatgttggtaaagaagaatttgatgttatcaagcttcaagacaagatagtgcttggcaatgatgatgagctatcaattagatgctttttttctgattctattcaatcgacttctttttccttctgcttcttggggcattacaaacaatga

SEQ ID NO: 40358 - DNA, 351 bp, Zea mays
  Peptide Sequence Number=SeqID_83733
atgacgaaggtcgatgcttgccgaaggtggtcaaaaagggttcgagccccacggaccttcggaagccgaaggcccccaacagtcctcatcacaaaaatcaaaaacatggaagagttgactaaagaacatgaggagctaaagtgctctcatgttgatttggtccaaagtttctcgccagcaagaaaatccttctttgagctagaatttctaggaatagatgatattgtatatcaagagctcaaggaagaaaatgagaggctaagaacgagcttgacacaactgaagggaagtgcattgctaaaccttctcaagataaccgtgatgtccgacttgagacaggaacaaccgtag

SEQ ID NO: 40359 - DNA, 603 bp, Zea mays
  Peptide Sequence Number=SeqID_83734
atgactgtttatcttagtatggtcgtggatctcccagcatgggctatcaaagcaaatggcaaaattagaagaggttttctttggagaggaagggtgccaaagggaggtttcttggtggctatgctaactgagtatctgaaactgtgggatcttcttgcgaaggtggagctgcagcaggatgttcaggacacccatggagactttcatcgtctggtcaatactcaagttatgtgcacggaaaatgtaaaagagaagagggagttgctgtatgcattgatcaatggcaggaagctttcagaccttcctaaaattaaccagcaaaccttgataatttggggagagcaggaccgggtctttccattggaacttggattacggctgaaaaggcatctgggtgatacttccgaactaatcattgtcaagaatgccggtcatgccataaatcgcgaaaagccagcagaactttgcagactgataaagcactacatcgttgatccctcagtcaaatgtcgagatgaccgtaagggatcttggaagaatgcgataaagaggtttgttgggtcgagcctgaggaaggtggactcttctcgaccgctgctatag

SEQ ID NO: 40360 - DNA, 408 bp, Zea mays
  Peptide Sequence Number=SeqID_83735
atgaatgcgctgtcccgcgaggggtgcaatcactatgaggtcttcgaccggtccgatgaagactttgggcgcgaaatttttaaggtcgaagaccctgtggtgaaggatcccgcgggggccctcttcgatcggatgtggggtcctcatggccgggaggcgatggcgcgtgccgaggatgtagaagacctcggaggtctaaacagtgcgccgcccgaggctgcggagggcagaccggtgctgccctcggatgctggtgaaggcccatcggacgtgcccgtgcctgctgctgccggcgaagaccctgtgtcggcccctgtgccgacagtcgaaggcgctcaggaggtggtggcggagccagcggtcgaaggccctacggccgcggacgcacccacacaggtggctaagtag

SEQ ID NO: 40361 - DNA, 1449 bp, Zea mays
  Peptide Sequence Number=SeqID_83736
atgggcgctgggcgaaagtatgccctcgcgagatgccctcccctgggtgggcggaaagtgcgaagtccgctttttgctttggatgtgcgagggcgggatcctgccgcggttgtgcgtgaggcggaggatggggcggtgcgaattgttgggcgctacgtgccgaagacggaggcccagcggagctgggatatacgtggatccaacgatcgcctgaatagggtcttcgagttgaattgtttgtcgtatggcggttatcccggggaagacgttgtcgaccgccgcaggaaaaaaacagcgactgtgactgaagacgaccccgcgccggaggccgccccagccactaagaagaggaagctaggtactgtggtgggaggacagggggtctccgatagttttgctatggagttgatggggacatgcgcggcccccgggggaaggatgtcttcgcccgagctccgggagtcttcggcgcggatgctggaggatcgccaggatgctgcgcagaagcgtcgggcggtcatcaggctccccgatgctaggcatgaagcgaagagagcgctggggagtgcgaaggctgccatacccggtggtagccagccgatgctgactgcgaagccggccgcgcctggatccagcaaggtgtcgaagagcacgaaggcggtcggtgccgacggaaccaagtctgccccggacggagccgcgaaggtctgggagctgccttcgccggggaaacgcgttgccgactttggcacgaatattagcgtggacgactatctcgttgggtcgggtgaggggcaactggttgttgtcccgcctgcggtggcaaccacggcgtcaaccgcggtgcttggggtgaagggtggcgctttcagcgctggcggtgagattttggcggccactgtcgtcaaggacgaagcgggcactatgtcccgccggctgagggaggcgtcgcagcaactgtcgcagcagctaagtcaagcggccgacttcgccgaccgcgtggcgtcgggtgcccttactgcagatgtgtctgccgaagtcgagagacttcgggcgcagcacgcggacgccgttcgggagaagtcggctatggagagcaagagctgcaggctggcagagaaggtggccgccctggagggcgagaggacggacctccggcgccagctggtggaggaaaggagggaggccaaccaggccatcgccaaggtgcaggcggcgcaggcggaggccaaattggcgcgggcggaggggagtctcgccagccaacgcgccgaggaatgggaggtgcggttcaacgctctgcacacccgcatggagagggccgaggcctctacgcgctcggaagttgagcggacgcgcaaacagctcgtggactcataccgcgagctgggtgcacggactgctgacttcgaggtgcccgaccgagaggcgggccttcgcttcctctag

SEQ ID NO: 40362 - DNA, 285 bp, Zea mays
  Peptide Sequence Number=SeqID_83737
atggcggcggtgggtgcgctgcaaaggggggtgggtggcggtagtgcgctgcagagggggcatgggcggcggtgctactgcgcatggaggcgggcacgcgtgcggggggcacgggtgagtggtggggtcaatgaccctgatgtttgtggtctctggttccaagaatctttgcctctctgtatgcttgttccaggcttcaagggcaagctttccggtatcttcttggggctctaccaaagtgaagaaaaacttcactacccaatgcacgcagaggactgggtataa

SEQ ID NO: 40363 - DNA, 1011 bp, Zea mays
  Peptide Sequence Number=SeqID_83738
atggaggttcagtgccaaaccagcttctgccagaatgaagatggtttccccaagttgctgagagcatgcacagtccgcctcggaatcaggagccagccagagtatgatggtcgtgaattcatcgagcatggcacagagaagtgtgtcgtgactgtatacattggatccagtccgcaccatgcggaatggagtgtcactactgatgggcgcagattcaaagacacctgccaagtcgttgctcgcaaggcattgagggccctgtgtcagatctatgaagaagaagtggccgacaccccgctcagattctttccgccctttcagagagaccgtccagtttggatggccaggatgcgtgcattggaagagcagcagctgcttgaggatgaccccacagtcgtgtacctcactgcatacctgctcaccctggatgcacagtatgatttcttggctcggcaccaccgtcagatgattgcccgagcagaagatgcagagaagctcaaccccctgaagcaagccaaggatgagcatgtccagaagctgatggaggcctacttggtaacccataaccaacgtagagccctgcggatccaagagcccgcttcatccaacccagttcaacccaggagagtagaagacccccagattcttgaaggtcacccggtctctaccagaggagaaaagaaggctagggaactcctggaaggaaccatagtcttggaaggaattccagtcttccctcaggctatggataagcaagagcaccccgagtccccccaagatcccccgccagagttgtttgagcccctcaccatgaagaagattccagcaccatcccttgaagtcaaggaagaagctgcaagcaccctgccagcaccgtcgccctctaaggagctacaagagccagtccagcttgaagaagagttcgaccgcgtcttgccatctcagtcgtcgccagaagaagtcatcaacatcagctccctcttgacccatccaggagatgtctcagattga

SEQ ID NO: 40364 - DNA, 816 bp, Zea mays
  Peptide Sequence Number=SeqID_83739
atgcccccactctcaccgcccgcatcgctgacccccgctgctggcggtcggcgacggtggaagtgccgcctcagtcccactatcgcacgtgaccgctgctacactcgctccttccgctccgcggggctccgcccggcggccattccgctccccgatggcgccgtcgtacacctgtggctcccgcctcctgccgccgaccccgccaagcccctataccctgttctgcttctccacggcttcggcgcacaagccacctggcagtgggcgcccttcctcggcccgctcctcgctgccggtctggccccctatgtcccggacctcgtcttctttggcgcctcatcctcccccgcagcagaccgctccccggtctatcaggctgcctgtgttgccgccgctatggccgcgcttcctggcgccccgcagcggtacgccgtcgtcggggtcagttacggcggcttcgtagcataccacctcgcccacgcgtttccggcagcggtggagcggcttgtactagtcgcggccggtgtttgcctcgaggaggccgatctggccgcggggctctttgccgttgaggatatcgccgaggctgcaagtcttttgctgccccagcggccggaggatctccggaggttggtggggctcaccttctgccgccctcagcggttcatgccgtcctgtttcatcagagattacatcagggtttggtggttcggtgctaaaggtaaaaaccacggatttgatccacaattgctacctgtatcgatccattgttgcattggaggtgttgttagttcaaagcgtctttggatcggctaa

SEQ ID NO: 40365 - DNA, 381 bp, Zea mays
  Peptide Sequence Number=SeqID_83740
atggtcgagcgcactgatgagagagagaggttcgccgtccgccatgaccgtgtggagcttgcaccgcgtgccactgcccccacaccaacagcctcttgctcagccgcctgtacacgccatgcgcccagaagacttgagaaggttgctcgccgccgcgggcccgtcgtaaacacgccaggtgccgagcttcggtgggcatcccgactgcttccacgacatcagtgttgcatcgcgctaatcacggtgaggaagcctccccctgagttcgcgctgtccttcttcgcgtattaccttaaggaatcgagatttggggcgcctggtggggctttggtgcgctccggcgaaacttgccgccatgggcagggggcgcttccgccgtag

SEQ ID NO: 40366 - DNA, 915 bp, Zea mays
  Peptide Sequence Number=SeqID_83741
atgacggtggcaggcgggcgggagcggcggtcacatcgtcggccagactcacgtcccatccaggggcagcaagagaaccccctctcacggcgtgaagacagggcgcccgagaagcaggcgacgcttcgccttcgccgtaataaccgcgccaaaaaagggaccgggaaaggggataccccgaaaaggatccttccctgtgaaggaaccgggctccgagcccccctactgatcagaggttcgaaggctggccctccgaggggttcaacagtcgcctcagatcgggttcgaaggctggcccccgaagggttcacagtcgcctcagacgccgagcgagggatgaccaggggctcgggggctgctctcgcaaacccggctccggccgaaccgttgacagcgtcaacataccagcccgagaacttgggccccgaccgtgcacctgggctacgaccaggctcggactcgggctcagccccagaagacggcgaactccgctccgcccgacccagggctcggactcgggctaagccccggaagacggcgaactccgctccgcccgacccagggcttggactcgggctaagccccggaagacggcgaactccgctccgcccgacccagggctcggactcgggctcagccctagaagacgacgaactccgcttcacccgaccccagggctcggactccgccctggcctctgccgaacgacctccgcctcgcccgacccaggagctcgggctcggcctcggccatggaagacagactcgacctcggcttcggaggagcctccacgtcgccctacctagggcacaggcccgccacgtcaacaggaagcgccatcatcaccctaccccgagccgactcgggccgcagagaacaagaccggtgacccatctggctagctccgccagatag

SEQ ID NO: 40367 - DNA, 885 bp, Zea mays
  Peptide Sequence Number=SeqID_83742
atggtacttcgatgggctacgctgcttttcttgacatcgtatttggatgaatttagttgcctccaaaatggaattagtaagttgtcaatagcttctcgctcagacaggaaccatcagaccctaaagaatctgtccacactgccacaggagtttcaagcttcaattgaaatagacattacctatattttgagggaggcgcagcccagacctttatatctgtatgtattctcttctgtgggccgttggacttggagaggggttgcagatactgttcagcgttcactcacatccataagatgcagttttgtgcccattagtcatattggtcctctgctgcagacaaagttcgtgagcaagaaaagagcaattggaatttttgcatacacggacatcataacaatgcatgctacgcccccatcaactttatctcatacagaagcaaggcgtatacgtaagcgagtgctagatcagcgaaaactagaatcagcaggtagggcgacgtggaggctcctccgaagccgaggtcgagtctgtcttccatggccgaggccgagcccgagctcctgggtcgggcgaggcggaggtcgttcggcagaggccagggcggagtccgagccctggggtcgggtgaagcggagttcgtcgtcttctagggctgagcccgagtccgagccctgggtcgggcggagcggagttcgccgtcttccggggcttagcccgagtccaagccctgggtcgggcggagcggagttcgccgtcttccggggcttagcccgagtccgagccctgggtcgggcggagcggagttcgccgtcttctggggctgagcccgagtccgagccctgggtcgggcggagcggagttcgccgtcttccggggctttag

SEQ ID NO: 40368 - DNA, 348 bp, Zea mays
  Peptide Sequence Number=SeqID_83743
atgtcggccaccgcgcactgccgcaaacccacggtggttcgcgcgcggttctctcccttccccgacgatcacccggccccttgcttgaagtcgcagtgccgccagaacccgcggcagccgtgggtggagtccgagccctggggtcgggtgaagcggagttcgtcgtcttctggggttgagcccgagtccgagccctgggtcgggcggagcggagttcgccgtcttccggggcctagcccgagtccgagccctgggtcgggcggagcggagttcgccgtcttccggggcctagcccgagtccgagccctgggtcgggcggagcggagttcgccgtcttccggggcttag

SEQ ID NO: 40369 - DNA, 243 bp, Zea mays
  Peptide Sequence Number=SeqID_83744
atggcgcttcctgttgacgtggctggcctgcgccctaggtcgggcgacgtggaggctccttcgaagccgaggtcgagtctgtcttccatggccgaggccgagcccgagcccctgggaccgccatcgcagcaaaatcctcccgagggcctccctacactgaccactcccctactgcccttgcccctttcggaacatggctgggtaaaaagaagtgatcaaggacacaacttgcctgggacttga

SEQ ID NO: 40370 - DNA, 183 bp, Zea mays
  Peptide Sequence Number=SeqID_83745
atggaggatctgagcatcgaggcgaaggaggccgcggtacgcataccccatcctccgtgtggcggcctccctccgagcacccacccgccccaccccctttcttctccctccatcgcgtcgtcatcatactacagaaagtacaagggtttgcttttactcttggatcaagactcacctggctag

SEQ ID NO: 40371 - DNA, 231 bp, Zea mays
  Peptide Sequence Number=SeqID_83746
atgccctcgatgtcattatctggcttgaggcaagcatggagtattcgcttggttctactcaagaagggaatcaaggaattcaggactttatgcactgattgtcatagtatggagtttaggaaacaggaaatgcattggtctcttgtttgggcatactgggagcgtgaggtcgttgccttgccattcctccaatccggagagaacaagaacttgactggaacatcaagataa

SEQ ID NO: 40372 - DNA, 1368 bp, Zea mays
  Peptide Sequence Number=SeqID_83747
atgggccacctggtcccgttcacccgcctcgcggtcgcgctttccgccggccacggttgcgacatctccctcgtgacggcgctgcccacagtttcgtccgcggagtcccgccacatcgccgcgctctacgctgcgttccccgccatccggcagctggacctccgctttgcccctttcgacgcgtcgtccgaattccctggcgccgatccattctacctccgctacgaggccctgcgccgctgcgcgccctcgctcctcggcccgctcctcgctggcgcaggcgcgtccgctctcgtcgtggacatggcgctggcctccgtggccatacccgtagccagggagctccacgtcccgtgcttcgtcttcttcaccgcgtcggccacgatgctctcattcaaagcctactttcccacctaccttgacgacgtcggtgccggacatggcgttggcgacgttgacgtgcccggcgtgtaccgcatcccaagttcgtccgtcccacaggcgctgcatgatcccgataacatcttcacccggcagttcgtcgcgaatggccgagcgctcgcgacagccgacggcctcctggtcaacgccttccacgccatggagccggaggccgtcgaggcactacagggtcgcttcgtgctctccgttctgccgcccgtgttcgccgtggggccgcttatgccggtgaacgacctccgggagacaggggaggcagcgcaaaaacaggggaactatagggcgtggctggacgagcagccgccgcggcctgtggtgtatgtcagctttggtagccgcaaggctctccccaaggaccagatcaaggagctcgccgccggactggaagcgtgtggccaccgcttcttgtgggttgtgaagggcgctgtcgtggacagggatgacgctggggagctcagcgaactgcttggcgaggccttcctgcggcgcgtgcaaggccgtggcctggtgaccaagtcgtgggtcgagcaagaggaggtgctcaggcacccggccgtggcgctgttcgtcagccactgcggatggaactcggtgacggaggcagtgagcagcggcgtgccagtgctggcgtggccgaggttcgcggaccagcgagtgaacgccagcgtggtggtccgttgcgggctcggtgtgtgggctgagcagtggagctgggagggggaagaggcgctggtgagagcggaggagatcgcagcgctggtgatggaggctatgggagacgacgcgatggcagtgaaaacggcgaacgtccgcgaggctgcgtcgagagccgtggtggacggcggcacgagctacctatgcctggcggcgttcgtgcatcgttgcattgcaccgcgtgaagttatataa

SEQ ID NO: 40373 - DNA, 144 bp, Zea mays
  Peptide Sequence Number=SeqID_83748
atgcgcggggagcttcgtgagccgtggctggacctggagggcgatgatggtgccggcgaggacatggtcgaacacctgggttgtgtggccgaaggggtggagctgattcgttatcatccatttgaacatagacataaaaattaa

SEQ ID NO: 40374 - DNA, 741 bp, Zea mays
  Peptide Sequence Number=SeqID_83749
atggttccgcagtggcgcacccaccggaaacacccaatcgacgcacatcggagcccaaacctcaatccgcgagtcctacgacgagcacgtgtaaccaggaatcaaatgaggggggttcccatcgataatggtgcgtcgcagagagctgacggcggagacgtgagctccacgacggtcctcggtgcttcgacgaggaattactcggaattctgttgcacacgcggccaacgaaccgagcgcgcacgattcctaccccacggcgagtcaccacaatgctacgccgagtaccgaccagcagctaggcgggcaatcaagcgtgacggcgactgccttacacggacgacaactttctctcactactatggttgtggttgcgagggcggagaaaggaagatggtgaggcgaacccgagggtcgtggccccgtaaatggatgcgaagtgggtcgggcgcggcaacagatttgcgcgaggaccgtgcgctctgccatgcgtggaagttcgttgacggggatggaggtgacagccgaggccacttgccagtgactgaaagattgagcgattcaatgcggagtcgacggttggtatgtgggccccacgagacagagagtgggcaggagaggacgtgcgtgcgcaatgatgacgagcagtccgtggttcctgagtgtattgacgaagatcttcctgagcaacaacccagtgaagagtgtcctctgacctattatgtcctacttactttataa

SEQ ID NO: 40375 - DNA, 354 bp, Zea mays
  Peptide Sequence Number=SeqID_83750
atgaagatgctagtcaggaagcagcgcagagctggaggggaacgttggcgccttagcggcgacgagaggcattggggcgatggctatccggtggaggaggttgcaaggaaactagtggcagtcttcgtcggcgacgaggggttccaaggagtcccgacggcggtggttagcagggagcttgagtctgctagagctttagtcgtggtgtctgacgagacagaatgtgatgagtgcgctatacacatatcgagcatcacaactttgcagaccaagtctgggagtgatgctcagcttgacaaggttggtgagtggagtggattaaaaccatcagagaaacctccaaccactccctag

SEQ ID NO: 40376 - DNA, 501 bp, Zea mays
  Peptide Sequence Number=SeqID_83751
atggcaatgaatgttgtgtgctgcaggtgtgaaggtgaatcgtcaagctgctcgcacccgctgaacagttacccgcacccactgagcggtggatcactcgacgcgtgggagatgaacagtacccccgtactgttcacgctgactggtactcgctcgtgtgtcacgctcgtatctttgtcttctgtcaagtcgaagtgtcatatgattattcatgttacttctcatgtttcatatgcttcgtctttcattaatatatgctgttatgatgaaggtctgtacaaggatgaactagccactctctggtttctccaggcgcgctccgctataattcaccggactgtccggtgtgacaacggagcaacggctacttcgcgcaacggtcgactgcaaaagagcggtgatcagatgaacagtgaggaacagtgcgcagagtcagagctgcagattacgcctattcacccccctcgagccgactttcagatgcctaactgggttacatga

SEQ ID NO: 40377 - DNA, 516 bp, Zea mays
  Peptide Sequence Number=SeqID_83752
atggggaggttgctcaccgtgattccaatagtgccccgggccatccacggggagcggcggatcccagcgttcgacgacgaatcccggccgccagagggtcaattcttccctatacggccacgggtgttccactggccagcacatgaagcttctggactcatcgcagacccccaaacgtcagtcgtggacggggacgatgctgacggcgttgttggcgcagaactcccagtccacgaagatgggtggctcggctgcgacacgatgaacctggacgccccacgagtggtaaatcaacggcgagcagagaggggtgctacaacggtgagggttcacggcgcttggcggctgacggtgaaacggccccggacttatacccaagcgatgcgccaaagtcggaagggtagctccgcgaggattgagtccaagggggcgcgggggtacgccggtgtggctgaccgatggggtcatggtgtcggcgccaggtcgctgcggaagactgggccgacagggaaatag

SEQ ID NO: 40378 - DNA, 792 bp, Zea mays
  Peptide Sequence Number=SeqID_83753
atggaggagacacccgcttcagctttgactacctttcccatgagggctttccctctatcttgtgggaggttctctgctccgctggataccccacatcccctctgtacatggtgcagctatatgaggagcatcggggcggacgacaccactgaggccacagcgctaaaggccttgacgaccttctatggatttcatcccctggagatgatgatgcacccacttggactcttccccgccgagaagagggatgacccaatgtggctacaaatcaccctcgacaattgggaggacttcatagttgacttgtcttcggaattggtggagaaagatctacaggtggaacagatgaaccagcgcatcctgactttagagcagcaggtggagatccgagataacaccatcgatatcctggagatccagctccacgatgtgcaggaagagcttacggaggccaacgatcacctggaaatgcaccaccaagacatggaagctaatgaggcaggcagcgaggcagaggaggatcttgaggaaatagagccagcttccggaccgaatgcggcttcctctggagtgccgccttcacctgcatccagcgttgcctctaccaatcatggttcccccgccacctcctccagctcccacgattttcaggagctaatggctcagcaaaatgagatcctgcggcagctggtgcagcaggacccgctagacgccgatgtgtggctcagggttgtggagtccaagttcccactcctcacaggagctgccctgatgccgcgaagactcgcttaa

SEQ ID NO: 40379 - DNA, 225 bp, Zea mays
  Peptide Sequence Number=SeqID_83754
atggagagcttcctgggcgcgcggccaaagaggagagcagggagagacgcgtcgctcaccaaggagccgagctttgagggaggggatggggaagagctccagggcgcgcgggatccggtgaagaagaaggacgtcgccgcagccatggaagcagggaagcccggcaagactccatgggagggagagcgagctgcagggaaatcggctgggagggagcgcgcgtag

SEQ ID NO: 40380 - DNA, 252 bp, Zea mays
  Peptide Sequence Number=SeqID_83755
atgtgccacactttgcctaagatcatcatcttaattggaacatggagaaccacccaggaaaacagttgtaccacaagggtggaattggacgcccttggccaagtaattagggaagctagggagagattaccttacccgaaaggggcaagccgggaggcgtcgctgcagagtatagggaggttctcgggtcgaactgctgcgatggcagttcagacgagggattcctatgcttccttcttcctaaaacagtag

SEQ ID NO: 40381 - DNA, 2679 bp, Zea mays
  Peptide Sequence Number=SeqID_83756
atgaacgatctggcggcggtggagctgcacccgggccacacggtggagttcggcgtttcacggatctcctcggttcgcgtgcaagacatgcagcagttggggtattttgggaacggagttggacgagttccgggggcggaggagattccggagccggagggtgagattgttaagaggaaagttggaagcgccgaggactgccaagactttggcagaggttgtggagttccttgcgcccgaaacaagtggggcaattggtatgattattggttttatgtggcgggaggcgaagtcgaagacctcctgggactcctggtggccgtgatgtgctcgcactgctatgtggcgttcccgccgtttcaggtggcggaggatgatagtgacgaaggggcccttcattgtgctgcccgcatgagtagcgggcccgatttagttgaggaattcatcggctacggagtgtggcccttggcgcatggctgggcgttgggcaaagtatgccctcgccagatgccctccctgggcgagaagctagtgcgaagtcctgccttcgcgttggatctgcgtggtcgggatcccgccgcattcgtgcgtgaagtggaagacggggctgtgcagattgcggggtgttatgtgccgaggatggaggctctgcggagttgggatattcatggatccaacgttcgcctgaatagggtcttcgagctgaatcgcttgccatacggcggctatctcggggaagacgctgccgtggccgtcgaccgccgtgggaaaagaccagtggctgtgactgaggaaggcccttcgcaggaggctgccccggccgcaaagaagagaaaaatagccttcgggggagggatgtcttcacccgaactccaggagtcttcggcgcgaatgctgaaggttaccaggggtcgatggccaaagaatgttctgatcccccgtgcggctggcgaagacttttttacgtctcgtatggctcgcggcttgaagatttttccttacgggcagaatattgctgctgttgtattggcagtgatggagaaggatcgtcaagacgctgctcagaagcgctgggcggtcgttaggatcggggatcctttccgcgaggcgaagaaggcgcggggagccgcaaagtctgccgccctgggcagtagtaagccattgccggctgcgaaaccggtcggccacgggcccagcaaggcttcggctagtgcaaaggctgctgcttctggcgcgggcaagccaccctcacgcgggcccgcgaaggggcgaacagacgaggcggcggcgcgtgttgcctacttcgacacggacatctgtgtcggggattattttgtttggtcggatgtggggcaactggctgttgtcccgcctccggtggcggccacttcgccaacggcgatggttggggcgaagggtgccacgcgggacttgtgggccaccttctgcgcgagcggtgagattatgtcggccgctaccgctaaggacgtggcgggctccatgtcccagcagctaaggcaagcgtcgcagcagctgtcgcagcagctgaagcatgcggccgacttcgccgaccacgtcgcgtcggaggagaggagggaggcgaacaaggccattgctgatgcgcaggctgcgcaagccgaggccaagcttgcgtgggcggagggcagtctcgcccgccaactcgccgaggagctagaggcgaggctcgatgccttacgcaactgcatggacaaagccgaggcctcgacgcgtgcggaggtcgagcggacgcatgcgtattctcatgtcctttgcctccctcgtcacctgcgagggggccgtgaatgctttatcccgcatttcgaggtcttcgaccaatcggacgaaaactttgaacgcgaaatcttcaaggacgaggaccttgtgctgaagcagtcgacgggggcgctcttcaacagaatgtggggcccgcacggccgagaaacggtctgggagcggtctgaccgggcaatagaacagatggcgcatgccaaaggggtcgaggaccttggtggtctagacggcgcgctgcccaaggccgcgggtgtggatccggagccgccatctgatgccggcgagggcccctcgtcgacccccacgccgactggagccagcgaagaccccgcaccagcccctgcaccgacgtgtgaggacgcctcgaaggcggtggtcgaaccagctaccaaagaccccgcggcggccgagccttcgcaggttccgacgtttgggcctgcgcaagcaaccactactgacaatactgattttgcggcagagacttcaattgtagttcatgtcgatgatagtgtgcctggttttatgtctgaatgttttgagtccgacggtgagtctgggagttcgtttccttggacggaggagtcctcggatgaaggcttggattattttgttgcattggatgtggttgtggcggagacttcgccgcgtgtggagggtactatggatcttcctggtgcgagtactgggtgtaggcggcgaagggtggtgggaaaacaaagtgtgggtgaattttcgcggagcggcaggcgccgtcgcatggggatggagcgtggccgacttcgggtagatggggttggtaaacgagaattgttatcctcgccgattggggcgggcataggcgagggggatcttcgagagcttttgagg

SEQ ID NO: 40382 - DNA, 222 bp, Zea mays
  Peptide Sequence Number=SeqID_83757
atggacaatgagtctttggaagatgatctagcttattttgtggcactagatttttctgtcacagagtctccgtcaagggtcgccccctacggcggtagggacttcggccagggttgcctcagggagggggatctgcgggctctttttgacggcgaagagttgagactgatgttgttcaatttccatgaagccgaccttatcccaaaacaagagccaatgtaa

SEQ ID NO: 40383 - DNA, 453 bp, Zea mays
  Peptide Sequence Number=SeqID_83758
atgaattatctcttttgggccaatatgccagaatttggcccatcccgctacactaacgcagcccaattgagcctcggcgccgacatgtggacccaagtcgtcatcccttcctcgcgtcttagtcgctcactgacatcatggggtcaccttgtcaaccactctggactcgtgccgctacaatctcctcacactcgtccgtggacccgctctggcggggacaaaccccccaacaccggtgcgctcgcgcgttcaactgaactatgggcccatcgcgtcagctatttcttctcccacctgcgcaacaaaccagggagcaatactctacaatcgaacacctggggtctggagcacctggctccggcaggtgcgctgctgggctggaaacgcgccgccgcctggctacggcatgaggaagaaagcgcctgggacgttagatcctatgtggacggctga

SEQ ID NO: 40384 - DNA, 177 bp, Zea mays
  Peptide Sequence Number=SeqID_83759
atggcccttgtgtcgtgccgtgaagctccacctgttcatggcgatgtgttatgtggcttcgccgtggagaaccgacgcccgggagctcgggatttcttcaccagagaccgtgaacccactgtcctccgtggccagctccctccattgccctccaactgcggttattttctcacatga

SEQ ID NO: 40385 - DNA, 696 bp, Zea mays
  Peptide Sequence Number=SeqID_83760
atgcaagaatttggcccatcccgctacactaacgcagcccaattgagcctcggcgccgacatgtggacccaagtcgtcatcccttcctcgcgtcttagtcgctcactgacatcatggggtcaccttgtcaaccactctggactcgtgccgctacaatctcctcacactggtccgtggacccgctctggcggggacaaaccccccaacaccggtgcgctcgcgcgttcaactgaactgtgggcccatcgcgtcagctatttcttctcccacctgcgcaacaaaccagggagcaatgtccgcacggagctcgcgggtcgttgcaccgaaccgcgcttaatccgcgggacctcaccggtcggactccgctgtagcactataaaactaagcccgttaccctggatccgcatcatcggcgcttcgttcgtgacctcgctggcgacaagcgagcagggtggaatcgggggggagttgaagccgccaccaccgattggagatttcgccgttgattctacctctgctcgggggaataaaaggccactaagagtacctgcgcatgtccgaagacgttccaggcaagaagatcctccggtggcatgtgaattgctcaccggagtttggcgggagtggcagatccgcaccactgcgtggccgacccttgcgccgtcgttgtctgctggtgagaaccgcctccactga

SEQ ID NO: 40386 - DNA, 177 bp, Zea mays
  Peptide Sequence Number=SeqID_83761
atggcccttgtgtcgtgccgtcaagctccgcctgttcatggcgatgtgttctgtggcttcgccgcgcagaaccgacgcccgggagctcgggatttcttcaccagagaccgcgaacccactgtccttcgtggccaactccctccattgccctccagctgcggttattttctcacatga

SEQ ID NO: 40387 - DNA, 348 bp, Zea mays
  Peptide Sequence Number=SeqID_83762
atgggaatcgactggaaacatacctactatcatgcttggtgtttcctggactgcttcagcctccaaatggttcaatctccaaagggcttgattgttgctaagctaccttctttggacaatgcatcacccaatggccttgctctccacaatggaaacatgctctgcctccaccttgaactggggctgcttgactgctctggttggttgctaggacaggaatacgaggtgcctgctgattctgcctctggaactgacttcctcctatctgactgttcttgcgattctgctgctgatgctgagggtactgcctctaaaactactgctgaggcgggcgctgattctgcttga

SEQ ID NO: 40388 - DNA, 486 bp, Zea mays
  Peptide Sequence Number=SeqID_83763
atggttgtggcttatgacgaagtctctgtcgaagtctacgagtctcccacttcgtcaccgccctgggaggcccacacgggattcggcccaaggggtagattaacaaagctcttgccatcccacgacaaactttgcaaatactctttccgctttcctgttggatcaacttgcccggtagagcaagttccaacatttggcgcccaccgttcgtgctacgaaaaacaaccagcgatggccccaagcgagctagttcgaaggcagccccgtccatcgacgaagcagcgaaggcagcgctactggcggagaaaaaaggcaaggccctcgcagacaacaccccccaagaggccttcgaagatgaagctgtcagcaaaagacagcgccgagaccatcccatccctgaaggcaccctacacacctgcagctccggaggcgtaccgcaagcaccaccaccaggcttcgctccaccaaagggcaaagacgcaatag

SEQ ID NO: 40389 - DNA, 69 bp, Zea mays
  Peptide Sequence Number=SeqID_83764
atggcagtcggggtcagtgaggcattgtacgccaaggcggttctctggaggacatggttgctggagtaa

SEQ ID NO: 40390 - DNA, 663 bp, Zea mays
  Peptide Sequence Number=SeqID_83765
atggcccgcgcccgcacctataaagcccacccaggcatcgaccacactcttccacgcacgcccaaacctcaccggagctcaactcaccgccgtttgcccgtacgcggcgtgtccgcggccacccgagcccctgccaccgtagaccggccagcccagcccttcccgaccctgtccaaccctcggagacgggttaagaaaaatagaaaagactgtaaccttgctgacggagagtgcatcctcgtgccggagcaaggagctgctcaggtggtagccccagatccagcaccagagcctgcaccagaggacctgcctaccactgctttggaaggcaagccccgttggttggtggacacggatccatggggatgtgtggtctacgagatgaaattggaaaaaggattaacatgcggatacctgtgtcaagcgtttgaacatactaaacatatgccgagaaatatggtaaatcgcagattgccctcctcacgcgacctgagacgtggtctcccattccagttatggtgggtacaagtgcggtcactgcacgacggcagtcggggttctctggaggacatggttgctggagtaacttggccgtccatcttgccaccgggttggactgtcgagtgggaccctacctcggctgaggaggagcacgaggagtga

SEQ ID NO: 40391 - DNA, 537 bp, Zea mays
  Peptide Sequence Number=SeqID_83766
atggcacgcacaaagactacccagcggaaggcgaccgggcctcagggtgtaccacgacaccagttggctcctcgacatgagaggagtagcagtgggagtaatgaacccataggggatctggagggagcgtgcgtgatagtcgccgcatcgctgagttgtcagcagaggttgaccgtttgcagcgggagattgtgtgagcgggatagggctattgactgggctataaattcacgatctatagcctgggattgcgaggcgactgcccgagcccgggtggaagagctaagcgtagccatggaaaatctgcaagcgtatagtaatactctgcatgaggaagtgcacgtgatatatgaccagttgcatccgaacgtgccaccggaagtggcggcaatgggagctggtgcaacaggagtagctggtggaggaccttatggggagttggatctctttagagcccctccatccatgaacatcgaggatgatcgttctcccgaagctagcagtggagtgggagcagccaaggacacagatgactag

SEQ ID NO: 40392 - DNA, 1176 bp, Zea mays
  Peptide Sequence Number=SeqID_83767
atgggtgttagtggcatgctccttttcttggaaatttgtgcgactattgaagtcctcacgattgttcgttgtatgggcgggagccgaagggtcgtcccttggcctcttcaaataaaccacccgctggtgaccgtcttcttcactcactctggtttctcttctcattctcacttctccactatcaaaaccacaatggtcggcggcaagggcagcaaaggcaagtgtggcccgaaggatgggaagcggccgactcccccttcagaggactttggcaactctgagttctcggaggagcagttctcttatgagggcaaggagtcctcgccaccggtccccctttcgtcgttgtccgattgctcggatgactcgatggggttattgacagtggagagggcctatgtccgatccgtcgagcgagcagggctcgaggggttggatgactcagaggaggaagactcctcgaaggactcccaggaggaggactctgaggaggaagactccggggaggagggcggtggctgtcacaatccaacaaagttatcgggcccacgtacaccaatccttgccatcaaggcctcggatagatatgtaagtggatcagataacttacttgtggtgccgagtttcaatgaactcgttcacttccaaggaccattcacccatagttgcaagtattacaataaactaacaagaacattgtcgacgtttcgaccctggggggtccctggaccgacgagtaaattgtcgctgcgtgtcccagcccagatgggtcggcgcgatacggaacacaaaggggggaaaaaccagcaaggggaaaccgcggccttcgtgttgtcctgcgcccagggcggatgcgcttgcagtagggggttacaagcgttcgcgtgggagagagagagagagccttgtgcgtcggcccgttctcccgcgcggccaaccttctcgtacgagagccctggaccttccttttatagacgtaaggagagggcccaggtgtacaatggggggtgtagcaatgtgctaacgtgtctagcagagaggagccagagccctgagtacatatcgtcgtggctgtcggagaggttttggcgccctattcatgtgatgtcatggccgtcggaggagcgcttgagccctgtggaagtacagctttcgaggctgtcggatccttgctga

SEQ ID NO: 40393 - DNA, 108 bp, Zea mays
  Peptide Sequence Number=SeqID_83768
atggcggacaaggaactcgtccgagatcattatgttaatgggaacatggagaaccacccgggaaaacgtgccaccacaagggaggaatgggaccccttggctaactaa

SEQ ID NO: 40394 - DNA, 363 bp, Zea mays
  Peptide Sequence Number=SeqID_83769
atggcggtcagatgggggattcttgcattgctcttcctagaaactgtagcaggttttctgaagatagtggaactagataaaggcctcgtagtgttgccctgcctcccttccttggtagaggtgaagggatgcagaattgatctacctgccaacccattcaaccggagggtacttagacagcaacaacaacaagccgagatgaatcctccgaatgctccaaatcctccactagccggggctgatccagcttctgcagcccagatgcggataatgcaacagatggttgatactatggaagatatgcacgcgcagatgcgacatgagcgtcaggagatgtgccaagagagggagcagatgtgctag

SEQ ID NO: 40395 - DNA, 549 bp, Zea mays
  Peptide Sequence Number=SeqID_83770
atgccactctccgaggtgcgcgtcgacccctacctactgcacacggccttcgagtggcacaactgtgacctcgatgacgacacgctccccgcttcttgcccacagctacgtcgaggacgacaagaatatgttccactccagctactcccttgccttcctctgctagggactgctcttatatgttattggtgctattccgcttgtacagctaatgaaataggtcctactacacaagacctcaagttgtacctatgcaaggactacctcaggtttgaaccatacttatggaatgcatgtaagaggtttgtgttggagcacagggctggcgagaatcgtgctccaatcatttcagatgatagccccaacaaagatatcaacattgccttctataatatcctgatgctgaaaaagtcaaagatactatttcttggcctgtcaaatctgcttgacccaaatgcaagttttgctcaaatgtggcaaaaaaggattgtctcaccaattgtcagcacgtttgcttccagcaaagttgtccagagaaggaaaagatga

SEQ ID NO: 40396 - DNA, 654 bp, Zea mays
  Peptide Sequence Number=SeqID_83771
atgcaggcggcatgcaaccgcaccaaggggcgcaccctttcgactccgacgcgtccagcatgggggcccaggcccacacgtcatgtaaccggcgcgccggttactacgtgcgggaaactgcaccgccacttgccagtaccgcgccttctcgactgcggaaccggtgccgcgactcgaggcaaccctgcgcatggcccaatagtgccaaccgagcgcatcgatcacgggtcagtcagccgcgggaaaaggcgtgatggtcgatatggccaaaagtgggccggcaataatggcggcggcaggcgggcggaagcagcggtcaagtcatctgcaggctcacggaccgggaaaggggatactccgaaagggatccatctccgcgaaggaagcgggccccgagccctcctactgatcagagattcgaaggctggcccctcgaaagggttcaacagccgcctcagagcactcgggctccgcgcccactactggtcagaggttcgaaggctagcccctcggaagggttcgacagtcgcctcaggcccctcgggctccgcgcccactactggtcaaaggttcgaaggctggcccctcgaaagggttcgacagccgcctcaggccactcgggctccgcacccactactgatcaggggttcgtag

SEQ ID NO: 40397 - DNA, 1764 bp, Zea mays
  Peptide Sequence Number=SeqID_83772
atgtcgtcctcttcttcttccgctgccgctacgccgccggccgccgcctcgtctgaggagacgctgagtagtttgatggtggaggagttgcgcgccggcgactctgttgattttggcgtgtcgcggatgacgtcagcccgcgttcaagatatgcagcggttgggttactttggcggcggagtcgctcgtgctccggggacggaggaagtccccgagccggaggcgtatccgccctttgaggtggcagaggaggatgcggacgaaggggcccttcgctgcgccgccggtcagagcagtgggcgtgatttagttgaagagttcgtggcgtacggggtgtggtccttggcgcatggctgggcgttgggagaagtgtgccctcgccagatgccttttcacggaggaagggtggtgcgaagtccggccttcgcactgaatctgcggaaccgcgacccggccgcctttgtgcacgatgcggaggatggggcggtgcagctcgtgggacgttacgtgccgaggacggaaggccagcgcagctttgatatccgcgggtcaaatgaccgtttgaacagggttttcgaattaaatcaattgccgtacgacggctatcctggtcaagacgaagcggaccgccgtggaaagaagccggtggtggagactggagacgaccctgcgccggcggccgccccttcctcaaaaaagagaaaattaggtactgcgatgggaggacttggggtgtctgatagttttgctagagagttgatgaggacgtgcgcggccccgggggaaaggatgtcttcgcccgagctccaggagtcttcggctcggatgctgagggttaccgggggttgctggcctaggaatgttcctatcccctgcgcggcttacgaggactgttttacatctcgcatggtggctgacttcgccaaccgtactgcgtcgggggccctcacggcagctgtgtctgccgaagtcgagagacttcggatgcaacatgctgacactgtccgtgagaaatcagcctccgacagcaagtgccgtaaactggcggacaaggtggccgcactggagagggagaaggctgacctccggcgccaactggcggcggagaggagggaggccaacgaggccatcgccaaggagcaggctgcgcaggcggaggccaaactggcgcgggcggagggcaatcttgccaaggagctcgccgaacatctgcaggagcggctcaccgccctggagagccgcgcgaagggggccgaggccgcgatgcgtgcggaggccgaacggacgcgcacgcagcttatggatacatatcgtgagctgggtgcgcggaccggtgacttcgaggtgccggaccgagagcccgggcttcgttgtctgcaatgggtgcaggagaagctgcaggaactccccactgtcgtgggggggggggtttatgtcgtcttcgaccaggcagatgaagattttgagcgagatgtctacaaggtcgaagaccccgtcgtgaaggaatccgccggggccctctatgaccggatgtggggtccgcacggtcgtgaggtggtcagggagcgggccgagactgcgagggctcaggcggcgcgtggcgagcgggtggacgacttcggggcattgaacagcgcgctgcctgacccggagccgacccctgcggaggccgtgtctggggtcgccctggagccaaccccggagaccgcagcgatcgcgacagctgccccacatctgctgcggccggcgaagacctgcccctaa

SEQ ID NO: 40398 - DNA, 423 bp, Zea mays
  Peptide Sequence Number=SeqID_83773
atgctcaaggaatgcttggtgtacacctccatgcgtctaggggtcccttttatagccccaaggcaactaggagccgttgagagcatttcaagaaggcaattcttgcattctgtcacctggcgcaccagacagtctggtgcggatttctttccttcatcggcgaagccgaccgttggcgctttggagccgttggcgcaccggacactgttcggtgccccttctgaccgttggctgttgtgtcgcgcgcggattatgcggccgaccgttggcccgaccgactgttggctcaccggacagtccgggaaggatggacttgccttcgtcgaagctttcctggcacagaagacctacttccggaagttcgggctctggtccctcttccggggctacgggttccggatcaacgatccccgcttcttctag

SEQ ID NO: 40399 - DNA, 2073 bp, Zea mays
  Peptide Sequence Number=SeqID_83774
atgtcggcgtcggatcttcccgacgagctgtgggcgcgtgtcctggagctgggagccgcgtcgtccgcgctggggttccgcgacctctgctccattgccatcgcgtcccgccgcctcggacgcctctccgtctaccccgccctctggtcgaaactcctctctcgcgatttcccctcccaatccgaaccctccacgtcctcggcctccacctcccagccgccgccgcagcggctccaccccaaatccctttacaagaccaagtttgagaggcacaaggtgaggatggctgaggcgaggcggcgggcggtgttcgaagcggaggcgcgggtgctagcttccaggaggcgactggtggagctggaggagtccattcgggaagagggggagaggatgaagacggctgcgcaggagctcgacaacctcgagaggcctcttcaggacccacctgcaccacagaggcgtcagcagaggtggggcgccgagcgcctgcgccgcttgctgtgtgatgcgcacgccaaagacctgtcgcgccttggctactgcagcacgtaccgctggctcgtggacgccggggacatgtgcgaggactgcgtcgcggcggcggtgcccgagaaggcgttgctgtcgtcgatgggccagtgcgatctggatgagcgtgacctcgcctgtgcctgctgcagcgtcgcgctcgagagcggtttctactggctgtcgctcttgctcaccatgtcggcgcggcatggctcagactgtggccacaagcaagaggagaaggcacggaggccaaatggaagacgccggagtgagacgaggtggatgaagcgaggagaggcatctagaagcatgagagcttctgtggcattaaacgtatggcaaccacaagttgttcgtggtcgtcagaagcagttggttcagcaatgcacagttcctgttgattcccgtcttagtgatctaaacatggagctgaaaagcaaggagaagcacaagctgaatgattgtgaggaagcattgaaacgagcaaagtatcacccactgcaggatagtcatacaagtggaactatcaatgagccacaaatttctctttgtaatttgggatcaagcctgtggatggacgaaccctcggtggacttcagtgctgaaggtgttagtagcagatcaggtctctgccaaagcacctgtttaaatcctggttgtaagcatgaccgtgcttgctgggaagatgattatgtcaaggctgtaatatctcatgggcaagatgatttggcggtcgatgaaattggattggctcttactgaagtgatgcatgcatatgatgatgacaaatggtcaagtctgtatgaagattttgacgacggtgtcggcgatgaaccaattcttcctctggaatcagattcaactggtgattttgtggacattgactccgcatcacctacctttcctagtgacgatgcaatggaatcatcaattaccaattcatttgctcggaattgttcaattaatggcactccaagtttagtttctgcaatgaaaggaacacgtgtgaagaagggaatcacgacaaagttgagcgtttcttgggcccctgatgtatacgaccctcctattacttctgactcgcacacggtgaaagggcaccatacgagttcaactaagggtaactacaaatacaagacctccaagagcagcagtaccactagaaggaaaaaggacaagaagcattctaggcacagtagtagcaatggaggtggcagcaaaagagacaagaagcattcttaccgcagtagtgccagcagcagcagagctattaccagtggttctcaatattgtgacgcatacagtggtggtggcatcaacagcagaactgttcctgaatctgccaagatatctccattggtggtagctgaaaatgtcacaccgcaagagatggttcctgtactgaagacactggaaccaatcaaatgtactaccagctgcggcaaagagaagccatttgccttgctgtcgcgccagttttcccctgcaaggtacaaggggatgttcaccttttggaaccaaaaccaactggcttcttga

SEQ ID NO: 40400 - DNA, 852 bp, Zea mays
  Peptide Sequence Number=SeqID_83775
atggtccgcgagacaacgttcctgctaggcatttcgccgagcacctgcagcaccagctcaaggcggctggtcttggcgacgacctccttcgccaccgcacgcgacattgccgtgtccgcgcggtgcctcttcatgcccatgaacctccacatgctctcgctcgtcgtccacctctccgagctggctgcctccttgcccggcgagttcagagacctggccgagccggtgcgtctacccggctgtgtgcccatcctagggcccgacatcgtctcgtcgctccaggaccggttcgacccatcgtacgtggtgatgctgcacctcgtcgtgcgctgccgcgaagccgccgaagccatcctcatcaactccttcgacgctatcaagcctgaggccgtcgaggttctgcgccatccagcaaagtccggcggccaccagtgtaccctatcgacccagatccttcaggccgagcccaacgacggcggcagcgtcgatgtcgatttcctccaacgcgaagaagcggagcgtcgggagcgcggtgacggcggcaaagaggtgtcgtgggggaggaagaagtggggcgggggcgacctcctcgcagccgcgggatgggagatctggtggtgcctccgcctcgaccgccgcacgagcacacgccaagccaattggagagggagtgcgagggcgcgggatggcggatctgctcgatctcaagacttggcgggcgcggcggacgggattgacgacggggcggggcaggagatcgcgcggcggtccaggggcgctgtgccgctgtcggcgcgggagtggggacgcacgggcgggggcacggtggacgcccacgttacctccttatag

SEQ ID NO: 40401 - DNA, 274 bp, Zea mays
  Peptide Sequence Number=SeqID_83776
gattgacatagcagaatcagcaacaaagaggctccttgagttagaacctcacaatccagagaactacgttctgctctccaacttgtacgcatccaactcccagtgggacagagtgagctatctgaggagaaagatgaaaggcaagaatgttactgctattgctggacgtagttcgattgaaataaacggccacctgcatgagtttgtgccgttctgcatgacgtcggtgaagaggaaaaggaagctgcgctttgtcaacacagtgaaaggctag

SEQ ID NO: 40402 - DNA, 783 bp, Zea mays
  Peptide Sequence Number=SeqID_83777
atgtacagaggagctgtcatggaagccattccaacaccaagacaaacaaataccctcccaacaatgataactctaggtgtcgaggaaaacgccatgataacggcacctccaaagaacagtgcatcgacaatgctcttttccaccgcagcaaagtcgtctctaatgtacaggagggctcccgatatgacacctgctgatctcaaagcgctggcccgatcccgcgccagcagctcgcatagtttgagctatcccatccgcaacggccaggagggcgctccaggtgccaaaggttcacacttagccaataaaaagaccaagtatgggttcaacaaaagagcaaagggacaaccgaaggcacctctggtctggcgcaccggactgtccggtgcaccaccggacagtgtccgggaagagcggcctcaggaactcgccagcttcgggaatctccaacggctagtccactataattcaccggacatgtctgatgtgcaccggactgtccggtgtgacaacggagcaacatatatttcggcgccaatggctacctgcggcgcattaaatgcgcgccagcgagcgcagaagtcaggcacgcccatactggcggaccggacactctacagtacatgtccggtgcgccaccggacatccaggcgggcccagaagtccgagctccaacggtcggaacccaacggctttggtgacatggctggcgcactggactgtccggtgcaccatacgacagtcagccccaccaaacggctggtttggtggttggggctataa

SEQ ID NO: 40403 - DNA, 1437 bp, Zea mays
  Peptide Sequence Number=SeqID_83778
atggcgatggctccaccgcctgcctgctcgctcttcccccgggtcgccgctgctgcgcccagttccgtcacctccaactccgttttgacctcgcgtggccccggtatccttccttccccgcgtctcgctttcgcccgccgccacctctccgcggcatggtcatcgaaggcagcagcctccgcttctgtcgaaatccaggatgactacacggatgagatggacgcggtgaacattgcgcaggatgtcacccaggtgccgcggcctccgctttgctttcttaccttttcggcttttccccatgtgttgtatagtgatttactgatttggctcattggaaaaacaccaatggtgtatctcaatagagttgctgacggatgtgtggctaatatcgctgcaaagctcgagtacatgggaccttgccgaagtgtcaaagataggattggattaagcatgattaatgatgctgaagagaagggattaatttctccagacaagaccattttggtagaaccaacaactggaaatactggtgtagccattgcttctgtggctgcagcaagaggatacaagttgatagcaacaatgccttcatcgttagatgtcgagagacgcattcttctgcgtgcattcggagcagagattgtgttaactgatcctaccaaaggactaaaaggagcttttgataaagctgaggaaatagtcctgagaacaccaaatgcgtatatgtttcagcagttcaacaatgaggcaaataatctattgagaaaccacttgggtaaattacagatccactttcaaaccacaggcccagaaatatgggaagacacgttgggttctgttgatatacttgttgcaagcataggaacaggcggtaccattagtggcactgggcgttacttgaaaaggatgaacaaagatattaaggttattggggtagaacctgctgaaactagtgtgatttctggtgatagccctggttacattccaagtatattagatgtgcagttgattgatgaggttgtgaaggttagcacagcagaagccgttgattctgcaagggaacttgctctaaaagagggcctgctggttggtatttcctctggtgctgcagcgattgctgctatcaatgttggcaaaagacctgaaaatgctggaaagttgattgcgaatgaggaagagatagcgagccttgtactacttcaagcgcgttgccagtccccttctctagacctgacaggcttccatgacatgattgataaacgtgaagcagtgaagaccctgtttgattgcaacttcagggtccgaagttttgaagctgcacagagtttctatcagatcgaaggtcgagcttgcaattgcaagatcaaaggtcaagctgaaaggagcctgtcgaacaaaatgcagcgtcttcactcaggtcgaagcgggaagctctaa

SEQ ID NO: 40404 - DNA, 651 bp, Zea mays
  Peptide Sequence Number=SeqID_83779
atgtctcggatgagctggtcgtcgtggaggaggacacgcacagtcacgagagcggcgggcgagggcggccgcggggatccggcagggcaatcgtggtctggggggcgagaccggcacagagggcgcgcgacagcagggcgcctgggcgcggctcgggacagagaggcagaggagccggcgttggtccgcctgcgcgcgtcagggaagggcggctcggccgctgctgctcgggacacggtgggcggcgtggttccgggcgacctgggcgtcgcgacgcgacggggcagagaggagggagagggcgctgtgccaggaggccacgccccgcgccgccgtggccgggccggagccggggacgccgcgcccgcgccgccggggagacgcgccgccaccagggccgccggctgcttggggaaagggggaggaggcactgggggcggaagcaagcacctagactgcggaggcagaggttctggtgccgttgtccaaggcgattacgatggcgacgccggtgaggatcagcgcctcagcagcgtggggcggaccggcaggaagagggcgcgggtgggggcgcctctgcgcggtggagccggcggcgcgcaggaccggcaggggcgtagccaggtgggaggagggaggcggctggcgtag

SEQ ID NO: 40405 - DNA, 213 bp, Zea mays
  Peptide Sequence Number=SeqID_83780
atgaacagtatcaacgtgatcttcttcggcacgaatattctcgtgttgatccttgccttcttcgccgttcgaatccggcgcctagttgacaccaggaacgtggaagaggagcttagtgctgggaagccacatagctctaagagggatacgggattgctcgagagctctggatctgttgacaaatctaagttgtcagtgaagaaggatggctaa

SEQ ID NO: 40406 - DNA, 1935 bp, Zea mays
  Peptide Sequence Number=SeqID_83781
atgtccattttcccatattcaagaacccagctgcgcttgatggaccccgtggattggttggacttcgtcacagggtcctggacagagaaaaataaagccagcaaggatgtaagagctgataggtgctgtgcagctgataggttggcaaagagaggactagaccatccagagagagttggtggttttatttatgacggcaatgaagttgatttagatgcttcaaaggatgcagacttctcgatggaaccatgctcaaaatcaaagaagaaatctttgaaaaagactgtaaaacccagggatgaagtggttgctgtaaatggacgaaacagcacagggaatgttaaagcatcattgtcctccaatgaacaaaacaaatctcttcctcttatcacggcaaaacagtatgcctgtcgtgctgcacatttgtcttcccttgtagtttcatggtctccagttgtgtcattaagtgatagaacttcttgtttattgaggcattggtgcattcttgctgttggctctaaatctggaaatatttctttttggaaactatataagccagaatattacacaatagatgctggtgtggttaccagtgatccgatgctcatcggggttttgcatgctcatgaatcatgggtcaatgccataacttggcaagttctttctgcgggctcttcaaaatcctcgttgcttttagctactggatgctcagatggaagtgttaagatatggttagggaatattgaagggttaaatcaatgtgcaattggagaagaagtgccatttgtgttagttgctgaggttgccgctaatttatcagctccagtgtcgtcaatctcattgggcatacctgcccggtctcaacatgagctatcaaaagtttctgatcgatgctatggtcttacgctatcacctggagaagagataattgctgtggtccgcagtttggatctgaaccttttgaaccagatgtatcaagtcagtccgcagtctgcggacttatcctcaagtaaccttatgtggtggggatccaacatcttgtggtcgctgaagaaatacgaaaatgtcgaaaagaggcttgtgttgtgggacgttgtagctgcgctgcaagagctgaagaaaaccgcgcccgcctttctggagactctagtgcacagttgggcctcagctttatttgcgggcgactcacagtgtgtttctatcactgcccagtcatcacgctcgatgcatgacatgatgccccatgtcagctcgcggaagctgcacttactgaacataatctgcagaaaagtgatgctcggcaatcatgcgcggcatggtcctggtgctggaaacaacagtaatgatggaacaactgatttctggagcactcttttggtagcgagtgaaacggagctgcgagagaggctggtgggtttcacctttgccgcggtcgtgaaacggacagcgtgtctgttcaacggcacctccaccgcaaattgctggttccctgtcggcgtcgcccagatggattcttgggtatccatgaactacgaaaaggtgcacggtcagctgcagtcgatcagatcgaagatcaaagagctaggaagcaggatcgacggatactccgacgtagaaagctgcccctactgctcttcgccggtccgtttcgagtcgcctgacgtggccatctgcggagaaaggcacacgctgtcgcggtgcaggacatccatgaccctgtgctccgtcgcgcagccagtgtggcactgctcgtgctgcgggggcacggtcgacaagctgctgccggagtcgttcttcaccatgcctttggacgccgtccgtgacgacaaaggatcgctcgatctgtcggcagcctccgccccgctttgccccttctgcggcgtcctgctgcagaggtcgatgccggcgttcctgctctccacctcgccggtatag

SEQ ID NO: 40407 - DNA, 801 bp, Zea mays
  Peptide Sequence Number=SeqID_83782
atgtcaggttctgatgaacgggccagcggccaggccgggcccccgccactgtcacacaagacgacgacgctcgtcacacttcaccgtcgctacgagctgggcatggaatggtgggcctactacgttcttccgtcgatcaggacgctcctagttagccgcggcgccatggctcctctgctgttcagggacatgaaggggctctcgtgctcgtcccaggcgtccacggcgacatgcccgagcctggagcggcacccggcgccccgcccacacaaggccagcgccggcgccagccccctggctcccgttcctgctgccgagcccaggaccaggacgcaccggcttgacggcaagaaaggacagcagccgcagcacaaggctgccgtcgtccccgcgaacgccggtggtggcctcgtcagccccgccggctcgtccaggtacctgctgctgagcggccgcttcgccgccgtcgccgaggagatccaggaggtgctggagcctgccccggccgtcgacgccatcgccaagcgggaggaagctagtgacgctgctgatgccaagaccgcgcaggcgcaggagcaggtggtggttgtgctcaaggtatccctgcactgcaaagcgtgcgccgggaaagtgaagaagcacctctccaagatggaaggcgtgacgtcgttcaacatcgatttcgcggcgaagaaggtgacggtggtcggcgacgtgacgccgctgggcgtgctcagcagcgtgtccaaggtgaagaacgcccagctctgggcggcgccaccggcgatagccgccgcctga

SEQ ID NO: 40408 - DNA, 651 bp, Zea mays
  Peptide Sequence Number=SeqID_83783
atggggacagttggctgtgccatgcaaaataaagtgtgtgaaagcaactgcctcttaaactatgggtggtgcaagcaggcaaacgcgagatcgggtgtcgctgtgaatgacgagtgcatgctcaagttcggcgagctgcagtcgaagaggctgcaccgcttcctaactttcaagatggacgacaagttcaaggagatcgttgtggaccaggtcggggatcgcgctaccagctacgaggacttcacaaacagcctccccgagaatgactgccgatacgcgatctatgatttcgactttgtcactgcagaagatgtccagaagagcaggatcttctatatcctatggtccccatcctccgccaaggtgaagagcaagatgctttatgcaagctcaaaccaaaaattcaagagtgggctcaatggcattcaggtcccatggctcccagaagaccatgaagatcccttgttggtctccggaagtggtagtgacccctgcttgattgctcgtatgccatctcaagttctcaaccgtgtcgagcagccattttcccatctcaagcgcatcatcgtttcgtttgacctcatctgctatcctgctcctagtgcaaatcacatgcgacagaaagtgtcaaactctcaggcatctgtctag

SEQ ID NO: 40409 - DNA, 774 bp, Zea mays
  Peptide Sequence Number=SeqID_83784
atgcagctaccttttagaacagtgacaataaatgaacacatcttgtttaataaactatccatgccactgttgtttttgtcagtcacaacaacagtaagtgagctgtcctccaagcgtgatgatgaaccagataacaatacagaacattctgaaacaaatgaattggcatcaacttctggcacaagtgatgctgctgatggcacaaaggaaatcgtacaagagaactggcttgtgttacttttcagggagcttgagaagcaaggcatcactttacccgagagatttccaatgcaaatgatgaggtcatttgtcactgtagctcaagaaaactacccaaatcgtcttggagtattgtttgttgtccgccttcctccagttgtcagagttattgcacagacatttcttcaagttttgaaaccatctacaaagcagaagttacgttttgagggagattcatacaagaagacgttggcggagttcttgcaggccgtgccagcgtttctgggcggtaaatgcagctgcccacgatgtgagaagcctcgtaatagttcagtggtgcaggcaggggaagggagcaagaaccaggctcgcttggtcagcgttgatggcggatcacctgtcgtggacttcgacttcgatgaagaagagatcccatcaccttatagctgcgagaacgccatcagggctgcgataatctgcctgctgatggtgtgcatcttcatcgcgtttctggctgggatgaacgaccctgcatccgttccgcccagtgcctga

SEQ ID NO: 40410 - DNA, 141 bp, Zea mays
  Peptide Sequence Number=SeqID_83785
atggctagttgggacaaggacaacaaaagcttcatgtttgcttcaaaaaaggtcaccgatgtggtgaaggcaagtcccaagggcgaggactatgtcgtgcatgcgaagggttcacaagccccagtcggggtctacgggtga

SEQ ID NO: 40411 - DNA, 1263 bp, Zea mays
  Peptide Sequence Number=SeqID_83786
atgagcacaacctggaagataaaggtgccgtttggttcagcttctggccggattctagccgccagaagccgaagcgtctcccaaacgcctaaattctcgacccgcttttgcgcgccgcgcttggacgagaagccagccgcctacgcgacgccagaagcggccctcacgccgcctctcctccccatcgcatctcccgcccccgcgctcgtcgttggccgaaagccggcctcattcgcgacggccacgacgctcgtctcgtcccccatcgcatctcccgccgccgcgctcgtcgtctgcgcagcagactccatagtcgacaaggcaattggaaggatgcaagagattgcggacaagatattttccgtagcccgggaaacaatccgtccgggacgcgggttgacctcatttgacgcaaccaaacttcgtgtagcattggaggacatagcttgcatgcttgagcaagactctcgggtgttgcaagagaatttgaacaacgtgaacaacgttatcaacccgggtgacagcagctacgaaccgtcagccttctcctcaccacccccagctgacgactaccttactccagattgggactttgcggagcactttgaaaacttctggggtctagaatatgactcggaccagatgccttcgtttagtgacaatgagattaacaatagtaatggtcatctcaaagtaggaaataccatgttgctgcaggcaatgccagggtgtactatgttcaaaatagcccccctagagaatgaggacgagctaaaggttatgtttggacccattgtctgcacaaatcaaacaacccttgttcctggcgtcgaggatgcaatttcatcatctgatgatcatgtcgaagccactttaggtgggggtgaaaatagcacacctgacccatgctcaaatgcgactgggaagcataaggtgcgtcatgattctccaaaaccaaagaagaaaaaagatacgagggaagagtacatgaaacgcctagtcgaggcttttgagtcgcgttcaatgaccactaacaagtccatcacctctgctgagaccgaccctgtccgtgttgaggttaatgtgcagttgcaacaagtgatcgatgatggtgcacctgaaggcagcgacctacatttgtttgccactcatctgttgattgagaaaaagtttagagatgtatttgcaacactgaagaccaaagaaggaaggaacgcttggctacgcaatgctttcgagatacatgttaaaaagtcgacatag

SEQ ID NO: 40412 - DNA, 123 bp, Zea mays
  Peptide Sequence Number=SeqID_83787
atggctgggaggaccgcgcccgcctccctcccctccttctccctcacgcccgactccctcgctgcccctttatcctggatctcgtcatggacgctaccacgaccaacgtttgttggagattag

SEQ ID NO: 40413 - DNA, 1782 bp, Zea mays
  Peptide Sequence Number=SeqID_83788
atgggcgggaccagcgcgagcggccggcggaggtgggcgcggcggtcctgccggacgggaggacaagccggtggggttgtcaggcggacgatcgcggcgccaactgctccgagggtaaccgaagggtttgctcatgtggacaagcaacggcgtgttcatggagcattatcagatttcagatgcaacagtggatcaacagttcatctttctttggatatcgaggaattcaagcataagggctcccacaaatcttctgttagatgtcttcctagttcacagagaaatgtaacagaaattagtcacatgcaacctgttgcgaggggacttcaagtagataagagcttcagtgataaagggttgtgtcatgcgagcagaactgtttcaggaatgcccattcgacctaagtattatctcagcagtcccaacaacaatttgaagagtcctcccactgtaaagagttgtagtcagatgagtgatttcagttatcgactggtcagaagtgctaaaaggtcagcttctccaggaatgggtttaaccagcacaaactactccctttatgagaaaatgtctttgctacgtcaacgaaggcatggtgataatcatcagaaccaaaaccgtatcaatgccttgaatcgacgacacaaaatcatgaatcctaggggagcagctgatctgctaagtaaagataaggttcatgaacaccttaattcctcattggaaagacattcacaggctttgttaaataatgcattgattagagaaaagcaactgtgctgttcagatatactcaatcaaaaagcacctgaacagatatggagctccgtttccagtgaatctgagaagatattatgcttttcctctggtgacagcattgatgatctgcaaggatcgtattcaagtgaaactagtgatagctccaacttatcatctctgggtgcagtagctggtgatgaatggaatacagccttcaagaaggtatactaccctcagactgcatgcatggactctacatctgtcatgtacactaaagaagtaggtcaggctagcccaatatctgttcttaagcctctatctgaagattgctctgattctgaaaacatcaggcgagagcctgcagatccatatgatctccagctgagactggagcttggcacatttgcaccaacagaaactgctgcggaggcaagtagcattggcagaactagtgactgtttatcctctgaagtgcagccgagcgacgacaaacccatacagcttgttgaagacattctcgaagaactggaagacgatgaggaaagggagttctcttacttgctggacatactgattgcttctggaatccatggaactgtggaggatcaaatgtacaaggtgtgccagtctaccgagtaccctgctagcgacgatgtgttcgagaaggtggaaaagaagtacaccaaagttgtccagtggtcaagatcagacaggaagcttttattcgacatggtgaacacgatactgtcacagatcctcgccccatgcttgaacatgcgaccttgggtcaacactaccaggaacttggctccgctttggggcgcagagggtctcctagagaaagtcttgcaggtgctaactcagagacgggaacaactcgcgcccagtgagactaagccggagaagaaagggttagatccgaagtggccagatttagcagactggatcgacagggcaggaagggacattgagagaatgattaaagatgatatgttggaagagctggcccttgagctactgttcagttag

SEQ ID NO: 40414 - DNA, 780 bp, Zea mays
  Peptide Sequence Number=SeqID_83789
gctggcccctcggaagggttcgacagccgccccagagcactcaggctccaagcccattactgatcaggggttcgaaggctggccccacggaagggttcgacagccgccccagagcactcgggctccgcgcccactactggttaggggttcgaaggctagcccctcagaagggttcgacggccgccccagagcacgcagagtgaggaatgactctgggtacgtccgttacatggccgaggctcgggctatgctcccgagtcggcaaggtcgaagtgaccgcagtcacttcgccctttcactgaccgacctgacaggaaaacagcgtcgctcgccacactccgactgttgtgccacccaccagggtgagactgacaacagccaagttcagcctcgggcgcaacaggaagctccgcctcgcccgaccttaggcctcagcctcggaaggaggtctccgcctcgcccgatcttagggctcagccttggaaggaggactccgccccgcccgaccccagggcttggcctcagcctcggcctcgggaggaatcgcgtcctcgcccaacctcggcctcggcctcaggacaagtctttgcctcgcccgaccttgggctcggaccgaccgcaccacgggggatacatcattaccctacccttagctagctcaagctacgagggaacaaaaccggcgtcccatctggctcgccccggtaacaggcacttctccgacgaccacgttatcgcgtacacagggctcaagcacttctccgacagtcacgttggcat

SEQ ID NO: 40415 - DNA, 579 bp, Zea mays
  Peptide Sequence Number=SeqID_83790
atggcagcgccgccggcgagggctcgagccgactacgactacctaatcaaactgctcctcatcggagacagcggcgttggaaaaagttgcctcctgttacggttttcagatggatcattcaccactagcttcattaccactattggcattgacttcaagataagaactgttgagttggatggcaaaaggattaagttgcagatctgggatactgcaggccaagaacgtttccgcacaattaccactgacataagaaattggatcagaaacattgaacaacatgcttcggataatgtgaacaaaattctggtggggaataaagctgatatggatgaaagcaaacgggctgtgcccacttcaaagggacaagctctcgcagacgaatatgggataaagttctttgaaacgagcgcaaagacaaacctgaacgtcgagcaggttttcttttctatagcaagggatatcaaacagagactttcagagactgattccaagcctgaggatcgaactatcaagatcaaggctgaaggggaagctgatgcagcagaggcgcagaaatcagcttgctgcggctcttga

SEQ ID NO: 40416 - DNA, 633 bp, Zea mays
  Peptide Sequence Number=SeqID_83791
atggggcatcatcacatatctaggtcgtattttcgacagacagatataaaacggagtgggaatgcctcgattgatatcatgtccaagttcttcaagctgatggtggttctacaattaatgaatgatttgaacgaagtgttcaagatgccgctatctcttgtattgaggcttatagtgtgcttgaggttcttcgacctctctataattcccctaagatactggaacaaaaggatcattgcgtctctgcgagctaatcagttctgtgagcgtctccctagccccaatggcgagtcaactgttgattgtcatcagatctcaaagatgccaaatcttgcattcaccattgcaaacaagactttcaccttaacaccagagcagtacatagtgaagttggagcaagcaggacaaactatctgcatcaatgggtttatggcatttgacgtaccgcctcctcgtggtcctctctgctacgctaaacatatctgtactactcttaagtgtgcaatgagggcgtccaccgagggcatcaccgtgcccccgctcgccccctccacgcccgcgcctgtctgcatccgcccccttcgtctccccgcaatggccgcgtccctacctcatgtctacgacgacaactag

SEQ ID NO: 40417 - DNA, 666 bp, Zea mays
  Peptide Sequence Number=SeqID_83792
atggccgccctcaaccccatggtcgagctcgcccaaccaatcgcctccatcgcaggattcgtcatcgactcgagccaggtgagggttcagcgtggaggtttgtcgaggtctgctgctcgtagctcccgtcgctccactcaagatccagcagaagtggagcaactgcgagaagaacttaggcgacatcaggattacttgaagcaacaagttgcgcaacatgaatattatgctacacagattcaacaacagcaaacactcatacaaacccctccagctaccttgccgacgcatgaacgagaagataggttagactttgttgaaaccctcttcgctagtggagatgtcgagtgggacgagagtcttgttggagttggtccaaagacccccttagggaagcctgctgccaaagcggtaaccgagacgggctccgcccgcagcgcggctgcggctgcggcggtccctttggtcaggagctccgacaccctcgccgcgaggctcagcttcgcggccggcgacacgccgtgctccccgatgatggactccagcacggcctcgcagagaagcttgttgtcgatcgccacgccgccggcaaccggcaccgacgagtccctggagaaggcgacctggatggagcggatcggagcagaacagcagcgtgagtactga

SEQ ID NO: 40418 - DNA, 258 bp, Zea mays
  Peptide Sequence Number=SeqID_83793
tactcacgctgctgttctgctccgatccgctccatccaggtcgccttctccagggactcgtcggtgccggttgccggcggcgtggcgatcgacaacaagcttctctgcgaggccgtgctggagtccatcatcggggagcacggcgtgtcgccggccgcgaagctgagcctcgcggcgagggtgtcggagctcctgaccaaagggaccgccgcagccgcagccgcgctgcgggcggagcccgtctcggttaccgcctga

SEQ ID NO: 40419 - DNA, 1296 bp, Zea mays
  Peptide Sequence Number=SeqID_83794
atgccttcgcactcccctcatgcatcgtgcccttccaccttccgagcccccggatggggagcactcgcgttgccttcgtcttgttgctgttggaggagcacgacctcgcgggggttggcacccttcagccatcactcggcttcaaggattttcatcatgcagtccggctgcagtcccccgtcgacggtcacacaggatgatgaccgtaggcctcgtggtggggagaagcaagccgggctgcggcctccgccccgccctcagcttcaaggatcttcatcatccgggcaggggaggagggcggggcgagttggggcctacctccgcgtgggccggcgacccgcttgttcctccagcattcgggggagaggggcatcctccagctgtgcggaggaggcgtcctccagccatgcgggggaaagcgaactgttgctgcctggacagggtgcagctgtccgtcctccacccgggcgacggtcgtgccgtgcgcaggtggatgctgtcacctgcctcgcggagggggcgaacttcgacaacgcgggcacggtcaggcatgccagcgacccttcccgcgccaccgactgcaccgggggatcgtccaagacgtcgtacgccgcgagggcggcgttcgtgttcttggattgtcttgtcctcactccagcacgacgcctccgcgcggaggccggcgccggcccgtctgcgaggactttagtggggatctgccggtgcaggctgaggcggccgccattcatcggcgtggcgtcggcgcgcaggtggccgctgtcgtctttgctgaggtggtggcagccagaggaggttgtttccgccgacgagaccgtcggtgccacctacggtcggacctccgactctttggcttcgatggctagtcctcgcccctcgcgtggggacgtgggcgagggccctttcacaacagcgtttgccctgaggtcatcgttgctgctgtttaaccgcccgaagcaaaggtcgttgtcgctgctgaacctttggacgctctgcgatgagctggagccggaggcagcggtgtcggcatggacggaggcggagtcggctcgaaaagaggcttcgtcggccctggagcaggtggcttcccaggccgaggaggtgcagcagcggcggctggagcttggccaggtcgtccgtgagcgggaccaatcccggagtcacgttgccgaggccgagagccggctgaggtcctcggggaacagctggctgaggctacggagcggccaaccgaggtgtccgctcgggccgggaccccggcggagaccctggttgtga

SEQ ID NO: 40420 - DNA, 234 bp, Zea mays
  Peptide Sequence Number=SeqID_83795
atggccggagtcaacgacctcacgcgggcaaagaagggcatggggcggtggcggttggccggagaacctcggcacaacgacgcggtgccagtactgggggtgtcacacccggttttggaagatgctaagcctacacaggcagctgactcggggtttgccactaagaaagaactagaacacgtcatattcctggaactcctcgaagtcatccatgttgctagcatcacctcctga

SEQ ID NO: 40421 - DNA, 159 bp, Zea mays
  Peptide Sequence Number=SeqID_83796
atgaccggttcatgcaagtccactttcaatgacaccacacgtctatccaatgctctactttcatcgaagatgtatgtttcggcgacaagtacaatcatcgtcccagtgttgatgaccaagggaactgttaaatactggagagaaaagaagattttctag

SEQ ID NO: 40422 - DNA, 318 bp, Zea mays
  Peptide Sequence Number=SeqID_83797
atggtgacagggatggggttgggtgcggtgccgcccgatgcgctgctcctcgcccacgcccatgcaacggagcgaccctctggtcaaagaaccctctcaggcaaggcagctgccttgaaggaaccagttgttgctgtggaggaaccagcgaccaccgcgggcaaattgacatgggcatccaatccatctcttgtcgtgtgcgccaccataaacattcctttcaaccatggaggagtatgtgaaggaggctccatgtgtgatgccagttatagaggcatagaaccactagttagttcctgggctctcgtggatgaatga

SEQ ID NO: 40423 - DNA, 444 bp, Zea mays
  Peptide Sequence Number=SeqID_83798
atgaggtttggtcatagaaatattttagatcatttggaggtagcaaaagtgtgcgacgagcttgaggacatgatggaagaaggtggcatactagtagattaccacggatgtgatttctttccagaacgttggtttgacctcgtagttgtgctccagactgacaactcaattctgcatgatcgcctgacgggtagaggttacatgggttccaaactcgccaacaacatagagtgcgaaatcttccaagtgctcctcgaggaggcgagggagagctacagagaggacatcgtgatgccattgcgaagtgacaacgtggaggatattagtaggaacggaagagttcatggcacgggcaccgtcaagagacatggtcacctgatcaagctctgcctggccttgagtacacctctcctcagcatcagaacaccgccgagtcaaatctga

SEQ ID NO: 40424 - DNA, 414 bp, Zea mays
  Peptide Sequence Number=SeqID_83799
atggccgtagggagcggcggcggctcgcggcgcgcgcgtccgaacgtgctagtgacggggacgccggggacggggaagacgacaacgtgctcgctccttgccgacgccgcaggcctccgccacgtcaacatcggcgacctcgtccgcgagaagagcctccacgacggctgggacgccgacctcgagtgccatgtcatcaacgaggacctggtcgggttacctctatttcttttgctagatgccgttaaggaaacaggtcctcgtggatcgtcagttgaccattatataaccgaaattggcagcgtttccgttgtctattgctttgcttatatagaagattgcaaggaaacaaatcagggcctctcggtcatgcggacaatcacatgcctattcttagattacttactaaaatag

SEQ ID NO: 40425 - DNA, 639 bp, Zea mays
  Peptide Sequence Number=SeqID_83800
atgaaggctgagtctgtcgtggtaaagaagaagaagaagaaaaggcttcgtcgttcgtcggacctagaactagtgactgcccctgtcgtgctgaaccctgatgatagtacaatgattgctgatctagaggatgttgtggagggctacaatggtgtgaggactgaaaggtacatgatggagggagatgatgaaaaaggggaagaaacgctccccctggttcatcgagaacggcgaagaaaagctggtggtgacaagtcaggcctagcttctgtggggataatcaatatccgaggtctgataatgtctgtcgatgacagtgtgctggaagactctattcctgaagatcttttgcttgagttgcctgaaattagagtcgttgacgtccgtatagagtgcccggacgacgtgccctctgttggcttacttgtcaggccagagactgatgatgtcgcggtgatgagttctgatatgctcattggtccagctagcctagccaccttagaggtcaatggccatggagatgaagacccaatggatgttccaagtgttgaaggtccaatgggtgcatttggagttgagatcccaatgggtgttgcacttagcttggattatccgttatccagttcctccgatgcctga

SEQ ID NO: 40426 - DNA, 246 bp, Zea mays
  Peptide Sequence Number=SeqID_83801
atggagttggcagatgacgatggtgctgcaacgaagcaaacaaggttagacgacggcgtgtctgccgcaagagaacgccgacacacagcaggacggatggcgggagtcaatcgcacacgcaagcagctggccgagaggagcagggagggcaccgaggaagcaaggatggccagctctgccgtcaccggtgagctccaaggacagaagaggcgcggccatggctgggacgccgagagcagggaatag

SEQ ID NO: 40427 - DNA, 252 bp, Zea mays
  Peptide Sequence Number=SeqID_83802
atgacgaacgacgacaacccacaacgacgggaacaggaaggcttcaccgaggcggggtccgagtgggttgacgctgctgggaacaacgaccgacaacgatatacgaagggagcagggaccacacgcaagcagctggccgagaggagcagggagggcgccgaggaagcaaggacggccagctctgccatcaccagcgagctccaaggacaggggaggcatggccatggctgggacgccgagagaagggagtag

SEQ ID NO: 40428 - DNA, 474 bp, Zea mays
  Peptide Sequence Number=SeqID_83803
atggctggcaataaaggcggcaagggaaagcgcgtccaaggggaagggaagccaaagcgccctccaactcctccgtcagaggacttcggtgactcagagttcttgaaggagcacttctcctctgagggtgatgactctccgctgccggctcccctctcgtcgtcgtccgattactcagacgactcaatggggttattggtggcggagagggtatacatccggtttgtcgagcgagtagggctcgagggatcggatgactcgaaggaggaggactccgaggggggggactatgaggactccgaggaggaggatggcggtggcggcgacaggagaggctacgagggcgacagcagcggcaatggaggcagcggcggtgcgggcggtggtgacgacagcggctacaacgacggcgatgagagcagcggcggcaagggcgacgacggctgtgtcggtggcaaggcgccaccgacatga

SEQ ID NO: 40429 - DNA, 612 bp, Zea mays
  Peptide Sequence Number=SeqID_83804
atggcgccctcgtacgccagcgccatgttccacgctcaggcactccaggaggacggccgctccacgcacgccctccgcctttgcaccttcttctctaacccagggctaccaataaaaagaccaagttttggattcaataaaggagcaaaggggcaaccgaaggcacccctggtctggcgcaccggactgtccggtgtgccaccggacagtgcacagtacctgtccggtgcaccaggggactcagactcaaactcttcaccttcgggaattccaggggggactcggctaaaattcaccggactgtccggtgtacaccggacagtgtccggtgcgccaaaggaggtcggcctcaggaactcgccagcttcgggaaaagccaacggctcgtccgctataaatcaccggactgtccggtgttcaccggactgtccggtgcaactccgggacaacggtcgtctccgcgccaacggctctctgccgcgcattcaatgcgccgtctgcgcgcgcagaagtcagaatcgcccatgctggcacaccggacatcaaacagtacctgtccggtgtgcaccggacacccaggcgggcccacatgtcaggagctccaacggctag

SEQ ID NO: 40430 - DNA, 270 bp, Zea mays
  Peptide Sequence Number=SeqID_83805
atggcatgggttcattgcagccaccacatctcccctcgccatggcccgagctataatgaccgggttgtctacggtcttgattgggatatggcaaggggaaagggtatcacgacgcattttatagggcagaggagtgtccaggtgggtgcgaggcgtgcgcatcccgtgggattcgcacggcaggtatcttcggaatcgggtcatgagtatacaagagtagggtcagtacgaagcctgagcgagacggaaagcgattatgacgaaggatga

SEQ ID NO: 40431 - DNA, 489 bp, Zea mays
  Peptide Sequence Number=SeqID_83806
atgggtagtggcaaaaggggcaagggatggccctgtcgtgccgacggcaagcgcaagcgccctccaagtccgccctcggaggattttggtgacccggagtactcggaggaagcttcctccgagtatgatcggtcgcctgctcccgcatccccccgctccatcaagcgtgccgggctcggtgggtcgaacgactcggaggagacctcctcggaggaggtggaggactccttcgacttcaaggagaggagcggcgacgagggtgatggtggcgaggacgacagcagcagcggcgacgacgatggcaatggcgacggcgacggcgacgatgaagatggcgagaccgatggtgacgacaagggtgacggcgacggtagcggcaaaggcgacagcaagggcgacagtggtgatggcagtggcgatggcaacggcaagggcgatgatagcggcaagggcgatggcaaggccggcggcataatgctgctggtttaa

SEQ ID NO: 40432 - DNA, 1008 bp, Zea mays
  Peptide Sequence Number=SeqID_83807
atggaagtggaagaagcaggaggcgaagtggagaacgccggcaaggacgaggcggaggcggagtaccattcgcgcgatttcgaatgggaggacctcaaggaagaggtggaatctggacctgtcttctcctaccacctctccccctttctcgaccccgccgccagtaccacctcgccgccgcagccctcgtcggaggcctggagaagcttccaccgtcgccatgcgtccggaaaattctttaaggaaaggagatatttgcttaaggaatttcctgaactttgtagcagcaaagatcatgccaaggttttagaagtggggtgtgggaatggaagcactgctgtttccattctacggatcttcctaatgatgacaatcattgtgtatggtttcttcaggtctagtgaaaggatcactgtctttgcttgtgactgtagtaaagacactcttgagaaggcatatgaaattatatccaatacaaaagggattaatatcaaggataggttccacccctttttaatggatgtttctaaagaaactttcccagattggttattttgcaaagcctgtcaaacttcgctgggaaaagctgctgcatctttacttgatccaagtcaccatggaattagagaagagcacccagtcttccttggagagaaccaatgttgtgctggtggcatggattttattaccatgatattcacactgtcagccatacccttcgacataatgccaactaccatagaacaatgtgtttctgttctgaaaccaggcggccttcttctttttagggattacggtctttatgacatgacaatgcttcggtttttacctcatcaaagagtagggtttcgggaatatatgcgatcagatggtaccttttcatacttcttctcattggatactgtgagagaactctttcgtgctgctgggctagtagagttggagctggaatattgctgtgtcaagtccgtgaaccgaaagaatgggaagacgatgcggcgggtttaa

SEQ ID NO: 40433 - DNA, 393 bp, Zea mays
  Peptide Sequence Number=SeqID_83808
atggagccctcgatgtggccatgcaggcagaggcgcttcacactgaaaggcgcccatggaccagggtgcctcacacgcttactcaaggagtgggtcggtgacagacactggcgtgtggggacgggtgtggaggcaggcgtagatgggaggtgggcgtcgaatgctgcgagtatttggggcgaggatggctctcagcctgcgccacacgtggggacgacgttgaaggaatgggtagtcctgggagtcatagagcgggtatccgctgccgccaccagcccagacccattccctatcgaacaggtggatggcgaggtggatggggagggcaccagccctgggttagagaagaaggcgcaaaggaagagggcgtgcgtggagcggccgtcctcctag

SEQ ID NO: 40434 - DNA, 297 bp, Zea mays
  Peptide Sequence Number=SeqID_83809
atggaagccccgccatcggccaggaatcgttgcatcacgtcatctgattcctctcccttctattcctttgcttccgtggtggacgagaagaaagcgacgaagggcgctgttgggggccttcatcttccgaaggccctcaaaaacacaactaacatgttttccaagtataatacattcacagggaccttcggcctcggaatgaagctgtacacgatattaaaagcatggtctgggagaaggatgagccagttccgaagctacgcatggagaagcttcggcttagcggtggaaaattaa

SEQ ID NO: 40435 - DNA, 912 bp, Zea mays
  Peptide Sequence Number=SeqID_83810
atggctaagctgaactcaacttcagctgtgaacctctttgaccatacaccagctgaacttgcctctgggcagttgagctgggtctgccagtcagactggcaaacaggtcgccaggagctgtcaggggcggttcaaccggtgttggtcaactttgaccagtctgcgcgtcagtctgccagtcagactggcagacaggctgccaggcctgccaggggcgagctttggtactacatcgagttctttgtggattcattactcttggagcttctagctcctagacgactaggtgtctcttgttttaacttgcctattcaacccccctctaggcaactttcaaaggcctttagcaatgtttgtgccttcattgccacaagagatatagtccaagagcacatagcctatagggtgtggcacttgtggatagctgggaaatgccgaaggagactaccgttgaatccagtgaagctatcccttgaggaaaggaaaaaagaggaaaattgccgtttcggccgccaccgctgtaccgaagggcaagataatgaaggttttgacacaccggcctcggtcgtagtgcctgaattgggtgaggggacctcctctactgccgaagtagaacaagccgctcccgccgcccgaagcgctgaagggtctactgtagtgccgaaggttcctacagtcgggccaaccgaagccaaagatgattcggccgaagagccaaaagtggaaaagacagtgaaaatgctagaaattttgagcccaccagcaggggtaggattgtcgaaagtgcaaaaagctcctaccgcaactcccaagagaaggaggatggccagcgtgctagacactgtcatggagaccacaatggccttgagccatgctcctactaagaaaattgtcgaagccgtcaaagtctag

SEQ ID NO: 40436 - DNA, 573 bp, Zea mays
  Peptide Sequence Number=SeqID_83811
atggcttcccatgggtcctcagacgacggaaatgcactgtcacacactgacgggcttgcacgggagggctttccccgcattttgtgggaggtacttcagggggccggatacacgacgcctcctcagtacgcgttgcaacagttcaagaagcaccgagtgccccgctgtaggctgtctacccaccccattggcttgttccccgccgaaagggagcatgccaaggatatctgggccatctacccaggacagactgcgcacttgaccgtacggtgcatgaatgctctgtaccgtctgcaagtgatgcgcggtgaggcgatgtcccatctgatggccctattggaggcgacaaagatcactttggacaacagagaggagctggtggttgatttgtccactgagatggtggaaaaggacttgcaggtggagcagctatccaatgatatccaagagttggaggaattagtggggaccagggagaacaccatcgaggttcttgaggatcagcttattaacactcagcagcagctggctgaggctaatgagcacctggatatgaatcaccaggagatctag

SEQ ID NO: 40437 - DNA, 153 bp, Zea mays
  Peptide Sequence Number=SeqID_83812
atgtcgagcctacaagcttcgccggaccaaaagaagggtgcctatggcctctgcgcgcgtgattggttgccgaggacctcagaatttctcgtcggcgtcaggacatcggtacaacaaccttactcgatccgcctccgtcttctcctcacatag

SEQ ID NO: 40438 - DNA, 417 bp, Zea mays
  Peptide Sequence Number=SeqID_83813
atgtataaaattgtccagtctctcgtgcatttagcacgaaccattgagctacagtcggtaacaccgtcctactccaaaaagcacctcaaggggcaaccccaggtgcgcgggggagagtggaatcgtcccccatctccgacgacgaaccaactgttcctggggaagaacctcttcagcgggaagctcgtcgacgaaggaaccgacgccgtaacgctcagcgacatcttgaagctggagaacgagatccggcgcagcctgtgtcacgagatgagatctcggaggtgggagaaactccaaataaacgagtcttcagggaaagaaggaattcctgccgacgtgatcgacgccaagctcaagagcaagccgagcaggaggcgagacagcgtcgagagaatcctctcttcggacgaaatctga

SEQ ID NO: 40439 - DNA, 282 bp, Zea mays
  Peptide Sequence Number=SeqID_83814
atggcctcccccggactccagacgccgagggatatcggtgactgcttactcgggcagccaaccaccttctgcctctcgctcatcctccaagcgatctacgacacgccatcaatagtcggcgggacgcacggagctccatcaatgcttcacgcgaacgacgacacgagaacgatattcggcgtcgagaagagtatgatcgggatcatggcatccttgcgcaaaggccattcagtggcccctaacttcaaggtctccaacgtcgacaagtacgagcccaagtag

SEQ ID NO: 40440 - DNA, 402 bp, Zea mays
  Peptide Sequence Number=SeqID_83815
atggcccgcgcccacgcctatataacgcccagtgaccttgaccgtacccctccgcacgcgctcaacctcaccggagcccaaactcaccgtcgtttgcccgtgcacggcgtgtccgcggccacccgagcccctgccaccgtagaccggccagcccagcccttcccgaccctgtccgaccctcggagacgaaagcctattattactgttagatgccaacaaaaacaacccttagggcagaactcacccctaattaagagatactgtaaccttgctgacggagagtacgtcctcgtgccggagcaaggagctgctcaggaggtagccccagatccagcaccagagcctgcaccagaggacctgcctgccacagctttggaaggcaagccccggttttatgcataa

SEQ ID NO: 40441 - DNA, 129 bp, Zea mays
  Peptide Sequence Number=SeqID_83816
atggcatcatcgggaggcttggctggtgacgaggaagattcaatagaagagcttgtgactgaggatcctggtgcccagcagatagaagttgctgagcaggagctcattgaaggcaagttacgcccttga

SEQ ID NO: 40442 - DNA, 285 bp, Zea mays
  Peptide Sequence Number=SeqID_83817
atgcgccgctacaaggacatcaacatcagactcgctaaagggacacgtatgccggacaaacagagcgatcaagaacaaggcaacacaattgttaattattatggaccttcgtcttctgaagcattatctccacatgaatataatgcttatcagacgaagaaggtgaagacgcgagagagtgatacaattcagcgtgaacagtacggtgctactgttcatctattttataggcacgggacacaacccgagtacaagtacatttatgcccttgacattcatctataa

SEQ ID NO: 40443 - DNA, 309 bp, Zea mays
  Peptide Sequence Number=SeqID_83818
atggcccacgcccgtgcctatataacgcccagtgaccttgaccgtacccctccgcacgcgctcaacctcaccagagcccaaactcaccgtcgtttgcccgtgcacggcgtgtccgcggccacccgagcccctgccgccgtagaccggccagcccagcccttcccgaccctgtctgaccctcggagacgatacgtcctcgtgccggagcaaggagctgctcaggaggtagtcctagatccagcaccagagcctgcaccagaggacctgcctgccacagctttggaaggcaagccccggttttatgcataa

SEQ ID NO: 40444 - DNA, 285 bp, Zea mays
  Peptide Sequence Number=SeqID_83819
atggcatcgtcgggtgggttggctggtgacggggaagattcatgtgagcagttgatcgactcactaatgaccagaattgagcgcggggcggtatgtgtctgggtaggcgtcatccgttggagcggaatccggcagggctgggggcagactgaatactcaccgttgatcggtattcgggtggcccggaatagatcaaagctagaagagcctctgactgaggatcctggtgcccagcagatagaagttgctgagcaggagctcactgaaggcaagttgtgcccttga

SEQ ID NO: 40445 - DNA, 540 bp, Zea mays
  Peptide Sequence Number=SeqID_83820
atgcaaaatgcagcacgacgtgcactttctcagtattgctcgttgttcagcggagtagctgatggccttgacctgaagtactaccctcgccgttcgaccggcagtgctggaggtgtgattgtctcgctagtgggtgagggcaatcccaggttgaacaacatggtcaacttggtcgttgtgctcaacacagagttggaccacgcccttgacgagttgggcaaggttcgggcggaggttgcggaattgcgtgctcaatgcgcgacacgccactatttggatggtggttctcccgccctgtcgggattcagcacccttaccattcatcgccccgtggtcgcttcgactatgatgtctgagaacaggcgcagaggtgcgaggcgtgctcagccagagcagcaggcaccccaagaggaggtagccccgcagcagcatctgccaccgacacccccgatgaccattgagcagatgttcttgatgcagacccaggcagtgcaggcaattggtcagacattagcagcgatgcagcaggctcagcagtag

SEQ ID NO: 40446 - DNA, 426 bp, Zea mays
  Peptide Sequence Number=SeqID_83821
atgtccggtgcaccagaggactccaactcaaactcgtcaccttcgggaaattccagaggcgtctccgctataattcaccggactgtccggtgtacaccggacagtgtccggtgctccaaggaagagcggcctcaggaactcgccagcctcgggaattcgcttcggctgctccgctataattcaccggacatgtccggcacgcccatgctggcgcaccggacactctacagtacatgtccggtgtgccaccggacatccaggcgggcccagaagacagagctccaacggtcggaacccaacggccttggtgacgtggctggcgcaccggacatgtccggtgtgcaccggactgtccggaactttgtgttccaagtgattgagaagagaaagctcactcggtccgagggaccgtttgagagagggtaa

SEQ ID NO: 40447 - DNA, 126 bp, Zea mays
  Peptide Sequence Number=SeqID_83822
atggacaacataggatatctgaagcttgaacttggcctatctgcaatgtcgaaagatcaacttgcagacagtcttgcttacaacatcttgaagggtttaattctaagcaaggctttgaaggcctag

SEQ ID NO: 40448 - DNA, 345 bp, Zea mays
  Peptide Sequence Number=SeqID_83823
atggcgagcgggcgaggcgcaagcggaagcgcggtgagcgattggattagagtcaaagcgatagttccttcacccaaatatggatgggagaatgggactcatcatagtgttgacaccaatactctagaaatactagaaatctctgtactgtggtttttcttcaacctgctttggtggcaggattgctacttgatcttcttcagtgaggtagaggaggaaaaacttgaatctgaattagacgcaggagaagggagttctgaggcccagaacatctgcaatttagtttttgataagtcctccaatatttgtctaggaggttacgacaaagtctcattcgatttttag

SEQ ID NO: 40449 - DNA, 468 bp, Zea mays
  Peptide Sequence Number=SeqID_83824
atggatgacggcagagaagaagaagcaggcgatgataattctgcgtcattgcacagagctgcaccagacacatgcagtggtctaccagcagcgcccacatcaagaattatatctccaaactgtggtgcgagtccacggataaatatagtaacaccacctgcagaattacgagcgccaggggtcaatgatggcaatacaacagtaattgaaacaatggtagcagcaaatcaaatggtgcctatgaggaccattagtgatcatgaacaagatacacctaatatcctccgaagtcatcctgaaagtattgatccaacaatggtgcctaggatcggtatgacatttggaaatgtcgatgaggcatacaatttttacagtcgttacgcatatgaggttggttttccacttaaaaagtatagggagagaaagaactgtaagtggttaaattgttcaatggaggaatacagaaag

SEQ ID NO: 40450 - DNA, 156 bp, Zea mays
  Peptide Sequence Number=SeqID_83825
atggcggcggtgggtgcgctgcaaaggggggcgtggggcggtggccgtgcgcatggaggcgggcacgcgtgcgaggggcacggcttgttccaggcttcaagggtaagcttcccggtatcttcttgggtaaggcacttttctcttgagatgggttaa

SEQ ID NO: 40451 - DNA, 1930 bp, Zea mays
  Peptide Sequence Number=SeqID_83826
tattcttgatatgagactggacgcactcggcagcagatcacacttagcttggctgatggaaaagctcgaccacaatgacatgacaattcgagctggccctggaaaggagctgaaaattacaaaggatacggtgcacctaattttggggttaccgaatgctgggggaggaactgcattgggcatcgatgaagctgttgctgccaacaatttaagagctgaacttggtctatcgaaagaagattttggggttacaactcttcaagatcgtttgaggaaaggttctgacgatgatttaagcatcagatgctttttcttgatattgttcaataggttgttgttccctactgccagctggggaataacaaaccatgaggttcttttaaccgaggagatggatcgtttccaccagatggactggttccagcttattttcaatgatttatgccaagctgccaagaagtggcatactaggagcgttacgaacgtttctacaaccatctatggatgttccatcgttattcttctgtattatttggatcatttgcatgactcagcggcaccccagaacaaacgtggaacaccacgaatcaaatactttgataggaatattattcaagccctgacaagagctgacaaggacaagatacgcaaaggagaagaagcatttggacattgctcgcataagaccaggaccaacacttttgatgtacctcgtcctaacccatctggacatcactcaattcacatcgaactcccgctcatcagggatttgatatcaagcaagctgaatcagcttccatcccgccaccgcctgggtttcatagagaagctgtcacattttgatgcggaggttggtaaggcgtgttcagttattaaacagactcttcagcagattattgagaaacaatacaatctatctgatgtttttggcgagttaattgatgaggtcctccgggctgaggcgggtgacaacgaagatgcttatgatgtgcagaaaaccacatcaaaatcagatgatattcttccccagacagctgaaagtttccccgatgaagctgatattgatccactggttcatacaaatataacgaaacagaacaaaacacctacaacctcagtgggtaaacatggtgacggtggcaagaacatgccgaccaatacaaacgtcactcctaaagcaacaccacacatggatcctgacgcgccgatatttgatgcgactccgcaaatcaagtgtttcatccaatgtgttattgatgatgcaaaaaatcagcagacttccatgagttcgaacagtttgattcttgatgttaatgttgggtcactactcaactttgaggaacaggaacgacacagtcgcaaccctcaaccttttgatgaatctgtactccacacacttctagacaattcattgcctgagacagatgaattggaccaatgcaaagcgatcatggtccccatggtaagcagggggcattggacattgtatgttgtcaacaaggtcaagaagtgcattcatattttagattccaacccatatggaccaacacttggtggaactacatggaaggactatcattttgcacatttgggctcaggtggcagaaagttaccatgggctaaggttattatgagcagattaaacaacgcaatacaacatgtacggcccaggacatgctttcccaagtttggtaacttcacaattgacttgtgcccagattgtcctaacatggcagctggatccaatgactatgggttttatgtcatgggtttcattctattttatcaatgcgacgaaggatctttgcggtcagacatagaagcaggcaacaccagtgagatactgtctcttgcgctgcattatatcacattccacccgaagaacaaagcattatcgctgctccaagacatccaaagattcaaggtctaa

SEQ ID NO: 40452 - DNA, 1299 bp, Zea mays
  Peptide Sequence Number=SeqID_83827
atggtgtgcatgaagaatgtgttagcgccagggggaggagacgacgaggaccctcctcgccccttcaggcagtcaaggggaagatgtctacttggagcaatgtcagtccagatagctctgcgagagcaccggctattggatctcactgctttcctgctagcagtcggtgcggactctgagatcgaccccgatcaccagtcgatgaggttccgctttgagcgcgaggatgttactattcatgctagccagattcgtcagcttttggattcaccgagtcatcgactcaccttcacagcttgtgttatggtacttctgatcctcctaggcgccctcacagcggagttgctccagctacaactcacgtcgcggccctgttccgaccacctttcacagatgggtcgcgatgctctccggcagatttcactccagtgtccaaagtttgatgttgttgacttccttatatgtgagatcgaggacacggtgatccagccaccgcagttccagggcactcttgaggcctctcgcctccactttggctcctatcgtcccgcccctgaggacctagtgccggtacctgatccagtgattgacactcaggcaaaggatgcgacttaccatcagttcgagactcaaggcacagcggtccctgatgatgatgatgattttgggattccgcctctgcctcctgtgcctccacgctcccatgatcatggggccaggagttcccatgctgcccctgctgcccctcctgcgattgaccctgctctagctacgatcctccagacccttactcagcaacatgacactcttcagcagcagcttctggcagataaggctgagaaccgccttcatgactcacatacttcagcataccggtgtttagaaccctcctgttcagtctgcacccctccagctcttcaggcaacgattatgccagccattcagccaggaccccctcttcctttgtttggtccttcttcctctccgttccggccggtcactctggtcttctcgtcgccggtcatcagctctgtcagtgctcaaccgccagtgccaccagctcctactgttaccactgctgctgtggcggtggctgtgacctcttcagctctggcagctcctgcaacgcagcctccgtccgagtcagtactagctccagcttctacggcagatcctggatccgagctaactctgaccctcaactggtgtttgctcttctaccacgaccgcgaccggatgcgcctccgcctcctccttcctcttctggtctatatgttcgggttcccttttggtgtttaa

SEQ ID NO: 40453 - DNA, 1566 bp, Zea mays
  Peptide Sequence Number=SeqID_83828
atggagaagtgcaaaccaatcaagacacctatgccaacaaatggacatctcgacctagatgagggagagtttgtcgactcgcctctcggcctcgctccttcgctccctctacacccgccactgctcccaccccacctcccacttcgcccgctccagtcactcctgagccatccaccacctatcacctccaccactcctgcttccactgctcctcctcccgctcccttttctgaaccacccattccacgtgcccgcttccgggagcgtgatgagatcgagacacatgttagcccagatagctctgcgagcgcaccggctattggatctccttattttcctgttagcatccggtgcagacttctcactcttctgactaccagcgatagatatgttgaggagtgggtccgagtgttctatgcttcagtatggatcgaccccggtcacttttggatgaggttccgctttgagcgagaggatgttactattcatgctagccagattcgccagctgtttggatttaccgagtcatcgcaccttcatagcttatgctacggtacctctgatcatcctcgtcaccctcacgacggtgttgctccagctacagcccatgtcgcggccctgttccgaccgcctttcacagatgggtcgcgacgctctccggcagattgcactccagcagccaagtacttatatcagctcatgagacggacgctactgccccggatgggttatagggaggccaccactcatatccagctctgcctacttggtgccctgatctctcattccgagtttgatgtagttgacttccttatatgtgagatcgaggacacggtattggatggtctccatgcccggcgtcagatgttgtatgctcattatctctgctacatctccgcgcaactgatccagccaccgcagttccaaggcactcttgaggcctctcgcctccactttggctcctaccgtccagcccctgaggacccaatgctaggcacaacagttcctgatgatgatgatgatgatgatgatgatgatgattttgggatcccgcctccgcctcctgtgcctccatactcacatgatcatgaggccaggagttcccgtgctgcccctcctaccgttgaccctgctcttgctgcagcaatccagcagcagatgttcgagaggatggtttccctgtttcagactattcaggacagggctaagcactgggccttcatgactcacattcttcagcatactggcaagacccccactagtccttcttcctctctgatccgtccggtcactctgaacttctcatcgtcggttatcagctccgtcaatgctcaaccgccagtaccaccagctcttgctattaccactgctgctgtggcggtgtctgtgacctcttcagctccgacagctcctgcagtgcagcctcagtccgagtcagtaccagctccagcttctatggcagatcctagatccgagactgactctgaccctcagctggcgtttgctcttctgccacgaccgcgaccggatgcgcccccgcctcctccttcctcttctggtctgtag

SEQ ID NO: 40454 - DNA, 366 bp, Zea mays
  Peptide Sequence Number=SeqID_83829
atggttggagcggaaaaggaagcaggaggaggagcagtggacgcaggagtggtggaggtggtaggtatggctgaggtggtggatggcgcaggagtgactggagcgggcgaagtgggaggtggagtggtagcagtggcgggagtagagggtgcggaggagcgagaccgagaggcgagtcgacgaactcttttcatccgaaaagccactaaaagcaggtccaggggtgctttcagatttacactgcgagaaagtcagcttttagaaaaagctgcttcctggatccagccctttggttggcttttggcttttagggaggcaaaagccaaagccaaaagtcaaaccaaacacaccctaggactgttgtga

SEQ ID NO: 40455 - DNA, 777 bp, Zea mays
  Peptide Sequence Number=SeqID_83830
atggagatggaatttgtctctggaggtataacagaactctgcccaggaacatggttatgcactgatacaccatttattagctttcggcacagctgctgcttcaatgtctcatgccttagtttgccatgtcgagaccttgctctaactaattcaatgcaagatccaattaactgcttcatgaaaacatcaatgccattattcaacaaattagcacactctatcgagaccccttccaacccatttgctcctgccacttcgtctgtccttttcttcattgacaaagtatcacagagttcaccatcttcaatacaagtatcagaggtggtctcggaggtggtgtccacgttcctgctggtgttcgtcatgtgcggggcggcagggatctacggtagcgacaaggaccgcatctcgcagctggggcagtcggtcgccggcgggctcatcgtcaccgtcatgatctacgccgtcggccacatctcgggcgcgcacatgaaccccgccgtcacgctcgcgttcgccgtgttccgccatttcccctggatccaggtacgcgacaatgagtccaggatctggccgtcgtggccctcctcggagcgagggcagtggaggcagcaatggggaaccggcgaggagcgggggcggtggaggcagcaatggggaaccggtggcggaggatccaaatggggaggggagatgaaagaagggagagagaaggggatggtggcctcacacgagggttccaaagtgaaagaagctggtcgtcggatggccgcgtga

SEQ ID NO: 40456 - DNA, 777 bp, Zea mays
  Peptide Sequence Number=SeqID_83831
atgggcgaaagtgctccagagataactatgttgctggactccagacaaattgaggaaccatatcaaagatttatctttgtcatttatgaagtaacaatatctgttctcctattttgtactccaaatgaaagcctgtatgagcagaagcccgaagaaacagctcttgtcctgccatcatcggtgattgcaagtactacagctaggagcaaaccccatacttcccgatttgaatatgtagaaaatgcacctgctcctaagactgggagcagcttagaaggcaatctcatgagtggacatgttgcacccctaaagtcatcgaacttctttgttgaatttgggatggacagtggatatcacaaaaaatatacatccagttcatccaaagtgcaggttgtgctgtggttgttgatgaacaaacctagttgttgccagaatatcctgtttctctgcactgggttgcggcttgtggtactggtcgactatggtggcacaatgcctcaactacaagaaaatctttgtggcctgctatatcttgcccgacagttcaaactttgcaaggtgaggtctgttcagtttggccagaaaggcatcccctacctgaacacctacgacggccgcaccatccgctaccccgaccctctcatcaaggccaacgacaccatcaagatcgatctggagaccaacaagatcatggacttcatcaagttgtatttgccctttcatggacttcatcaagttatatacttagttaggctcaatgttagcacaaacagttga

SEQ ID NO: 40457 - DNA, 420 bp, Zea mays
  Peptide Sequence Number=SeqID_83832
atgcgacgctccgtggcttgtgcccccaccgccgcctccatcaccttctccgccatcggcatctctgtccttggtgcggcaagcttgaacttggttacagctgtagcaaatctgacgggcaccaagtttgacttcttggcctactcgtcggcgctcaagcatttggtacttgggcagttctttcttgttcaagtatccttatcttcatggtggcaacatgattattctggtcaccatggaaaactactctttacatatttggatacggacagacaagcagagaaacaccagttggtcaagatgttagctggtttccagctcggtgtgatcaggtcacttgcactctctattgcatcttcagttgctattgtcatctgcaacaaagctctcatctgcacgcttggttttctgttcggttag

SEQ ID NO: 40458 - DNA, 486 bp, Zea mays
  Peptide Sequence Number=SeqID_83833
atggcggacgactgggtgcttgttggatatgataatggaattataaaaataagtatgaaaaaggttccagaaccaagtgtcctggacaccaggatgtctgggggtaagggtgggagccatctatatacaattgttcaaaagaactttaccacttcaaatgtttatctttttgaccttatatgttttggcatcaatcaccaaaaatggggagattttgaactggtcctgaggggcagttcaactggtcctgaggggcagttcaactggtctctgacccctctgacctctaaccaacagtctgccagtcatactagcaaacaggtcgacagagtcgtcaggggcggttcaaccggtttggtcaacttggtcagactgcagattagcctattcacctcccctctaggcaactttcaaaaacttcaggcatttcatacttattggatagcaacccttgaagctctaggtttctctccttttcaaggatga

SEQ ID NO: 40459 - DNA, 1035 bp, Zea mays
  Peptide Sequence Number=SeqID_83834
atggtcgagttcagcagtgactccgatgaaattcaggaggaatctctcattccttctcctttgcctcatcgttctctctccaagagaggccaaggttctggtcggttggagggggagggaccctcaatgccctctcaacccttgctcggggggcgtcgaaagattggcgcctcccacccccatcgaagcacctcctccgcagggtacgccccttgccaagaggaggatggagctttctacgacgaggtcgatcctccatcgtccgacgctctactcatcttcggtctccatatgcatccggcgaccatgtctcgaggacctcgtgaacctccggtcgacttctcttcgaaaggagtggactcccttcaacgattaaggttcaccaatcccaccctcatacctagacatcctgcttccacttctttaccgcgccactcggcccacctccgcatcacgcgccgcacgaccttctcaatgctgctctgcgtggtcgccgccaggtggggcccgctggtcagactcatcctcatccgatgtcgtctccttcatcgcgtaacaaaccacgcggtcagccctctcccaacagaagcacccatagtcctcggatcggtcagcgccgagcggcttcatccagccgaattaggggaggccagagatcctgtagccgtgtcaaccacgtccgccatcgccgaattccgcggccgcctaactacctctacacccaccggccggatatgtcgggcttgcgtggttgccgcacgacgccgctgcgcacgtcggggtcgtttccgcgcttcacagccgtcggcggtcctcagggcaagattagagcttcacctgaccaccgtgcgcgcagccgtgttctctgcccaagcctggaattctagcctagagttttgtgagatcgcggtggtgttcgggcctgtcgcgccaagctccctcgacggtcgggttggccagcgtctataccgggtgtcaagcaactacggcgtgccgtgggaaaggtattggcgtcgcgtgaatcgcagtgagtaa

SEQ ID NO: 40460 - DNA, 387 bp, Zea mays
  Peptide Sequence Number=SeqID_83835
atggaggggtttggaccttcccatacaggcgcaggtcagaaagtttatttacatcttagtagttacaacagtggagacggtgcaaacatgatgttttggtctgattgctggttagagggttgcttcgtttctgaggtcgctccagaagtttatcgaaaggcgcagcgtagggccacagattcacacttctggagtggccttatgaaagttaaggacacattcattagtaaaggaacctttgtgattcatgatgggtcccaggggtttggctcaacaattgacggtccaatggtttcatttggtctcacttgtagcgcataccgaattgaattcaaacagggactcattcagatggaacttgaccgccaacgtgatgtttacggttaa

SEQ ID NO: 40461 - DNA, 5082 bp, Zea mays
  Peptide Sequence Number=SeqID_83836
atggctacgtccacgatgccactcggcggggcgtctccgtcgggccgcgttctgggtccggcgctggaccggatcataaaaaacgccgcatggcggaagcactcagcgctcgtggccgcggcaaaggcggcactcgacctcctctcttcatcgccggcatacccgtcttcggaccctatctcgccgcaatcctcgctgctgctcggcctgccctccgccgccgccgacgcggccctccacgcgctgctgctcgctctcgagtcagcttcgcccaaggtcgtcgaccccgctctcgattgcgtcaccaaacttctttaccaccgcctcctctttggcgacctcggctgcgccggggacgatgcctcttcccccacctccaggctcttcaccgccgtccttacctgtggcgctctctctgatgatgcaatggagcttgccaccctccgtgttatcatcgccgccgcgcggtgccccactgtcgccatccgcggggagggcctcggccaggtgctcaagacctgctacaacatatacctcagcagcaacagtggggccaatcagctctgcgccaagcttgcgctggcgcaggtcctgctgattgtgtttgcacgcgtggaggtggattcgatggacgtgcgcattcggacggtgtcgatcacggagatgatggacgtgtctgatcgcaacctgaacgactccagcatcgtgcaggtggctcaggggtttataaacgagacaatggaggggagtgttgcaccagagccagggtcacatttggagccaaccgaggtggatggaaaggaggatactgggatgagcaagattagagaggatgggcttgcactcttgaagaacctgtgtaagctgtcaatgaagttctcgacgccagataaccctgaggatcagatgttgctgcgcggcaaggtgttgtcacttgagttgctgaaaatggttatcgacaatgctggccctttctggagaacaaatgaaaagtacattggagcaatcaagcagtatctttgtttgtccttattgaagaacagtgctttgtcagcaatgagtattttccagttgttgtgctccatatttgtgggcttactgtcaaggtttagatctggactgaaagaggaaattggaatattctttccaatgcttgttctaagggttcttgagaatgtccatcaacctagctttctacaaaaaatgacagttctaaacttgttggagaagatctgtaaagaatctcaggttcttattgatatctttgtgaactatgattgtgatgtagatgcaccaaatatttttgaaagggttgtcaatggacttctaaagactgctttaggtgttcctccaggatctacaacaacattaactatagcccaagaccaaacatttcgtattgagtcagtgaagtgccttgcaaccataatcaagtcaatgggttcatggatggaccaacagctgagaattggtgatttttcaccaaaaatatctgaagcttctttaagttctttaagttcaatagataaccccaacatccttattggagaagatggtagtggaattgattatgaactgcaatctgactctggtagcccagatgtatctggtgctccctcccttgagcagcgtcgtgcttttaaaatagaacttcagaaaggaatatccttgtttaaccgaaaaccttccaagggaattaattttctcgttaaaagcaagaagatagggcatacaccagaagatgttgcttgtttcttgagaaatactgctggtttaaatgcaacaatgattggagactatttgggtgaaagagatgaattccctatcaaagttatgcatgcatatgttgatgcactaaactttgaaggtatggacttcggtgaagctattaggtattatttgcgaggcttcaggttgcctggggaagcacagaaaattgatcggatcatggaaaagtttgctgaacgatactgcaaatgcaatccaaactcctttaccagtgcagatactgcatatgttcttgcttattctgtaatcatgctcaacactgatgctcacaatactatggtcaaggataagatgtctaaatctgacttcattcgcaataaccgaggaatagatgatggaaaggatttgccagaaacttatctgggtacactatatgaccaaattgtcaaaaatgagatcaaaatgagtgctggttcatcagttccacaaaacaagcaacctagtagtgtgatgaagctactaggattggacaatattattagctttgttaactggaaacaggctgatgacagggtagttggagcaaacgacctgctcatcaaaaccatacaagagaaatttaaactaaagagtggaaagtcggagtctgtgttttctgttatcactgatacaacaattttaagattcatgatggaggtttgttgggcccctatgatggctgcattcagtgtgacacttgatcagagtgatgataaggcggccacgtcgcagtgtttgcagggattcagatctgctgtgcatgttacctctgttatgtgcatggagacacagagagatgcctttgtgacatctgtagccaaattcacatatctgcattgtgctgctgacatgaaacaaaagaatgtggatgctgtgaaggctattatatccattgcaatcgaagatggtgattatttgcaggaagcttgggagcatgtactaacatgcctttcacggtttgagcatttacaccttcttggagagggggcacctactgatgcttcatttctcacagtaccactggttgactcagaagaaaaaacacagaagtctacctctatgtcatcaaagagaactaatgcacttcagaatccagctgtaatggctgctgttagaggaggttcttatgacagcacaacagcaaaaaataaagcatcaccgttggttactcctgaacagattaataatttcatatcaaacataaacctgctagaccagattggcatttttgagttaaatcacatatttgctcatagcccaagattaaatagtgatgctattgttgcttttgtgaaagctctttgcaaagtttcaatgacagagttgcagtctcctacagatcctcgtattttctgcctaacaaagattgttgagattgcgcattacaatatgaaccgcattcgtttggtttggtcccgtatttggaaagttctgtcagatttttttgtttctgttgggttgtcagagaacctttcagttgcaatatttgttatggactctttaaggcagctagctatgaagtttctggaaagagaagaactggcaaattataatttccaaaatgaattcctgcaaccttttgcggttgttatgcagaagagcaatgcttcagaagttcgtgaacttatagttcgatgtgtctcccaaatggttctgagtcgtgtcaacaatataaaatctggttggaaaagtgtttttacggtttttactgcagctgctgctgatgatcgaaaaaatattgttttgttggcatttgaaaccatggaaaagattgttcgggactatttcccttacataactgaaactgaaacaacaacgtttactgattgtgttaaatgccttatcacattcacaagtagtaaattcagcagtgatgccagtcttaatgccattgcatttcttcggttttgtgctgtcaaactcgctgaggaaggatttattagtcatgagaaggatactgaacagcaaccaagtaaaatagattcatcagatgggaacagcatggtgcataaggacgatcatgtttacttctgggttcctttgcttgctggtctagctagattgacaacggactcaagaccaactatcagaaaaggttctgcagaagtgctctttgacatcttggcagatcatgggcacctcttttctcagtccttctgggctaatatcttcgaatcagttatctatcctctttttagcagtgaaagttttgcaccaaatggccagatctcaagtgtaaatagtactgaggatgattcttggaattttgaaactaaaacggtggctctaaaatgtttagcagatttgtatattatgttttttgaagtgatgcgtccagaactttctagagttacttctgttattacgaatttcatcagaagcccttataaacaatcagctagcacgggtatatcagtttttcagcgtttaacagaaggactcgcgagcaagctctccaatgatgagtggggaacggtcctgttgtgcttcaaagaatcagcatcacatacatttgttgtgtttgacaaaatagttaaaatgatgaaagtcattgaaattccagatagaaatgaatcttactctgaagctgagcaatattcagatcatgacatatacaatgatgaagaagaggaagccaatatggaaacggcgtcttatgctattgtcagaatgaagaatcatatggctttgcaactcttaatcgttgagggcatcatcaaattgtatgaggttcacaggagctttcttggtgctgagcatatagtcataatgttggagattctatctgccattgcatcacatgcaagtgaagtgaactctgaatctaacttgcacaggaaactacataaagcatgctctattttggaggtacctgagccagcggttatccatttcgagagcgagtcctaccagagctacctcaaacttctccaagctcttcttcatgataacccatctttgtcagaaactatgaatgtggagtcacaaattatgctcgtctgtgagaaaatactgcgaatgtatctgacctgcgcagagcatgaactgtctaatggtgtttctggtaggggtccagctttacaacggatgcctctgggtacttctaaaaaggaggagctgggtgctagaactccatttgtccttcatgtgatggggttattgggcagtttagagaagaactgctttaggagaaacttgccccgctttttccccttattagctaatcttattcgctgcgagcataactctggagaagttcaagttgcactgtatgatatcttccaatcatcaataggccccataatatcagcatag

SEQ ID NO: 40462 - DNA, 345 bp, Zea mays
  Peptide Sequence Number=SeqID_83837
atggatcgccaggcgagccgtcgaggccgccgccgggggcgccacgtccggctcggctcgcttctccgcctccgtgtgcggctgttcggcggcctcgccggcctcgttgcccggtgcctggaggagctcaactgctgccccacgaggaggactacgacgaggaggaggaggagtcataagatggcggtcagccacggcgacaggcgccaccaccgacctgcgccagcagagagggaggagaactccctccatgcagaggccattgccgattgcttggagtttatcaagagatcctacctgcctgcggcggctggagctggtggtgatcgcaagccggatcgctag

SEQ ID NO: 40463 - DNA, 300 bp, Zea mays
  Peptide Sequence Number=SeqID_83838
atggcgcctcctgttgacgtggctggcctgcgccctaggttgggcgatgcggaggctcctccgaagccgaggtcgagtctgtcttccgtggccgaggccgagtccgagcccctgggtcgggcgaggcggagcccgagtctgagccctaggtcgggcggagcggagttcgccgtcttcccgggacttagcccgagtccgagccctgggtcgggcggagcggagttcgccgtcttccgggacttagcccgagtccgagccctgggtcgggcggagcggagttcgccgtcttccgggacttag

SEQ ID NO: 40464 - DNA, 531 bp, Zea mays
  Peptide Sequence Number=SeqID_83839
atggctgaaaggtaccaactcccacggagttgcgttcctccaacgatgaggcgaaaagacggcgggtatcccccatccgggggcttggaaggtggaaagacacgatgcataagggagcgcgaagacgtggtcgccttccaagggggtcaccctccttttaaaggcgactatccctactcgcgtccccagccgtcatgggctgagtcttctccaacacgctccaaggccctcccctacggcgcgggggctgggtcccacatgtcatgcaagccggctcagagcagaagaagccaaaccgccgcgcgcgggaccgggaaaggggataccccgaaaagggtccttccccgtgaaggaaccaggctccgagcctccttactgatcagaggttcgaaggctggccccccgaagggttcgacagccgcctcagatcgcgtgggccctacacccactactggtgagaggttcgaaggccggccccccgaagggttccacggccgcctcaggctactcgggctccgtgcccattactga

SEQ ID NO: 40465 - DNA, 732 bp, Zea mays
  Peptide Sequence Number=SeqID_83840
atggtgacctccagcttgatggtgggggaaagcgagccgggctgcggcctctgcccctccctcagcctcaaggattttcatcaccagggctggggaggggactgcactatgcctggctctcggacgcgagtggcttcggagccgctcgcggcgccggcgtcagccacggcagctggaagaagttcttccgccgacgagatagccagggtcggccacggaccgacctccaactctacggccttctgcccgtccttgcctcacgagtttgggcatgggcgggggcctcttggcagcagcatccgccctgaggtcagtgctgccgctgttcggccccccggagcagaagtcgtcgtcatcgctgccgctggagcgggcgacggcgcgccgttcgtcggtcttctgttgctccgcaggccctcccccatcgagtggggttgttcgtccctgcggagggggaaccggagttccgtttgtaatggcactttgaatgccagtgttttttgttcattgtggttgtcgaggcctgaacatgactcgcctgttggtcgtctgaaccgcttcaccaagcgtgagtcgccgcgtgtcaaggtgacgagtgagagcggagatccttggaccgcgtcgccgtccgaggctaggtcggacctcgccgaaggtgtcgtcgatgccgagggtgctgctgcccccttccagcgtcaagacccgagcctgcaggatcagatcgtcttgtag

SEQ ID NO: 40466 - DNA, 309 bp, Zea mays
  Peptide Sequence Number=SeqID_83841
atggcggcggtgggtgcgctgcaaaggggggtgggtggcggcaatgcgctgcaaagggggcgtgggggcggtggtagtgcgcatggaggcgggcacgcgtgcgggggcacggagaaaacctttttaagaaaaatgaaaagaaaacacacaagctcagcaatgataagcacaaacaaatcaaatgttttgaataagggaagaatagagtttttccaaagcacggactactcagattcgggggctaagcataactactactgctcagcttctgaattgaggactatgctaaccaggacttatgagcactaa

SEQ ID NO: 40467 - DNA, 108 bp, Zea mays
  Peptide Sequence Number=SeqID_83842
atggggggcgcggagcccggttccttcgcggagaaggatccctctcggggcgaaggtgaagcgtcgcgccgctccctcctgccagagccgcctcgtgtccctgttctt

SEQ ID NO: 40468 - DNA, 237 bp, Zea mays
  Peptide Sequence Number=SeqID_83843
atgggtacccgctacccatggtggattctctgcgactatgcgagtgagttaaaagtcggcattcgtagcaatcgatctcagcctagactcccacccccgcacgagtacaggacgtggttccagacgagaattggtgggatggcctcgtcgccgcgcaccgacgaccccatggcgcaactgctagcgaagatagaggacgggaatcgggaaacatatcgcatggtggaggtgatgtag

SEQ ID NO: 40469 - DNA, 180 bp, Zea mays
  Peptide Sequence Number=SeqID_83844
atggacttggaagttgaacaacgtgaagacgagttgaacggcttggtttgggaggaagaaagtggtcgggatcacgcacaactaaggatttgttcggttattcccgttacatatagattggatggagatgttgatgctagggaaaaacagtattcgtgcaatcttcttcttgaccgatag

SEQ ID NO: 40470 - DNA, 1164 bp, Zea mays
  Peptide Sequence Number=SeqID_83845
atggacggcaatgctaggtcgacggcggcgagtcagaagaagtccatcgtcccggacgacgacctcgtggagctgctctggcacaacggaagcgtcgtggcgcagccccaggggcaccacaggccggcgccgccctccgaccgcgactgcccgggcaccagcggccttactgccgaggagaccgccgcgtggttcccggacaccctcgacgactcgctggagaaggacctgtacacgcagctctggtacagcacgatcgccgacgccgccccgcaacacgagggcatgttcccgggccctacctcgcagccttcgccgccgccgcccgttgcgagcagcggcgtcgagtcgagctgggccggcgacatctgctcgaccttctgcggcagcaaccaggtgcccaggacgccggcagggatcagggggaaggacgcggcattgcagccggaggtgccgagcggtgccggcgcgcacgacggcacatcgtcatccggtgggtccggaagcaactatgggggatccgggctgcccagtgacagcgtccatgtccacaagaggaaggggatgtgtagagacgagtcagatagtcggagtgagagaagaagggaccggatcaaagaaaagatgcgtgcgttgcaagagctgatcccacactgcaacaagactgacaaagcatctatactagacgagacgattgagtacctgaagtccctccaaatgcaagttcagatcatgtggatgacttctgggatggtgccaatggtgtttcctggtgctcaccaatacatgccaccaatggctctaggcatgaattcaggttgcatccctgcagcacaaggcctaagtcagatgcgaagattaccatacatgaaccaccccatgccaaatcatatccctctgaactcgtctccagctatgaatccaatgaatccactgaacactgtgaaccagttccaaaacggtcacctcagggaggcaagtaaccacttccttcacctagatgatggtcgagcagcggtacctcgggtaccaagacctggaccccatgtttatggacaccaaatagcacaagccgaagaacacaacagaatactggaagtggcagctagtactgttataccaacttctaaggcagggcaaccacctacttttgatggagtttag

SEQ ID NO: 40471 - DNA, 405 bp, Zea mays
  Peptide Sequence Number=SeqID_83846
atgaattttaggccaatagttcttatcttcctcctgctcgtgctcattgtcacatcacagtttgagtggaagcagcatattggtgaggctgaggcgaatccaacagctacacgaaggaggcaacaggcgcttggaagggaggatgctgttaaagagaaaggggacctcatggtcgttgccaacgtcggcgactctcgggttgttctgggctccgcatccaacgacagcgccatcacgtcccaagagtcatcggtacccgctatgtcgcgcgcatttgacgactactatatcttggactgtggcgtcatctcggcgccggaggtgacgcagaggaggaccgacatcaatgatcagttcgtcattctcgccaccgtcgggatagcttttgtgttggcctgcctttaa

SEQ ID NO: 40472 - DNA, 792 bp, Zea mays
  Peptide Sequence Number=SeqID_83847
atggatccgaaagttggcgttgctctgaccctctccctcgtcggcgggctaagcacctcccttggtgcactgttggctatcctcaaccatgcgccaaacaacagaacactcgggattctacagggctttgctactgggctcatgctcagcatgtctttctttgacttggcttacgatgctgtcaacgccatcggctttctgagagggaacctctggtttttcgctggagcgctgctgttctcaacaatcgcggacgttttccctgagccagactgcagtgcggcagatgaaaatgggaagcagcaggtgggtggaaaggaactcatgatgagacatcgccgaagagttatatttagcgtcattgtcacagcaattgttgctggtgtgagtttacaaaacttccctgtgggcactgctgcatttcttggaacaacaaagggcttccgtgttggtttgaacttggctcttgctatagcactacactacattccagaggtaatttactctgcattggcttttgtgaagggtatttcagtagctctcccagcatactttgccactagcagcaaatggcaagccttcaaattagcaactctatctggttttgcagagccactgggtgtgattattgtggcatacctattcccaagcaatttgaaccctgaaatactggaaggtctacttggattaggacgcaaggatgctgttaaagcagtatttgttggtatggcctttatgtctatgagcttgtattttctagatgctagcctcccaaaggagatgagcgcttaa

SEQ ID NO: 40473 - DNA, 126 bp, Zea mays
  Peptide Sequence Number=SeqID_83848
atggactccatgatgttcgaggttgctgaattggatggagcaacaataatttatcacactaatagtaaaatgaaaggttacatggttattgttgtaagccgtcgcaacgcacgggcaaccgactaa

SEQ ID NO: 40474 - DNA, 1665 bp, Zea mays
  Peptide Sequence Number=SeqID_83849
atggcttcatgcaccttgatttggttttgtacaccattctgtttccttaacttcctttttgtattacttgttctgcagtgtgtggcatcacaccctgatactaggatgccatttttaaatgcacagtttccactgtacctgtaccctttcttgaacactacctacaaaacaagagaatatgagttcttgaggattagtagcctgagcgtgatcggtgctcttgtgaagtccgatgatcatgaagtcattgtgaatttgctgtgttctgaaatagttcctttgtgtctgcgtgctattgagatgggcagtgaactttcaaaaaaggtggccacttttattctccaaaagattatgcttgacgacacagggcttgcgtacgtatgcgcttcttctgaacgtttctgcgctgttgccaatgtgctagctcagatggtcgaagcacttgctgaacagccttccccgaggacgcttaagaacacaatccgctgctacctcaggctgacagatgatcgaagggcctgccaagcgttacgtgactacctccccatcgcgttgagggacgggacattcaacggcttaatcgaggtcgatctcacagcaaggctatggctccaccagctgctgcataacgtcatgatgtcagacagtggaggcggccctcgccctgccccgggtcctgtgatggggatgggcagtgtagactgcccccgctacctacccgcacgcgtcagcgaaattccgtctcgcaacggcctcccgcaccgcacggccgcgcgccgcagagcgtacaccgcccccgcccgccctccgcctgcccgccctccgcaaacagctcagcctaccacgctcgccctcctgccaatccttccacgaatcgggtgtccccaacaatcccccgcacccgccgcactcgggcagacggagcgctaccgccgcgccgcgcgctccgacttcgccgcataccccaaagcccggccccgagctcaatcccccaagccccgagctcaattcgccgtcgcaagcgcgaaagccggcagagatgtttgcccccgcccctgctccccccacgccacgcacgtccgtgatgccggggatccgcaacccccatcccccagccccctccccgcccttgatctccccacgctgcgcgcgtccgtgatgccggggatccacaacccctcatcctcggagggcacgccggaggtagggtacgagcacctgggaacttcggcggcatcgatcggaacccgggcttcgctccatctcctctcccccatctctcctgtacgcactctctctcctccccaagctgctgactggctcgcgaagtcgccaagggatcaatcgagatctaatctcgtttctgagatgggtgcatctaccgccatgggagcgctcgagcaggcccacctcgcggccgtcgcttccgcatgcgatgatgatgagcaaaacgactacatcgacatgctctcaggggacaccgcggtgacggggctacaccgtggagccaacggtgcgcgctggtgctggggcttgatgaggacggccgccatgagggcctgtgctggacactcaagcatgtctccaaggccttccgcgatggcacccgaggcgcacaatcacacctgcctggatggcactttggctattctttttcctttttaa

SEQ ID NO: 40475 - DNA, 165 bp, Zea mays
  Peptide Sequence Number=SeqID_83850
atggagcagctggtgacggagttcgaggccttggaactccccgtgacgctgtgcggcacgcgcctctgtgacgtgctgtgtcactgcggtgtcatgggcgccacggacgacatcgtcaatgtgtgcttcaatactgattctttagaaatactaaaacatctataa

SEQ ID NO: 40476 - DNA, 1521 bp, Zea mays
  Peptide Sequence Number=SeqID_83851
atgatgctaatccacacacttgaagatgctaaagctaaagctacagttctccacatatttgaagaagccgatactacaccgccagcggcttggggacaagccgcacttcaaggagtggggaataatgttaaggcattatcatctcagctatctgaagccagtacagaactgtctcttcagttgtcgtctgaagaagagctcttgagacaaatcgacagagtccgagaacactgtgagggcctccgaatggatgatgatgttgtgatattgggcgacaagatcgctgcgcacttaagcctccttcaaaagatatatttggctcttgatgcttactctcctacattgcagcagcatcctggtgggttcgagggttttctcgacctgcgtgagaaggtcttcttcttattaaaatgcccgggggctgtcttacccccacaggtcgagtttcaggccgcagcgcacaggagtcccgatctcgactcccgactcgaactcgacgactcccagtcccagttcctctcgtccgcaaccgcaaaatccaagaccctggccgccggagccgaactggcccgcgcctcgggccctgcccgatttgtgtgctttgcggcctgtgggcatgctagccagccggcggcggcaccggagtccatagcagcaaccacgcggctacgagctacgacgggctggctaaggcgcaggttgagcgctgaaggctacccagctgtggtctcacgcgggtggccggtgagagcagccaagcggcaggtacatctcccctctgccgctccaccctccgaggcggccctccctctcaatccctccagcatctgcctgagcgctccgccagtgctgtcgccgctcgtttctgggctcatcttttcatctgacagagtcctcaaatctagagggttaactaccagtagcgtgatgaagtcatgtaggctatccgagctcagcaatgctgaggttagcagcctcaaggctcgtcctcgcatcgattcctcgtccatgtccatatttggcacggtgaatccaattgttgagggtgtctgtgtcagaggtgatgcagcagataagcagtaccaggtgaaaaactgcagatggaggccaacttttgccttggagactgatgggccatctaacactgatggccaagactttgatgaggacagtggttttcttggtaggactagactgggaagactcatccaagctgctgcaagggagctacttgacaagctgaactctgcgagaaccaattcgccaacaaagatattccttgtcctccttggtttttacacagccaatgccttggcaacaatactagggcagaccggtgactgggatgttcttgttgctggtgttgtagtggctgccattgagggaattggcatgctcatgtacagaaaaccaattgccaggcctcctggtaggttccaatctttgatttcaatggtgaactactggaaagccggtgtatgcctgggcctttttgtggatgccttcaagctgggtagctga

SEQ ID NO: 40477 - DNA, 147 bp, Zea mays
  Peptide Sequence Number=SeqID_83852
atggctgctccgccgtcgctcgccgccagcacccctctccgccaccacgtccacggcagacgtccactgcagcaggtcctcaccactagagcgagtcagcggcagatttttgagaagttggatattgaacaaaatacaatacaataa

SEQ ID NO: 40478 - DNA, 345 bp, Zea mays
  Peptide Sequence Number=SeqID_83853
atgaggtcgagggcatgggtggccgtcgccggggcactcgtcgtcgctgcagtcgtcgtcgaatgggacctccttgtgaaatatgtagcacttcttggagctcttgcgtcgaggccctcgttgtccaccgtcgcctccttccacgacaccttcttggcccgtcacttcaggcgcagcaccaccgactcgggggcctgcgccgaaggcaaagcgggggaggacgacggatcggtcgtcaccgtcacggatccggtggaagaggattgcggcggcgcgcgcattgctatggggatggagaatttgggattctccacaagggcgacgcggcgtcgagctcgggcatag

SEQ ID NO: 40479 - DNA, 192 bp, Zea mays
  Peptide Sequence Number=SeqID_83854
atgcagttgggaaatgtgatcgttcgactaggtccaaacgacactggcatgcagcttcgtgagaagaggcacgtgatgattctatgggcgcaacaagaatgggtcatattccgcttcctcgacttcaagactgtggagctttacgacactgtcatccactgcattgtctctcagctatgcttctgtggctaa

SEQ ID NO: 40480 - DNA, 546 bp, Zea mays
  Peptide Sequence Number=SeqID_83855
atgggtgttgatgccaccattgagagcaatgcccaattagccaatgatgacttcgacttcgataatgatgatcgcataacaaaatttgcacttcacatgatggaggaaaatgatgaaatgtgcctgatcgataatgcaaccacaaatttgacacttagagagaagatatctatcaagacactcctgaagagaactgagaacatcattacaattgttgacaacaatgaccccattgtactgagcgagagaacgaacccgctgctcaacaagtcgcccagtccatccgtcgtcgctgggctccaacctgacgccggcaacggctcggggttctacgtcggggtctattctttcctcgacacagccaagccatgcaccaaccggttcagcagcgggtcgttgacatccgaggactcgccagtgctgacgcccaggctgctgtccttccagttcagctctagccccgacaactgctcctcctccgccgaatggcctgaccgtgcggtggcgccgcgctccaaccggtacctcttcgccgcgaacgcgtag

SEQ ID NO: 40481 - DNA, 519 bp, Zea mays
  Peptide Sequence Number=SeqID_83856
atggcgcctccgcttgatgtctcctccgccgatcccgtctcggcattgaaactgtcgctgcccacgatgcactccacccccggccgatgcttcccccgcccagccgcctgcgcccacggctacatcatccagcctgccgcgttcactacccacgatgcactccacccacctccgccgcccgccatggcctccacccaactcacgttcagcaggttccaactcccaagatctaggtcggacaccgacgcacaccacgtcagtaacgccaagcaccactcgttcgacctcggcaagcacccgcctctccatcatcggctcatcgccccccctccactatctctcgcttgctctagccgatctatgtgcatggggctcaacggctggaacaaatcctcgtcgatcctcagatcttgggagttcatggctggcgcgtttctccgtagcccaaagccaaaaattcccccaccccaaggccgcatcctcctgcagcctgctcgaaaccctccttcctcctcctga

SEQ ID NO: 40482 - DNA, 207 bp, Zea mays
  Peptide Sequence Number=SeqID_83857
atggcagggttgattgcacttacagtactgcctggcgattttagtttgtcagagaaactgggaaggtgccgttcacatgggcagagaggtgactgtcgtagtatgcagctgcaagtttctcttgtcattcacatggctactgagatcgatgtaattgtaataactccccaggtgccacaagtagttggtaaaagtctgacagtgtga

SEQ ID NO: 40483 - DNA, 627 bp, Zea mays
  Peptide Sequence Number=SeqID_83858
atgggaagctccgcctcgcccgacccagggctcggacccagcctcaacatcggaagacggactccgcctcgcccgaccccagggctcggactcagcctcgaccccgaaagacggactccgcctcgcccgaccccagggctcggactcagcctcgacatcggaagacgaactccgcctcgcccgacccagggctcagactcagcctcggcctcggaagacggactccgcctcgcccgaccccagggctcggactcagcctcgacatcggaagacgaactccgcctcgcccggccccagggcccagactcgacctcgacctcggaggagcctctgcctcgcccgaccttagtattggaagcactagagaagctggaaaagagtgtagacacacttattgtgattccaaatgataagttattagatgttgccgatgaaaacatgcccttgcaagatgcatttctccttacagatgatgtccttcgtcagggcgtccaaggaatatcagacatcatcacaataccaggacttgtcaatgttgattttgctgatgtaaaagttgtcatgaaaaactctggaacttccctgctgagttaccctctcaaagacaccgaagtgattgaccactaa

SEQ ID NO: 40484 - DNA, 393 bp, Zea mays
  Peptide Sequence Number=SeqID_83859
atggccggttcggccgcccgccccaccccgccggctcggccgctcggccgccccgcgccctgccccgcgcccctgcgcgccctgcggctcggccgccacgccccctgctcggccggctcggccgccccctgcgccgcccgccctccccagcccgaccccccccccgcgcgcccgcctggccgccggttcaaccggccggctcagcggctcagccgcccggccagccccgcccgcgcccgcgccccgcctagggccggttcaaccgccctagggccgagacattgtggtacaggtggcaatgagattgatggttctggttacgattatggtgctggagaagatgaagctgtggaaggagacttccaggagttccaagattacgacgagttctag

SEQ ID NO: 40485 - DNA, 144 bp, Zea mays
  Peptide Sequence Number=SeqID_83860
atggccgagatgagcaacgtggtgtccggcaacgctgctgtcaagggaagcgacgactgtgcatcaggcgaggggttcatgtcgaggataaccggcgtggagggcaggacaccggacatgggcagatcgacggacacgggcgag

SEQ ID NO: 40486 - DNA, 165 bp, Zea mays
  Peptide Sequence Number=SeqID_83861
atggccgtgatgggttcaacatcggaaaagatgtacctctgtcagaataagataacacgcaatgggagtggagagatggcgagagtagcgtgtacccttcgtggcaagaggctggacagtggtgtatctgtgctctcggttggcgtgaacctgatctggtcttaa

SEQ ID NO: 40487 - DNA, 141 bp, Zea mays
  Peptide Sequence Number=SeqID_83862
atgaacgggtgggctaaggtgactcactgcgatgtggttaaagcaccaaagcacatggcgcaaggtcgcgaggtggctaactccgaaatacagagctccaaagtcagccctattcactggttttgggacttaggcatatga

SEQ ID NO: 40488 - DNA, 384 bp, Zea mays
  Peptide Sequence Number=SeqID_83863
atggcgcagagcgtcgtcttcttcatagaagacctagatctcgcctctcgggagggaccccatcggggaggagagatcctagggggactcgagcggtttctcgagtgcctctccataaggactggttcgttggatgaccgtctaggaaaacagtgcaaccatgagggtggtggtaacgaggatgatggttttgattatgcttatggtaatgtttctgctagtccactacagccaaacgggataattgctgagtatgttgatgtgtactcacccttactttacacaccaaaccccccaggttgtccacattgcaaccactgctcaggacaagatgaagtcatggaggaggacttccaggagttccaagagtacgatgagttctag

SEQ ID NO: 40489 - DNA, 478 bp, Zea mays
  Peptide Sequence Number=SeqID_83864
ccgccgggcaccggcgattcgttcgcaccctcgcccctccggactcgcccagccgccaacaaccagcgatccatccacgccctcgcccgctccggaccacgcccgcgccgcctccgcgccctacaaacttcctgtcacgggcccgtacaccgtttctgtcttcctcgagaagggcttcctctccatcctcgggttcatcctcgccggcgacaacctcatcgccaacctctatctgaagattgctcagattctgaaaatatcagacaagagcctacagatccatatgacatccttgaagaatttgaagatgatgagaaaagggactaagccagagaagaaaggatttgatccgaagtggctaggtttagcagactgcatcgacagggcaggaagggacattgagagaatggagctgctggctattcagcagcaaggaccttgcaatagggttctttggaacccacaacttgagatttaa

SEQ ID NO: 40490 - DNA, 366 bp, Zea mays
  Peptide Sequence Number=SeqID_83865
atggcgtccccgaggccccgaggaggcggcacttccaaggccggcgagcaagcggcgcccgtcgacgtgcgagtagcgacggcgacgcatgaggcacgaggttcaagcgagcgacgccacgaaaggcgcgagatgcgcgcaacgatgatcgcgcgtgacatcctccgatacggcacagtttgggtggctcgagtgatgacctacatttgtgcttctgtcatcgacgacatcctccggccactacctcttttgattcgtgttttctttttgattattgtgttttatgcctaccacatgtattatttacgcttaaaacgggtgtgccgtggcccatatggaccacccgctgggtccgcccctgaatga

SEQ ID NO: 40491 - DNA, 1827 bp, Zea mays
  Peptide Sequence Number=SeqID_83866
atgccgtcctcttcctcatctgctccaaatacaccgccggctggcgcatcgtccgaggacactttgagcaacatggcggcggcggagttacatcctggtgatacagtggagtttggcgtgtcacggatttcctcggtccgtgttcaggatatgcagcagcttggatattttggcagcggagtggggcgcgtcctgggggcggaggaggtccccgagccagaaggcgagttggtcgtttttgaggcttttttcaccgctggccttcgtctacctgcacatcgattcgtggcggaggtcctgcggagattcgaggtccaggtccaccagctgacgcgcgaatgccgtggtggctctggcgaagtatgtttgggcgacgacttcgtatggtggtcagccctctgtggaggcgcagttgaagaccatccaggactccccaaggccgtcatgtgctcccattattatgtggcgtacctgcagtttgaggtggcggaggatgatgaagacgagggagcccttcggtgcgctgcccgcatgaatagcgggcacgacttggtggaggaatttatcgggtatggggtgtggcccttggcgcatggctgggtgctgggcgaagtatgccctcgcgagatgccttcccggggcgggcagcgggtgcgaagtccagccttcgcgttggatttgcatggtcgggatcccgctgcattcgtgcgcgaagcagaagacggggcggcgagtatcgtggggcgctatgtgccgaagacagagggtctgcggagctgggatatccggggggccaacgatagattgaatcgggtcttcgaattgaaccgtttgccatacgatggttatcccggggaagacgccgccgaccgccgtgggaaaaaaccgatgggcatgaccgaggaagagccttcgcaggtggctgccccggccgctaagaagagaaaactaggtactgcagtggggggactgggggtctccgatagttttgctatggagttgatggggacgtgcgcagccctcgggggaaggatgtcttcgcccgagctccgggagtcttcggcgcggatgctggaggtgtttccttacgggcggaatattgctgctgttgtgtcggcagtgatgaacaaggaccgtcaggacgctgcgcagaagcgccgggcggtcgtcaggatcgcagatcctaggcgtgaggcgaagagggcacgggggagcacgaaggctgctgctttcggtagtagccagccgatgccggctgtgaaaccggccgcgcccggacccagcaaggcgtcggagggcgcaaagactgccgcctctgatggaaccaagcctcccccgggcggatccgcgaaaggacgggagctgccttcgccggtgagacgtgttgtcgacttcggcacgaacatcagtgtcgaggattattttgttgggttggatgaggggcaattggttgttgtcccgccttcggcggcaactgtaacaccccagcgtggtcgcgcatgtctcttggctgcgctcgacctttgcctcggcaaaccgcagcccttgtcgaaccacctctcgctcgctacctcgcccgtgtccgtcgatctgcccatgtccggtgtcctgccctccacgccggttatcctcgacatgaacccctgctcgtcatcaacatcagccgcaccaccatctgcagtagagcagctgagtccctccaccaacgccctcgtctacaactccataacctcgcctgatgcacagtcgtcgcttcccttgacagcagcgttgccggacaccacgttgctcatctcggccatgttcctcttcgtgctcagcacctaa

SEQ ID NO: 40492 - DNA, 985 bp, Zea mays
  Peptide Sequence Number=SeqID_83867
atgtcaaccgtccccatcgattccccgttcgcgtccaggcctcaccgccttggcatacaatgctccactgaccccggctgccgccgtgcagtgaccgcacttggctcggactcaacctcgactccggaagacggtctccgcctcgcccgaccccagggctcggactcagcctcgacctcggacgacggtctctgccttgcccgaccccagggctcagactcagccttgactctggaagacggtctccgcctcgcccgaccccagggctcggactccacctcgacctcggacgacggtctccgcctcgcccgaccccagggctcggactcagcctcgaccttggaggagccatcacctcgcccgacctcgggctcggaccgaccatgtcacaggggggccatcattaccctacccctagccagctcaggctacggggaacaagaccgacgtcccatctggctcgccccggtaaaacaggtaatgatggcaccccgcgtgctccatgacgacgacggttctcagccccttacagaagcaaggagacgtcagcaaggatccgacagccccgacagctgtgcttccatagggctcaagcgctcctccgacgaccacgacatcacaagaacagggcagcaacacctctccgacagccacgacgacatggctctcgcgggggagctcgtaggcggcgaggagtctgacctatccagggcacaattgaccaatcaaacaggtcagagagcttcaccagggaccaaggaaggcgggcgaccgaagtccggtgagggcgatcttggccttccggtgaagttctatcgggtccgaggactgggaaagcttcacaagctactggcgaagctaaccgagcggctggcgcggcttggaagtgactggagtgggctggccacggtggccgaggctctagcggcaatggcgggcggaaaagagctcgccggagctaaggaggggcgtctggccggcgaag

SEQ ID NO: 40493 - DNA, 426 bp, Zea mays
  Peptide Sequence Number=SeqID_83868
atggggtccctgacggtacccgtggtggaagaaagggcggaggggcttaccggcggcgagactgctccggcggggaagctcatcggcggcgaggagtccggcctatccagggcacaattgaccaatcaaacgggtcagagagcttcaccagggatcaaggaaggcgggcgtctaaagtccggtgagggcgatcttggcctttcggtgatgttctgtcgggtccgagggctaggaaagcttcacaagctactgacgaagctaaccgagcggctggcgcgacttggaagtgactggagtgggctggccacggtggccgaggctctggcggcaatggcgggcggaaaagagctcgccggagctaaggagaggcgtctggccgatgaagggatcaaggtgaacacgcttggtctttggctcaaggtctga

SEQ ID NO: 40494 - DNA, 639 bp, Zea mays
  Peptide Sequence Number=SeqID_83869
atgagcttccccgcctgcgcacgtggatcggccgactccgaccatccccgacggcgacccgcacatcgtcgtgaccctcaggacctcccctacaccctcggccacctcaccggagcagtctcgccgccggtcactaatgagataggccaccagagaaaaatgcaaacccaattgaaagattgtaatctcgctgacggagagtacgtgctcatccccgagcaaggaactgtccaagaggaagaccaggagcaagctctcgaggctgctatcgaggatctccccgcagtcccagctattgaaggcaagccccgctatggtgggtacaagtgcggtcactgcacggcggcaaccggggtcagtggagcattgtatgccaaggcggtacgcttcaggatatggttgatgtcgaccgttggagaagttgatcgttgctccgttggctcaccggacagtctggtgaattatagcggagtgactctcagaaaatctgagagcggccagttcgcaaggtgcctcggcctgggcacactagttagtccacatatacttgtttttactccaaactttgaagagttccccaactcattttctttgttggtttatgttgaactttatgtacctgagataaatggcaactag

SEQ ID NO: 40495 - DNA, 1803 bp, Zea mays
  Peptide Sequence Number=SeqID_83870
atgcggtggtgtttttccatccagaacttggggggggggggggggggggaggggggctgtcaggtgccaattgttactgattccagatataggtgttcctgcgctggaactaactgcgccgcgaccttcctcagcaatcttatgctcatgtctcactctcaacagatggcgaatagtaggaagcctcctggcctcaggttactcggaggcgccggctcactgacaacgtaccagacactagtcctggtcctcacgttcttggcatacacatgcttccacatgactcggaagatcccaagcatagtcaagagcgctctggacccgcagacgaaggtggggttctcgcactggggacggttgcacgccagcagaaacgctctcaccaccggctggctgccgttcaacaccgccgacggctccgcgctgctcggcgagatagacgtcgcgttcctcgccgcgtactccgccgggatgttcttcgccggccacatcggcgaccgcatggatctgagggtcttcctgacggtcggcatggccggcaccgccgtgttcacgacgctcttcggcgctggatactggctgaacgtccacagcttctactatttcttggttattcagatggtttctggcctgtttcagtcagttggctggccttcggttgttgcggttgtcggcaactggttcgggaagagtaagagaggattgatcatggggatatggaacgcacacacctctgtcgggaatatagcaggctcgctgctcgccgcgttcctcctgaagttcgggtggggctggtcgtttgccgtccccagccttatcatggcgctcgttgggttgatggtgtatgttttcctgccggttagtcctgaggccatggagattgacagtgacggcggtgagcttaactgcgagaaggacgctgtgaaggagcctctcttggaaccaggccaagaagtgaaacatagtgcagtggggttcttagaggcatggaggattcctggggtcgcgccgtttgctctgtgcctcttcttctccaaactggtcgcgtataccttcctgtactggctgccgttctacatcagccatacacgcattggtggcgagtacctctccgacgccacggcaggaagcctatcgacgatcttcgacgtcggcggcgtgctgggaggggtcctggcgggccacatctccgaccgcctgaacgcgcgcgcgatcacggccgcgagcttcacttactgcgcgatccccgcgctcttcctgtaccgcacgtacgggagcatgtcgatggcgtggaacgtctcgctcatgttcgtcacggggatgttcgtgaacgggccctacgcgctgatcacgacggcggtgtcggccgacctcggcacgcacagctcgctcaacggcaactcccgggcgctggccaccgtgacggcgatcatcgacgggacggggtctgtcggagccgccatcgggccgctggtgacggggtacgtctcgtcgaggagctggagcgccgtgttcaccatgctgatggcggcggctctcctcgctgggctcctcttgagcaagctcgtgtgcgccgagctgcaagggaaaacgcattccagcgtgagcaaggacgcaggcggtgaacatggtgcctactcagatgaagtggtatatgtcaaatggagggcgaaccaccttttgtacactggaatggccaactctgcatttactttgaatgttggccttcttttttgtaggggcaacagtgcaaccactcctgatatcaaatattgctctggtgaatcagtaaaagaggattag

SEQ ID NO: 40496 - DNA, 249 bp, Zea mays
  Peptide Sequence Number=SeqID_83871
atgggctgcttgctccgccgtctgttccccttcctggtcggcgcggccgtcggggtgtacgcggcgcagaactacaaggtgcccaacatccggcgcctcgccgaccgcggcgccgacgccgccaggcgctacgaggaggcctaccgcaagaagcctgctgccgccgcggacgacgacgcccgtcccgtcggcggctgcaggaagaagaaggtggtgcaggtggatattgacgacgacgaccaagagtag

SEQ ID NO: 40497 - DNA, 1071 bp, Zea mays
  Peptide Sequence Number=SeqID_83872
atgtggaaggatcgagtggaacatgccaaggatgtgtgggctctatacccagggcagactgctcacctcacggtgcgatgcatgaatgccctgtatcatttgcaagtgatgcgaggagaggcaatgtctcagctaatggcattgttagaggctaccaagatcaccctagataacagagaggaacttgtggtggacctgtccactgagatggtggaaaaggacatgcaggtggaacagatggccaaccagatccaggagcttgaggagttagtaggagccagggagaacaccattgaggttctcgaggatcagctgatcaacactcaacaacaactcgaggaggctaaccagcatttggatatgcaccatcaggagattcaggacatggaggccaacgaggatgttgacatcgagggaggagtggagccggagcccgcatctagcctagacactgctggctcagggagacccccttcccctgagtcaagcgttgcctctgtcagccgccacctcaacactatggtggtggtgatcaccatcaacgtcccccagcagcagccacttatcaggagttcctcagcactcagccaccgttattcactagagcagaggatccacttgatgctgatacccgcgcagacatggtgggatcacttcctcgctatgcagccagttgaccacgtggtggaatggagagagttaaaggccttcaatgacctgtgtcagtatgctggataccacgcagacactgacgagaagaagagggacatgaagactgtatcacggcccgccaggcagaaaagaaaaggaagaccccctgtggcaggacgttcagctcagcctcagcgcttcaggattgtatcagacactcagaacaggggacctcagcagcagcaaggacgttgggtgatccgaccacagcagcagcagcaggcacccaaccgctctcagcccccagttcagaggaacaacaatcagccacagcagcaataccgtcaagccaatgacaacagatgtttcacttgtggtaacactggacactatgccaagaattgccccaggaatcagtag

SEQ ID NO: 40498 - DNA, 246 bp, Zea mays
  Peptide Sequence Number=SeqID_83873
atggggaagcctatcccatcactcctcatgctcctcatcagccgagtgaccgcacttgtacccaccataaccggaatgggagaccacgtctcaagtcgcgtgaggggcaaagtctgctgccaggttcactcagattcaaaggtgatattaggcctctgtgttaaaaatcacagaaaaagacctactggatatttagttgctaaaaatgatttaaatggcaaaccctaccttaatttggtgtattga

SEQ ID NO: 40499 - DNA, 519 bp, Zea mays
  Peptide Sequence Number=SeqID_83874
atggcctcgaccgttgttttctctttctcgcttaacaatgtatgtttgactcgtatagataacggtcagttggcgaagtccgaagaagttgcaggtgaagaccctgagcaggagctcgttggtgaaggcaagggactcgagcggtttctcgagtgcctctccgtaaggactggttcgttggatgaccacccgggaaaacagtacaaccatgagggtgtgccctcggcgattcttgagagcaacgagttcgtcgctgagccagcctgtgcaccggacactgtccgcaataacaatgtgctggcaagcaacccactcgacgtgaaggctacagacacgaagctgttatacaaggctgacatctccggaacaagacgccggtatggccccacccgcgggttcgctgcctcacctaaggtggacccgggggccactatcggtaccctgaatacggggtacccgctcctgctatgtcaaggtgagtcctcggtggccaccattaaggatttcacgggcagctga

SEQ ID NO: 40500 - DNA, 666 bp, Zea mays
  Peptide Sequence Number=SeqID_83875
atggccgcgcccgcccctgccaccaccggcgacctcctacgcgtcgaccccctcgagctacgcttccccttcgagttgaagaagcagatctcgtgctccatgcagctgtcgaatcacaccgacgactacatcgccttcaaggtgaaaactacaagtccaaagaagtattcggtgcgacccaacactggggttgtcttgccacggtctacctgtgatgttgttgttacgatgcaagcacagcgggaagccccgcctgacatgcagtgcaaggataagttcctagtccaaagcgtcgttgcccctgctggtataactgtgaaggatgtcactggggatatgccaccctctccagttccagaggaatctgaagaaggttctccacctagggcttctgaatcagaaaacggagatggaccttctggaggattcaccagagcactaagagagcgcattgagcctcaagacaaatctacagaggctggagctttggtttccaagttgactgaagagaagaattccgcgattcaacagaatcatagacttagacaggaacttgacttggtgaggcaggagatcagcaagaggcgtggagggggcttctccttcatcgtcgtcataattgttgctctgatcggcgccatcctcggctacctgatgaagtcgtaa

SEQ ID NO: 40501 - DNA, 858 bp, Zea mays
  Peptide Sequence Number=SeqID_83876
atggggaggaggatcggaactcatggccgagccgacggggcggcgaagctgtccgatccgaatattcccttcccgccactggaattatccctcgcgtgccgtgcgggtccttctgcgccccggaccgccgcgtcactgcgtgcccgtcccccacgggcgccgagccacaggccgcaggacgggccacacgggcgccgagccacacaagcccacaggcacccgcaccgcacgaaagccagcccgcttggatccgccgctgttctcgtcgcgcaggagcggcgatttcggctgcgcttccccgttcccgcggccgtgacgccagacggtgggccccgtgtcgtcagtccacgtcaatgggcaatggccgtgttgtgggccccgcttcgactgtcccagataaaaactgagccgcgcgagcccggatcttgtgtggcacgcgtgtctacacgtctgccggcggccacaacctgcgatggcccacaagttttgagggatctgcatgggcgccggccgccggccgccgccgagcacatccagacgccacacgccagagccgctcaggctcagccgcagacctgcagcgcagcgcagttggcagttgccgtcttgccgacttgccggccgccgcacgccgccaccgcccaggccgccagcgccaggcgcgtcttccgcgcggtcttctggcgagctgagcaggccgccaccgcccaggcccgaccgacgactgctggcgagctgagcaggctgcaggcgagccgcgagcaggcagagcagagcagagcggtgagcactaagcagcgattagcagagcatagcagcgagcagccggtgagcccttctgcttctgttttaatttga

SEQ ID NO: 40502 - DNA, 231 bp, Zea mays
  Peptide Sequence Number=SeqID_83877
atggcgaagtatgagttacggagtggaagcctttgtcttcgccgaagactccaatttcctttcaatacacctatgacttggtttgaaatacacttgaaaaacacattagtcatagcatatgaaagagatatgatcaaagcaaaagaaatttctagaatcaagaatattgagctcatgcctaagtttggtaaaagtttgttcatcaagaggcttggtaaagatatcggctaa

SEQ ID NO: 40503 - DNA, 336 bp, Zea mays
  Peptide Sequence Number=SeqID_83878
atggtaagggagacgggatactacgacgtgctggaagtgagcccgacggcctccgaggccgagatcaagaaggcatactacgtcaaggaattgggggaggcataccaagtgctcagtaatcccaagcagcgtgaagactatgacttacatgggaaacctggtatttcaacggaagcgataattgatcctgcagcaatttttgcgatgctgttcggtagcgagctttttgaggactacattggtcagctggcgatggcatccatggcttcacttgatggttttactgaaaacgaacagatcgatccaagaaggttgcaagagcaaatgcgagtatga

SEQ ID NO: 40504 - DNA, 936 bp, Zea mays
  Peptide Sequence Number=SeqID_83879
atggacatcatctgcaagcacctgatgttcgggccggagtcgacgcgcagcggctgggcgaacctccccttcgtgttcaacaagcgctacgagcgaggagcttcctgcgttccgtacgtgggcaagaaggtcaggtactcagaaactgcatcaaatcaaatggttgtgttcaactctgaagcagcagatgaactgggagaaaaccgtttgcagaagtcagtgataacaaaggggatatcaccatctattggagcattcactgtccaatgtgctaaatgttttaaatggaggcttattccaacaaaagagaaatacgaagaaattcgtgaacgtattatacaggaaccttttgtatgcaaaagagctcgtgaatggagacctgatataacatgcaatgacccagaagatatatctcaggacggtagcaggctttgggctattgacaaacccaatattgcacaaccccctcatggatgggaaaggcagattaggataagaggtgaagggggtaccaaatttgctgatgtatactatacctctcctactggaaggaaacttaggtctctggttgaagtcgataggttcctccaagagaatccagagcatgttgcacagggtgtaactttagctcagttttcgttccagatacctagacctttgcggcaggactatgtcaaaaagaaaccaaagttgataaatgcaagtgatgaagcaagtacaattacctctaagtcttctgaaccagaagaagtgaaccctatagcctgggcagttcctacaaaacatgagggtgatgccagtgaagaagcttctttcgccgatgagacacttgcatcagaagtagtgctaacccggaagaggaaaataggaagctctttgtcagtagagccaaaccatctctctgatgaacttgaaccaaagttggaggatgcttag

SEQ ID NO: 40505 - DNA, 552 bp, Zea mays
  Peptide Sequence Number=SeqID_83880
atgacggatgcagagaaggaggtagcaacagaaagacgaatggactcgccgcctcgatgcgattgcggagatcgtgatgtcatcgacgaggacactgcgaagcacttcgtgtgtccgaacattgattatagccagaggcaaaggaaaagaaaaaatgagtgggcggaagagttgaagtttgatccagtactatgcaaatgtggtattgaagctaaatatggattagttccttctgagcttggtgttggctatttttgtggacatatggtagattacgatgaggagacgaggaaatgcggttgggagagttacgacgacaaaggagaggtgatgcgtacaataaagtccaagagactaatgggacagaagatgcattgtggatctcagctcgtcgatttgtacgttaacgatcgcatacaagacatgcgtaggtttgcgaaatcgacgagttttgatagcccgatgcgtgcagagcagagaagattgaaggcgacaaatgagaagagagcacaggatgcaagggaatgggaggcggctagagccaagaaatag

SEQ ID NO: 40506 - DNA, 1287 bp, Zea mays
  Peptide Sequence Number=SeqID_83881
atggtgaccaccagctcctgggtggggagaagcaagccgggctgcggcctctacccctccctcaacttcaaggatattcatcatcagtgctggggaggggagtgcgccgagttggggtcggtctccacgcggacagcggcccgcttcttcccccagcgatcggggggaagggcgttcgccgttcgtggcgctggcagctgccgcgtgtccggctcttcggtccgagcggcttcggcgctgcttccggtgccgccttccaccgcggcagccgaaagaggtttcttcgtcgacgagatagtcggtgccgcccgtggactgacctccaactctacggccttttgctcgtcctcgcccctcgagtggggacgtgggcgagggccttatggcagcagcatccgccctgaggtcatcgttgctgttgttcggccgctcagaacagaagtcgtcatcgctgccgctggagcaggcggcggcgagccatccgtcggccttctgttgctccgtaggccctccaatcgtggggggttgttcgtacctgcggagccgaagccggaggcagcggtgtcagtatggacagaggcagagttggctcgaaaagaagacttcattggccagagcctggctgggccgtccgctggcgggaccgacgccggagtcgagttgccgaggccacgagccgggctggtgtccttgggggacagctggctgaggcttcggggtggccggccgagctgtctgcttgggccggattcctggagaagaccctggcggcgatggcctgggcgtggtgctgatgtcgtccttcggagtggagatcctccgaccgtgttgccatccgaggctcggtcggacttcgccgaaggtggggttgacgccgagggtgctgctgctccctccaactgtcaagccgccgaggcccaaacatattgtcgtcgtgttgtaaagctgcgtttcttttcctcttgtttcgagtatctaaacttatttgtcggtaacagaattgtttgtccgagcgagagttacttttcacagaaggtgatgagtgaggattctgctatcgatatagtcgagaaggcccgaaaaatcatttcggcagaagagttttcgagcgtgaagacttgttcggtccgcagaatcacttatccgagcgtgagttacttatcgcagaaggtgatgagtgaggatcccactttcgaagtagtcgaagagcatgaaagacgtcctggcacaaagatcttttccgaggaaaattttgacgcggagggggttcccccttctagcccctga

SEQ ID NO: 40507 - DNA, 1059 bp, Zea mays
  Peptide Sequence Number=SeqID_83882
atggctgcctttcaagggggtcaccctccttttaaaggcaactctccccacttgcgtcctcagccatcgcgggctgagtcttctccaacacgctccaaggtcctccccctacgacacgggggctgggtcccgcgcgtcatgcaagctggcccagggcagaagaagccaaaccgccgcgcggcatgcaaccgcaccaagtgggcgcaccctttcgactccaacacgtccagcatggaggcccaggcccacacgtcatggaccgggaaaggggataccccaaaagggatccttctccacgaaggaaacgggccccgagcccccctactgatcagaggttcgaaggctggcccctcggaggggttcaatagccgcctcagagcgctcgggctccgcgcccactactggtcagaggttcgaaggctggcccctcggaagggttcaacggccgcctcaggccactcgggctccgcgcccactactgatcaggggttcgtaggctggccctcgaagggcgccataggaaactccgcctcgcccgaccccagggcccggactcggcctcagccccggaagacgacgaactccgcctcgcccgacccagggctcggactcggcctcggccccggaagacgacgaactccgcctcacccgaccccagggctcggactcggccacgaccccggaagacgacgaactccgcctcacccgaccccagggctcggccctggcctcagccgacggtctccgcctcgcccgacccaggggctcggactcgacctcgacctcggaagacagactcgacatcgacctcggaggagcctccgcctcgcccgacccagggctaggaccgaccacgtcgcaagaggggccatcattgccctacccctagctagctctggctacggggaacaagaccggcgtcccatctggctcgccccggcaaagcaaataatgatggcgccccgcgtgctccatgacgacggcggctctcagcccccttatggaagcaaggagacgtcagtaaggactcgacagccccgacagctgtccttccgctag

SEQ ID NO: 40508 - DNA, 69 bp, Zea mays
  Peptide Sequence Number=SeqID_83883
atgccgaactatgcattctttgattgcttaggaatgaaatttaatttggaattccgttacgctagttga

SEQ ID NO: 40509 - DNA, 1050 bp, Zea mays
  Peptide Sequence Number=SeqID_83884
atgagtactgctaatcgctaccaacacatcaagtcaactaagcctgttgtaggcaaagcaagaaaattgaaggatctcatgataaaaagtgataataggatatgtgctgactgtggtgcacctgatcccaaatgggcatctgctaatattggagtgtttctttgcttaaaatgtggagatgttcataaggcacttggtcctgacatctcaaaggttttatctgtaactttggatgattggtctgatagtgatatcgactccatggttgaggttggtggaaactcacatgcaaattcaatttatgaggcttttcttccaaaagatcgcccaaaacctaaaccagattcaacgatggaatataggacaaaatttataagagctaagtatgagacacaagattttttgaagccaagtctgcgcatttcatcaagatcatcttttaaatctaccacttctgtgaagagtgtagatagcaatttctctagcacttcaaggaaggatgtatctgaagatacaagagaatttgttggagagttgaatatcacactggtcaaaggcaccaacttggccgttagagacatgctaacaagtgatccatatgttgttttaacgctcggagggcagttttgctccaaaaattcaacaattggttctaactgcataaagctcaatcgacggcaccttgaagacagcttggatgattggtttgatgaacaactagagaactacttagatgatgattatcttgtgtttgattgccctggccagattgaactcttcacacatgttccagttctgcggaactttgtcgagcacctgaaacggaaaattttcaacgtttgcgctgtttaccttcttgattcacagcttgaacttcctcatatcaacatcctttcaaagatggatctggtctccaacaaaaaagatgtagaagttgatgattacagcatggttagtttcattccacttgatttgagaaaggaaagcagcatacaatatgtgctatcttctatcgacacctgtatcccatatggggagatgcagatgtga

SEQ ID NO: 40510 - DNA, 594 bp, Zea mays
  Peptide Sequence Number=SeqID_83885
atggagaacctcaagcgccgactcgacgcgctccattcccgcgctcacgacgacctcgatgcgtccttctcccgcatctccaagcgaatcaaggtaaaaatttgctcaaattgcatgacccaaaaccaagcctgtcagcatctggcagatgaagttgacaaggagcacaagaagatgtctgataatataaaagaaagttctgagattgccagggcaaagtacaagcagatcatcgcagaggcacaagcttccacaactcgtgtgtgcaaggtgactatccctgagatgacaaaatctgtggagaaagctattgatgggtttactaaagtagacactatagaaaaactagaaaaatacgtcgacctggaatttcttaatcagcagcataaccctgttgttctccggctttcggagaacagcggggttatgctgccgaaatcacgagtggaagctttggaaatgggtgacgatcgaagaagggctatgtacgatggattcaacagtaacactctggggcactttgatgcatgggttaaggttgctgacgaattcgtggtgcgcacatttgctggggagcctcgtgtcgtaacctaa

SEQ ID NO: 40511 - DNA, 513 bp, Zea mays
  Peptide Sequence Number=SeqID_83886
atgtggaggaacttcatccatattttgaaatctttgagaacacgtatcagtgtacgaaacctgatgttgaagtctctgaggacttggtacaaatatcacatgatgttcagggggcttggtaaggggaaagggaagaaaaagggtgaaagctcctacaggtccattcgatctaggtcgagtagggaggctgatcctactgttgacgttgttgggggccttcgttttcctaaggagcttcagaatcagactacctttagtgtagaacgatggaagagtatcgaaggtagcttcgtcataacaacaatgggaaggtggtgcaaggagaagcaatcgagaatgagtgaccaacattggcgcccacctccggtgaactctacgaccaccttcgtcattgcaccgaagaagacaacggcgctaggggctgtccttgctcccctggacaccaatcaagacggagtccttctaagggaggctcaaagccagaagaggaaggccacctgcccaactccatga

SEQ ID NO: 40512 - DNA, 132 bp, Zea mays
  Peptide Sequence Number=SeqID_83887
atggggtgcccgcgcggctatctcaagtcgcatggtgaacagcacccgaccccatcacgtggacggctccggggccgccacgtggatagagaagacaataccctccaaggtatcttcggaatcggatcatga

SEQ ID NO: 40513 - DNA, 108 bp, Zea mays
  Peptide Sequence Number=SeqID_83888
atggccgaagctctggcggcaatggcaggcggaattgagctcgccggagctaagggaaagtggctggccggtgagggatgtgttcaagggaatttggcacgactttga

SEQ ID NO: 40514 - DNA, 492 bp, Zea mays
  Peptide Sequence Number=SeqID_83889
atggttcacatcgtcgagcaccatgatttcgtgcccgaggacttcatggttgaagaggcggctgcctcttccacatcgtgggccaccaacctccctccagagaattgctgtgccaccctcctagctccacggcctccccggggggccatgaagcagtggcgcgacgacatcgaccgtctactcggcatggcacactctagctcaaccaggcctaggcctcggtcgtcccggcgccaacatgaggcgtcagcgtcagtgcgctcaccctcggtgagggccacaccgactgaagacctgtgggcggagctcaaccgccggcgtgcgggagaggacgctccggtctctttggagaggtctaatgacctgcggacaaagctaaaccgcaggcgtgcgggcgaggatgcccgcatctctctggagagggcgcgcgagcgccgacaaaatgtcgagggtcgcaacctcgactacgacttcgctgcggttgcaccatag

SEQ ID NO: 40515 - DNA, 1641 bp, Zea mays
  Peptide Sequence Number=SeqID_83890
atgaatggcggcaaccacccccgcggcggtgagccctcattctcgcagctcctccaaggccttcaaaaggggctggagattcttctgtttctcgcgcgggcccccgtagcgccagttaccgccagcggcggtcaccactcgttgagaaaacgacgggagcctcccgtcgtcattccggagataaaaccaccggcgctgccaccccttgttcgaagacgcgaggatggcagggatgtactgttgtgcccgcgcctgcctcaactggaggatgcagccaccggcccgcaccgccatgcgaactcttctttcccccgtcgtcgaggcaaaaagctccgcggagaagagatgggtccacaggtcccagtggggggcaatcccaaaaaacacttcgcaaaccgccgcgaagatggctgcttgcgcgatggagttggggctgagattgtgcagctccaccccatagacgtgcagaatcgcccgcatgaaacgacttgccggcactccgaaccctcgctcgtgaaaagagatgaagctcagcacataccccggcggcggggacggggcggctccactcggaggggccatccactgcagctgcggatcaccggagagaggacgaagcaaaccatcggcaacaagggcctccagatcgtccgcgtgacggtggagaaaggccacgggtcgcgcggcgaaacaacggtcacccggtcggccatcaccaagcaaaagaggtggcggtggagcggacaaggtgcgcggttttctttctctggctattccctcaggttgcggaaacctaagtgggaggcgagcagcagagtaaagaaccgtcaccggtccctctcccgaatatataaaggcccaggcgagacccgttcaacactttgcccgaacccgtcgcgagattcaaaactcaaaggcaagacgcccgttcctcgaacggctcgcgcacgcacaacggctgccccgcgaaccactcgtctcgtcgcattaactctgcggcaggacaggcggcacctttggcaggcgaagcaagcgacgcttcacctccgccataatgaccgcgtcaaaaaagggaccgggaaaggggatacttcgaaagggatccttcttcgcgaaggaagcgggccccgagcccccctactgatcagaggttcgaaggcttgcccctcggaagggttcgacagccgcctcagagcactcgggccccgagccctcctactgatcagaggttcaaaggctggcccctcggaagggttcgacaaccgcctcagagcactcgggctccgcgcccaccactggttagaggttcgaaggctggcccctcggatgggttcgacagccgcctcaggccactcgggctctgcgcccactactcatcaggggttcgtaggctggcccccgaagggttcgacagccgcctcagagcacgcagagcgagggatgactctgggtacgtccgatacatggccgaggctcgggctacgctcccgaggtaccctaggacatttccgagaccagcaggagcaattctgtaatggaatcccatcagagggaggcatcgagccctcggaccctatcaaacgggaccgggtccggcaaatcacctgcaggaacttttggagcgcgcctctgggccactag

SEQ ID NO: 40516 - DNA, 255 bp, Zea mays
  Peptide Sequence Number=SeqID_83891
atgccgaagaccgtcgatgcggtctttttcgacatattgtgtcttagtttttgcgggggatttttgcaggaatgctctaggtcctcgccagatggcattgttagcctgtacgcgctgggggacgccttcgtcttgacaatgaaaggaccctcccactttggctccagcttgccccatgactctgtccgggttattcggacgagtacgaggtccccttcgtcgaattctattgggatgactgtgtggtcgcgctag

SEQ ID NO: 40517 - DNA, 573 bp, Zea mays
  Peptide Sequence Number=SeqID_83892
atgcctcataatatctgcaaagaagggctacgctccgataccagttgtgacggaacctcccaaaagcagcaaaagtctgctacttcctcacctaaaaacaacgaagggataaaccctgagtatgggatactcagcaagtcttacccgactaaagaaaagactctcaagggtatgctggttatatgggagtcaagcaaagctaagcatcaaaaagcttttgtaaaacagttgattaaggaagcgaacgagccctttcactattttgaggagtcactgacacgtcacaaaaagaccctccggtttctatctattcacgatttgaagtccacgacgccgttcatgcgtggccgtgctccggcgagcatctacgtcggccgattagggcaacggcagggttctccgagcagcggacacggaattaacactaccccgaccatttttccccaacctaattgcacaaatagtgagctatcaagctctgtccgcgtgaaccgaatgggtggcggacagttgatcgtgttcccggtgattggtgagctcgcagttcaaattggtggttcagcagcatcgtag

SEQ ID NO: 40518 - DNA, 255 bp, Zea mays
  Peptide Sequence Number=SeqID_83893
atggggtcgttactaccgctgttgctctcttcatgccttggagccagctggtgccgagcttcgtcttccgccgaagctgttgttcttattgatcctgtctttgcttcttctggtgttattgcttcgtcaccaaacaaaagcttgaaaggtggaagtggacctaacaaatccagaccccacctttgcagtggccaagttggctgtattaactgggttagagatgaaggttgtttctggtctcttgcacatctttga

SEQ ID NO: 40519 - DNA, 696 bp, Zea mays
  Peptide Sequence Number=SeqID_83894
atggcgcatcttcctcccctcaccggcgcggacgtccccaccaatctgggcccgagcgctatcgctgctctgaccgcgggcactgctgccggcgtggccgccggtccgggctcgagcgtcgcctccccgagccgcaccacttcgcaagctacgctgatcggctggctcctccccagtgcgaccgtcacgcccccacgcatccgcatgatcgccgacgatgatgccctctacatcgacgccctcagacatcttcctagagccatctcccccacgcagttgcactctcgtcgacccccaccgggcttcaccctcaccactctcgcgccgatgacccccgccgtcgatcccgcgttggtcacaaccatcgccatgatccaggccactgtggctgcctcgcaggaacgcgaacgcgccgcgtccctcgctctagagcaagagcgtgccctgggcgccgctctgaccaccctgatggccaccgcgcagcgcctacttgtcggccgcccgtcggtcgctcgtgaggacccccgtgttgtcctctcgtggctccacaacaccatcaccgtggaactccaggacatcacccacgaccaggtggacaccgcccgtcaggcgtggctcgctctcaaggaccagttcctcgggaactgggatgcacgggcgctccacctcgacactcggttccacctgttctcttag

SEQ ID NO: 40520 - DNA, 849 bp, Zea mays
  Peptide Sequence Number=SeqID_83895
atgaacttggaatcaggtgtccacacacccccacggttctgcctctgcttgccccgcttccgtcaatcacgcgtctcgcccaaccgccccgcagcgctcccacccttgttcgcccagatctggatcccgtccccgtcatcggcgcctcctcccccgcgcgtccgagacccggttccgtcgcttccccgtcaagctctccagtctctcctcaccttccttccctccccctccctgctcggtccatatggcggcttgacagtgaatcggatcttcctcggcctcctctccctgcgcccctctggtcaccatggagctcgccgcccggacctccagccaccgcgcctcccgtcgccgaccgtcaagcgccgcattgggcgctcctccccaaccctgccatccgcggatctccctacacgaccatggatctccccctggccaccgtccgcggatctccctgcacaacctatctttgaagcagtcgcggcgcgagtttgccgcctgtgtggaggttgtggccgccgtcgctcagatcgacctctgtttcacgccttcgtctccgctgccctcagcccccttccgctctcagatttcggcatctcccggactcactaccgtccttctctcctcccgcgcagatgcttcgcggcggcggcgaaccggatccaggggctcgctagggccttctgcggcgcgccggcctcgcgagtggatgtggaggccaacgggacgcccagcccacagctcgccgccgtacacgcggccgcagagggcatgtcgccgttgtgtgcctcctcctccactgcggtgcgtgggagggagaagaggtgctccagtcaaaacgacaactga

SEQ ID NO: 40521 - DNA, 666 bp, Zea mays
  Peptide Sequence Number=SeqID_83896
atggagggcggggggctggcctctggagggcgcctgaccgctgggtggggtgctgcagagtgccaaagccggagcaggggcctcggacgccatggtgagctcctcgaggagaagctcgttcctcacagcatggaaggtggggaaggggacgatcctcttgatgagagccttcaggtggccatagcaagggctgaggccacacagaaggctcaccgaggtcgtggagaggtccgccatgcccttcatctggtggtagtactctcccacggagaggtccccctaagagaacaggtggaaccgagtgtcgaggtggagcgcccgtgcatcccagttcccgaggaactggtccttgagagcgagccacgcctgacgggcggtgtccacctggtcgtgggtgatgtcctggagttccacggtgatggtgttgtggagccacgagaggacaacactgtccatcaggcactaggagggagacagcggagcgtcgtcatcgaggacgtaccaccgcagtgtgagaaggacatgtcctcgccaacgggggtagagggaggacgtcggttccaacacaacggacacgagggaccggatgttgtgcagtccggcagcttaagcatggagagcagtgatgtggtcggcgtcgaggccagaggcgggaagggcctctga

SEQ ID NO: 40522 - DNA, 285 bp, Zea mays
  Peptide Sequence Number=SeqID_83897
atggcgcatcttcctcccctcgccggcgcggacgtccccaccgatctgggcccgagcgctatcgctgctctgaccgcgggcactgctgccggccttgccgccggcttttttttgcatccacaatgccgcagcttggcacatgttcattgcctggagctgcaatctatggcacttcaactaggagatttggagcacaccctttttacgagacagttgttaagttcacaacaacaacaacaacaacaacaaagcctttttagtcccaagcaagttggcatagactag

SEQ ID NO: 40523 - DNA, 363 bp, Zea mays
  Peptide Sequence Number=SeqID_83898
atggaggaagaggagagcagaggggaagaggagagtagaggggagaggggactcaccgcgctgagcagctcgccggccagcggggtcaaggaggcggcgcggacgagaagggcttctgagttagttgaggttgccccgccgcaatgtcgtctcgtggtccgccgccatcgcggggctcacacagtggaccggccccgcgatgcgctctcgctgctccgccggatgcacctcgtcgggtgcccgcccaacgagttcgcgctggcgagcgcgctcggcgcgatctcgctggcacccgtgggcaccgggcatgcgcggcagctctatgcgctctcggtgcggcttggcttcggctccagcgtctaa

SEQ ID NO: 40524 - DNA, 414 bp, Zea mays
  Peptide Sequence Number=SeqID_83899
atgccggaatcaaagctaaatctttttagatctgctgggcttaagcacaccacaaccagcttagatgcggtgattagtcctccacgcgaggatcagtcaggtcggccatcgctcccgtcttcagcgccgttactgctcgggacgcctgaatgtggcggaggtcaggtccgcgctcgacactcgacgggctcacggcgcgctcgagtccggcaagctgtacgaaatggtgtacgccgggcgagcagcgggggtgcctcgtccgtgtccgacggctactcggcgtcgatgtgcctggacggcttgctggacccagccgcggtgcgcggcaagatcgtggtgtgcgaccgcggcgtgaactcgcgtgccgccaagggcgacgtgatccgccgggtgggggcatcgagatggtgctag

SEQ ID NO: 40525 - DNA, 156 bp, Zea mays
  Peptide Sequence Number=SeqID_83900
atggaggagaaaaccaagcaacctttgagcattgttgatcattcacacttcattcttgcacacttgttcgacattcttagtgatttgagctccgttctactttctgacagaaaacataatgtgctagtaaacccaactaaacatcgtattgagtaa

SEQ ID NO: 40526 - DNA, 342 bp, Zea mays
  Peptide Sequence Number=SeqID_83901
atgaagtggcagtatttgctgaagcgatccaccaccgtcaggatgacatactttcctcccacacgtggaagcgcctcgacgaagtccagcccgatgtcagcccagtccgctactggcactggaaggggcaacagcaggccgactggaaggtggtctgatttgttgacatgtggtgtaggcacggacctacctgagcttatagttgttccggaagaggcatggttagagtttggtaatataaaattcatgccagaacaagaaggaaaactccaactaaacaatggactttctggtttgtcagcacaaaagaccagcggtagtgacaaagttgcaaattcataa

SEQ ID NO: 40527 - DNA, 546 bp, Zea mays
  Peptide Sequence Number=SeqID_83902
atggtcctcggtcatcaagcctacatcgacaaggtccttaatcgactcagacggagacactacaccgagactctcttctcgtgcaagtcacccgctcggtctcagcttaatcatttcaacccaaaaacttggtacctggcagagggtttcaaggaaggtaatcaagttcaaggaagggaaaataataagcctaggaaaattggtttcacaattttaggaattttctaccattttctagagtttttcaaagttctgttgaaaaagaaaaaggaaaaacagaaacagggctgggccgattccagcctaggtggcccaacactagagggaaagcgcgcccgcgcgcgctggctgctttgcaaaaataccctcggggttctcactaactgggatccggtcttccaatgtttaacacagtcgctgacagtttgcataaaagtcctcccacttctatctattctgggtttaaagtccccgacggtgcatggcgcggcagagctccggcgagctcctggaccggccgattggggcaaggataggtactactga

SEQ ID NO: 40528 - DNA, 639 bp, Zea mays
  Peptide Sequence Number=SeqID_83903
atgtcctcccgcatcttcactcttgcttttccccatggggaaccaccttggtacagaagcaacagaaatctgctacttcctcacctaaaaacaacgaagggagaaaccctgagtatgggattactcagcaagtcttacccgactaaagcaatactaagcatagtaaaacctttttgtaaaaacagggtttcaaggaagcaagcaagtgagaaagatttaaaaacatcaagggaggtggcaaatgcaccggggcttgccttcgttcgtagggaaaataataagcctaggaaaattggtttcacaattttaggaattttctaccattttctagagtttttcaaagttctgctgaaaaagaaaaaggaaaaacagaaacagggctgggccgattccagcccagttggcccaacactagagggaaagcgcgcccgcgcgcgctggctgctttgcaaaaataccctcggggttctcactaactgggatccggtcttccaatgtttaacacagtcgctgacagtttgcataaaagtcctcccacttctatctattctgggtttaaagtccccgacggtgcatggcgcggcagagctccggcgagctcctagaccggtcgattggggcaaggataggtactattga

SEQ ID NO: 40529 - DNA, 99 bp, Zea mays
  Peptide Sequence Number=SeqID_83904
atggtcttttgtccagcagaaccttcatatgaagggcttctccttggaatggtgcaactggattacgtctataatgataggggtcatgtaggcataaag

SEQ ID NO: 40530 - DNA, 558 bp, Zea mays
  Peptide Sequence Number=SeqID_83905
atggcgcctcctgttgacgtggtcggtccgtggtgccctaggttgagcgatgtggaggctcctccgaggtcgaggtcgagtctgtcttccgtggccgaggtcgagtccgagcccctgggtcggcccaagtccgagccttggggtcgggcggagcggagttcgtcgtcttccagggctgagcccgagtccgagccctggggtcgggcgaagcggagttcgtcgtcttccggggctgagtccgagtccgagccctggggtcgggcgaagcggagttcgtcgtcttccggggctgagcccgagtctgagccctggggtcgggcgaagcggagttcgtcgtcttctggggctgagcccgagtccgagccctggggtcgggcgaagcggagtttcctatggcgcctcaggccgggcctggcggctatcagcctcactctgtcgagtggcatagcagtcggtgcggcgcaggcggagctgtcctcttgtcagaccggtcagtggagcggcgaagtgactgcggtcacttcggctctgtcgactggagggcgcacgtcaggataa

SEQ ID NO: 40531 - DNA, 255 bp, Zea mays
  Peptide Sequence Number=SeqID_83906
atgggggggcatgggttgggggcgtgtggcgctgggctgccagcgctggcggagcgagcaggtgcgggaggcgagtcgctagctcctgggccacgcgagggcgagcggtggggcgcaggggtgggctggggagctgggctgcgtgagggggaagcatggcgcgggagtgggccgggaaaggtgggccgcgtgcgctgcggggtgggccgagggacacagggaagcggagttaggccgcccgcgctcggtgggtga

SEQ ID NO: 40532 - DNA, 378 bp, Zea mays
  Peptide Sequence Number=SeqID_83907
atggagggtgaccccgacgagcacagcgaggcagagagtcagcctcgcgtgcgacgggcaagcaaggccggagacccatggacgcatcgacggccggacctaaatagcttgaacggaggagcagatacgacgaccatggagatgaggagaggacgagctcgagggggatgccgagccaaggacgagtgtgctgggagcgatgtccaggacggagagcgacaagctgacgaccagttggatactaccgcgggggtgttgcgcaatgggaagaaaggaaatgcgcctagtagtgaatatatctgcgtaggaggagaagacgttaggatatttcacatgagcgagggcatcaggaggataagactgaataagcggtggtga

SEQ ID NO: 40533 - DNA, 369 bp, Zea mays
  Peptide Sequence Number=SeqID_83908
atggagggtgaccccgacgagcacagcgaggcagagagtcagcctcgcgtgcgacgggcaagcaaggccggagacccatggacgcatcgacggccggacctaaatagcttgaacggaggagcagatacgacgaccatggagatgaggagaggacgagctcgagggggatgccgagccaaggacgagtgtgctgggagcgatgtccaggacggagagcgacaagctgacgaccagttggatactaccgcgggggtgttgcgcaatgggaagaaaggaaatgcgcctagtagtgaatatatctgcgtaggaggagaagacgttaaggatatttcacatgagcgagggcatcaggaggataagactgaataa

SEQ ID NO: 40534 - DNA, 237 bp, Zea mays
  Peptide Sequence Number=SeqID_83909
atggaggtttctcacaggaaaaaatacactcgccggagccgaggagaaacccgtcgattgccggagccgatggtccgatcgacgaaccgaacgcgtcccgacgaagccctcgacgagacgaacgcagcggtaccctcggattccgcagacgatgcacgaattgggagtaattgctcgtcggagttgtcgcaggagttggaaccgctccgaagttcggcgagcaataccgggagctag

SEQ ID NO: 40535 - DNA, 252 bp, Zea mays
  Peptide Sequence Number=SeqID_83910
atgcaggcggcatgcagctgcaccacggggatgcaccctttcgactttgacgcatccagcgtggaggcccaggcccacacgtcatggaccgggaaaggggatactccgaaagggatccttctccgcgaaggaagcgggccccaagccctcctactgatcaggggttcgaaggctggcccctcggaagggttcgacagccgcccagagcactcgggctccgcgcccactactgatcagagattcgaaggctag

SEQ ID NO: 40536 - DNA, 648 bp, Zea mays
  Peptide Sequence Number=SeqID_83911
atgcagtacaatggatcaagcagtctcattagctgcgagaagcagacgattcgaatcgagtttttatccttgcaagtgaccgaacttgtacccaccataaccggaatgggagacctcgtctcaggtcgcgtgaggggatatgtctacgggcaggtcctctggcgcaggctctggtgctgggtccggggctacctcctgagcagctccttgctccagcacgaggacgtactctccgtcagcaaggttacagtctatcgaaatgcaatgaacattacccgcggcatagattacggcggcgaggcttaccggcggcagcagagctccggcggggtggtcggtgacgtccgggaggtcacgacggtcacgtcggtgtgcgggtcggcgtcggaggtggtcggagctaccctggccacgagcacaggcggcgggggtcgtcggcggctcctgttccggccaaatcacgacggtatagttcaattatgtgcacgaggagctccatggggtgatgtagaggccatgcgcgcaacgaattttggaaatgtgcagaggcttacccggtccacgtgcgccgacgggttttttgaactcccggcgaagcaacgattgcgctattccggtgacgcgggtcctcgattcaagcttgagtaa

SEQ ID NO: 40537 - DNA, 552 bp, Zea mays
  Peptide Sequence Number=SeqID_83912
atgaatcgacggtcaagcttcgacgaccaagagatcaaactcttcgagttctacaaggctaaagatcctgagcatctatttggtgaaggcaagtgtcggcgtttcgaccccgggggtccctggaccgacgaggggctgagaaccgctgtcgtcatgggagcacgcggggtgccatcattacttgtttaccagggcgagccagatgggacaccgcccaaggtcgggcgaggaggtgactcctccggggtcgaggttgagtccgagcccaggggtcgggcgaggtggagaccgtcttccgaggtcgaggttgagtccgagccctgggttcgggcgaggcggagaccgtcttccgaggtcgaggttgagtccgagccctggggtcgggcgaggtggagatcgtcttccgaggtcgaggttgagtccgagccctggggtcgggcgaggcagagtgtggcggaactgcccgaattattccaacttaagtgcctaagccccgccttagaggctagaccacacttaaataggaataacccgtcaatccctcggatctag

SEQ ID NO: 40538 - DNA, 282 bp, Zea mays
  Peptide Sequence Number=SeqID_83913
atgggttgggggcgtgctggcctggcggtctgggcgtgtggcaccgggccgccagcgctggcggagcgtgcaggtgcgggaggcaagccgctggctcctgggccacgcgagggcgagcggtggggcacgagggtgggctggggagctgggccgcgcgagggggaagcatggtgcaggaatgggccgggaaagctcttctctgtccttggttacactgtaacctatggcatcagctattgctatgtatggacgaaagcatcaagcatcaagcctaatagatag

SEQ ID NO: 40539 - DNA, 996 bp, Zea mays
  Peptide Sequence Number=SeqID_83914
atgacgaggagcaagggggtgtcacaacatacgaagggcgacacgaagatattgggcactgactatgacgtgtgtgcagattcctgggactcgacaagctgggcagagcagagagctaaccccgcgttgcgtcaacggcagcgcgactctagcgagaccctatgttcgtacgggtcgacagcatggacgaacagacacgacacggaggtgcgagtccaccaaggacgcgaacttgaagggcggcgcttagaacgaaaccttgctgagcgaagaacgacgaccggcaaggcgaagcctgacgacgaggtcgagcaggggatagcgagcgcgagcgcacgcaacagcgacgatagtcgaactggtaatagaacgttggcgaacttggccgacgcgaccatgaacgcgtgctggcgcggacaagacaacagtggcggacgagctcgcgacggtgccaagattggaggcagaaaagacggccaggacggagcacagatcggtgcgacagaaacgaaaaccgggcgcagggacgcgcaccatttccctgggcacgacggtggcctgggccagaaccgtccacggccaggaggcatgcacagccaccatggccggccaagcgagcagaaaaccgcggcgccggaggagcaaggcgagcagggtgatccgggctggggaaaaatggaggctgggcgggttctgcaggggcaaacacgccgaacagagggcccaagccgagctggggcagacagccatgggaggcaggggagttcgcggctgcgctcacagggagaacggaacgcgcgcgacgagccagaaactgaaccagggcgcggcacagagacccgagagagaacgcggcgagctgagaagccgcggcgcaggaacgttcggccggacgcggcaagcggagagaggaacgtgtgtcggcgagcagagcagacgcgcgactgggctgggcgaaatttggaggacggccgagctgggcgagctcgaagctaa

SEQ ID NO: 40540 - DNA, 63 bp, Zea mays
  Peptide Sequence Number=SeqID_83915
atgacgaaggtgatgcttgccgaaggtgttcaaagctcaagaaatggaacattatatctctaa

SEQ ID NO: 40541 - DNA, 171 bp, Zea mays
  Peptide Sequence Number=SeqID_83916
atgaaggtctgcaagggcgtggatggggacgctattctgaatgccttctgttgggggccttcggcttccgaaggtcctcaaaaacgtgatttgacaatgttttctaagtatgcgagcaggtatgtctttcatgaccttcgtcctagattcattatatccgaagggaaataa

SEQ ID NO: 40542 - DNA, 426 bp, Zea mays
  Peptide Sequence Number=SeqID_83917
atgacgaaacgatggtgcgcgcatgatgtgaaacgtcctcgtggatgtgcaatagccactgccgagtcggtgtcgaggctggtgtcggacgaatacggggagtatgcgcatgctcctacgccctctgccaagaatggggtgacacggaggtggaggcatgatgggagagagaaaagaagtagaattgcgaacgaggtggtggcaactgaggcgaggaccatcattatcgtgcggagcatgcacgcaccatcgttttcaccgttgtcggacgtcccgttcgtcttcccggccttcgccctgttcttcctccccaacctactgcccctacccacggtcgcagccgcaagccgaccgacgctcgtcgatgcaggttatcttggcgatgacgagtccagatctgggatattggacaaccaaagcctgtag

SEQ ID NO: 40543 - DNA, 1437 bp, Zea mays
  Peptide Sequence Number=SeqID_83918
atggaggcggcgctcctcgcggccgcaggcaccggtaggaaggatggtggtagtgaggagagcggtgtggtgtgcgaggtgaagaagcagttgtacctcgccgggccgctcgtggtcgggttcctcctgcagaacacggtccagatggtgtccgtcatgttcgtcggccaccttggggagctcgcgctggccagcgcctccctggccacctccttcgccggcgtcaccggcttcagcttgctggcaggcatggcgtgcagcctggacacgctgtgcgggcaggccttcggtgcgcggcagcaccacctgctgggcgtccacaagcagcgggccatgctggtgcttgctctcgtgagcgtcccggtggcgctggtgtgggcctacaccggcgacatcctggcgtggtgcgggcaggacccggagatcgcggcgggggccggcagctacatccggtgcctgatcccggccatggtcgtgtacggggcgctgcagtgccacgtccggttcctgcagacgcagaacctggtggtgcctgtgatgctgagctccggcgccaccgcgctgtgccacccggccgtctgctggctgctggtgcgcgggctcgggctgggctgcaacggcgccgcgctggccaacgccgtctcctacctcgccaacctctccttcttggccgtctatgtcagggtggctccggcctgcaaggccacctggacgggcttctcggcggaggcgttccgcggcgtccccgatttcctcaggctcgccgtgccgtcggctgtcatggtgtgcatggagtggtggtccttcgagctcctggtgctactgtccggactgctccccaaccccaagctggagacggccgtgctgtccatctgcttgaacactagctcattggcgttcatggcccctcttggacttggtgctgccataagcacgcgtgtgtcgaacgagcttggagcagggcggcctcacgcagcccgactggcggcccgggtggtggtgcttctggcgctcatcgtgggcacgtcggaagctctggtcatagtgctggtacgcgacctgtgggggtacgcgtacagcagcgaggaggaagtggccaggtacaccgccaggatgatgccggtcctcgccgtgtccgtcatgctcgacggccagcagtgcgtgctctcaggtgtagtgaggggctgtggccgccagaaggccggcgctttcatcaaccttgccgcctactacctcgccggtatccctgccgcgctcgctttcgccttcgtgcgccgtctcgcgggaatgggcctctggttcgggatcttgtgcggcctggtggtgcagatgctctcgctgctctccgttaccttatgcaccgactggaacaaggaagcactgaaggcgaagaacagagtcttcagtgtggctcttcctgcagacatggaaacatga

SEQ ID NO: 40544 - DNA, 390 bp, Zea mays
  Peptide Sequence Number=SeqID_83919
atggccgaggcctcgaagcccatggctctgaagctagttgatgtcttggtcggcaatgcccttcctagcaggcggcgggagagccccaaggggcgcaccccttctcgcttcttgccaaggtcaagagaggcatcgtgggattgtgttatccttggtggcggacccgacatcgtttgtcctcggggcttcggtacccttcaagacaccatcatcgactgccatctggaacttggtgaagaggacgttgagaacgtgcaaggcccctacatggcacacaactatcagtgttttgaactagcaccgacgaatcgtcaaggggctcaggccatgagtgagtcacagggctatggcctcataggtcataagtgggtctctggcccaggttcatag

SEQ ID NO: 40545 - DNA, 384 bp, Zea mays
  Peptide Sequence Number=SeqID_83920
atgtgggattcgatccatggtaatgggccctgcgaggacaagcgcgataatggtcatgtctgtaatagggcggacaggttcccaacatttggcgcccaccgttcgggctacgaaaaacaacccgcgatggcccccaagcgagctaattcgaaggctgccccatccatcgacgacgctgtgaaggcagcgcttctggcgaacaagaaaggcaaggccctcgcggacgccacccaccaagagtccttcgaagacgacgctgtcaacagcaaaaggcagtacgaagaccaccccaccccgacggcactgtacgcacttacagttccgaagacgcgccccaagcaccaccgccaggctccgctccaccagagggcgaagtcaccatag

SEQ ID NO: 40546 - DNA, 381 bp, Zea mays
  Peptide Sequence Number=SeqID_83921
atgggcagaggcaacgggaacacgtgttcgaccgtggctgacacccccggttcacgcccgccggacttcaccggaggcccgagatcgacctcaccggacttcggtcttccgccgccgcgcgtggaccgagctaaccggccggactcctctccgccgacgagcatcctcgcctgcgcgcgtggaccgaccgactctggccatctccgacggcgacccgcacaccgttgtgatccccgagacctcccctacgtcctcgaccacttcaccggagccatctcgccgccggaaatggttgatggtgtgacttggcctaccaccctgccactgggttggacggtcgagtgggatgttgctccggcaggagaggagcacgaggagtag

SEQ ID NO: 40547 - DNA, 135 bp, Zea mays
  Peptide Sequence Number=SeqID_83922
atggagcagatggcgaacgatgaagaagtcgatgacttcggaggcctggaaagcacggactttatttttgtgatactgaaagtcggttgctgcgcaagttctgacgtctgggcctgcgcaagcaacccctactga

SEQ ID NO: 40548 - DNA, 384 bp, Zea mays
  Peptide Sequence Number=SeqID_83923
atggactgtgagtttgccccgtcctccggcgtccttgggcttcgccgctgccggcttgcggtgaccaccgccaccgtcgcctccttgtgctgctcggcgctcgccccagccgctccgtatctagctatctgccctgctcagcgctcgtgctcgccactccagtgctctagctcgctgtccctttgctgctcatgcttgccactgcctccctttgcttccattgtccctgctctcattcttctccccttcctcgctgatctgctcacaatctccattaattttggttatgatgatgaagcaacaaacaatagtgctggctatggtgatgagcaagacaaagacaagaatgatggtggtatatatgatttggatgatggttattga

SEQ ID NO: 40549 - DNA, 2683 bp, Zea mays
  Peptide Sequence Number=SeqID_83924
atgtcttcttcctcatctgctgtgagtgcgtcgtcggccggtccgtcgtctgaggataccttgagtgatttggtggcgacggagttgcagccgggccacaccgtggaatttggcacttcgaggatctcctcgtttcgtgtgcaggagatgcagcagcttcgatacttcggtgatggtgtcgggcgagttccgggcgccgcggagatcccggagcctgagggcgaactggttgtccaccagttgacacctaacgccgtggtcgccctggcgaagtatgtttgggcggttgcttcgtacggcggccagccgtctgtgcaagtcttcgccaagaactattgtctgcactggcaaaagaggaaaaaaggaaataagattgcacaatttggatcgtgcaccttcacaccgaggactggaaggactttggcagaagttgttgaaatagtcgcttgcgctcgaaacaagtggggcaactggtgggacctttggttttatgtctctggtggggaagtcgaagatctccctgggctccctgcagccattatgtgctctcactgctatgtggcgttcccaccgttcgaggtggcggaggacgatgtggacgaaggggcccttcggtacgctgcctgcatgagtagcgggcgcgatcttgttgaggaatttattggatatggagtgtggcccttggcgcacagctgggtgcttggcaaagtgtgcccccgccggatgccgtccttgggcgatcagttgttgcgaagtcctaccttcgccttggatttgcagggcaggaactcggccgcgttagtgcgagaggtggaggccgaggccatgaggattgtagggcgatatgtgccgaggacggagaccttgcgtagttgggatattcgcggttctaatgttcatttgaaccgtgtttttgagttgaaccgtctgccatatggcggttacctgggagacgacgatgctgttatcgaccgccggggaaaaagggcggcgacagcggtcgacgaaggcccttcgcggggagctgtgccagctgcggccactaaaaagaggaaactaggtactgcagctgagcggttgggggtcttcgattgttttgctgtggatttattgggaacttgcacgacccccggggagaggatgtcttcgcccgagcttcgggaatctttcacgcgaatgatgaatgttaccgggggtcggtggcctaggaatgttccgatcccccgggcgaccggcgaggacgacccatgggcctggttttgcgccagcggcgagatctcttcagccaccgctgctaaggacgtggcaggctcagttgcgcagcagctgaagcatgcggccgccttcgccgaacagattgcgtctggggccctgaccttggagtttgctgccaaagggaggaatgagcgcctccggacgcagctcactgaggctatgcgggacaagtcggtcgtggaaagaaagagccgcaatctgatggacaagctgtcggcggcggaggccgaagaggaggaacttggccgctggctggccgcggagaaagaagacgctgacaaggcctgcgcggaggctcaggcggcgcgcgccgaagctaaacttgcacgcgccgaggctagccttgccctccaacgtgctgcaaaggcggaggcgaaccacaggagccttcgcggccatctggacaaggcggaggcctctacacgcacaggggtggaccgagcacgtgcattcctcgtggacacgtaccagcaacttggtgcgcatacgaccccctttgatgcgtctggcaaggaggtgggcctctgctttctcgggtggttgcaggaggagctggaggtgctttcgtcgattgtgacaggtctcatatccttcacttcactgatcacatgtgagggggccgcgaacgccttgtcccgtgagggatgcaggcacttcgaagtcttcgatcggtccgatgaagacttcgaccgcgagatcttccaggttgaagatgtggtgctaaagcgctccactggggtgttttatgataggatgtggggctctcacgaccgcgacactgtccaggaaaggtcgaaccgggcgatggaggagatggccaatgatgaggaggttgaagaccttggtgacctgaagagcatgtcccctttggtggagggcgtgagggcgggggctgaggaccagccggtgcctccaactggcgttggcgaggacgaccctttggccgccgccgtgttgcatgaagatactacgggggcggctgtgccggcttttgaagaccctgcagcatcggccagccctacgcaggttctgacgtccgggcctgcgcaagcatcccctactaatggtattaattttgtggcggccgcgaacgcagtgcctgctaatgatagtttttctggttctgaatcgggttcttttttgtctgatggtggcgggtttgagagcccgttttcctggactaaggagtcttcggatgaagatttggattattttgctgcgttagatgtggccgcggaggagtcttcgccgcggctggagatgggcgaagagttggatcccacggctggggtgaggatcgaatgccgtcagcgaaaagtggtggcgaagcatagtgttggtgagagctcgcgaagtgggaggcgccatcagatggggttggagcgaactcgtcttcgtgtagatcggg

SEQ ID NO: 40550 - DNA, 558 bp, Zea mays
  Peptide Sequence Number=SeqID_83925
atggtggttcggcgaagtcctcctgtttgggtgcttgtgggtggtggtggtgtggtggattttggtgatgtggaggcggtggtggtaggacctggacctcttggtgctggtaagcgtggttggttggatgctggatttgctcgttgtggtagggttgttgttgatggtatgtgtgcgctactaccctctggttgtcggtcggttgtgctctggacattctgtccttggtggccatggtctctggacaatccttgtcgggtgagcacagtcttcaccgtgaaacaaacagaagaatctgcgtggctgttgtgtccgtccgcggcctcttccccttatgtcgttgtcgcggccttgggggtggtattcctgacgacgggtggtctcttcggctggctgctggttggcaatgttttgcacctgatgatgattgcggttgtcccggccgaagtctggctgcgctatctaggttctgctgggctgtggagggtccttgggcttcctctgagactcaaccttgcgttgatggagctcttcggacctggcatacttctcaaataa

SEQ ID NO: 40551 - DNA, 402 bp, Zea mays
  Peptide Sequence Number=SeqID_83926
atgggcagaggcaacggaaacgggtgttcgaccgtggctgacacccccggttcacgcccgttcgcgcaccgcgcctcccagtgcacgcccgcgccggacttcaccggaggcccgagatcgacctcaccggacttcggtcttccgccgccgcgcgtggaccgagctaactggccggactcctcgccgccgacgagcatccccgcctgcgcgcgtggaccgaccgactctagccatctccgacggcgacccgcacaccgttgtgatccccgagacctcccctacgtcctcgaccacttcactggagccatctcgccgccgaggttgtcgcctcctagacggcttggtggtgactccgtcgagctcttcgagaaggttgtgaagaagccgcatatgagattgtga

SEQ ID NO: 40552 - DNA, 378 bp, Zea mays
  Peptide Sequence Number=SeqID_83927
atgaacaatattaaattacatttgtaccttcggcttgacagaaggcaaaagtccaagcgtgacgcacgagtgaatacaagtcagcgtgaacagtacgaggaccttcggaagtcgaaggcccccaatagccggtctgaggcagagtggcgcagcggcggcgctaccctactctggcgagcaattgcgcgagtactaagacagggaatgggaaatcaggggcatggggaggcggagctcactagagcaacgtacacggcggagattcgacggcggtcgcggaacaagcccaagatcgcgatggacggcgatggcgcttctcgggcacacgctgtgcgagggaagagtgtgggagcgctgcagaggggaactactgggtga

SEQ ID NO: 40553 - DNA, 685 bp, Zea mays
  Peptide Sequence Number=SeqID_83928
gtacatgcaagcggtagctgatgaaattgttttggtaaatgttgacccccaaaagccacccaaggcatggaatctggtaaagcttttggatgaatttgttagtctaggcggaaaactgagtgaatcattcaaggacatccgagagcaaaacctccaatcagcacttgagcaaatgcaaggttggggtcctgtgaaggctgatagtttcgcccttccaaacatgccgttgccgcccgattcattcagaggaattcgaaaaagaacatcttcaataacgcggtggttttccatttgtgttgatgatacgtcaaagaaagggagatatacaaacactgtgaatctgctccggaaatattttggggattttctaatagctacctacttgaatgccgtgcaagagtcccgttatgacgatgcttatataggtggaattgagagggaagtactattgaagactcttgatacattatggaaagaccatttggtaaacatgaacaagcttagttctgctgtgaacgttcggagttttggacacagaaatcctctggaagagtacaagatcgatggctgccgcttcttcatctcaatgttgagcgccacacgacgtctcaccgtggaatcccttgtgcactactggtcgtcgcccatggagtccgaggagatcttcaacacagaggatcaatag

SEQ ID NO: 40554 - DNA, 2019 bp, Zea mays
  Peptide Sequence Number=SeqID_83929
atggacgatgccgctgcagaggaagaagcttccatgttcgagaccagccatgtcctcggcgccctgctggcctcctcgccgttgctggcgcgcgcctgggaccgctgcacagccgcctccgctgcagcgccgtggttcgttcacggcgaagacggcggcaaggtgtacgtggggttctctggggtgcaggctgcgcttacggcggcaggcgcggcggtggccggcggcggcgccgacatcttcgcgccggtgagtctcggcggggacgcggcggggcggatgttcgcgccgctggtcgccgccgagcccgacccggccgctaccggggagccggttgccgtgcaggcgctggcgctgcagtgcttcctgaaactctgctgcagtcctgatttccagattgccttctcttctgtagtaaaactgttagtctgtgaagtcaattcagaccccagaactcaaaacaggatgcttctgaatcagatcaggggcaaggcagtcgtgttcacgggccactcccttggtggcgccgttgcggccctcacggcgctacactacctctgcatctcatcgtcaagctcgccacctgctcctcctgtcctgtgcgtcacctttggaagcccattacttggcaacgaggcgctgtccagggccatcctgcgtgagcactggggtggtaacttctgccacgtagtctcacagcacgatgtcgtcccaaggctcctcttctgctccccggacgccgtacccgcgcacatcattgttggaatgcaactgcagcaatggccggcgtggactcggcacacaggagctgtgagcacggtcaccgcgcacatggcggacactgacaaagacgtgctccggcagctgatacagacgcacgttggcgctgtggccgtggaacagaagcttgccgcttctgagacgacaggtgggagcccgtaccggccgtttgggacgtacgtgctgtgctccccagaaggcgcggcgtgcgtggacaacccgaccgccgcggtacagatgctgtacgccaccttcgcctctcagagctcagccggtgcagagtccccggaggccgcgcactcctgctacggcgagctcgtgctgaaaatgccgcaccacttgcttctcaagagatggctgcgtgtggacgacgacatgccggcgacgcccaactacgacgacggcgtctccctcgcgttggaggcctctggcatcgacgtcatggtcagggccatggaggcgtcgacggcgcggcattggctgaaaacatcaaagcgggcagggcggcggccgagcctgaactgcgctcgcctggcgacgcagctgggccgggtcacgccgtgccgtgcacagatagaatggtacaaggcgctgttcgacgcagagatggggtactacgacgcgttcaagcagcggcggtcgcccaggaagtacaccaaggtgaacttaaaccgcatcaagctgggccagttctgggaccgagtgctgagcatgctcgacgccggccagctcccccacgatttccaccgccgcgccaagtgggtcaacgcctcccgcttctaccagctcctcgtcgagcctctcgacattgccgactaccatcgacacggccaccacctgacgagcgggagctacatgactcacggccgggagaggaggtacgagctgttcgacaggtggtggcatgagaagggatgcactggcgctggcggtggcatcacgtcctccatgtcggcagcgtcggcgagcagccggagacgcagcaaatacgccgggctaacgcaggacccgtgcttctgggcgagagtggaggaggcgagggagcagacggagagcgcacgccgcgagcgcgacgtggccgaactggcgatgaagctggaggagctgcaagagttcgagcgctactcccgtgagctggtggcgaccaaggaggtgtccgtcgacgtgctcgcgccgcagtcgagctacacgctgtgggtggaggattggaaccagctcaagctcagggctcagggatga

SEQ ID NO: 40555 - DNA, 285 bp, Zea mays
  Peptide Sequence Number=SeqID_83930
atggaaaaggatcgccaagacgcgtcgcagaagcgtcgggcgttcgcgagggtcggggactcgcgccgcgaggtcaagatggctcggggggtcgcgaagtctatcgcccctggcacctgcaagcctccgccggggtcagaggctgggcaattggctgttgtcccgacgctggtggcggccgggtcggtcgccgtgacgcagaaggcacagggcgcagcctgtgtaaatttacattcatgcccttcacgtttactattgacttatggacaacccaatgaggactag

SEQ ID NO: 40556 - DNA, 450 bp, Zea mays
  Peptide Sequence Number=SeqID_83931
atggctgcgaaggcaacaggccacgtgggcacggaggcgatggaggtatccgtggaggtggcgaacggcgacgacgacgcggcacggctagacgacgatgggcggccgcggcggaggggcaccatgtggacggcgagcgcgcacataatcactgcggtcatcggcgccggcgtcctgtcgctggcgtgggcaatggcgcagcttggctgggcggcggggaccgccatgatgctgctcttcgccggcatcagctactacacctccacgctgctcgccgagtgctaccgctgcggcgagccgggcaccgggaagcgcaactacacgtacacggaggccgtgcgcgccatcctcggcggtgccaagttcaagctctgcggcgtcatccagtacgccaacctcgtcggcatcgccgtcggatacaccatcgccgcctcaatcagcatgctgtaa

SEQ ID NO: 40557 - DNA, 729 bp, Zea mays
  Peptide Sequence Number=SeqID_83932
atggcgcctcctgttgacgtggctggtctgcgccctaggatgggcgatgtggaagctcctccgaagccgaggtcgagtctgtcttccgtggccgaggtcgagtccgagcccctgggtcgggcgaggcggaggccgtcggctgaggccagggcggagtccgagccctggggtcgggcgaagcggaggcctgactgcctgtcagtttcactcttgtcaagtggcaccgcagtcggagtggcgcaggcggcgctgtccttctgtcaggtcggtcagtggagcggcgaagtgacggcggtcacttcggccctgccggctgggggcatgcgtcaggataaaggtctttatgctgatgggggttaccagctgagaattaggagccttgagggtcttaatgccttgcgtaatgcttcggctggtctggttgttccctcatgcgagctggccgtagcccggggcgagagggcgatcagggacagactcggcttttttacatacgcccctgcgttgcctttccgcaaggaggagggcgggaaagcgccatgttgccctcgatgggcgccgaacatggtgtctccggtgagctgcaagcgggtaatccgagtggacgtccgtgccccgttcgttaggggtcggctaggggcccagaggcacgcccaaaagtacctgcgggtgatctgccgaacccggtcccctggcgacggggtccgagggctcgatgcctccctctga

SEQ ID NO: 40558 - DNA, 591 bp, Zea mays
  Peptide Sequence Number=SeqID_83933
atggctgaaaggtaccaactcccgcggagttgcgttcctccaatgatgaggcggaaagacggcgggtatcccccatccgggggcttggaaggtggaaagacacgatgcataagggagcacgaagacatggtcgccttccaagggggtcaccctccttttaaaggcgactatccctacttgcgtccccagccgtcacgggctgagtcttctccaacacgctccaaggccctcccctgcggcgcgagggctgggtcccgcatgtcatgcaagccggctcagagcagaagaagccaaaccgccggaccgggaaagggggataccccgaaaaggatccttccctgtgaaggaaccaggctccgagccaccctactgatcaggggttcgaaggctggccccccggaagggttcgacagccgcctcagatcgtgtgggccctacacccactactggtcagaggttcgaaggtcggcccctcgaaagggttccacggccgcctcaggctactcgggctccgcgcccattactgatcaggggttcgaaggctggcccccaaagggttcacaaccgcctcagacgccgagcgagggatga

SEQ ID NO: 40559 - DNA, 576 bp, Zea mays
  Peptide Sequence Number=SeqID_83934
atggccaggaggggaggttcctggcttggggttgatcgacgaggacgtctgtcttctaagggggaggggtttgacgccggctacgggagaaggtcggagggggagcaaggcgctgctgcgccactggtgaggacggcgcagagggggctgctcaggctcgcggcggtggccgatcggcacgcggctggcggctgcgcccgtgcagtgcgcaacgaactagggtcagacggccaacgggagcgaggggtccgtcgcgccggtggaggaagggtcggcgactgtttgggaagggagtgcccgcgaggccgcgtcgactactgctcccctgcgtcccatggcagctgttgcacgtgcgcccgcatggctgcgatggctgcagggagctgggtcagcgaccaaaggagggagggaggccggctgccaacgagcgggacgtcggcggggaaggccctggcagggtcaggccgaggcggatctgagccgccgagggaggtagccatgaacagagaggagagtggcgtgtgggagaaggtgggcttgcggccagggatggtggccgcccctgggaggggatga

SEQ ID NO: 40560 - DNA, 693 bp, Zea mays
  Peptide Sequence Number=SeqID_83935
atgggaccacaatctgcactggcaacgaaggggaccattagccgaccacgatctggcggcgaaggggatgacacaacaggagcaagcagtgtcgagagttctgaatacttgtcagagctacttaaagttcacaagattccacacaatgtccttaatgcaaggccaaagtatgctgcaagagaagccgaaataattgcccaagctggaagaaaacatgctattacaatatctactaatatggctggcagaggaactgacattattttaggtggtaatccaaaaggtctctcaaatgtagaacttagtccatcatcagtaggtctgcttgccaaagctgcaatcatgtcaaaatatattcacaaaagcgagagaaatgaatggtctttgagtaaggcaaaatccactattgctgaatctatagaaatgggtcaaatgattgggatggagaaactgcaagagcgcatgactgaagagtctgagatgtaccctctttgtgatgcaataggacttgcttatctcagtgtcttaagggattgcgaagttcattgttcttttgaaggtgctgcagtgaagagattaggtgggcttcatgtagtaggaacctctttgcatgagtcacgccgaattgataaccaaatttcttgtccatcatcagcagctttcattcttacactggatgcatccatgcactga

SEQ ID NO: 40561 - DNA, 126 bp, Zea mays
  Peptide Sequence Number=SeqID_83936
atggcgggtggaattaagctcgccggagctaaggggaagtggctggccggtgaggtggcttcttactggtgtataattctttgtcctaaaatttggggcttaaaaagttctctgttacttaagtag

SEQ ID NO: 40562 - DNA, 729 bp, Zea mays
  Peptide Sequence Number=SeqID_83937
atgctcgtcgagtggcccgggtccgtgggcgtcgagggaggagcgctcccacggcggtggggcatcgaagccgcgtgtggcacaggcagggtcaacgaggccgcgcacgaggatggtgaagctgcgcgaggcgtgggcaacggtgcgaggcgaggtgcctgggagggatgggtactcggatcagactcaaaaagggagtcgagatcggtgggtggggaggagccagcaaggggaaacacatcttcgtcgaaggacgtgacgggaaatgatgatgcgattggaggtgaggtcaagacagtgataccccttgtggtcaggggagtagccaaggaagaggcagcgagtggagcgtggagacaacttatgaggagcagtagcggaagtgttgggatagcaggcacagccgaacacgcggagggcatctacctcatagctaacagagagagacgcctggaagagaaggcagcggatcatattggtggtgaaaagactgagtacaggggaggtccagagatcacaatgaaccaggtcaaaagcctgctccgcctgagaagaagaggtagtaaaagggagacgactcctgggtggccgagacgacgatgccaaatggtggaggtggtggtggagaccaggacgggaggtggagacgcgctgacgtcatctgcagccatctccaccgactcccctgttgcgcccgaccccagcatgatagtgacttccaccgcatga

SEQ ID NO: 40563 - DNA, 426 bp, Zea mays
  Peptide Sequence Number=SeqID_83938
atgggtgttgcgttgcgtgaaacggcgtcagccgcgcgtcttcagacagaaacgcagcgcgagccgactcctccgtctgaggactttggtgactcggaatacttagaggaggagttctcctctgagtccgaggggtctccagctcccgtccctcccccagcgtcgtccgatgactcggacgactctcaggggatcaccgcggaggtctggacttacatccgggccgtcgagcgctccgggctcgcgggcttggatgagtcggagtactcctcggacgaggaggactcgtccgaggaggacggtggcggcggtggcaaaggcgacgacgacgatgacgacgacggaggcgatggcggcgacgacgacggtgacggcggcgacggcggcagcaggggcggcagcaggggcagcaaggccagtggctag

SEQ ID NO: 40564 - DNA, 594 bp, Zea mays
  Peptide Sequence Number=SeqID_83939
atggcgagagtagcgtgtaccctccgtggcaagaggctggacggtggtgtatctgtgctctcggttggcgtgaacctgatctgtttatgtaatcgcttccgccttttcgtatctccgatgaactataatgtctgcgtgacgggtgaaacactcttgggaaagagtttatatgaaagaccagataggaagagtgcattgtatagaaggttgaatcaactaagaaaaatgccgccgcgcacaaggaaaactgcgcacaagcatactggcccaattggtgtgccatgtcatcaacttgccccaagacacgaggatagtagtagtgggagtaatgatccgatcagggatcttgaagcgaaagttaatcagcttcaaacagaacttcaacgcaggactgacatatgggtcgcggatggcaacagaatcaatgaattgagaagcgacatccaccgcctgcaagatcagttcgcagatcgagatctagcgctcgactgggcggttcactctcattcgcttgcttgggctaaggaggcgaaagctcgagcccgagtagaagagcttaactcagccattgatacccttgcaggcttattgtaa

SEQ ID NO: 40565 - DNA, 558 bp, Zea mays
  Peptide Sequence Number=SeqID_83940
atgggaacaaaggcaaccttctacaattgcaccatcgaaggcggccagggtgctctgtacgaccagacgggtctgcactacttcaaggcatgtgtcatcaagggaaccatagacttcatcttcggatctgccaagtcattttatgaggaatgcaaaatcatttcggtgttcaaggaggcggtggcattgccaatggcgccaccagagcaggaccagtctagaaatcccatcaaaatcgccctaggcaagagcgggttggcattcaagacttgcacaatcgagggggaaggagaaaaaatttacttgggtagggtgggcacgcatgtgatctactcctataccgatataggtaaggagattgtaggcataatatctgatggtcaggacgtccagactgtcgagagggggtattacagcgccactttcaagtgttacgggcctaggatgtctccaatggtaacctcaactctgacctatgtgcaggcaataccctttatcgagttacactacatctcgggggagtcgtggatcccgtccctaccacccgatgaagaataa

SEQ ID NO: 40566 - DNA, 462 bp, Zea mays
  Peptide Sequence Number=SeqID_83941
atgggcaagaagaagaacagcggaagttcgttgcaccattccggtgacaaacggaagcgagagccaagtcccccctcggaggacttcggcgactcagagtactcggaggaggagttttcctccgagtccgagaggtctccggtccatgcctctcccccgatgtcatctgatgattcccaggggatcgccgccaaggtgtggacatacatccgggccgtcgagcgctctgggctcgagggctcggatgagtcggaggtctcctcggacaaggagaactcctttgactcgtccgaggaggagagtggcggtgacggcgacaacgagggtgacggcagcgatggagatgatggcgagggtgacggcgatggcaacggcggcaagggcgacggcaagggcgacgacgacggcggcaagggcggcggcggcaacagcaaggcaagtggcaaagcgccactatcttaa

SEQ ID NO: 40567 - DNA, 444 bp, Zea mays
  Peptide Sequence Number=SeqID_83942
atgggcaagaaacgcaagcgcgagccgactcctccgtccgaggactttagtgactcagaatactcagaggaggagttctcctctgagtccgaggggtctccggctcccatccctctgcgtgagtcgtctgatgattcagatgactcccaggggctcgccgccgaggtctggacttacatccgggccatcgagcgctccgggctcgcgggctcggatgagtcggagtactcctcggatgaggaggactcgtccgaggaggacggtggcgacgatggcgaaggcgatgacgacgacaacgacaacggaggcgatggcggcggcgacgacggtgatggcggtgacggcggcagcaggggcggcaacagcagcagcaggggcggcagcggcggcagcaggggcggcagcgacgacgacggcaggggcggcaacaaggctagtggctaa

SEQ ID NO: 40568 - DNA, 813 bp, Zea mays
  Peptide Sequence Number=SeqID_83943
atggctcgtcttagacacactgcacgtaagtcggtgattcctttcctgccgtctcgacttgcggagcgtcctctgcgccgcaccgtgtccggtcagtcgagtcaactgaagaggctgcaccaccgcctgcgtgaggagcaggaacgccgacgtcagcacagagagcagcagggctcttcctccccaccccagcaggaggtggagtctgtgaggcgccgctcctctgctccccagctggaggctttcgaccggcacacctggtcgatcgagtatcgttgtgtagtctaccagcacagtcgcgggaggtacccggaccgctgggaggctacctgcctagttcgccgtccggaggatgacctccggggtgcagaggccgtttcggagcattactccatctccgagagggacactgcagaggcagctatgcaggatgcagcacagcgtgcactctcccagtactgttctttgttcggtggggtggccgacggtcttaaccttaggtactacccccgccgtccgactggtaacacagagagtgtggttgtctcacctgttggtgaggataaccctaggttgagcagcacagtcaacctagtcgcagtgcttaacaccgagttggatcactctctggacgagctaagcagggctcgaacggagattgctgagttgcgtgctgagctggcagagcgccgccaccaggagggtggttcccccgctcctgttgggactcagcacccataccgctcgccgccacgtggtcaccacacttatggttcccctgcctgtaagaccaggatagatctggatccttag

SEQ ID NO: 40569 - DNA, 1332 bp, Zea mays
  Peptide Sequence Number=SeqID_83944
atgcccgaggggttcggtcccgagacctccaggtgggcgacttggtgcttcgactacgacaagatgcccgagggcggcacaagctcacgcctccctgagaagggccattcatcatcgccaaggctcagacgtcgatggagggggagcagcagcaccctcggcgtcaactccaccatcggcgaagtccgaccgagcctcggacggcaacacggtcggaggatctccactccgaaggacgacgtcagcaccacgcccgggccatcgccgctagggtctcctctgggaacccggtccgagcagacggctcggccggccgccccgaagcctcagccagccgtcccccgaggacaccagcctggctcgtgggctcggcaactcgactccggcgttggtcctggccaagccccggccgacgaagctccctttttcgagccaactctgcctctgtctgcgatggcaccgctgcctccggctccggctcatcgaagagcggccgagggcctcgacagccacaatgaacaaacactggcactcaaggtgccattacaaacggaactccggttccacccccgcatgtacgaacaacgccccacgttggagggcctgcggggcgacaaaacccctggtggcttgccgatgcccgctccggcagcagcgacaacgacccccgctccgaagtggccaaacagcagcagcgatgacctcagggcggacgctgctgcgacgagctcctcgcccacgtccccactcaaggggcgaggacaagctatcaaagccaaagagccggaggcccagagcgcggatggtggcggcgatctcgtcggcaacgaggacatcttcagccgccaccacctcaacgtcgacgatggcagccatctgcccacctgcggatccccactcggatcctcccagacagatgaagcaccaacctccgtgcaagaggcgttcgagcccaacgcgctgaagctgacgacgctcgtggccagccccgcgttgtcggagtccgccccttccgctaggccaccgggctgcctgatgaaaatccttgaagcagagcgatggctgaaaggtaccaacttccgcaaagttgcgttcctccaacaacagcaagacgaaagcgacgcaagcgctccccatccgggggctcagaagccgtcgcggactgagtcttctccaacacgctccaaggtcctccccctacgacacgggggatgggtcccacgcgtcatgcaagctgccccaggacagaaggagccaaaccgccgcgcgcggagcgcacaacagcccagcggttacaagcatttctccactatcgcccggaccagcgggtga

SEQ ID NO: 40570 - DNA, 555 bp, Zea mays
  Peptide Sequence Number=SeqID_83945
atggtcccgaggtatgacaacccaaggaatgcgtggacgatgtcagtggctatgcctagtgttggccttggcttcatgagctgcaacaatcatgaaagtctcatcgacttcgaccctgcggcggaggccaacctccgtaggcaactggagcaaaccctcgccgctgaaccctccagcccgctccaccactacaaccttggcgtcttcctatgggaccgcgccgaggcagagcaggagggtgatggggaagaggcgcggaagctccgcgcggaagcgtcggagcattttctcgcggcggccaagctgaatcccaacgatggcgtccccttccgcttccttggccaccactatgcgcgcggcggtgacaatcaacgagcggtcaagtgctatcaccgtgccgtgaccctcaaccctgacgactctgaggctggtgacacactctgtggcttgctagatgttgaagggaaggagagcttggagcttgctgtctgcaaggaggcagctggcaagtcaccgcgtgcgttctgggcttttcggagacttggctatttacag

SEQ ID NO: 40571 - DNA, 258 bp, Zea mays
  Peptide Sequence Number=SeqID_83946
atggcggacctcggcgactgcgcagagaacggcggggtgttacatacgcgctcggaaactgaatcgtttctcgacaacgagctcagggaaggtgtttttcggaccttcgacttcttgaagcctaagagacttttttcacggatcaagctcgttacgaaaaacgatctagcaccacgaaggggctactgttgggaccatgcttcgtcgccgaaggtcctgcaggaagaaacagcttcggctgaagctgtctatacgtga

SEQ ID NO: 40572 - DNA, 405 bp, Zea mays
  Peptide Sequence Number=SeqID_83947
atgaagccgtggaaggagactttcaggagttccaagactacgacgagttctaggcgtgggttagcggcaacccccagtcggctgcctgtgaaggccgcgtttatctacgtttcttttccgcactttgatttatttttgccttctaaaaccgggtgtgacaatatactagaggttgctaaacaggaaactattgcttgtgttactaatacaatctcttttaagttcctttcaagtgacattctttcaattggtaataatctattctatggaaagaaatgtcaatataaagttttaaaaggaaaagagataacaaagaaggaagtctccacaaatgatgaaaagaagaatattaaggtgacaccaccacagatactactcttgatgcagtttaaaattcccttatag

SEQ ID NO: 40573 - DNA, 624 bp, Zea mays
  Peptide Sequence Number=SeqID_83948
atgggggcccaggcccacacgtcatgtaaccggcacgccggttgctacgtgcaagaaactgcaccgccactcgcgccactaccgtgcctcctcgactgcggaaccagtaccgcgactcgaggcaaccctgcatatgacccaacagtgccagccaggcacgcggtcaaggggaccgggaaaggggataccccgaaagggatccttctccgcaaaggaaacgggccccgggcccccctactgatcagagtcgacagagccgaagtgaggctgacagcatccaagtccggcttcgggcgccataggaagctccacctcgcccgatcccagggctcggacttggcctcggccccggaagacgacgaactccgcctcgcccgaccccagggctcggactcggcctcggccccggaagacgccgaactccgcctcgcccgaccccagggctcggactcggcctcggccccggaagacgacgaactccgcctcgcccgaccccagggctcggattcgacctcgacctcggaagacagactcgacctcgacctcagaggagcctccgcctcgccctacccagggctcggaccgaccacgtcacaggaggggccatcattaccctacccctag

SEQ ID NO: 40574 - DNA, 939 bp, Zea mays
  Peptide Sequence Number=SeqID_83949
atgggcggcgccgacggcctcaatgaggggggagctttttccggctgccaccacatcagcacggacggtgacgtccacctctccaccaacaaggcgcgccggcaggtccccactctcgtcctcgccgcgaaagccaggaggaggacggaatgttgcatcctagctggacagcaacagttcgccttccccggcatggctggaggacgcctcctccgcaaggctggaggatggtttccaccaccagaagctggaagaggaggtgaccagccggcccgtgcaggaggcggcgtctctggcaggggaagcaagcgacgcttcgccttcgccataatgaccgcgtcaaaaaagggactgggaaagggggataccccgaaagggacccttcttcgtgaaggaaacaggctccgagcctccctactgatcagaggttcgaaggttggcccctcggaggggttcaacagccgcctcagagcacgtgggctccacacccactactggtcagaggttcgaaggccggcccctcggaagggttcaacggctgcctcaggccactcgggctccgcgcccactactgatcaggggttcgtaggctggccctcgaagggttcacaatcgcctcagacatgtactgatcaggggttcatagctttcttaataaatcactcctatatgatactaatgttccaaatgggaagtcttatgttgggtgttggtcgtggtcgaccggaacgggggcatctgacaagcgcttatagtaccggctcaggcagattggatacgggcatagttcccaaagctttaccctgtggtccggactataagttggttacgaagtttgcagatgaagatatgatgctgaactccatggatgctagtctagtgatacccccggtcatcttgtggatggatgtccatgtttcgctgtactttgatgaataa

SEQ ID NO: 40575 - DNA, 549 bp, Zea mays
  Peptide Sequence Number=SeqID_83950
atgagctttgctcttctgggcgctcgttgttttataggctttctcatattaagtcgaaagagtttaggtaagactttcaaagaaactctcgacgggagaattgagtctattcaggaatcattgcagcaattcttcaatcctaacgaagtcattctggaggaatccaatgaacaacaacgattacttaatctacggatcagcttgcgaatttgcagcaccataaatgtagtagaatcattatcagcggcacgctgtgcgcctaagtgcgaaaagacagtgcaagctttgttatgccaaaacctaaatctcaagtcagcaacacttctaaatgccacttcttcccgtcgcatccgtcttcaggacgatatagtcacaggttttcacttttcagtgagtgaaagatttgtatccgggtctacaactttggtagaagcttctaccgtagaacaaattcgagaggccttcttattagaacccagagacctacttcgagaaggctttattgtcctaagaaacgaattctttgattcactttttgaatttaagtaa

SEQ ID NO: 40576 - DNA, 285 bp, Zea mays
  Peptide Sequence Number=SeqID_83951
atggtcaaaccggaactgctagaggaacgaattttcaatagcataacttgggctcctagattatggggcaaattggctgacagggactggaagcctattgcatttatttttctcattgccggtcatatgttcattaccgcctggaaaattagacagccaacccgtaatcgcaacgacccaattgcaagagcggagctctaccaacttagctatatcccccccaagccaagtggagcatgcatgaaagagtcagatgcttcttctattcttatccctggtggctaa

SEQ ID NO: 40577 - DNA, 954 bp, Zea mays
  Peptide Sequence Number=SeqID_83952
atgacatcactgactgtttctgaccttctgacgcttcagactgcggtggcagtcgaccgttgctccctggacaccggacagtccggtgcaccgcaggctggtgcaatcctgtcggggaccataattaggggtacccccaagactcctaatctcagctgtccactcaaggacacgatctcgcctcgcacgagcccagcctcgggcaagggcagccgaccccggaggatctacgtctcgcccgagggccccctcaagcagcagacacaccttcggctcgcccgaggcccggtcttcgccaagaagcaaccttggccaaatcgccacgacgaccgacctcacttcgccactccactgaccggcctgacaagaagacagcgccgcctgcgccgctccgactgctgtgccactcgacagaggctcggactcggcctcggcaccggaagacgacgaactctgcctcgcccgaccctaaggctcggactcggcctcgaccccggaagacgacgagctccgcctcgcccgaccccagggctcagattcgacctcgacctcggaagacagactcgacctcgacctcggaggagcctccgcctcgccctacccagggctcggaccgaccacgtcacaggaggggccatcattaccctacccctagctagctctggctacggggaacaagaccggcgtcccatctggctcgccccggtaaaacaaataatgatggcgctccgcatgctccatgacgacggcggctctcagccccgttacggaagcaaggagacgtcagcaaggactcgacagccccgacagctgtccttccgcaaggctccagcgctcctccgacgaccacgacgtcacacgaacaggggaccccccggggtcgaaacgccgacagttggcgcgccaggtaggtgcctgctgcgtgttgacaaacaacttcccgtcaagatctag

SEQ ID NO: 40578 - DNA, 696 bp, Zea mays
  Peptide Sequence Number=SeqID_83953
atgaccaaagaccttaagctccttgatgagacaaagaattcagaagttaggaaggatggaataaaaggaacatacagagtggatgttgacattcctgctaatgattggataaacgtcaccaagttctatgatgttctaattttcaacactggacactggtgggatagatataaattcccaaaagacactccccttgttttctacaaagggggaaagccgattgaacctccacttgacatgcacaacggactgaaagtagtcctgaaaagtattgcttcttacatcgaaagggaggttcctaggaaaacactgaagctgtggcgcacgcagtcacctaggcacttctatggaggtgagtgggatcacaatggcagctgtgtatctgatagacgtcttgaagagcatgagctcaattcttggtttgatccccagtttgggggagtgaacaaagaagcgagaaccgtgaatttagcaattcaggaagccctggctggcacggaaatccagttgctcaacctcacttacatgagcgagttccgtgctgacgcccatccagctatctggctcggcaagaaggacgcggtggctgtctatggacaggactgcatgcattggtgcctgcctggcgtgccggacacttgggtcgacatcttggctgcacagatcatgcatcacttcaagcaggagaaaggctga

SEQ ID NO: 40579 - DNA, 354 bp, Zea mays
  Peptide Sequence Number=SeqID_83954
atggcggcgtggagaggcggcgggcgggcgagggcggcgtggagaggcggcgggcgggcggccgggagaggcggcgggcgtggcggcggtgaggcagagggagaagagaaaggagaaggaaaggagaaggaagaagaaagccggccgggcggccgagagacgaggagagggaagggggctacacagggggagacggtcgagccggccgctggccgcacggcggggcgcgggacagctgaaccggccgggccggccgccatcggggacgggaggggggtcgtgccaggaggcgagaacgcaggaggagggggccccgccaccggggatggtgaggggacggagaggaaggcctag

SEQ ID NO: 40580 - DNA, 99 bp, Zea mays
  Peptide Sequence Number=SeqID_83955
atggcgaaggtagctgttcaagttcttcttgacgaaggtgattgcaaccttgctgatggagagtatgtgttgattcaggagcaagggactgagcaatga

SEQ ID NO: 40581 - DNA, 381 bp, Zea mays
  Peptide Sequence Number=SeqID_83956
atgtcaggacgatacacaatcccatccaaagtgaagacagaggcaatcacaaccaagggctccaacacacttcctagtcaactgggatgtgacaaagctccttcagaccaccagccccaagaggcagagggggatgaagcttcggaggaagatttaactcacaaccaagaagccattttcacaacctacagttttagtagcttcggcaagccatctccagctgcatgggccttagcacaaccactggtcatggctccaacttcgtccaacaaccagcagcctaaagggcagcgccaaattcagcaacaacgtgatgcaagagaagagtctgaagctcggacagttaatagcactgttcaagtgtcgaggcacatctactga

SEQ ID NO: 40582 - DNA, 156 bp, Zea mays
  Peptide Sequence Number=SeqID_83957
atggccgacggggataacgtattcccgtcggcggccgacgggaataaccgttctctggaggacatggttgctggagtgacttggtcgtccatcttgccaccgggctggacagtcgagtgggaccctaccttggctgaggaggagcacgaggagtga

SEQ ID NO: 40583 - DNA, 603 bp, Zea mays
  Peptide Sequence Number=SeqID_83958
atggcttggttggccggtctatggtggtgggtgctcgggcggctgctggcacgccctgcagctatatcccgatatatccttttgtggctgctgaaaaatgtaaggataaatggcttatcccgctattttaaacactggttgcagcacacgccatcccaggtacagtgtgacgacgccgacaccgggttccagcccacgagcttgcccaaggggtcgaccaacgacgccttgatggcaagcaacgtcgtggactcgtcattgtcggtggtgttgcagacgataatgcagcacaggagcagcgccaaggagaaggataaggggaagaacaggctattacaccgagtccgactccagttattacacatttcattgaggactacaaaaaatctggagaatacacaggctgcaattgagtacattcattctttatcaagggcacagcctgctcgttctctcaatggtactggcctttgtcctgctagtagatcacttagcacccatgccgccactacgtcaagcacaccacagttgaaagcacaccacgtcaagcacccaggccgccactacgtcaagcaaaacagaagacgagaagaactgatgtag

SEQ ID NO: 40584 - DNA, 852 bp, Zea mays
  Peptide Sequence Number=SeqID_83959
atgtggtcgttggaagtctgttgtcgcatggcacaccggacagtccggtacgccaccggacactgtccgactgtccagtgcgccaactgcgcgtgctctgtcctcttcgcgcgcaggcgcgcattaaatgcgttgcagtcgaccgttgcgcgcgaacgtcgagtgccctggtgcaccggacattgtccggtggtgcaccggacactgtccggtggcacaccggacaatccggtgcgccagaccaaggcgattgctcttcatggactaaccaccttctgtggtttccaccccttggagctatccactcaacccattggtttgttccccgcggagaaggaggacgacccaatgtggaaggaccgagtggagcacgccaaggatatatgggctatctacccaggtcagactactcacttgacggtgcggtgcatgaatgccctgtatcgtctgcaagtgatgcgaggagaggcaatgtctcatctaatggcattgttggaggctaccaagatcaccttggataacagggaggaacttgtggtagacttgtccactgagatggtggaaaaagacttgcaagtggaacaattgtcaaatgagatccaagagcttgaggagctagtgggaaccagggaggacaccattgaggttctcgaggatcagctaatcaacactcagcagcagcttgcggaggctaaccagcatctggatatgcaccaccaggagatccaggacatggaggccaacgaggatgtcaacatcgagggaggagaggagcctgcctccagcttggacactgctggctcagagagaccaccttcccctgagtcgagtgttgcctcgtttgctcactag

SEQ ID NO: 40585 - DNA, 399 bp, Zea mays
  Peptide Sequence Number=SeqID_83960
atgaagctgtggaaggagacttccaggagttccaagactacgacgagttctaggtgtgggttagcggcaacccctagtcggctgcctgtgaaggccgcgttatctacgtttcttttccgcactttgatttattgtgatgttgatgttggtgccaccttccaccagcaccttcttaacccggctttcccaaatcacagggtcgacaagcagcaggtacttgctggggtgattgaatttaagccattgattagctcggatgaaggatatggtgtgctccaaccatcgtatagctcggacgaaaaccggatctttggacccccgatagaagtcttcgatcacagctgtatcagcaacctcaaggatacagttcctcgttgtttgaaatcttctaaggaatga

SEQ ID NO: 40586 - DNA, 213 bp, Zea mays
  Peptide Sequence Number=SeqID_83961
atggcaaagagacgcgcccagacaaccggtggcgtaggagacgctcgcaccgagcgtgggcaggcgggccttacgggcgccgggcgctgtggcttcgcgccgccgtttcctagccggttgactgccgccgggcgtctccacggcacgcacgggatcttcacggcgggtgcgggcagttcagttgaattcaccgtctcggttgtgcacctttaa

SEQ ID NO: 40587 - DNA, 537 bp, Zea mays
  Peptide Sequence Number=SeqID_83962
atgcagttcaatccaagggcacgtgaagcttcacagggtgctatggagtctacccgtgcaaggaatcgaagaaaggctcaccgtggaggtcggtccacgctcgtcgatggtcgggtgaagtccggtgaccttgatcagacgtctccggcgaggcagagctcgattcctcgctctgcgagcttcaccgaggcacgtagagtctcttccgagggttggacagggcgggagatggctcagtttgccggtctacggtggcgggtgatcgggcggccgctggcaagctatatgcagggcaaactccggcgatctcatgctccggttttggggctccctcccctccactcaacacatgtgataacaattcatggttacaagtatggagtcagggccttggtaacacctggggtgttacaaccctccccccttaaaggaatctcgtcccgagatttgggtagggatcctttagaggggtccaagaagattcaaaagggcaggtgggggtggggttttggattacgtaccgactcctttgggtag

SEQ ID NO: 40588 - DNA, 801 bp, Zea mays
  Peptide Sequence Number=SeqID_83963
atgaactcgtcactctcaggaaaaggagaaggcgccgcggctataaatcaccggactgtccagtggtgcaccggactgtccgggcgagaggctccaacttgtggagattcctcgcaaatgggaagagaactcaaaaagaaaaaactgtggatcacctattcacccccctctaggtgctctcaactaccccaactcattcagggtgggggaagaagagaaaacaaaggcagtcaaaggttacaaccaagcgacggaggatctccattgttgaaggagagttttgaggcagaggaggttgttgagttgtctattattgatgaaactcctcttgcaaaaatggaggtggagctaaagaagatgtcaagtccaatgctttcagtggaaacctcgaagaaaaatatgactaaggagatcggtgaaaccaaaactgctccgaagacttcggaggagaaggtcgccaccacgataatggcaacagaagatgctagtttgtgtcaagcgatcacaacaatggtgataactgaagagctgcccacaagcatgtcgttagcagcagaggaagctaaagctaaggtgctgcttgcgccgccagaattggtgaaatccaagggtgatgctcttgagattattcctggagataataaaggcaaaaatttcatggaggctgaagagccaaagccgaaggacgacccaaagctgaagattgcactagccgccatcaatcaagtggagaaaaccgtggacgaagttgttctcaagatatgtgaagacatttatgatgaagtcatgaaggaaggttga

SEQ ID NO: 40589 - DNA, 108 bp, Zea mays
  Peptide Sequence Number=SeqID_83964
atgggtgagttctcatgtgacaaatggcttgaggctgttgagggcaaccgtaatgaagtccttggaaactttaataagaaagaaggatcacctattcaccccctctag

SEQ ID NO: 40590 - DNA, 159 bp, Zea mays
  Peptide Sequence Number=SeqID_83965
atggagaccatgaatgaacttggtggcttagatcagaatgccctttccgaggaagaccagaagcagttggcaaagagtgagaggtttgctattagcctatccaaagatatgttgcgtcccgttgcaacgtacgggcattattgtgtcctattgaaatga

SEQ ID NO: 40591 - DNA, 312 bp, Zea mays
  Peptide Sequence Number=SeqID_83966
atgaccgcggacatagggctcgccacagttgtagcacaacccttggtgtcggtgctccatctgtttggtcgggggccaacacatatgatgggattggggatgatggcgctggcattggtgccatcgggaaggccctgcatggttgccatggatcgggctaggtcctggactgtggtggctaaggtttcaagtgtgagggggtgtagaagaggatggtggtataaacatcatggtggtgtgtggcaatgggacggtggaggccgatggatgtggcgggtgggtggaagatggaggatcgctggacatctctga

SEQ ID NO: 40592 - DNA, 318 bp, Zea mays
  Peptide Sequence Number=SeqID_83967
atgacgcccacccacgcgcccagctcccttcttagagccccgccagtgccctgcgcacaccctcacctcatttcgcgtagcttcaccccctctcgcgctctgcccacgctgccagccgttgccggagaccagcgcctgcgttcccggccatccagctcgccggagactactccaagcctccccgagctccgccccgaggtgagacacccgtccccgtgcccaatttcccttattgcgccctgtgctcggccaatttcgccttcgccggtgctcggccgcatcggtccgccatgctcgcgtggtggccagccgatttag

SEQ ID NO: 40593 - DNA, 177 bp, Zea mays
  Peptide Sequence Number=SeqID_83968
atgagggtggaatgggatgcccttagccgaataattagaggaactggggtggcaatgagattgatggttcttggtattggctctggtaatggttgtcagcattgcaaccactgcttaggagaggatgaagctgtggaaggagactttcaggagttccaagattacgacgagttctag

SEQ ID NO: 40594 - DNA, 402 bp, Zea mays
  Peptide Sequence Number=SeqID_83969
atggggaccggggcgcggacaccagcgcgcggggccgaggcgcgcggcgcggccgccagcgtgcggctagggcacgggggcgtgcgggctcaccggggccggggcaggcgcggtcgaggaggaggggctcgccggggaggggccgaggccgagtgcgggaacgccgggggcggggggctcgccggggccggggcaggcgcagccgaggggcttgcaggggagggcgcgcgggcgcgggtagggagagggagggcttgtcaggggggaagggcgaggcgggcgcggtcgaggggggactcgccggggaaggggcacggccggggggactcgccggggcgcgagggcgcggctcgccggggcggcgcggggcacgtgggccgaggcagtgcggggcgcgagtag

SEQ ID NO: 40595 - DNA, 432 bp, Zea mays
  Peptide Sequence Number=SeqID_83970
atggacaacgatccatggggatgcgttgtctacgagacggaaattggaataaggattaagctagtgcttttggcaaaacaaacccctcagccaaacagctacatgtctagaggtagaggagtagactcctcacaccaggagatacttcagggagcaggttacacgacgcctccccagtacacggtgcagctgtttgagaagcaccgggtgcctcgctgtagggtgaggatgaccctggagcctcatcccctacagccaggctggcattcgttggactctgagtctttcggataccgggctgaggacactatcgaggccattgctctccacgggctgaccaccttctgtggttttcaccccttggagctgtccactcaccccattggtttgttccccacggagaaggaggacgacccaatgtggaaggattga

SEQ ID NO: 40596 - DNA, 387 bp, Zea mays
  Peptide Sequence Number=SeqID_83971
atgtctcagctaatggcattgttggaggctaccaagatcaccctagacaacagagaggaactggtggtagacctatccactgagatggtggaaaaggacctacaggtggaacagatggccaatcagatccaggagcttgaggagctagtgggagccagggagaacaccattaaggttctcgaggatcagctaatcaacactcagcagcaacttgaggaagctaaccaacatttggatatgcaccaccaggagatccaggacatggaggccaacgaggatgtcgacatcgagggaggagaggagccggagcctgcatccagcttggacactgctagctcagggagaccaccttcccctgagtcaagcattgcctcgtttatccattga

SEQ ID NO: 40597 - DNA, 200 bp, Zea mays
  Peptide Sequence Number=SeqID_83972
atggcgttggccggccggaattggctcgtcggggtgcggcgagagctgttcctcgtcgtggaccttgagaacgaagaagagagtgaagtgactgaagagaagacaccaccaccacctttggaatctcgggcaaggacttggctctacttcgacatctgcgagtccgaacctgactcacctgtgaacaaaggcaagccacg

SEQ ID NO: 40598 - DNA, 315 bp, Zea mays
  Peptide Sequence Number=SeqID_83973
atggcggtggcaggcgggcggaagcagcggtcacgtcgtcagccaagctcacgtcccctcatgggacagcgagagaaccctctcccacgggaccgggagaggggataccccgaaagggatccttctccgcgaaggaaatgggccccgagcccccctactgatcagaggttcgaaggctggcccctcggaggggttcaacagacgcctcagagcgctcgggctccgcgcccactactggtcagaggttcaaaggccggcccctcgaaagggctcaacgaccgcctcaggccactcgggctccgcgcccactactga

SEQ ID NO: 40599 - DNA, 702 bp, Zea mays
  Peptide Sequence Number=SeqID_83974
atgaacaagacaccggcactcaaggtgccattacaaacggaactccggttccacctccgcaggcacgaacaaccccacacgattggagggcctgcggagcaacagaaggccgacgggtggctcgccgccgcccgctccaacagcgacaatgacgacttctgctccgaggggctgaacagcagcagcgatgacctcagggcggatgctgctgccataaggcccttgcccacatcctcactcgagaggcgaggacgaggagaaggccgtagagttggatgtcagtccgtgggtggcaccggctatctcgtcggtggagaaacctcttccggctgccgtggcggaaggggctggtggtcaccgtcctgggtgaccaccggtgaggggatgcggccgggctgcctgatgaaaatccttgaagccgaacgatggctgaaagccatcatgggattagtattctccaacacgctccaaggtcctccccatacgacacgggggctgggtcccacgcgtcatgcaagctggcccagggcagaagaagccaaaccgccgcgcgcggtgcgcgcaactgcccagcggttacaagcattcctccactttcgcccagaccagcgggtgaaagggcggacaaccatgcagtcggcatgcaaccgcgccaagtgggcgcacccctttgactccaacgcgtccagcatggaggcctag

SEQ ID NO: 40600 - DNA, 363 bp, Zea mays
  Peptide Sequence Number=SeqID_83975
atggctcaccggagagcttggtccacgcgcgcaggcgggcgaccgaagtccgatgaagtcgatctcgggcttccggtgaagtccggcctggtccgagggcttggaaagctttacgggccactggcggagctagccgaagcactggctcgacttgggggtggctggagtgggctggccacggtggccgaagctctggcggcaatggcgggcggaaaagagctcaccggagctaaggaggggtggctggccggtgatgccctagcggcgaacgccagtgcgcgctctggcgcctggcacagcgtcgagcacgaggcagcgcagagagaggtcgagttcaagcgcggattggccccaaatctttga

SEQ ID NO: 40601 - DNA, 231 bp, Zea mays
  Peptide Sequence Number=SeqID_83976
atggcgttggccggccggaattggctcgtcggggtgcggcgagagctgttcctcgtcgtggaccttgagaacgaagaagagagtgaagtgactgaagagaagacaccaccaccacctttggaatctcgggcaaggacttggctctacttcgacatctgcgagtccgaacctgactcacctgtgaacaaaggcaagccccggtgcatgcaacccctttccttgagtttttaa

SEQ ID NO: 40602 - DNA, 726 bp, Zea mays
  Peptide Sequence Number=SeqID_83977
gagttggagagtttctacgagattttggtgttccagtggtcctgtggcgactacttcaagaggtcggatataccgaagcacccaagtaccagtggtcatgcactgttcttagaggacaaccatgttgccttaagtgacccattggtgtatcatcaccaggcccgattaatggaaagcattcctattgggcaggattctgttgaatcggcatctgctcgagttttgatggtcgtgctagagttgcaacttactcgggggcacagtcgtcaaaagtggcaacagttgtacactgggagttatgcagcatttaagatgatggaaatggccaagaacagtgcttgtactcaagcacaagaacgacttgaggaaacgaaggttcaagcggaacaggttattggactaaagcatcaggtgacagaacttcagatgcaacaccaagctgatcagaatcacattaaggagcttgagcatcagctaactaatgctcattctaaattaaaaattttgagtaagcaacaagaagaaatttgtctgtatgctgttgctgttagagaagaccttaaggaaaccatgagcttcataagccatctggatcaggcgatcaaagaattgaatcgtgctcatcccatggaatttcaagtagcacaacggcttgtcaatcatctgcagcaatcagtgcataggctcaatgctgccgttgatcctactcctgcatcggtggactaa

SEQ ID NO: 40603 - DNA, 282 bp, Zea mays
  Peptide Sequence Number=SeqID_83978
atggcgatctggcgggttcagccatggccttcacaatggcgcaagggcactagagggcgcagaccacgacggggcgggctaactgcggcgctggatagctccggcgagcaatcacgcgagcaacagagcagggatgaccaaatcaagggtacaggcgggctgctcaccttgggggaagtgctggagtcgcgaagcaacagtggtggcgtagggacgcgacggggcgacggtggcggcgctctggctgcgcaagaaccgctctgggttttcaattcaaattga

SEQ ID NO: 40604 - DNA, 831 bp, Zea mays
  Peptide Sequence Number=SeqID_83979
atgaattcacccacccccgccagtggaggagacactcctttcagttctgacttcctttctcacgatggctttccttccatcttgtgggaagtgcttaactccgccggttaccctacgccccctttgtacatggtgcagttgtatgaggagcatcgggtaccttgttgtcgggtctggctgacgttggaggctcatccccttcagccgggttggcgttctcttgattccgagaccattggattcaggacggacgacaccattgaagcggcagccatgaagactcttacgactttctgtggctaccatcccctggaaatggtgatgcaccccttgggactcttccttgctgagaagaaggatgaccccatgtggtgtaaccgcgtgagccatttgaaggatgtatgggcaatgtatcctgacttggttgggagggtcactgttcagtgcatgagtgcgctgtaccgccttcaggcccttcagagcgacgctatggcacaccttgctaacatcgctcaaaccaccaagctcactctcgatagccgagaagattttgtggtcgatttatcctctgagttggtagagaaagatctgcagagggaactcgaagaagcaaatgaccacctggacatgcaccacttggagatggaggccaatgaagccggaagcgagggagaagaggctcccgaggagctaggaccagcccctggtgccaatgggactacctccgcgatgcctccctcacccatggcagctaggcagcgtcgcaggcacaacgagcaggttcccccgccacctcctccagctcccacagtgcaggagctgatggcctag

SEQ ID NO: 40605 - DNA, 411 bp, Zea mays
  Peptide Sequence Number=SeqID_83980
atgaactcccttgatggccatcaatggagggagagagaaggggaaacgggagaggaagaggcggcggtttccggctcggtgcacagcgcaggggcttcggttggcgcgatcggtggctcgggtcggactggcagcggggtcgcggcagggacgtcgggcgtcggcacggtcgggtcgctgcctggtgcggcgttcggctggaagggagagagcagggaagagaggagacgaacgagacgtggttgtgatggctccaccgaatacgaacaggtgctgcagcaaggaggcgaggagacgtgcgtggcgactgttcacatggctagcagattggcgtacagaagacgcgaacagggtgttacaaaatctacccctcttaaaaagaatctcgtcctcgagattaagaaaggctag

SEQ ID NO: 40606 - DNA, 465 bp, Zea mays
  Peptide Sequence Number=SeqID_83981
atgcctccctgttgtgctgctcgccgcgtggtgttggtacacgcgtgctgctgcaccgtcctttgcattgctctcgtccccctgtaccgaagaccaacactgtgcagccatctcaccgtcgtcttcctaccgcgttgctgggattcctccgcatctacgacgtgctgctacaccgccgtgtccaccgctctgctcacgtcgagcactgtcaaccctcgccagatttctcagtttgccagtgctgtgccgatctcctacgccagcgtcagttgtgctgttgctcgcttggccgtcattcttcgcctcgtcgaaatctgccatgcctcgttgtcacctgtgcgcctgctggtgcctagcatccagctcgtcgaagccatgtacgagttccacgtcaagaccttctactcccttacgatcgaagctgcaactgcttgctgtgcgacgaacacgagattaagaaggtga

SEQ ID NO: 40607 - DNA, 271 bp, Zea mays
  Peptide Sequence Number=SeqID_83982
ggtgcgacttctggcggcgctcggcttcgtgggcgcgggcgtcgcggcaggggcgctgggacagacgcgtggctctgggcgcgtcggggaggcgaggctcagtcgcctgggcgcgactgacgacggcttctgcgggctcctggcggctgctgacacgcagcaacttgcaagtagctcaagcggcatgggcggcggctacacggttgaaggagcagaggagacgctggaaattgaagaaacatactgccaaatgggacccaccactatgtga

SEQ ID NO: 40608 - DNA, 492 bp, Zea mays
  Peptide Sequence Number=SeqID_83983
atgttccccttccccgtcccgtgccccgacggtgctcgccgtgcccggttcccgcgcccggcgagcccctccccacgcgcgcctgcaccaggcgagccctcccctcgcgctcccgcaccctgcgagcccctccccatgcgcgccctgccccggcggcggctcggccgcgccacgccctcctcgacgagtcccctcctcgggcccggcgagccccttccccaccgcggccccgccccggcgagccctccccgacaccacgccccatgccgcgcgccggtggccgcgcctggcctcgtgccccgcaccctggccgtgcgccggcggctgtgctgcgcgccccgcgccccggccccgcgcgccagtggcctcgccctcgaacgcgcgccgtcggccgcgtgccccagccgtgccccggcagcttcgcgccacgcgcgcctgcacggttcgtgtgccctcggcacgcgcagcgtgctctcgcgcgtgcgaccgtag

SEQ ID NO: 40609 - DNA, 123 bp, Zea mays
  Peptide Sequence Number=SeqID_83984
atgagattgatggtttttggtattgaccctagtaatggttgtcaacattgcaaccactgctcaggagaagatgaaggcatggaaggagacttccaggagttccaagattacgacgagttctag

SEQ ID NO: 40610 - DNA, 138 bp, Zea mays
  Peptide Sequence Number=SeqID_83985
atggagagtcatgatctccgggcagaatgggaatcacggcttgtgggttgcctttggtgcaatctatgctcaggaaaagaagaaggcgccgaagcggatctccaggagttccaggacttcgacgagttcgaggattag

SEQ ID NO: 40611 - DNA, 486 bp, Zea mays
  Peptide Sequence Number=SeqID_83986
atggagactcgccggccgaaaagggccacaagtcgcgcctcaacgcaggcaggccgtcgagccagacgagcgcgcgggcagaggccgggacgcgggcggttcgggctgagatgggcgcgagtgagcaagaaaactgctctgtgggctctcttcggggaagataaacaggggctcggcgagatcgtggcggcggtttccatttgcaagccatcagtggtagacgggcagcagcgcatcgcagccagcggccaggagcagcggcaaggcgtggcaagcgtgctgggctgcggcgctgcaccgcggctaggccacgcagagcgcagctgcgcagggacgggccaggggaagcgacgcgctgggctgcgctactgctcgcgcacgagctgggtcacggaggcggggcacgctggtgggccgcatgggggaggcaggggcgctgctgggcctcaggaaggaaaagggggggacgaggtgggctggcgctag

SEQ ID NO: 40612 - DNA, 1482 bp, Zea mays
  Peptide Sequence Number=SeqID_83987
atggcgtcgcatctgtcctacctggcctccacggtctccgcctctgtcgccgcgtccatcgaggaggaggacgcctcaaccttccccgtttgtatcacatacaagggggcgccgagttctctcctcgacgacatagaggcttatctgaaccccaactctagagagctactcgcggtcgcggaccctgcgctacggctcaccagatacttcgccgctgtgaagttgttgctgccacacgacataggcggggtgggatgcttagcatgcgggccagtgggacaatgttctcctcgtccatcttcgggacgatatattcggtgctctacgttcggcggcggcagcccggacgagcacaacctgcacaccggcgggcaggtcgtgaaggcacccaccatcgagcggaacctgtcgtgcaacctggaggagctgtacaagggcatcaccaagaagttgaagatttctagggaaattgttgatgcaagtggatggaccagtccctgtcagatttatgcttggttaatttctgctattggattcaagttgaacttgcatcaatgtgtagatcacctagttgaattgattgatttgtatttggccatttgggtgtgcaactgggcctcggcttctccagatgtggtgggtcaacgacagaggcaccctcttgctcccatcggcggtagcggcgatggcacctccttccatctgcaacaacccatggaggccgacgacggtgcatctggggtttggaacgacagtcgcgtggatgcccctacccctcacggctgtgcggtccaccctggctccctccctggatgcagctggcgctcgctgcgggtgccggtggacaagcgatcgctcgagatggcggtggaggtggatgtgaggtgggagcccatgggggcgcaggagtactacgactactggcgggccatgtacagcgcccgcagcaacaggggttatttcaaattggattcatacttggatcctttgtttatgtcaataattaaagatcctgatctatggtgcaaggagatgggaaaatttgctcaagctcaaaagggatttaattatgctagcaactacaattatcgtggagttggtattgaaggacacccgattatggtggttgttggtgcacacttccttcttcaatgccttgatcttgaatggtttgttctacatgtagtgaggccaagagtagcaaaatttgtagagctagagaaccctgttgagcgtgatttaccaattgcaacacaacttctatctagatctaatggacaaaaatatctagttacacacttgtacatgatggttgtttacaaattagtcattgacatttctattttgatgaagggtggaggccattatcagatccttgtccacatctgggcttctgttgacaagactacgagtgtcgtccacctctccaattccacccttagcttcaatgtgggaagggatgacacagatctttcccgctag

SEQ ID NO: 40613 - DNA, 210 bp, Zea mays
  Peptide Sequence Number=SeqID_83988
atggagctgctcatggaattggtcctcggctacagtaaggtactaagagaacataattatattgcatctgagcatctgttccttggactgcttcgtgagggtaaaggcaagaggaggtctctaatcacttctaaagtaggctacatcagtgagacattgcatcccataataaaagaggtatttgaggttcagctgctaatggtcctgtga

SEQ ID NO: 40614 - DNA, 414 bp, Zea mays
  Peptide Sequence Number=SeqID_83989
atggcgtaccagacagtgtccggtgcaccagggccgtacaatccgaaccagtcactctcgggaattccagggatcaagtccccatctgccttcgacctcgctacgctgcacgccatatcttgctccgacgatgacctcctcgaggtgccgcccccgcctaggaggccgccgcctggcccgcctccctccctcgggctccatcttgcactgccaatgacctccccggcggtgtccctctatgctcctcaacagtctgctcccctcccatgccacctcctcccgctcagccgtggtgtcccgctcctagaggtcgtcaccttttggctcgctcgtcatgtgctcaaccaaatgagagagcagaccataccaaggttaatatttattcttggaatagcttattggtgtccacaataa

SEQ ID NO: 40615 - DNA, 150 bp, Zea mays
  Peptide Sequence Number=SeqID_83990
atggggacaacctggggtggggtggtttgtaaagcaaggctaagggcgtctcatttcaccctcatggttgcactgttatcccgggttgtcactccccaaataggtccttacggagaggcactcaggaaacagcctgagcccctaaagtaa

SEQ ID NO: 40616 - DNA, 423 bp, Zea mays
  Peptide Sequence Number=SeqID_83991
atgccccctacaccaccacagggcatcccggctgctggaggagaccctgacggagacggagacgatgacgacgtcagtggcagtgcgagccatggcatggagcgctcaaaggagctagaaccggaggggtggatcgctagacccttcactcgtgacgctgctcgcgggtgtcacttccacgacgctcttgataccctgttgcgttgggcattcgaccgacacacttggtccattgagtaccgttgtgtagtctaccagcatcgtcgcgggttatacccggaccaatgggaggctacttgcttggtgcgccatccagacgatgatctccgagatgcagaggccttctcagagccctattctataactgagagggacactgccgaggcagccatgcaagatgcagcacgacaggcactttcttag

SEQ ID NO: 40617 - DNA, 441 bp, Zea mays
  Peptide Sequence Number=SeqID_83992
atggcagatttcgacgaggcgaagaatgacgaccaagcgagcaacagcacgactgacgctggcgtaggagatcggcacagcactggcaaactgcgaaatctggcgagggttgacagtgctcgacgggcactgagtattagtggagagggttgcgcggggctcggtcctggcgctgcttggcgcgggcgtgtcgggctcggccgtgtcctggcgctggcagggtgcgacttctggcggcgctcggcttcgtgggcgcgggcgtcgcggcaggggcgctgggacagacgcgtggtttctagcgagcggcttgaggcgcggtcggctcggggtcttgcgggtgtcgggctcgacgcgcaggctctgggcgcgtcagggaggcgaggcttagtcgcctgggcgcgactgacgacggcttctgcgggctcctggcggctgctgtga

SEQ ID NO: 40618 - DNA, 414 bp, Zea mays
  Peptide Sequence Number=SeqID_83993
atgaacacatgtgaccaggcaaacagcgatgtccggtccaacccggaacgcgagcagggcagacccggggcgagcagggaggagcgaccgagcggagctcgcagctgcgcgcagggagcagagcgcgcgcaggggagcagggagatccgggcaccatgtggagctcggccgaaggggcgacctgggactgggagacgccatggcgcggagcaggaaggagcgctgggcatcgagcagggacgcgcgcgagagatcgaggccgagcagagagagcagcctggcagcgcggcggcccgcatccgcggcgagcaggctgggcaccgagcaccggatccgagccaggggcgagcaccagagatcagcggcaactggaagcggtggacacgacctgtagaggagcgccggcgagcttga

SEQ ID NO: 40619 - DNA, 378 bp, Zea mays
  Peptide Sequence Number=SeqID_83994
atggagtggagcgagtttgagaaaatttcagaatttgaatttttgggatgctacaagtactaccctcgccgttcgattggcagtgccggaggtgtgattgtctcgcaagttggtgagggcattcccaggctgagcagcatggtcaacctggccgccgtgctcaacacagagttggaccacgcccttaacaagttgggcaagatgtctgagaacaggcgcagaggtgcaaggcgtgatcagccggaatatcaggcaccccaagaggatgcagctcagcagcaacaattgccactgcgacccccaataacagtcaagcagatgttcatgatgcaaactcaggcagttcagacaattggtcagaccttagcagtgatgtag

SEQ ID NO: 40620 - DNA, 345 bp, Zea mays
  Peptide Sequence Number=SeqID_83995
atggccaagctcgaggcgagcagggcgccgagcaccggagaggatggcgaccaggtggagagctcgcagccatggcagaggaataagggagcttggcttgctgttgtcgtgagggagagggagaggaggagggagaggaggaagccaagggtatccatttataggcgagggagcagcaagggggcggactgcagccatggcagacgccagctctgtgcattggtgggcatgggtggctgtcaggctctgcagtttttcttatggacgaagcaacgaacacacagtgggcggccgttttcgtcgttttctccttggatcggatcaaggttctacaatttttattaa

SEQ ID NO: 40621 - DNA, 408 bp, Zea mays
  Peptide Sequence Number=SeqID_83996
atgcctccacctccgcagatcacgcctaccttgccccgcccgcgacagcctgcaagcattaatgaagttatctgttttgcaataactatgtggagcagtttgatcatcactgtccatgggtcggccgcatcgctggcagtgcttggggagaagacaacattgatgtctccagatgttcttgtagcccgtggtgtgccctgctgtaggttagtactgtatcctggagagtttgtggtgacattcccaagggcataccacattgggtttagtcatggtgataactccagtgcacaagaatccgctgaacagggtggcgttgagctgtatgcagaggtgaacaaccatgggctctgcgctattgcccaggctgagtcgtctgctataaggttctcggtggactcgccatga

SEQ ID NO: 40622 - DNA, 1068 bp, Zea mays
  Peptide Sequence Number=SeqID_83997
atggccggaatcgcccggtccacgcgtgcaggcgggtgtcctcgtcggcggcgagtataccggccaaaccacggcgaactggttcaatctgatggcatggtgagcttcacggggtcacacagcgactgtgtgcacaaggaatcgaaggatggtggagtggtttacccggtccacgtactccggcggggtcgagagctccggcgagcgtggactggcttctccggcgaagtaaactccgattccttgctcggggagcctcacggaggagatagagtccgtgaggagctgctcccctgtgcttcccctggaggcgccccagcttctagagtagctgctggaggagacctagacgacggaggtggcgacgacagctcgagccacgacaccgacttctctactgaccatgagccagaaggatgggttgctcgacccatcgctcgcgacgctgctcgcgggtgtcacttccatgatgcgctcgacaccctgctacgtcgggcacttaaccggcgtacctggtccatcgagtatcgctgtgtggtctaccagcatagtcgcggggtctacccggaccgctgggaggcaacctgcttggtgtgccgcccagagaacagtctccagggtgcagaggcctgctcagagcactattctatctctgagcgggactcagctgaggtggccatgcaagatgctgcacggcgtgcgctttcgcactactgctcggttctctgtggggtagctgacggtcttgacctgaagtattacccccgccgtccatctggcagcacaggaggcgtgattgtttcacctgtcggtgagaacaatcctaggttgagcagcacagtcaacctagccgccgtgctaaacacggagctggaccatgcattagacgagctgagtagggctcgtgctgagatcgccctgctgtgggctaagcgcgcggaacgtcgtcacctggacgatggttcccccgctcccgttgggactcagcacccgtaccgctcacctcggcgtggacaccagccttatggcaatcccgactgcaagaccaagataaatctagaaccatag

SEQ ID NO: 40623 - DNA, 819 bp, Zea mays
  Peptide Sequence Number=SeqID_83998
atgtcttcttcctccctcatgcgccgcatctttccaccttccaagcccccggatgggggatgcccgccgtcttttcgcctcatcgttggtggaacgcaactccgtgggagttggtacctttcagccatcgttcggcttcaaggattttcatcagccagcccggccgcacccctccaccggcggtcacccaggatggtgacctccggcttgatggtgggggaaaacgaaccgggctgcggcctctgcccctccctcagcctcaaggattttcatcaccagggctggggaggggagtatgccgagttgagcgtgcctggctttcggacgcgagcggcttcggagccgctcgcggcgccgacgtctgccacgacagctggaagaggttctttcggcggcgtgatagccaaggttgggccacggaccgacccccaactctacggccttctgcccgtccttgcctctcgagttttagggcatgggcgggggcctcctggcagcagcatccgccctgaggtcatcactgctgctgttcggccccccgtggcagaagtcttcatcgtcaccgctgctggggtgggcgacgacgagccgctcgtcggtcttctgtcgctccgcaggcctacccccatggagtggggttactcgtctgttgattatctgaaccgcttcaccaagcgtgagtcgccccgtgtcaaggtgacgagtgaggagtccctcggctcggtcggccttgctgtccgaggctcctctagctcagttaaagggacccctcggccgctctttgatgagccgaggccaggggtagcgatatcagcatga

SEQ ID NO: 40624 - DNA, 1224 bp, Zea mays
  Peptide Sequence Number=SeqID_83999
atggcgcttcctgtcgacgtggctggcctgtgccctaggttgggcgacgtggaggctcctccgaagccggggtcgagtctgtcttccatggccgaggccgagtccgagcccctgggtcgggcgaggcggaggtcgtcggcagaggctgagtccgagcccctgggtcgggcgaggcggaggtcgtcagcagaggccgagtccgagcccctgggtcgggcgaggtggaggtcgtcagtagaggccgagtccgagcccttgggtcaggcgaggcggaggtcgtccgcagaggccgagtccgagcccctgggtcgggcgaggtggagttcgtcgtcttccggggccttagcccgagtccgagccctgcccgagtccgagccctgggtcgggcggagcggagttcgccgtcttccgaggcttagcccgagtccgagccctgggtcgggcggagcggagttcgccgtcttccggggcttagcccgagtccgagccctgggtcgggcggagcttcctatggcctcgggcaagccggagatgtgtccgccgttgaaggggggcctcgggcgagacggaaaccccttcgggctttatgctgatgggggttaccagctgagaattaggcatcttgagggggaccaacctttctcggttgcatttggttccggtgggtgcgcgcgagcgcacccgccgggtgtagcccccgaggcctcggaggagtggtttcactccttcgaggtcttaatgccttgcgtaatgctttcggctggtctggttgttccctcatgcgagctggccgtagcccgggtgtacggtcggggcccaagttctcgggctggtatgttgacgctgtcaacggttcggtcggagccgggtttgcgagagcagccccgagcctctgcacagggcgagagggcgatcagggacagactcggcttttttacatacgcccctacgtcgcctttccgcaaggaggaggggggagagcgccatgttaccctcgatgggcaccgaatcatggtgtctccggtgagctgcaagcgggtaatccgagtggacgttcgtgccccgttcgttaggggtcggctaggggcccagaggcacgcccaaaagtacctgcgggtgatctgccagacccggtcccctggcgacggggtccgagggctcgatgcctccctccgatgggattccgttacaagatcgctcccgctggtctcggaaatgtcctag

SEQ ID NO: 40625 - DNA, 333 bp, Zea mays
  Peptide Sequence Number=SeqID_84000
atgccaaatgtgacagccactctcgctgtcgtccacctccctcttccacgagacggtaatggaggaggcatcgcccgggacggtggaggagccactgctggtgagcgcaatcagagggaaaaaggtcgagagggcaccaatctggctcctgaggcaagtcgggagctgttcccaggcccgttcaaggccatgcgtgcctatctgtgtgccgagggtaacatggaggacactgtccgccaggctggctggcaagtcgcccccgtagcttcatctccattgaggggattgggaacaagaggaggccacttgacttgggacttcgaaaacttatag

SEQ ID NO: 40626 - DNA, 1410 bp, Zea mays
  Peptide Sequence Number=SeqID_84001
atggcggcagcgtctcagccgccatcgtcagccttgcggatgcacgggtgcggcggcgcggcttctgcgtcgtccgcgcccgtgcgcctcttcacggagtcgcggggtagagtcgtggcgtcgattgggaggggcaggaggcggaggcgcgccatctcgtgctgctcgtctccagacgcagatggccctcgccccgccgcgccaccgacctccgcagcgccttccgacgggtcgatacagctctattcccagatcgagagggtaatcacggaggcggcaaagcagtcccgggaaggctggggttcgactggagattggaccgaagtcgagggatcatgggtgttgagaccgaagtccttggagccatcatttgttgtccactttgttggaggaatttttgtcggagccgctccccagatcacataccgcttcttcctcgagtgtctcgcgaacaggggagctttggtgattgctacaccttatgcgagcggctttgaccatttcttcattgcagatgaagttcaatttaagtttgacaggtgtttgagaaacttggatgagcctgtaaatgatctcccaacgtttggtgttggacattcattgggatctgttatccacatgttgattggatcaagatatgctgtgcagcgaagtggaaatgtactgatgtcctttaacaacaaggaggcaagctctgcgatcccactattttcacctgtaattgttcctatggcacagagttttggccctatattctcccaattggcatcgtatccaacaatccgatttggggcagaagcagctattaagcagcttgagaatctaagcccacctgttgttaagcaacttctacctttacttcaacaacttcctccgttgtatatggacctaataaaagggcgggaggacttcattccaaaaccagaagagacacgccgcctgaatcagaacacagataaaatctgtgaacattatctcaatttatgtctggtgctttacagtgttataaaatcctactatggaatttctcggaatctcttaataaagtttaaagatgatcaaattgatgaaacctctacccttgcacaagtactaagctctgaagcagctattagctcattgcttgatatgtcaattcgatcacttcctggggatcatgggttaccattacaacaggttcttcctgatgttccaccagcaatggctgatgcagtgaaccgcggaggtgaacttctgacaaatctgacaacaggcacaccatgggaggctgttgctaaggaggttggcaccactttgggtactgactcaggcattctacgagcacagatctcaaaagacgttgaaactcttgttgatgtaattgcttcatggacatcttcaaattctggtccaagactacttcgcccatga

SEQ ID NO: 40627 - DNA, 459 bp, Zea mays
  Peptide Sequence Number=SeqID_84002
atggaccttgacgcggctgcagaggaggaggagcgcaagctcgaggactataatgatgttgaggatgctatgttcttcattggtttcagtgagaatgagacccatggagatcctattcagatcgatactgtcgccagctctggaatagggaatggcacaggctccacgagcctgccagagttagtccctgatcctgatgctggtggaaggaactcgaactcaaagaaaaggtccaagtgctggaatgactttgatgaattgactaagattgtgatgccccaaccaccacaaagtggccgttggaaggctgcagtcgcatggcgcaccggacagtccggtgcgccaccggacactgtccagtgcgccagccacgtcagcagaccgttggggttcgaccgttggagctctgtcttgtgggcccgcctggctgtccggtggtgcatcggacaggccctgtag

SEQ ID NO: 40628 - DNA, 1251 bp, Zea mays
  Peptide Sequence Number=SeqID_84003
atgaagcacgtggaccgtcctccgaataatcccaaacgtataacaattcagtcaagccaggagtgtttcagcgttgacattccgtgcgcagaacagtccaatccaagtcaaattgtgggaaatcctccaaatgttgacagtcaaactttgatcaaagaaacaatagaggtggattctgatgacgatgactttatgccagctgttaagaagcgtaatgtttctgaaagccatacaagagttttaagaaaagttgtgacaaagaggataaaagcggaggatctttcccgacagaggctcaatgtcagatgcaacccacaagatgtgattgcaagcattcacatattgaatgacagacaacgaaaggaattaaaaatcacaaaggacactgtgcatcttatccttggtgtaccaaatcatggtggtggaaaaccattggggattgacgaagcagttgcagcaagtaatttgagggcagagcttggtttggctaaagacgagttcaatgtgacattgctacaagatcgtttaaggaaaggggaggatgatgaccttaccatcagatgtttcttccttatcttattcaactgtctgttgtttccaactgctagctggggcataacaaaccatgaagtgcttctgactaaagaaatgcacagtttccacgagaccgattggtgccagcttatatttaatgacctttgtgaagcggcgaagaagtggcgtaaccgaagcaccacaaacaacaaccaaccaaagtgcaagaccaacattttttatgctccgcgccctgcccctactcctcggcccacctttaacatccaacttctatcgatcaaggatatgatgtcaagtaagatcaaccagctccctcctcgtcaccgtactaaattcacagagaaacttgctggatatgacttagaggttgacaaggcatgcttagccataaaagacaaccttaacaaaattgttgagaagcaatatgatatagcagacaactttatagagctgatcgacgaggtactacgtgctgagtctgataatttagaagatgagatagataagccagagcaatcgcgacattcagatgaatcagtagagcttgactgtgttcgttctctgtgggatctactctgttccaaggacatggaccaaagcagggttgtcatagattacagtgaatacagtggaaactgtctcgatgtttttgaatctttctcagaggggaagtgtcttgagaacgtgttcatgtag

SEQ ID NO: 40629 - DNA, 285 bp, Zea mays
  Peptide Sequence Number=SeqID_84004
atggctagagcagctccagccacctccgacgccgacccgcacaccgacgtgaccgccgtgacctccccgacgtcaccgaccaccccaccggagctctactgccgccgcatacaaatatcttattcattgcattcgatagattgcaacctcgctgacggagagtacgtgctcatccctgagcaaggagttgatcgggaaggagtccaggagccagcaccagagcctgccaccgaggatctccccgcagccccagctttggaaggcaagccccagttttatgcataa

SEQ ID NO: 40630 - DNA, 240 bp, Zea mays
  Peptide Sequence Number=SeqID_84005
atggggaagcctgtcccatcactcctcatgctcctcctcagccgaggtatcaaacatttagcaatcaaccactttttccaagtcatcacatttccacttgttactcactgtagcagcatggatcaagcagtctcattagctgcgagaagcagacgattcgaatcgagtttcaaccttgcaagtgaccgcacttgtacccaccataaccgggaatgggagaccacgtctcaggtcgcgtga

SEQ ID NO: 40631 - DNA, 459 bp, Zea mays
  Peptide Sequence Number=SeqID_84006
atgggcaagaacaacaagcgcaagcgtgagccgactcctccatcggaggagtttggtgactcggaatactcagaggaggagttctcctctgagtccgaggggtctccggctcccatccccctgcgtgagtcgtctgatgactcagacgactcccaggggcttgcggcggaggtctggacgtacatccgggccgtcgagcgctccgggctcgagggctcggatgagtctgagttctcctcggacgaggaggactcggacggcggcgaggacgaagatgacgacgacgacgacggcgacggcgacgacgacggcgacgacgacgacggtggcgacggcgacggtgatggcggcaacggcggcggaggtagcggcggcaagggcggcaccaagggcggcagcagcgtgggcagcaccggaggcggcggcggcaagggcagcggcggcagggccagtggctaa

SEQ ID NO: 40632 - DNA, 384 bp, Zea mays
  Peptide Sequence Number=SeqID_84007
atgtccaacgagatccaggagcttgaggagctagtgggaaccagggagaacaccattgaggttctagaggatcagctaatcaacactcagcagcaactcgcagaagctaaccaacatttggatatgcaccaccaggagatccaggacatggaggccaacgaggatgtcgacatcgagggaggagaggagccggagcctgcatccagcttggacactgctggctcagggaggccaccttcccccgagtcaagcgttgcctccgtcagctgccacctcagcattatggtggtggtgaccaccatgagcgtcccccagcagcagccacttatcaggagttcctcagtacgcagcctccgttgttcactcgggctgaggatccgctag

SEQ ID NO: 40633 - DNA, 1224 bp, Zea mays
  Peptide Sequence Number=SeqID_84008
atggtcccgttgttaagctccaagcgtgggatcagcaacgggctgctgcagcggctcagagagatgccccacccccacgtgctccgcctcgtcatgggtggtccccagactacagattcaagaatggaggagaaagcggcggacacgacggcgacagtggcggcggcggcagcagcggcagcggatcaggacggcgcggtgtactgcagcgagcacccgtacccgccaggcgcggcagcggcggccggggcgggcgccggcggcatctgcgccttctgtctgcaggagaagctcggcatgctggtctcgtcgtccaagtccagccccttccacccgccgccgcagcagccggtctccgccgcgtcgccgtcctcgacgacgccgccgccgtccaaccgcgcctcctccgaggcgccgccgccgccactctaccctcccgcggcgtcgcgcaaggtgatgcccgcgcagagcgcgggcggcggcgccggcggcgggctcaagaggagcaagtcggtcgcgccgcggccggaggagccgctgccgccgcccgcggtcacggcggacagcccgcgcaagaagagcttctggtccttcctccacctctcgtcgtcgtcaggcagccacaagggcggcgcgtcctcggcttcggcggccggcggcggcgccgcgaggaggaactccgtgtcggtggcgtcggcctcgtcggcgtcgctcgggggccggctggaggcgatcgtggagccggagagcccgggccgccggagcgagggctcgtcgtcgtcgtcgttcgggcggaaggtggcgcgctcgcgctccgtgggctgcggcagccgcagcttctcgggcgacttcctggagcgcctctccaccggcttcggcgactgcgcgctccggcgcgtcgagtcccaccgcgagcccaagcccaaggccgcgctgggccacctgggcggcggcgaggagcacgagcaggaccaggaccagcaccaccgcatcaagtgcgccggtttcttcggcggcggcctgggcgccgcggccccgccttcgtcatcctactggctctcggcacccgacggcgccagcgccagcgccagcgggagcgcgaggggctccggctcgcggagccaccggagctgggcttgggcgctggcgagccccatgagggcgctcaggccgaccagctcctcgtccagcaagagcatcatggccgcgcccacagccgcgtga

SEQ ID NO: 40634 - DNA, 462 bp, Zea mays
  Peptide Sequence Number=SeqID_84009
atggacgaagggagagaggaagaccagcgacgtggggattggcgggggagggtcctccggaccggcaacacccgcgggaaccgcatccgccacagccgcaagggccgaggcggtgcccgcaacggtgagggccccaccggcggcgttaggccctaccccccacgccggcccgagcgtaggggaggcgggaacggacccccacgcccctgccaccagcgcctgcgcgcccgcaggggaggcagcggcggcggctgggaggggtggggatgggccgtgggggcgcgcccacccacggcggcggcagcggtggcagggtccgcgcgaccaggagaggcggcggcagcgcgcctgccaggggaggcagcccgcgcccaggaggagaggggagggaaggtggagggggagagagggggccgctgctcgctagccatgggaggagagtggtgcggcgcgcgcgcctag

SEQ ID NO: 40635 - DNA, 381 bp, Zea mays
  Peptide Sequence Number=SeqID_84010
atggccaaaccactcctgcccacctctgctcaatctgagccctcggatagcttcctcgagaggccgtgccaccgacgacctccgccgcatgcgctcgtggctagagcagctccagccacctccgacgccgacccacacaccgacgtgaccgccgtgacctccccgacgtcaccgaccaccccaccggagctctactgccgtcgcatacaaatatcttattcattgcattcgatagattacaacctcgctgatggagagtacgtgctcatccctgagcaaggagttgatcgggaaggagtccaggagccagcaccagagccagccaccgaggatctccccggagccccagctttggaaggcaagccccggttttatgcataa

SEQ ID NO: 40636 - DNA, 1421 bp, Zea mays
  Peptide Sequence Number=SeqID_84011
gggtctctgatcgttttgctgtggagttgatggggacttgtgcgactgtcgggggaaggatgtcttcgcccgagctccgggagtctttggcgcgaatgctgaagaatattgctgctgttgtatcggtagtgatggacaaggatcgtcaagatgcggcgcggaagcgccgggcgttcactagggtcggggaccctagtcacgaggtgaagaaggcgcggggaggcgtgaagtccaccgcccctggcagcagcaaaccgccgtcggctgcgaagctggccgtccccaggcccagcaagtcttcggtgggtacgagggttgttgcttccggcacgggcaaaccaccctcggctgagcccatgaaggagcgaaggccgccatcactggtgcgcgccgatgaagtggcggcaggtggtgctgactttgacacggacatctgcatggaggattacctcgttggtgagttttttttgggactgggtcctgaacaaggttgtggtgcagggtcgaatggggggcagctggctgttgtcctggctctggtggcggccacttcgcctacggcggcggttggagcgaagggtacttcgcaggacccatggtccaaattctgcgccaacgctgcggaaaacaagagccgcaggctgacagagaggttggcagctgcggaggccgagaaggaggatctcaggcgtcagttggcggaggagaggagggatgcaaacagggcctgtgctgaggcacaggctgcacaagctgaggccaaacttgcgcgggcggaggccagtctcgcccgccaatgtgccgaggagatggagacgaggctcgacggcctgcacgaccgcctggtcaaaatggaggcctcgacgcgcgcggaggtcgagcggacgcatacgcagctcgtggatgcgtaccggaagctgggtgtgtggatcgctcccttcaaagcgcctagtcaggaggtgggcgtccgcttccttgggtggctacaggaggagctgaaggtgctcccgataattgtgacgggcctcatgtccttcgcctccctcatcacctacgagggggctgtcgaggaccgagtgctgaagcggtcggttggggcgcttttcgataggatgtggggccctcacagccgagagactgtccgggagaggtccgaccaggcgatggatcagatggcacatgatgaggtggtcgaggacctcggtgatctggatagcacactgcccgaggcgtcgggggtggagctagcgccaccatccgatgctggccagggccccttggcgatccccacgctgaccagagctggcgaagaccccacaccggccactgtgtcgacgggtgaggacgctttgaaggtggtgggcaaactagctgtcgaagacccagcggcgtcggccttgccttcacaggtggcggaatag

SEQ ID NO: 40637 - DNA, 861 bp, Zea mays
  Peptide Sequence Number=SeqID_84012
atgcctaccgctacggggcctgcacaccagttttcaagcatgttaactggacaggtgaaagctgattggaaaaggttgtgtcggctaagatataggttaggtgtcgaccaagtgcctaacacactactcgccctcgccgtacccagtttacacagcgcccgaagagcttatagtccgctgcctgaattgcaggccaaaaggccacacagcccacaggccacaggtgccactgccagacacttgagagccagattggaaagcgaaaggaccttgcaaggattcaacccaataaaccagccccaaaacattaggaattcaaagatcaacaaaattggtgaagagggagagaaagacaaggaaaaacaagccaaatccaactcaaggaagaagaagaaaagaagagaagttgagagtggctgtgtacagccaaaggctgtttcgggctggggcaccggactgtccggtgtgcaccggacagtgtccggtgcgccagaccagcgcggagcaaaccagtcgctctcgggcttttctccggcgacttcggctaaaattcaccggactgtccggtgtgcaccggactgtccggtgcgccagatctgcaacggtctgcaacggtcgactgcgctgtttatggaaacaaatcaggcaccggacagtgtccggtgtgcaccggactgtccggtgcgccacgagacagaaggcaaggatggccttccagatttgttctcaacggctcctagctgccttggggctataaaagggacccctaggcgcatggaggagaaaaccaagcattccttgagcactcttgatcactcacacatcaatcttgcgcacttgttcgacattctagtgatttga

SEQ ID NO: 40638 - DNA, 57 bp, Zea mays
  Peptide Sequence Number=SeqID_84013
atgacatatcatgttacggccaagttcggtaagagtgagagttttacagtcaagtaa

SEQ ID NO: 40639 - DNA, 75 bp, Zea mays
  Peptide Sequence Number=SeqID_84014
atggcgggcggaattgagctcgccggagctaaggaggggtggctggccggtgatgattctttactcttaagttaa

SEQ ID NO: 40640 - DNA, 519 bp, Zea mays
  Peptide Sequence Number=SeqID_84015
atgggtagaggcaaaagaggcaagggatggccccaccgcgttgatgggaagcgcaagtgtcctccgagtcctcccttggaggactttggggacttagagtactcggaggaggtttcctccaagtatgatcagtcgcctgctccagcgtcccctgtggcgtcgtccgaggactcggacgactccatggggttgtccattgcggtacgggcgtactggcgatccatcgagcgtgccgaactcgatgggtcggatgacttgaagcaggcctcctcagaggaggtggaggactcctctgactccgaggagtggagcgactgcttgggcgatgacggcgagggcaacggtagcagcgatgacaacgacggccagggtagcgacgacgacggtggcgagggcaatggtgacgatgacggcaaggacgaggacaagggtggtggtgaaggcgacaatgacgacggcaagggtgaaggcgacgacaagggcgacggtaaggctggcgacataatgctactggcataa

SEQ ID NO: 40641 - DNA, 987 bp, Zea mays
  Peptide Sequence Number=SeqID_84016
atgttccgccaatcctccccctcctacagcgacgccctcatgcaccaccacgccgcgagcttctccgccgccgcgctgtccgtcaccgtcccggcccagatcccccgcggcggcgcggcggccggcgggtacctcgacggcaatgttggcgccttctcgtcgccgccgtcgtcctgctactcgtcctcgttcccgtcgtcgtactacaacagcatccagaggagcatcagctcgcactcgctcccgatgcgcctccagctggccgacgtgtccctcggcggcagtagcggcttctactcgccgtcttcgccgtccacgcaccagctgcctctgcagccgctctcgtcctccccgtcctcctccgccggcgaactcttcgagttcacctcgtcatgccccgtccgccgcgtcttcagcaccggcgatctccaggggatgaacgggtcgtcgccgccgcgcccggtgccgtcagccgacggctgcggccaagagggtggcgggccgttctcacccaaggtcggccgctacagcgccgaggagaggaaagagaggatcgagcgctaccgtgtcaaacggcaccagagaaacttcaacaagaagatcacttacgcctgcaggaagacgctggcggacagccgcccgcgggtgaagggccggttcgcgaggaacggcgagaccgacacggaggccgaggaacgcgaggcgtccgacaacagctacggctacgactacggctgcggccacaacgagctgagcaacggcaacggcaacaccacctacagcgcgggcagctgctacgacggccacaacagcaataggctcaacggcgacaatggcgagtggtggtggcgggcgccggtcgccgccgcggtcgcggccgcggccgacgacgaggcgcagcggcagcggcagatcgtcggcttcgacgaggacgaggagctctgggcgtcgctcggcgacatgctgtcggtgaacctggcctcgtag

SEQ ID NO: 40642 - DNA, 1547 bp, Zea mays
  Peptide Sequence Number=SeqID_84017
atgatgaccgcatcaaaaaaggtgcgccacgtcgttcaatttcatatccttttcctcttcccctttatctctcttgctatagggaccgggaaaggggatactccgaaagggatccttctccgcgaaggaagcgggccccgagccctcctactgatcagaggttcgaaggctggcccctcggaagggttcgacagccgcctcagagcactcgggctctgcgcccactactggtcagaggttcgaaggctggcccctcggaagggttcgatagccgcctcagtccactcgggctccgcgcccactactgatcaggggttcgaaggctggccccccgaagggttcgacagccgcctcagaacacgcatagcgagggatgactctgggtacgtccgatacatggccgaggctcgggctacgctcccgagaaaggcgacgaaggggcgtatgataaaagccgagtcagtccttgaccgtcctctcgcgctgtgcagaggctcgggggctgctctcgcaaacctggctccggccaaaccgttgacagcgtcaacataccagcccgagaactcggaacctgaccatgcacccgggtcaaagctccgtccactcaagggacacgatctcgcctcgcccgagcccagcctcgggcagaaacagcagacccatcagccaagtctagcctcaggcgccataggaagctccgcctcgcccgaccccagggctcggactcaacctcgacctcggaagacggtctccgcctcacccgacactagtgctcggactcaacctcgacctcagaagacggtctccgcctcgcccgacccagggctcggactcaacctcgacctcggaagacggtctccgcctcgcccgaccccagggctcggactcaacctcgacctcggaagacggtctccgcctcgcccgaccccagggctcggacttagcctcgacctcgaaggagtcaccgcctcgcccgacctcaggctcggaccgaccacgccgcagggggggccctcatacgagaaggtggccgcgcgggagaacaggctgacggacaggctctcactctctctctctccctcgcgaacgcttgtaaccccctactgcaagcgcatccgccctgggcgcaggacaacacgagccgcgggaccccccggggtcgaaacgccgacacacggagagaaggttggcgcagacataaaggcatacttccaacttgacatagataggacaaaggaaaagaagagttctaggtttaggcagcagctgagggcagatgaggtagcacgaacccattttgggaacgatgagtatgaagatgaacttaaagcggctctgcatcagtcacgtgtggagcacgaatttagtcagagggctggtgcaaggtatgacaggggtggtggatcctccagccagagggtatctcaagggccacttgataggatgatgggaaggagtagggaacaagtacctgaacgtgttagagactacaatcttgctagcctatggactaaggcaacaaatgatagatactggtccctggacaa

SEQ ID NO: 40643 - DNA, 492 bp, Zea mays
  Peptide Sequence Number=SeqID_84018
atggtgacctccggcttgatggtgggggaaagcgagccgggctgcggcctctgcccctccctcagcctcaaggattttcatcaccagggctggggaggggagtgtgtcgagttgagctgcaccgtgcctggctttcggacgcgagtggcttcggagccgctcgcggcgccggcgtctgccacggtagctggaagaggttcttccgccggcgggatagccaaggctggccacggaccgacctccaactctacggccttctgcctgtccttgccttacgagttttggcatgggcgggggcctcctggcagcagcatccgccctgaggtcagtgccgccgctgttcggccccccggagcagaagtcgccgtcgtcgccgctgctggagcaggtgacggcgcgccgttcgtcggtcttccgttgctccgcaggccttcccccatggagtggggtttgttcgtacctgcggagggggaatcggagttccgtttgtaa

SEQ ID NO: 40644 - DNA, 297 bp, Zea mays
  Peptide Sequence Number=SeqID_84019
atggcgcttcctgttgacgtggcgggcctgtgccctaggtcgggcgacgtggaggctcctccgaagccggggtcgagtctgtcttccatggccgaggccgagcccgagctcctgggtcgggcgaggcggaggtcgttcggcagaggccagggcggagtccgagccctagggtcgggcgaagcaaacccgagtctgagccctgggtcgggcggagcggagttcgccgtcttccggggcctagcccgagtccgagccctgggtcgggcggagcggagtacgccgtcttccggggcctag

SEQ ID NO: 40645 - DNA, 183 bp, Zea mays
  Peptide Sequence Number=SeqID_84020
atgaaggaagtggcgaggactgtccatgcgaggcagctcggctatggaacccaaagtctggtgagtgattccgtgcaatctggtggtgacgaggatgatggttttggttatgactatggtactggtgaagatgaagtcatggaggaggacttccaggagttccaagagtacgatgagttctag

SEQ ID NO: 40646 - DNA, 318 bp, Zea mays
  Peptide Sequence Number=SeqID_84021
atgggtcggcgcgagacggagcgcgaagggggaggaagccggagggagacgggcgtgagaggtggaatcccgcggccttcgtgtttgtcccgcgcccaggtcgggcgcaaggagaggatccaggtgtacaatgggggtgtagcaaggcactccgctataattcaccggactgtccggtgtataccggacagtgtccggtgctccaaggaagaacggcctttggaactcgccagcctcgggaaaacgcagcggctgctccgctataattcaccggactgtccggtgtacaccggactgtccggtgaaccagcagagtaa

SEQ ID NO: 40647 - DNA, 2562 bp, Zea mays
  Peptide Sequence Number=SeqID_84022
atgctgcggcgcgtggcgagcaacgcctactcatggtggtgggcgagccacatccgcaacacgcagtccaaatggctcgacaacaatcttcaagagatggaaatgagggtgaagtccatgatcaaactcatagaaataaatgctgacactttcgcaaagaaggcagagctgtacttcaagaacaggcctgagctggcaaaccttgttgaggagacgtatagatcttaccaggcgctcgctgatcgatgtgatcggatatcaggagagctccacaagtcaaatcataccataacaactgtgtttccagaacaagtacaactctcactgcaaaatgacaatggcgacggattcccaaggggtatcacagggatcaatatcatcagaggaactagcccagcttcaaagaggacacagacgcataggaggattacctctcagatgagtaaagaaaaggcacaagaagagattgagaggctccagaaggagattttggtgttacagaccgagaaagagttcttcaagtgctcatatgaatcttcactagataagtacttagatattgaacgaagggcaacagagacacaagaggaggtatggagcttgcaagagacttttaataccaacacagttatcgaagacaatgaagctcgagctttgatggctgcacgtgccctcatttcatgtgaggatacattgattaacttgcaagatcagcaaaatcgatcatgtcaagaggcaacaacagagttccaacgagtcatagacactaaaaagaagctaaaagctttcaagagtgagtgtgggcactctgagaaccaaaaggagctaagtgatcaacaacatatagtgaccagctctgcacatccatctatagagaataatggccccattctgcaagaccataggctccatctacaggaaatatgccagaagatcaaactacaatttaattcatgctcagaggcatctgtagtgcatttagcaggaatggttgatgaattcgtggataaggtgatcgcactagaaattgcagctacaactcagactgctcaaatcaatagaatgagagctgaggcagatgagctgcaaaaatgtatgaatagtttggaggaagagaaggaaggtttagttggggattccaataagttgtctgaaaggttgaggcaagttgaggaggtgctgcaaacaattcaacgaattgagaagtctgtgcacattgaaaatggaaatattcagagacaattaaccgaagcatgcaacaatcttactgattttgtggagaggttggatgtgccactaagcgaagaaacaatagattcatctgaagggtccaaaggaattgcttctgaagaagatgcagataagcctgacactctctctgacccatttcaagctgattcaggcactgtaggtgaatcaatggatggagactcattgtactcattcgatatctctagtgaggcacatgaagaagatgtagatgacaccttagggtggcagcaagtagttttgaatgggttggagggcaaggataaaatcctcttaaaagattatgcatccatccttcggaactacaaagatacaagaaagcaactttcagaaatagagaagaaaaatcaagaatatcatcttgattctatgtcaaaaacggaagagttaaagagtgtcaatgcaacaaaagatgacgaaattcactctcttaggcaaatgttgagctctttacagtccaagatcaacacctatcgaatccaatttgttgaaaagtctgaagaatcatccaaaacaaacaacgatccttgtctagaagacaaagagatttgtgagatagaagaatacctaaagaattgccaaaatgaagaaccacatgtttctttattagaggagaaatttagagaagaaattaacaaagtattagatgaaagcttagacttctggttgaggttcagtacatcgtatcgttatatccagaaattccaaaaagcatttgataaagcaaaagcagaagtggatagacttacagatacaaaagctctggagggcttagacactggttgtactggtcagtttgtgagaaaacaagagccaactatccttgaaaagaaactacgtgacttaagtactgatcttcaagtttggttggaaaaaaatgtgctgttgcagggggagcttgagagaagatttttattgatatgcaacatacaagaggagatatctaaggtcacaacattgaatcgaaccaatgaagctcactttactcctttacaggctgcaaagttccatggtgaggtgagtaatatgaagcaagagaataacaaggtcaccaaagagctacaagctgggctcgagcatgtaaggggcctccaagtggaaattgggaggactgttctgaagctcagagacaatattgaactatcttttgggagaagcagtcgagcacatcagaacttcagatatctatcagggaaggccggggtacctcaacgaacttccttatttggttctaggacgaaaaagacatcattattttcatgtatgcctcccattgccaaagccgatttctga

SEQ ID NO: 40648 - DNA, 594 bp, Zea mays
  Peptide Sequence Number=SeqID_84023
atggctagcagatgtggcagagatccttctgaggagacaaatttaagagaaaatggtggtctcaagtttgatcttttggatcacttgagaagggttgggtgcaaccctcatcatttaggacatcacaacgagaggaaactatcaattggtatcggagaccagcacttcatttatgagtcttacaaatcgaaacgatatcgggtggagtgtgataagataaaggacgaaaaggccaccaactcgcgctacaaaaacaaggatgacaagaagcagaggatgaagaaagttgtctactacgagacaattgttggtgtttcaaaccttcgctccgacaggccaagatatgggtcgactgccggtagcttccttaagaaggatctactgtgcatcggtaaaactaggagttctaccctggtgtccctgacagggctctttatggcgggcgacgtgggcggtgaagattcccgatgccatcattatcatccctgcgtcacgtcgacccctgtctttcatagcctggatttcggcgtggatcgtcgtgttgtggggcctgtcgaaggcagtgttctctggcctaggctcggtaggtcatga

SEQ ID NO: 40649 - DNA, 933 bp, Zea mays
  Peptide Sequence Number=SeqID_84024
atgggggacaatcagattgtggctgaaaatgtcgctgaggaacttcaaaactatcaagctatttgtgagctgggatcaacaattgggactgttgaagaggtggatatcttatctttagattctaaagatattgtgagattcaaggtacacgtcaaaagtgttgctatgattcctccaattatagaggtaggtgttaaaccttttctctatgacatatttttcaagattgatgatatcactgatgagggatggaatgatgagtctataaatcttggcaaaagagcatcggtggacaggcaaggtcttgatgacctttcttatgaaaaaactggcaaaaaagctagaaatgtaggggacaagtctgttaaagaagagttgagacttgaaaacattggggatatgatgtctcaaggcaaatcttctggtcgggggcctgacttgggtgataacaatgaaaacctgaacccggtatctgaagataaaggttatgacaataatcctataaatgaagatgaagagtttcatgagagtgaagatgacctcctgagttctcaagatttggaagaatttgccaaagatgatgaggggtgtttaccttcaagccaagaaaaaatcaacaagtctcctttgggtgctcaagctaaaggctctggaaaagctaaagctgaaaaacaagtaatgaatatggaagtggagcatggtgaaggcattaggaggaggagcagacttgaatccaatgacgacatgaagattgctgacaaagctgcagcgagagctatggctaaagatgccttcataaacaaagatttaggaatagctttaggaatagctttaggaatttgccaaagatgtttgcccttattgcatattacctctagcatttataagtatcttttcccttggcacaatgcaactagaataatagcagaatag

SEQ ID NO: 40650 - DNA, 276 bp, Zea mays
  Peptide Sequence Number=SeqID_84025
atgtcgtgcgcgttcgacgactactatatcaaggactatggcgtcatcttggcgccagaggtgacgcagaggagaaccgacaacaatgaccactcgtcatcgtcgggaggaatagaactgtttttttatggggatcttccctccatccagaaggtacagcagcagttcaatgatgaacttgcttgctggatcatggctggcgccaaaggtttgggtcagcttgggctagattgcttcatgagaagtgtcggatcgagcccttttgctctcctgtaa

SEQ ID NO: 40651 - DNA, 525 bp, Zea mays
  Peptide Sequence Number=SeqID_84026
atggcgctatggtcgcccgccgtggtcgcggcccggcgcgctcccccgcccgcgcgcgtcctcgccccgcccacgttccgccccgcccgccggctcgccggctatgcgcacccgccccgcgtgctcgtccgcccgccccggctacgtagtgagactctgcctactcaccttgggagtgttcaagggtccgtacaacccgaggcaaaaagggaatcacggctcatgggtaaagtgacaatgagactgatggttcttggttttgactctagtaatgctagtccactacaaccagacaggacacttgctgagtatgttgatgtgtactcacccttgctctacacaccaaccccccaggttgtccgcattgcagccactgctcaggagaggtcgaagccgtggaaggagacttccaggagttccaggactacgatgagttctaggcgtgggttagcggcaacccccagtcggctgcctgtgaaggccgcgtttatctacgtttcattttcgcactttgatttattgtaa

SEQ ID NO: 40652 - DNA, 438 bp, Zea mays
  Peptide Sequence Number=SeqID_84027
atggcgccgtcaccaaggactctctctgccaccgctgctatcttccttctactcgcggccatcgtcaccaccgctggtttagttgatactacatacatccgcaaatttgctgaacgtcgtggtcagaaagaggttgtaacgctacaatcactaccggaatccgggcctttgccgagtgccggcggctttgccgagtgccttttataccgcactccgcaaagtcctgcgctcggtaaagagcttatttaccgagcgcaggacactcggcacatccaagcactcggcaaagactgctttgccgagagccaaatactcggcaaagatggctctcggcaaagggccgttagcggccgtctacagctgacggccgtcagtctttgccgagtgtcaaatatctggcactcggcaaaaagagtctttaccgagtatcctctgtag

SEQ ID NO: 40653 - DNA, 363 bp, Zea mays
  Peptide Sequence Number=SeqID_84028
atgccatggaagaacacttacttgcacagtgcgcaaccaccaaatccagtctcaagtgttgtagcaatacgtatcgaccgcagacctatgtcaaacaggtcgccgccaaggccactcgggctacccgccgcccaagagaaggagcaggcagccctactcgatgccctctccaaggccgtctccaccactcgtgcccatgagcgtactgctgagcttgcatgggaggagaaggccaccctcgccaccctagagcggcaattgaaggacgctgaggaggacaacgaccactccatccccgacgtcattggcacctacgaggccgctgaggtggccaatctccacgagcaggcagctgctgtctag

SEQ ID NO: 40654 - DNA, 1230 bp, Zea mays
  Peptide Sequence Number=SeqID_84029
atgtgtgctgtattttctccctatttatctcttgtagaatgtgttggcttatcttctgccacaaagggaacttggtgttgccgatattgtgagaatagacaacagagggaaagttgtttggcatataacaacaatgcaatagctgctgggagagttgaaggagttgatgccttggaacaaatattcacgcggtcgatacgtattgctacaacacttgagactggatttggtggttgcgcactgtgcaagctccatgatttcagcaaaaagaaattcagtacccgaaccgtgctgctttgtgaccaatgtggtagagaatatcatgttggttgcctcaaggaacataatatggctgatctgacggcattgcccgagggagcctggtattgttctacggactgtgtgaggattaaccagacactgcaagatttacttaacagtggtggagaacctgttcttgccatggatttagatgtcattaagaagaaacgagaagtgaaaggttttaatgatgatgatgctgaccttgatgttagatggagagttttaaaggacaagagctcagacgacagcaaactagtgctctccaaagcagttgccattttccatttgaccattggttctttgtcaaaagttggtagaatttgcaataagctatggccagcgctggaggggggggggctctacagactacaaccgccgcgtgatggagggagtgcagctgacgctcgagcagagggccacgggagcacaatagggcggcaggagaggagggcgctggagaaggaaacttttgatcccattatccaggtttcaactggacgggacctcattccagccatggtttatgggaggagtgcaagggaccaagattacacaggaatgtattgtactgtgttaactgtgaacaatattgtagtttctgcgggtcttttccgcatcatgggtagtgaaattgctgagctgccgttggttgctacaagtagggatagacaaggcttggggtatttccaagcacttttttcctgcatagaacgtctgttgtcatctttggaggtgaaacattttgtgctaccagctgcagaggaagcggagtctatctggactgagcgttttgggttcgcaaagataagccaggatgagctgcgcgaatacctcaagggtgggcgaacaactgtgtttcaggggacgtcaaacctgcacaagctggttgcgaaacttgaatgctag

SEQ ID NO: 40655 - DNA, 2376 bp, Zea mays
  Peptide Sequence Number=SeqID_84030
atggccacccctgtggcgcctcttctccatgatgagcctcaagctgctggtatcttactcccagggacaacccagcattcagatcaaacaaactctgactctagagttggagagcttatactgcctaatggggatacttatcgtggcgcgttatcgggcaacacgccacatggcccaggttgttatatctggtccgatggttgtgtttatgagggtgattggaggagaggcctcaggcatggccgaggcaagacgctgtggccaacaggggccacctacacaggtgactactccggtggctacatttatggtcagggaacgtataccgccgggcttaacagttacaggggaggctggaagctgaatcttaagcatggccaccttggcctacagacatatcccaacggagacacttttcaaggttcttgggtgcatgggcaaatgcaggggcatggcacctatacctgggcaaatgggaacacttatgttggcgccatgaaagatggggtcatgtcaggcaaaggaattctcacatggaacaatggagattcatttgaagggaactggttagatggtgccatgcatggctatggaatctacacatggaaggactctggctactatgtaggaacctggacaaggggggtcaaggacggaaaaggcacgttctatccaaaatgccgtgggattccggttaccgacatcgacgatttaagaaacagaggtgtactgcctggtgctgaaagccagactcatggttcccgtatccttcactctgcctcatcggacatggcagacatggtggctagcagaaatcaggactctgtaggtatttcatctgttagaagcttgaattttgagaaaactcgctccactaatgtgctactggaaagaaggtggagccttggagtggctattgaaaaattcctcggtcgcgaaaccaatgaaagttctgcaattgaaagatgtgaaaacaaggctgattccaaccttcctatactggaacgggaatatatgcaaggtgttctcatcagcgaggtcgtggtggatgcaagcttctcgaatccattaaaaagggtatcacgccgccagaagaaaatagtgaaggacataaagaaacctgggcagacaataattaaaggacataggagttatgatctgatgctcagtctgcagcttggaatcaggtatacagttggaaagattacacctattcagagacgtgaagtgcgagcttctgattatggttccagagcaagtttctggatgaacttccccaaaaatggttcacgacttactccttcacatcatgctgataattttaaatggaaagactactgcccaatggtgttcagaaatttgagggagatgttcaagattgatgcagcggattatatggtttccatttgtggaagtgacgcacttagggagctatcttctcctggaaagagtggaagtgtcttctttctatctcaggatgatcgatttatgatcaagactctacggaagtctgaagtgcaggttcttctacgaatgcttccagagtattatcaccatgtccgtacctatgagaacacactcataactaagttttttggcctccacagggttaaaccgtccagcagtcaaaagttccggtttgtagtgatgggaaacatgttttgcactgaacttagaattcaccggaggtttgacttgaaaggttcatccttaggccgctcaacagacaaagtaaaaatcgacgagaacacaacactgaaagacttggatctaaactattcattttatctcgagccttcttggcggcagactttgcttgcgcaaattgagaccgatagcaaatttctaaagcagcacgcaataatggattatagtttgcttcttggcgttcatttccgggctcctcaaagcctacggacacaggcatcctttcatcaagcaatcctaccagataggctggctgttctttcagaagaaggtgctctggaggaggatgttttgaacagtcctgaaggactggttttggttcagcgagctagtgatcaaaatgatgttgtcattggttcccatataaggggggcccgtcttcgatcatcaagtgcaagttttgaggaaatccaacttggggttaacatgccggccagggcaaaacagacggttgaggatgatgacagtgaagataatggtcaggtgtatgatgtggtgctgtacctgggaataattgatatcttgcaggagtacagcataaggaagaagattgagcatgcttacaagtgcatccaatataactcattgtcaatatctgtcgtggaacccagtctctactcggagcgcttcctgaaattcattcaaactatctttcctgaaaattcataa

SEQ ID NO: 40656 - DNA, 609 bp, Zea mays
  Peptide Sequence Number=SeqID_84031
atgaaggctggggagcatcgggaggataaggagggggaatgttttgtccggtttggacatggcggtggcctgactccttccgaaaaaggagatagggtactgttcccaaccttgcttgtggctgttggaccgctgatttgcttcgctgcgtatatcgggctgcttcaaccccactctgatgatacgtcccgagttgtggaccaactgttaaagttgatcgcgacctttatagcctcctggaaagctccttgttggggccctcagcagatggaacgggaggccaacacgctccgtcccagggttcactacaccctggtcgtgaccgggtctcgacttgacgactggtcctgtgggatcgagaattcctcggccatgctaacgaatgagggacaagggtcgcgagggtctggcgtccttcattctccccgccattgggaggttcgcccttgctgctcatcgaagagccagggttcgagcctgagtccgagcaaagggtataaaaatgaggtctccatcgccctcgaccatccagatgaagtccaagtcatcggcggtggggaggtggccctaggtgacgagggccatgatcacccttggtgcgtggtgtag

SEQ ID NO: 40657 - DNA, 210 bp, Zea mays
  Peptide Sequence Number=SeqID_84032
atggagatagtcttacaagaattagtggtgatggtgaggccggcccacggcgcggcgcggtacgacggtagcagagaatttctggtgagcacatcccgacgctccaatcgatccccggggtcgcaatctgggcacacgatccaggggacggttcagcatgcggaccggaggaagcggaagacccaacggcaggtgaaaggggctcgctga

SEQ ID NO: 40658 - DNA, 756 bp, Zea mays
  Peptide Sequence Number=SeqID_84033
atgaataagtcacatggttcagtggggccaattgttataatacaaggatcatctactgtgaagggtcttgagggtgctgagttgctggacactcttgttacttatttatggcgtatccatggtgtggattattatgctcaaatggtgctgaatgggagaataaacttgattcattctagcaagacagaattcaaggcacctggtggtacacctatcatgcagcaacctgctccaaggggaaatggaagacaaagaccaccaatagggagtcggctgagggatgagcgtggcaatcataggttcgacaggaatgttgattcaccaacacatgatgggtctggtgaaaatcccgacgatcctatttatgatttgtttggtgatccagctatgcatggtgccttccctccagatatccctgctcccccggttctaatgcctgtgcctggtgttgggtgttctccatttgaacctatggcgaagtggaagtcgtgcagccgattgtgtcgcgggagtggtgcgtgggagtgggcagaatccgctgaccaggggaaatgtggtcgtgggagagcggttgctctgattgtgagtggatctgcggcatggggtggttgggtgggggcagtgaaggccgccgggctggggaaggagctgtggaagccgccagctagggagagaggcggtggaggctactggccgggggagaaagtcgtcgtcgaccgccgggctggggaagcgattggggaagtcaccagctag

SEQ ID NO: 40659 - DNA, 2370 bp, Zea mays
  Peptide Sequence Number=SeqID_84034
atggcgctcgattggttagagtctgacccggtcagagctgggaggaggacctgtcggtgggtcccacgcgtcagtgacaaagacgaagcagcccacgtgcatattttgactaacaagcagagcccccatgttggcgccagcgcccgagttaacactgaagatggaaagaaaaggaaaagagttgccaagggttctggcaaagcaccaaagaaaactgttgatgctgatatagagaatgaaggcgttgccttcggaggttcatcatcctctgaaaaagataatgagaagaccaccgaaggtggcaggtcttcgaggcatgagaaggtagaaggagagctgaaagaggcagaccttacacttgagattgacgcagctgagccaactcaaactaccggggacgaaatagatgaactcggtttcttcgtgaggcatcttggtggtggtgaactcaatgacaaggatgcttcagagttagaaaataaaggcgaagctatggggtaccatcctagagccatgctcttcagagggggagacaaaatgcttatgtgtatacctgatcctgacgagtcaaaaattgtaaggaatatcacccgtagtattggtttcctagaggtcgaaggtcaacttagccatgttaagaagaggaaactttcccacagcttggcttatactagtatcaagggctcgaactcgggctcagccccggaagatggcgaactccgctctgcccgaccaagggctcggactcgggctcagccctggaagacggctcctccaagaatccggctcgagcaggtggctcggctggtcaccccgaggcctcggccagctgtcccccgaagacatcagcccggcccgaggcctcggcagatcaactccggcgtcggtcccgctaacggacgacccggccaggctccggccgacaagtcttcttttcgagccaactctgcctctgtccgtgctgacaccgctacccctggcttcggctcatcgaagagcggccgaggggttcctttaactaagcaagagaagcctcggacagcaaggccgaccgagccgagggactcctacgcctccgggatacggatacctcactcgtcacctttcaacagttcgccttccccggcatggctggaggacgcctcctccgcagagctaggggatggtttccaccaccagaagctggaagaggaggtggccagccgacccgtgcgggaggtagagccccggctcgccacgctctccgccccaacaaggatgccgggctgcatgatgaaaatccttgaagccgaacgatggctgaaaggtaccaactcccacggagttgcgttcctccaacgacgaggcggaaggattgcgggtgtcccccatccgggggctcggaagccgtcgtgggctgagtcttctccaacacgctccaaggtcctccccctacggcgcgggggctgggtcccacgcgtcatgcaagctggcccagagcagaagaagccaaaccgccgcgcgcggtgcatgcaaccgcccagcggttacgagcatccctccgctttcgcccagaccagcgggcgaaagggcgggcagccatgcaggcggcatgcaaccgcgccaagtgggcgcgcccctccgacttccaacgcacccggcatgggggcccacgcccacgcgtcacgcaaccggcgcgccggtcgctacgtgcaagcaactgcaccaccactcgcaccactgccacgcctcctcgactgcggaaccagtaccgtgactcgaggcaaccctgcgtatgacccagcagtgccagccaggcgcgatggtcaatacgaccaaaaatgggccggcagtaatggcggtggcaggcgggcaggagcagcggtcacgtcgtcagccaagcttacgtcccatcctggggcaggctcggactcgggctcagccccggaagacggtgaactccgctccgcccgaccaagggctcggactcgggctcagccctggaagacggcgaactccgctccgcccgacccagggctcggactcgggctcggccccagaagacggcgaactccgctccgcccgaccaagggctcggactcgggctcggcccctgaagacgacgaactccgcttcacccgaccccagggctcggactcagccctggcctccgccgacggtctccgcctcgcccgacccaggggctcggactcgacctcggcctcggaagacagactcgacctcgacctcggaggagcctccacatcgcccaacctagggcacggaccgactacgtcaacaggaggcgccatcattaccctaccccaagctgactcaggctacggggaacaagaccggcgtcccatctggctcgctccgccagacaagtaa

SEQ ID NO: 40660 - DNA, 741 bp, Zea mays
  Peptide Sequence Number=SeqID_84035
atgggcgacgcaacataccaggaaacattcgatgaagagagtcaggttgaagctaaggaaaatgatccggaggaaatggaaggcgctgaacatccgcacaatgagaatgctggcagcgatccgcatcgcgattgcagtgatgaaactggcgaagtcgcagatcccgtaatcgtagaagacatagagccaggtatttattacggaatttcgaatgagaattaccacgcgggtcccggtatcagtaagtctcagctcgatgacattgctgatactccggcactatatttgtggcgtaaaaatgcccccgtggacaccacaaagacaaaaacgctcgatttaggaactgctttccactgccgggtacttgaaccggaagaattcagtaaccgctttatcgtagcacctgaatttaaccgccgtacaaacgccggaaaagaagaagagaaagcgtttctgatggaatgcgcaagcacaggaaaaacggatgcattctacagtgacggttatgaagcacagtttggagtgcagccaactttcgtttttctggttgccagcacaactattgaatgcggacgttatccggttgaaattttcatgatgggcgaagaagcaaaactggcaggtcaacaggaatatcaccgcaatctgcgaaccctgtctgactgcctgaataccgatgaatggccagctattaagacattatcactgccccgctgggctaaggaatatgcaaatgactaa

SEQ ID NO: 40661 - DNA, 699 bp, Zea mays
  Peptide Sequence Number=SeqID_84036
atgaaagagcaactggcagcagctcttccacgccatatgacggctgaacgtatgatccgtatcgccaccacagaaattcgtaaagttccggcgttaggaaactgtgacactatgagttttgtcagtgcgatcgtacagtgttcacagctcggacttgagccaggtagcgccctcggtcatgcatatttactgccttttggtaataaaaacgaaaagagcggtaaaaagaacgttcagctaatcattggctatcgcggcatgattgatctggctcgccgttctggtcaaatcgccagcctgtcagcccgtgttgtccgtgaaggtgacgagtttagcttcgaatttggccttgatgaaaagttaatacaccgcccgggagaaaacgaagatgccccggttacccacgtctatgctgtcgcaagactgaaagacggaggtactcagtttgaagttatgacgcgcaaacagattgagctggtgcgcagcctgagtaaagctggtaataacgggccgtgggtaactcactgggaagaaatggcaaagaaaacggctattcgtcgcctgttcaaatatttgcccgtatcaattgagatccagcgtgcagtatcaatggatgaaaaggaaccactgacaatcgatcctgcagattcctctgtattaaccggggattacagtgtaatcgatatttcagaggaataa

SEQ ID NO: 40662 - DNA, 742 bp, Zea mays
  Peptide Sequence Number=SeqID_84037
atgggaaaggacaagaaaggtcagggctcgccacatcgctccggcgacaaacagaagcgtgaaccgagtccttcgtcggaggacttcggtgactccgagtactcggaggaggagttctcctccgagtccgagggctcgtcggagtccgcgccaagcctccccgagctccgccctgaggtgagacacccgtccctgtgcccaatctcccttattgcgccctgtgttcgtccaatttcgccatcgccggtgctcggccgcggcgacaacgagcaatctgaggttcctgagtgtgttgttggagacctccctgagcaacaacctggtgaaggcaagtcagtcctgccagctggagagactgcatcgtcgcctgcacgaggagcaggagcaccgacgccaggagcaggagcaggagcagtaggactctcccccttgcctcagcaggaggtggagtatgagaggccgccttcccctgcacctcagctagagatgccccctgcaccacctcagggcatcccggctgctggaggagaccttgacggagatggagacaacgacgacactggtggcagtttgagccacagcacggagctttcggaggagctggagtcggatggatggatcgcgagacccatcactcgtgacactactcgcggcatcatcgcgggctatacccggatcagtgggaggctacttgcttggtgcgccatccggacgatgatctccggggtgtatgtgacacccg

SEQ ID NO: 40663 - DNA, 483 bp, Zea mays
  Peptide Sequence Number=SeqID_84038
atgggtatgggttcttaccggctaacaggcagaagaaatgaggtgaccgcgcaaccagcggcgcagcagcgatgtcacttgacgacgagcaatcgccggtgctccgcgatccaatcgtgtagggtgagaccacgggcgactcccagagaacgagtcgaagccccacacccaagggtgagaccctacagagagcatatgcgcgggctttacatttctttgggcaatgattcacccaatggccttgttccccacaatggaaacatgcacgacttcctccttgcgctggtgctgcttggttgttctggttggttgctagggcgggaaggcagagtgcctggttgctctaacgttggtattgatttcctccctggtagttgttctgatggtactgctgctgctgctgaggaaactgcctctggtactgttgtggctggttctgacgctgatgctggtgctggtgctggtgctggttaccttgcttga

SEQ ID NO: 40664 - DNA, 306 bp, Zea mays
  Peptide Sequence Number=SeqID_84039
atgatgaagcacttgagaacaagtcctcaacattggcgcccacctccggtgaacccttatcgaccactttcggcaagcactgaccttcgtcatgccgccgaagaaagcttcagcgacaggggctgctgcactgcagccactggacccaaaccaagaaactctttctctccgagaagctcagagctagaaaagaaaggccaccagtccaacgctccagtaggaggagttggaccaagagatcagggatatggagttcatccatcagcaagtacaaagaaagaaggagaagatggcgcgactggctga

SEQ ID NO: 40665 - DNA, 1320 bp, Zea mays
  Peptide Sequence Number=SeqID_84040
atgaacgtcgcggcgctcgagccatcctcagagctccagctctgcctcaagcctcaccttcactcgttgaggaaaaaatctcgagacctggtcgcccaattcggtgttctccttccgcccaggcctaggtgcccagcaccgcccatcactagtctatcaacggcgccgaagtgcgccaaggtcgaggtctgccccatcccctcccctaccgagctccgtgcctccatccagggcggactcgagaccaagcccctccccgcacctgtttcgccctattgcccaggccgagctccgcctcttcctaggccctgctcttccctaagactacctccccggttgttccggaaggtgaggaacgacgacgtcgaccccaacctcgtcacctataacatgctcatcttcgacctcgcgtgcgctgggatagtcaccaaggccagggaattactgtcgacgtggcatggaggtactattggtaacaagttctggatgtcactaggtctaccattgatagctactgtgaactttgctggtaacactagaacgccggtggcagttcgagggcacggtacggagctttcggtggagccagagccggaggaatggatcgctagacccatcactcgtgatgctgctcgcgggtgtcacttccatgacgctctcaacaccttgctgcgtcgggccttcgatcgacacacttggtctatcgagtaccgttgtgtagtctaccagcaccgtcgcgggttatacccggaccagtgggaggctacttgcttggtgcgccgtccggacgatgatctccggggtgcagaggccttctcagaccactattctattactgagagggatactgccaaggcagccatgcaagatgtagcacgacgggcactttctcagcattgctcgttgttcagtggggtagatgacaaccttgacctgaaatactaccctcgtcgttcgaccttcagtgctggaggtgtgattgtcttgccagtcggtgagggcaatcccaggctaaacaacatggtcaacctggtcgccgtgctcaacacagagctagaccacgcccttgacgagttgggcaaggttcgggcggaggttgcagaattgcgtgctgagtgcacaacacgccactatttggatggtgattctcccggccctgtcgggattcagcacccttaccgttcaccgctttgtggtcgcttcgactatggtaccccagaccgtaggacccggatagatttggatccatatatcgacagaatgtctgagaacaggcgcagaggtgcaaggcgtgctgagctagaacaacaggcaccctag

SEQ ID NO: 40666 - DNA, 210 bp, Zea mays
  Peptide Sequence Number=SeqID_84041
atggagagggtaggggcagctgccaatggggaagagaggaagagagggagggggccggcggccaaaggggtggaaagggtggggggcgactgcaaccattggggagaaggagaggggcgttattgtgagagtgtaagtggacgtgctgctactcccctcattcccaacatgtatcaagtacctgcattgagtaatgcaagagtgagatga

SEQ ID NO: 40667 - DNA, 420 bp, Zea mays
  Peptide Sequence Number=SeqID_84042
atgctggaggaagaagtcgatgccgaccagatccgcgtggatgcagaacgcctggccgcctggggatgtgctcgagcgcagggggcggacgtgcgtagcagggagataagcaggggatccggagggagatggggcgcgcacggcaccagagcaggagggcgcgcggccaccatgtcaagcacaggggcgaactggactgaacccgagctcgaagaaagaggagaacggctgggcgaggccgcggcacaggaaaacggcggcgaccatggaaaaagggactcggccgtgggagaaacagagcaggggctgggtgagctcgaagccggccatgggaagacgaggggaaggagctcggactggataagcaaggggagcaagcagcgggcgcgacatccatggaagcaggggtgcgcgccatag

SEQ ID NO: 40668 - DNA, 603 bp, Zea mays
  Peptide Sequence Number=SeqID_84043
atggataatgaaaaaacttactctcagaagattaaggcggtggatgctagacaaggcaaattacgacgaactcatagactagctactacccataaggcaaggcaatttgagttggaaagagacattaccttcgataatactaagttcgcttattcatcgaagagtatgaccaagaaagcaacttctaattccttaaacgaagaagcatctaagcaacaggtaaaactgaaagagcaatctacaactacctttgataaaaccaagtgtgctaccacatcaaagactggagcacaagtgttcttaaaaagctggagatgtccaaccaagatttttgccttaggcacagttcttggtcgagacccaaatcataaagttggaggtgttaagttaggcaaagaattttggatggtgcgtgttagacttgtagtactgcctattgagcctttgattcgaccatacgacaacaaggaggttattggtgatgtcggcaacaatcttatagcatggccttcgtgttggtttcaaagctgcaagatttctacagaatccgaagactacttattacaaaccggatggcgtggatcactacctccatttaaatag

SEQ ID NO: 40669 - DNA, 456 bp, Zea mays
  Peptide Sequence Number=SeqID_84044
atgcggcttcatatccttagaggtatgaaggcagaagtcatccttgcatttgcagacatttgcactcatgaggaatatatgaagtgtgacattactatgttactattgtggtttctacctgcgagcggggtagctaatggccttgacctgaagtactaccctcgtcgttcgaccggcagtgctggaggtgtgattgtctcgccagttggtgagggcaatcccaggctaagcagcatggtcaacctggttgccgtgctcaacacagagttggaccacgcccttgacaagttgggcaaggttcgggcggaggttgcagaattgcatgctgaatgtgtggcacaccactatcttgatggtggttctctcgcccctgtttggattcaacacccttatcgttcactgccccgtggtcgcttcgactatggaaccccagactacaggacctgcatagattaa

SEQ ID NO: 40670 - DNA, 723 bp, Zea mays
  Peptide Sequence Number=SeqID_84045
atgtcgcagcaccgccatcgcgcagtccgcaggcgtcgctccgtctgtcttcaccgtgtgcaggtagctgcgcagcgctcatcgtcatgtggaggaaccccgccgagcctcgccgtgttcgcctgctcagagccgcccctgcatcttgtcgtcgcgtgcctgctttgccaaggccctggctcaccgaggcctccgctcactggccatggtggacgcaaggtgtcgctgtcagccatggtggccggccctgcgcggccaggccccagcacggcggtgctcgcgtttggcatggctctcgcgctcgcgtctagcacagcctgcgtctgtgcccccgacgcggcctacgaagcccccactcggattttgcacggccccggcgcagcagcagcctcgcgcgttctcatgcctcgccgcgagctcgtctggccgtcattgcgaggctttggcaaccaagtgatcgaactcttcgagttctacgaggctgaagaccctgagcatctatttggtgaaggcaatgataccctgccggaccacataggaagtgatcaatggggattagctctccccgggcagaaagggaatcatgactcgtggaggtacttgatcagagatggttggtttacagatgatgatgatgatggttatgactatggtaatggtaaagaagaaggcgtcgaggcgaatctccaggagttccaggacttcgacgagttcgaggattag

SEQ ID NO: 40671 - DNA, 702 bp, Zea mays
  Peptide Sequence Number=SeqID_84046
atgtcgcagcaccgccatcgcgcagtccgcaggcgtcgctccgtctgtcttcaccgtgtgcaggcagctgcgcagcgctcatcgtcatgtggaggagccccgccgagcctcgccgtgttcgcctactcggagccgcccctgcatcttgtcgtcgcgtgcctgctttgccaaggccctggctcaccgaggcctccgctcactggccatggtggacgcaaggtgtcgctgtcggccatggtggccggccctgcgcggccaggccccagcacggcggtgctcgcgtttggcatggctctcgcgctcgcgtctagcacagcctgcgtgtgtgcccccgacgcggcctacgaagcccccactcgaattttgcacggccccggcgcagcagcagcctcgcgcgttctcatgcctcgccgcgagctcgtctggccgtcattgcgaggctttggcgaccaagtgatcgaactcttcgagttctacgaggctgaagaccctgagcatctatttggtgaaggcaaaggaactagaggtgtagttgcttcgccgtcgtgccgtcaatggggtccaggcacagtgcttgctctgccgaggctgagtgccgaggtacttgatggtgatgatggttatgactatggtaatggtaaagaagaaggcgtcgaggcgaatctccaggagttccaggacttcgacgagttcgaggattag

SEQ ID NO: 40672 - DNA, 414 bp, Zea mays
  Peptide Sequence Number=SeqID_84047
atggggctgtctgcgaggccggagaaaaaagaaagaaaaaaaagatcgaagctcagagctcacggtcacaggctcacggctgctcggtgcacgtctcgcgtgctcccatgccctggactccggtcaccgcgtggtcggcggctggacaacgacgagtcggcggccggcggctggacaacctgcgagtcagcgagtaggcggctggacttcgggcgccggcggggtgaggggcctgcgacctgcggcagtgctccggccgaccggcggtccggcctccgtgctccgggcgagcagcgctgcgggctccagcggtgctccggggtccgggcgtgggcggctccacctccacggctggcggcggctggagctggaggaacaaaagacaacaaccgtatattaaagttgtttctctaa

SEQ ID NO: 40673 - DNA, 444 bp, Zea mays
  Peptide Sequence Number=SeqID_84048
atggtcacccggtcggccatcaccgagcggaagggatggcggcgcaaggggcaggaagggcggttttcctcttctctggctaagtttctcgggttgcgaaaaccaaagagggaggcaggaagcggagcaaagaaccgtcaacaggccctcacccagggaccgggaaagggggataccccgaaaaggatccttccccgtgaaggaaccgagctccgagcctccatactgatcagaggttcgaaggctggccccccgaagggttcgacagccgcctcagatcgcgtgggccctacacccactactggtcagaggttcgaaggccggcccccgaagggttccacggccgcctcaggctacttgggctccgcgcccattactgatcaggggttcgaaggctggcccccgaagggttcacagccgcctcagacgccgagcgagggatga

SEQ ID NO: 40674 - DNA, 405 bp, Zea mays
  Peptide Sequence Number=SeqID_84049
atgaacctgacccctaagggcctcagcccggctcacggcctcgacagcctggctccgaggttggtcccgctcaccgatagcctggccgagctccaactaccgctgccgcatctcctcgacctgggaagccacctcctcccggaccgacaaagcctccgctcgtgccaacgccgcctctgtccatgccgctgctgcctccgacttcagcccgtcacaaagcaaccgaaggtccaccgcctcgacgctccgttgggcaaggcgctcattggcttcggcaagcacgacccgctaggatcgcagcaactcccaaacgtcactttcgcggcggaggaacagcgacttggcggtgcttgcgtctgcgagctcctgaggaaggaaaacaagatgtcgcgaagaatgccctag

SEQ ID NO: 40675 - DNA, 321 bp, Zea mays
  Peptide Sequence Number=SeqID_84050
atgggtgtagcccccgagcttcgagtggatttttggaaaataatccactcgaaggtctggacttacatccgggccgtcgagcgctccgggctcgagggctcagatgagtcggagtactcctcggacgaggaggactcgcccgaggaggacggcgaaggtgacgacgacgacgacaacgacaacgacggaggcgacgacatcgacgacggtgacggcggcagcaggggcggcaacgacggcagcaggggcggcgacggcggcagcagcaggggcagcggcggaggcggcagcagcaagggcagcaataaggccagtggctaa

SEQ ID NO: 40676 - DNA, 48 bp, Zea mays
  Peptide Sequence Number=SeqID_84051
atggcaaggaacccgggctgcaccgtcttcatagtccttttcaagtaa

SEQ ID NO: 40677 - DNA, 567 bp, Zea mays
  Peptide Sequence Number=SeqID_84052
atggacgcggccaccggaaggctctcgttcgtgtccccgctcaagggatgcgaaccagccatcaaagccgaagagcgggccgctccgaagcgcaccggcaacaacagttcgccttccccggcatggctggaggacatctcctccgcagagctggaggatggtttccaccaccagaagctggaagaagaggtggccagccgacccgcgcggaaggtggagccccggctcgcctcgctctccgccccagcaaggatgatgaacatccttgaagctgagggcgggaccaatatcgcagcccggcttgcttctccccatccaggggctggtggtcaccatctcgggctccgagcctccctactgatcagaggttcgaaggctggcccctcgaaggggttcaacagccgccttagagcgcgtgggctccacgcccactactggtcagaggttcgaaggccggcccctcggaagggttccacggctgcctcaggccactcgggctccgcgcccactactaatcaggggttcgaaggctggccctcgaagggttcacagtcgcctcagacatag

SEQ ID NO: 40678 - DNA, 1734 bp, Zea mays
  Peptide Sequence Number=SeqID_84053
atgaccacagtcggctacggcgacctgcacgcccagaacaccgtcgagatgatcttcaacatattctacatgctcttcaacctcgggctcaccgcctacctcatcggcaacatgaccaacctcgtcgtcgagggcacccgccgcactatggagtttaggaacagcgtaaggacagcgtcgagtttcgtgggccggaaccacctgccgccgcggctgaagcagcagatcctggcctacatgtgcctcaagttcagggcggagagcctgaaccagcagcagctcatggaccagctgcccaagtccatctgcaagagcatctgcgagcacctcttcgtgccggtcgtcaaggatgtctacctgttcaagggtgtctcaagggaaatgctgctgtccctggccaccaagatgaagccggagtacatcccgcccaaggaagacgtgatcgtgcagaacgaggctccggacgacgtgtacgtcgtcgtctctggcgaggtggaggtcgtactgttcgacggcgtcgacgagcgggtggaggcgacgctggggacgcgcaacatcttcggcgaggtgagcgcgctgagcgaccggccgcaggcgcccttcacgttccggacgaggacgctgagccagctgctgcggctgaagcaggccacgctcaaggaggccatgcagagctggcccgacgacagcgtcatcatcatcaagaattacgtcaagcatcaggtcgagatgcatggcatgaaagccgatgactcgctgggagacaacactagcgagcacgacgacgacgcgaatgtgctcacagtcgccgcgatgggaaacagcggcttactcgaagacctcctcagggcagggaaggacgctgacgtcggtgacgccatgggcagaacagcattgcacatcgcggcgtctaaggggtacgaggactgcgtgctggtgctgctcaagcacgcgtgcaacgccaacatcagggacgcgcagggcaacacggcgatgtggaacgccatcgcggcggggcaccacaagatcttcaacatcctgtaccactccgcgcgcgcgtcgaaccctcacgccggcggagacgtcatgtgcctcgccacgcggcgcggcgacctcgacgcgctccgggagctcctcaagctcggccttgacgtggactcggaggaccacgatggcgccactgcgctgcgcgtcgcgatggccgagggccacgcggacgcggcaaggttcctgatcacgaacggggccagcgtggacaaggcgagcctcgacgacgacggctccggctccggcgccgcgcggcttacaatgtcgccgacagagctgcacgagctgctgcagaagcgggagctcgtccactcgataaccatcactgactcgccaccggtggtcccggacggcggctcgtcggggcacagccgtccgggcagattacagagcacaggctcggacaacacgcgctggcctcgggtgagcatatacaggggccacccgttcctcagaaaccgcagctctgaagctggcaagctgatcaatctgccagccaccatggaagaattcatagccgtcgtcggtgagaaattgaaggttgatacggagaaggcgctgattgtgaacgacgaaggagcggaggtcgactcgatcgacgtgatccgggacaacgacaagctgttcgtggtcaccgaagaagatctgacgcggctggcaccaatggactcggtgccttcgtcatag

SEQ ID NO: 40679 - DNA, 684 bp, Zea mays
  Peptide Sequence Number=SeqID_84054
atgacggatgcggagaaggaggtagcaacagaaagacggatggactcaccgcctcgatgcgattgtggagaccgtgctgtcatcgatgaagactatgagaagcaattctgttgtccgaacattgattatgagacgaggaaatgcagttgggagagttacgacgacaaaggagaggtgatgcgcacaatagagtccaagagaataatgggagagaagatgcgttgtggatctcggctcgtcgattcgcggcagatgagaagagaccataggatgcaagggaatgggaagcggctcaagccgagaaacagatgttggataatcttgctgatcgcctcaagggaagataaaatggcaacggttgagctgatggaggaggaggacgacacatctagattgagtgagcttatcgctctcgcagaggcaggattacatgaagaagaggaggacgacacatcaaggttgagtgagctcgtcgcactagctgaggcaggattacgtgctcaagaggaagaggatgagtttatgcctcaggccaccgaagaggtagaggcggcttattacaagaagaagtctgatgaggctgaggctgaggatgagctattctcccaagctgcagatgaagtagaagccaattattacaagagaactggtgacaagtgtgatgcaggacaatgcatcaagtga

SEQ ID NO: 40680 - DNA, 368 bp, Zea mays
  Peptide Sequence Number=SeqID_84055
ctcttgagcttcaccgctccctcgcgaacacgacacacccattcccatcacctattgcgctcggcaacctcgccggtgatcccaccgccgtgggcgcccgccacctcgtcgtggatcggccgtcccaagcaccctctggccaaattggccccacctccgtaatcccctacctccgcccgtgcctagccaccactccatcgacgcagaaccgagaccgcgatggagaaccgtcgcggagcctcaccggtggtcgaactccggccgagattcagaaaaagttgcatcatgagcgagggaagcagaagccagaagaggtagctcctcctacagtagaagacacccacccggccacacttctggttatataa

SEQ ID NO: 40681 - DNA, 972 bp, Zea mays
  Peptide Sequence Number=SeqID_84056
atggtcgtaggccgcctcgatgagatgatactccttcacttccatctcctccccttccgagccctcgaggatgaaaggggaaggtccgtgagagcccctccaggagcaggcagcgtgggcagcatgaccccagtggaggaggaggtagtggtggccggcgatggtggatcctggagttcagcgaccaccgcgggtagcatcgctgccccagacaagccaaccgtcactgatgtgcctgaaggcaagagggtcggggcggcaccaacaaggaagcagcctctgtccgccgcgagcccgcgaggagtagctggaggaggcgtggccaccgatcggaccttctctcggtgcgtcgccagatcgactagcgttggaggaggcaacgctgcctcgccaccctctacccacgcggcgggagtcgaagacgacccagtagcctctgtcctcccttcgtggcgccctacaggaatggcgacgcttcttacgcaccactgcggccgcctcatctgcttcctgcttcctctccaccttgatagcggcgccttcagggagaggaggaagggaggcattgacaataccaagcccctacaagagcgcccaccattgagacccaaacaaggaggaaaggggaaagagaaggaaaaacttaacaggtcactcaacctcgcttggtcgaacgacaaggtgccactctcatccagaaaatctaacctaaaggcgctgatgcacgaaagtgcgtatcagcctctcgtcgaaaaggccccgcccatgctgcttggtgatggcatccagtatataaccgatctttcgcttgaacttcttctcttcaccataaggccactcaggcttagccaccaggatccagctagtgaacattggcgcactcccctcgaggttgcgaacaaagaaccactcgcctttgtatctacgaacgaaggacgagagagggatcctcaagtaggacgccttccatga

SEQ ID NO: 40682 - DNA, 354 bp, Zea mays
  Peptide Sequence Number=SeqID_84057
atgggggagggagtaatggaggaagaaaaggcagccttgaactccattaactcgaagacgaatggtcggtgcgtggggcgcggacggctcgggttggtcctaggcgctgctcgggtcttcagggcgcgacggcgtcgggttgtgcgcgggtgcgcgaggcggctggcgcgcatggcatgggcgcgggtccttggcgctggtcgggtgaagcaggggcaggcgcgcggcctgggcagcgcggtgtgcgcggtagaaagagaagagggggagagggagaagtgcagggggcggcggcggttgctagcagggaggcggcggcaggtcaaggggagggagacgacacagctaggttag

SEQ ID NO: 40683 - DNA, 354 bp, Zea mays
  Peptide Sequence Number=SeqID_84058
atgggggagggagtaatggaggaagaaacggcagccttgaactccattaactcgaagacgaacggtcggcgcgcggggcgcggacggctcgagttggtcctaggcgctgctcgggtcttcagggcacggcggcgtcgggttgtgcgcgggtgcgcgaggcggctggcgctcatggcgcgggcgcgagtccttggcgccggtcggttcaagcaggggcaggcgcgcgggctgggcagcgcggtgtgcgaggtagagagagaagagggggagagggagaagtgcagggggcggcggcggttgctagcagggaggcggcggcaggtcaaggggagggagacggcgcggctaggttag

SEQ ID NO: 40684 - DNA, 762 bp, Zea mays
  Peptide Sequence Number=SeqID_84059
atggtggctgacatctgggatgcgcactcgtgcgagaacgtggtggagtgtgtcgtgtcgccagtgcggtcgaggactggcgggacacgtgtccaggacatgggggacaagcatgcggaaatctatcttgatgctgctttcgatgctgcaagtgcttggatcaccccgattgacatggatttccatgattcaaacaacaaagcttgcgacgctttgttctcgtgcctctcgcttttgagtttgagcgagttggatatttggctacggctcacaagatttgctccactctcaagagattccatgagggcaacgatcaaagagtacgagaactttatgcaggtggctagagaggccattgatatgatgttttctcagttccagacactcattgtggatgagcttttcagcaagcccaagtccattgagattgaccaccagacctgggctaagatagagaaccctggccaaccgaccatggtcctaatctctggaggcagttcttcctctaacccctcacctgctatgtttactttgtcttctttgttgaccattacaaaggagaaggtggaggtcctaagggatgaaaagctggtgcttgtggccagtcggttcacatggcatggtgggtcaaaggatggatgcaacagctatggcgaccccgaacacttcatcgcaagttgccgcaagaagggcaagcaggaagctggccccgcgcgaccactactctggttggtgcaagggcaagtgggagtacacctctag

SEQ ID NO: 40685 - DNA, 330 bp, Zea mays
  Peptide Sequence Number=SeqID_84060
atgtcggagagtagttctccggccgggtggcggagtgcacccgccctaaatcctaagatgaggaggggcttaggtgttttgcttgatcgttggagtgaaggggaagaactcaagaacacacaagggttagagtggttcgggccgccggagcgtaataccctactccactgggctgcacgacctcacgttaggtttggcccgatagcttatgtcatgggccacaagcagcgggcctccgcctgggtaggacgtgaagggcaaggcccagacacgtgtcagcaccggacccctgctcataccagggttctccttgttccaagaccctgctga

SEQ ID NO: 40686 - DNA, 1056 bp, Zea mays
  Peptide Sequence Number=SeqID_84061
atggcgacggagacgcggcggcaacccgagtcggcggtggcggacctcggcggctgcgcagagaacggcggtgagcgcgggcagagggattcagggagggagagggtaaattggggcgcgtcccgggttgcggacgtcggggcggagctcaccgtggcggaaggcacgacggggctccaacggcgacggagaaacgagcccgggcggcggtggtttaatggcggcggcgctgtggcgtgtgcgcagcgtgggggaggtggaaggggggtctgtagatgcgcaaatgagggagggggagagggcgagcgaggttctgggctcaagtggccgaggcgagtaactcacgttcggatgagtgattccgcggaccgaacaagtcttcacgctcggaagctcttctgccggagcgattcatcgagccttatcgattgcgtcggtgacagagccccatggacgggtaagagtgcgcgtaagcggcaaggccgaccgagccgagggactcctacgcctccgggatacggatacctcactcaacaccttccgcgagaagcaactctcgctcgcacaaacatttttgttaccgacgaaaaagtccagatactcgaaacaagaggaaaagagacgcagctttacaacacggcgagggtgtgttttggcctcggcggccgcaggaaacacacgctacaagacaatccgatcctgcaggctcggatcctaacgcttgaagggagcagcagcaccctcggcgtcgacaacaccttcggcgaggtccgacctagcctcagacggcgacgcggtccgaagatctccactctgaaggacggcgtcatcaccaaacccgggccatcgctgccagggtcttctccgggaatccggctcgggcaggcggctcggctggtcaccccgaggcctcggccggctgtccaccgcggacatcagcccgacccgaggcctcggcaggtcaattccggcggcggtcccgctaacgggcaacccggccaggctccggccaaccaggttttcttttcgagccaactctgcctctgttcatgctga

SEQ ID NO: 40687 - DNA, 576 bp, Zea mays
  Peptide Sequence Number=SeqID_84062
atgggcatcggaaccaggggacaccagacgacaaccctccttccagatcagctcaggtcggtttgggctctcgagtctatactatcgaggactgcagtgaatgctcatgcaagtgaaagtgatctacgacttattgtagatggcataatggcacactataataaaatattcaatacaaaggttgatggcaatgggatcctcatagacaccgcaattttcctgacgatggcatatcccaagggaagcaggcaagtgctacccaccagggacaccacccacctggtacccttcaatcacaacaggatccagttcatcctagcgggtgtgtacgacaggattcaggcgctccaggatcacgacgcagatatcaacgggtggttgagggagagagaagggggagatagaggcgtgagcacgagcgcgctcgtcggcgttcccgtctctccaccatgcgcgctcggcgggctgttcgacgtgcaggtcatagccttcgtcctgatgggcttgaactacatcgtcttcagttcgaaagccgcctgttcgggctcggcggatctttctatctgcctggactaa

SEQ ID NO: 40688 - DNA, 1359 bp, Zea mays
  Peptide Sequence Number=SeqID_84063
atgaccaaatctagaatagtcgggaacaaaaatgtgagcagaataaacagacactatgttcaagccggcctcaaggtggcggaccacaccatagaagtgaaagggaagcgtcccacgtggcccatctcctctcacgcgcccgcgctcctccctccaccgctgtcagcccggccccacccgtcagctgcactcgccctcgctccctcacaaccgccctctctctggcaagcgggccccgcttgtcagccccttcctcgcgcccgtgaccaagctatcgacgcgatcaccgtcggccgccgcgcgctccatcgcttcgccattaacacgctcgccagctcagtttggcgccttgcgtcaccgcgcaccgtgcccgagctgtcccttcaccccgcctgcccgagccatcccgtcgccaccactgtgcgccatcatcgccgtcgtggcaagctcgctgctcttgagcttcactcctccctcgcgaacacgacacacccattaccatcacctattgcgcccgacaacctcgccggcgatccaaccgccgcgggcgcccgccacctcgccgtggaccggccgtcccaagcaccctctggccaaattagccccacctccataatcccctacctccgcctgtgcgtagccaccactccgtcgacgcagaactgggaccgcggcggagaaccgccgcggagcctcaccggcggtcgaactccggccggtttgccccccctaacgccgtcccctcccctcctcgctggtgcgtgggcccgtgcccacggcgccgtccccactccgtccaccgctggtgggccggctgggccgtctgaccgcgcgcgcgcccgtgctcggctgggccgaattccccccggcctagccctgtcaggaagagatcctactgaagatgaccccaccatagtctatatggctggatatctccacacactcgataaccaatatgacgacctttcctcccactgcacccacctaaactcctgggttgaaagcttagagcaacaggtcaaggaacttaaaaaagagaaggcgtctctccaagaaagtctcgagatagcagaaggtgaagaggccaacactcgtgaagcctaccgaaccctgaagatggattacgataagaagttaaagaagctcgcccccactaaaaagatccagaagagaaccaagagccaaggatgccagactgaacggaaaaaggaagccccaccagcactgcctccctccaggatagaaaacttatcagacattgaggatatgtccctagctagtcttgacgaccttctcaaggaatttggggacactttagaaaggcagttcggaagcaccttagagagcactcgcgtgtag

SEQ ID NO: 40689 - DNA, 807 bp, Zea mays
  Peptide Sequence Number=SeqID_84064
atgagtgattccgcggaccgaacaagtcttcacgctcggaagctcttctgccggagcgattcatcgagccttctcgactgcgtcggtgacagagccccatggacgggtaagagtgcgcgtaagcggcaaggccgaccgagccgagggactcctacgcctccgggatacggatacctcactcatcaccttccgcgagaagcaactctcgctcgcacaaacatttctgttaccgacgaaaaagtccagatactcgaaacaagaggaaaagagacgcagctttacaacacggcgagggtgtgttttggcctcggcggccgcaggaaacacacgctacaagacaatccgatcttgcaggctcggatcctgacgcttgaagggagcagcagcaccctcggcatcgacaacaccttcggcgaggtccgacctagcttcggacagcgacgcggtccgaagatctccactctgaaggacggcgtcatcaccaaacccgggccatcgctgccagggtcttctccggacatcagcccgacccgaggcctcggcaggtcaattccggcgtcggtcccgctaacgggcaacccggccaggctccggccaaccaggttttcttttcgagccaactctgcctctgttcatgctgacaccgctacccctgccctcggctcatcggagagcggccgaggggttcctttaactaagctagagaagcctcggacaacaaggccgaccgagctgagggactcctacgcctccgggatacggatacctcactcgtcacctttacacggggcgactcaggcttggtga

SEQ ID NO: 40690 - DNA, 611 bp, Zea mays
  Peptide Sequence Number=SeqID_84065
atggaccacagctctaccttgtcctctatgcgggagtcctcgcctcagccatcttggggttttgcgctggctgctcagtggtccttgggcctttatcgctctgggcgtctgcttgctcctggtgctcgacattatggctccaaactcattggtgaagaatcggagttgcctcgtgtagggtgcggcaaggctttgaaacaatggcgcaccatggccttcctctggctccagtgctccacgcccaccgcagtccgccaaggcgccaagcgccagccgcccagaagccctctaatggagactcgcgaggaggtgctcggatctcttccaccgcgccaagcatcgagtgctcagcagagggagcgggttcggcgctcgctcgtctctcccgcggcactacgtcctgttcctgctcccgcctcctttactgcagcaacgccgccatcgactaatttcccttcaaatggtactgtcaggttgatcgaggaacgacgacgaagtctaacaccagaacatgtggagatgctgtccctggccaaggattgggagcaagcagctgttcagcagcaacactgtgttgagaacaaagatcttgaagagctaatggaaaacat

SEQ ID NO: 40691 - DNA, 1128 bp, Zea mays
  Peptide Sequence Number=SeqID_84066
atggaggcggcagcgtcagccgagtacgggtactacggcggaggcgcgggcccacacgagacgaagaccgccgggtgcggggaccacttcgtcgtggacgacctcctcgcgctgccgccgtacgacgacgaggaggagggggcgacaggcgagaccccgctgtgcctgcagcctgtcaaggaggaggagggcggcctcgggaatttctcggccgactcgtccatcgtcgtcacagcaatcgacagctgcagcaactccttctctaggctagccgacgacgacttcccgggggaattctacgagccgtacgaccaactggtggagctagaatggctatcaaactacatgggcgagggcgaggaaactttcgcggcggaggacctggagaagctgaagctcatttccggtgggttctccccggcggctgtgaacgtgtcagcaccagctccagtgggcgtagcttcagccgcctctgcgacacagtccggtatgttcctgccggtcccggcaaaggcccgtagcaagcggtcccgcgcagctccgggcaactggtcgtcacggttggtcgtgctcccgccgaccccggcctcaccaccggcccctgcagcgtccatggccatttcgccctcggagtccggcatctcggcgcagcaggcgttccgcgccaagaagccgccgccgtcgaagaagaaagacgcggcggcaccggcaccggcaccggcagaagggcgacggtgcgtgcactgcgacacggacaagacgccgcagtggaggacggggcccatgggccccaagacgctgtgcaacgcgtgcggggtgcggtacaagtcggggcggctggtgccggagtacaggcccgcggcgagccccaccttcgtgatgtccaagcactccaactcccaccgaaaggtgctggagctgcgccgccagaaggaggtggtagtgcagcagccgccgcacgtgatgggcggcgccggcggtcctgcaggcgggctgatgcgcatgcagagcgcgatgctgttggacgggccggtggcggcggtgtcgtcgtcgtcccccatcgtcggcggcgacgagtttttgatccaccagcacttagggacggcagactaccggcagcgcatctaa

SEQ ID NO: 40692 - DNA, 423 bp, Zea mays
  Peptide Sequence Number=SeqID_84067
atgggcaagggtaccaagcgcaagcgcgagccgactcctccgtcggaggatttcggtgactcagaatactcggaggaggagttctcctccgagtccgagggatatccggctcccgtctctcccccggcgtcgtctgatgattcagacgactcccaggggattgccgcggaggtctggacgtacatccgggccgtcgagcgctccgggctcgagggctcggatgagtctgagttttcctcggacgaggaggactcggacggcggtgaggacgaagatgacgacgacgacgacggcgacgacgacgacggtggcgatggcgacggtgacggcagcggcggcaagggcagcaccagaggcggcagcagtacgggaagcaccagaggcggtggcggcaagggcagcagcagcaaggccattggctaa

SEQ ID NO: 40693 - DNA, 117 bp, Zea mays
  Peptide Sequence Number=SeqID_84068
atggcgcggcttaccggcggtgagggaggtccaatgaagggctggggatgtgccttggataatttggccactttttgctatttgctccgcatggttttggtgccagcacaagggtga

SEQ ID NO: 40694 - DNA, 504 bp, Zea mays
  Peptide Sequence Number=SeqID_84069
atggctcagcagaacgagattctacggcagctcgctcagcgtcagccaccaccccaacattatggtggtgaagacccactcgacgcggatgtttggctcagggtagtggaatccaaattcccactacttaatagggattgttcagatgtagctaagtacgcaggctatcatgctgacacggatgataagaagagagacagattcaggaggggcctcagtactaagctccgtgaccgtctcaacacagtcagggccaacagctacaatgagttagtcaacatggccatctctcaggaagactgcatcacagcccgtcaggcagaaaagaagagaaagacccctatggcaggaccttcagctcaacctcagcgctttaggattgtgtccaacactcagagtaggggacctcagcagcagcaagggcgatgggtgatccgaccacagcagcagcaggcacccaaccgctctcaacccctagttcagaggaacaacgatcagccatag

SEQ ID NO: 40695 - DNA, 288 bp, Zea mays
  Peptide Sequence Number=SeqID_84070
atggcagtcggggtcagtgaggcattgtacgccaaggcggtgagccctgatctgttgtcagggaatcgatggggacggttgatgtgtgtggggacggagtgcctcgccacgtcgtctagtgcttttggcaaccaaacccctcagccaaacagctacatgtctagaggtagaggagtagactcctcacaccgggacatggttgctggagtgacttggccgtccatcttgccaccgggttggacagtcgagtgggaccctacctcggccgaggaggagcatgaggagtga

SEQ ID NO: 40696 - DNA, 219 bp, Zea mays
  Peptide Sequence Number=SeqID_84071
atggtctcccattccggttatggtgggtacaggtgcggtcactgcacgacggcagtcggggtcagtgaggcattgtacgccaaggcgccttccttgtggcataattttacaggttctctggaggacatggttgcgggagtgacttggccgtccatcttgccaccgggttggacagtcgagtgggaccctacctcggccgaggaggagcatgaggagtga

SEQ ID NO: 40697 - DNA, 700 bp, Zea mays
  Peptide Sequence Number=SeqID_84072
acctattccggccatcaccgtcgacgacctgcacctcgacgtgaccgccaggacctcccagatctcacccagcccttcaccggacctccctcgccgccgttatggtgggtacaagtgcggttactgcacgacggtagtcggggtcagtgaggcattgtacgccaaggcggtgagccctgttctgttgacagggaatcgatggggacgattgatatgtgtggggacggagtgcctcgccacgtcgttctctggaggatatggttgctggagtgacttggccgtctaccttgccaccggggccgaggatactattgagtccacaactctccacgtgctgacgaccttctgcggctttcaccccttggagctatcgacccatcccattgtcttgttccccgctgagaaggaggatgacccaatgtggaaggatcgggtggagcacgccaaggatgtggaggccagggagaacaccatcgaggttctggaagatcagctccagaccacacagcaacagtttgaggaagtcaaccagcacttggatctgcaccatcaagaaattcaggacatggaggcagaaggggccaatgaggatgtagacatcgagagaggagaggagctggagcctgcatccagcttggacactgctggctcaggaagaccaccttcccccgagtctagcgttgcctcgtttgctcattag

SEQ ID NO: 40698 - DNA, 327 bp, Zea mays
  Peptide Sequence Number=SeqID_84073
atgagggcagtgggaggagcgcgcgtgggaggaagcagatgccagggcgcgcgctcgtggaagaagccgaagtctgtaggcggtggcacagtgaaagtattagggagggcgtgggaggatacgagagagaaggtgagctcgcgtacaggaataagaatcagatgcaacctcttgggtaaaatacacaaaaagaggtttaccaacaagtggtcacgttacaagttagtaaaaaccaacttgttgaactactttgacattgagcaggtcccctcagtaccatcggcacaggacgcagcctgtgagaaattaccagtatgccccttataa

SEQ ID NO: 40699 - DNA, 537 bp, Zea mays
  Peptide Sequence Number=SeqID_84074
atggccgatgaaggctttgcgcgaccgagcgccatggaaaattgggagcgcgcaagagcagaggagcgcgcgcgcaggaaggtccatggctggggagggcgagcagagaggggcgcgacgcagattgaaggactagaagcttgggtgccggcagaggaagctgcgagcggaagggagctccacaagctgggatccgatgcgcgcaacagggaaaaggggagggagagaagtccagggagcggcggcacagtgaaaatatcagggagggcacgggaggatacgagagagaagcgttattgtgagagtgaaagtggacgtgctgctactcccctcattcccaacatgtatcaagtacctgcattgagtaatacaatagatgacttctgccttcatacctctaaggatatgaagccgcatcgtacccctcctcgggcaacgtacgatgctaaaaatgtgccgggaataggatgcaacccaaacggtagcaaccaccactgtatttacttgcttttaccggaagttcgggcaaatctctaa

SEQ ID NO: 40700 - DNA, 411 bp, Zea mays
  Peptide Sequence Number=SeqID_84075
atgggcaagaacaagcgcaagcgtgagccaactcctccatcggaggattttggtgactcggagtactcagaggaggagttctcctctgagtctaaggggtctccgactcccatccccctgcgtgagtcgtctgacgactcccaggggctcgcggcggaggtttggacatacatccgggccgtcgagcgctccgggctcgagggctcggatgagtcggagtactcctcggatgaggaggactcgtccgaggagggcggcggcggcgacgacgaggatgacgacgacgacgaaggcggtggcggcggtgacggtgacagtggcggcaggggcggcagcaacggcagcaagggcgacggcggcggcagcagcaggggcggcaacaggggcaacagcagcagggccagtggctag

SEQ ID NO: 40701 - DNA, 903 bp, Zea mays
  Peptide Sequence Number=SeqID_84076
atgtcccccctcggctgggccgaatccggcccaaccctctctcccactctcccgcacgccgagttccctgcccggcccacacagcccatctcccgcgtgcccgcccgcgctcgtgccgtgcctcccctcccgctgaccggccagccccacccgtcagccgcaacaccccgcccgcttgcaccacgctcttcctctagcaagcgggccccgctcgtcagctccctctctctctcgcccgtgatcggctatcgacgtgatcaccgtcgaccaccgctccgccacatcccctcgcctttactcgccaaccagccaaattggtgccttgcgcctgtgccgagccatcctgtcaccaccgtctgccccgagccatcccgtcgccaccactgcgaagagggatccgatcctccagaaatcgtagctccagaagaagggcaggaacccgacctctcggaaatagacctttcgtgtcaagagaacttcgacgaaggctcgctagagcttgtacttggtattgtaataacttttattcgaaactctatactatttgaaatggaaggctcctttgtcattaggacatcctactgctcggaggtggaaggattccctcaccttctgcggagttgcgcgcttcgcatggggatccgcaagaagccggaatacgtctggaaagaataccgcgagaacgggattgagaaatgctccatggcagtctacctgggagaaagcggaaactacccaaatcaccccaccttccaaatcaccgccactggacatcgcttcccagatacttgccagagtgctgccccaagagccctctgccagctatgccaaaacaatagcagggaagtctctgagacaccccttcgctactttccacccagcaacaaaaatactcctgcctag

SEQ ID NO: 40702 - DNA, 825 bp, Zea mays
  Peptide Sequence Number=SeqID_84077
atggctaaaggtctcgatgtcaagcctggttccactgttaagtgtgagcctggatatcgttttatgctgcacctttcccagaaacttgccattggaaccctctctgttgacaagaacccacccatacaatttgatctggttttcgataaagagtttgagctgtcgcacacatcaaaaactaccatcgtcttcttcattggctacaaggttgagcaaccattcaaggaagatggatatccttttttatttagcattgaattagttctatttcaagtagaagtgatcagaactttttttgtttccttgacctcttatttgccttcttccacaatggatcttgattctgaagatgaagacgaggagctgaatgttccagtagtcaaggaaaatgatatttttaataatgacctcggtggaccctatgcatttcttgagaaaagtcaagaaaaggcagttcctgcagcttcaaaatctagtccggcttccaagaagagcaaggatgacgatgattctgatgaggacgagactgatgattctaacgaggacgagacagatgattctgatgagggtgagggtttgtctcctaaagaaggcgatgatgatgatttaagtgatgaagatgataccagtgacgatgaggaggaagacacttcaactcctaagaagcatgaggcaggcaagaagagagctgctgaaagttccatgctgaaaactcctctatctgataagaaagcaaaagttgccacaccgtcagctcagaagacagttcaagttgcgttttctacatggccatggggaccatctgccatcattttctttttgtga

SEQ ID NO: 40703 - DNA, 195 bp, Zea mays
  Peptide Sequence Number=SeqID_84078
atggcgctgttgctcacgcacgcgaaatccgcggaggggaaggacccgacagcgcggtcccgcgtgtcagcgatggagcgaaggaggcggccgcgcgagcaagtagcggatcagtatgagggctcggggcccgagtgctctgaggcggctgtcgaacccttccgaggggccagccttcgaacctctgatcagtag

SEQ ID NO: 40704 - DNA, 363 bp, Zea mays
  Peptide Sequence Number=SeqID_84079
atggaattaccactagacgcgcagagcagcggaagatgtctcgatgtagacgaacgcgtcgagcagtgccgtgcagtcgccggcgtccttcacgtcctcgcacagttcgtccaagtgctccagatgcagcacctccgagggcatatttctaacacctgcttggaggccaagggcggtaggctctactgggcggtaatcgagtatatcatgatgtgcttctggagccacgacccggccatctccttggagccggtgatcgctggtccggtggccgacactgaagacgccgcccgggagggcatacaagatgtcgtagaactggtggccgaacgcttccagcaagatcctactgatgatgagtag

SEQ ID NO: 40705 - DNA, 426 bp, Zea mays
  Peptide Sequence Number=SeqID_84080
atgggccgcagttttttagtaaagtgggacacagcccccgcctggcgacgtggccccggcccaccaactggaagcggcatgtgttcccagccgccattctgcgatctgcatggctgttctgcttctgccttctgcggtctgcgcttctacgttctacgattaacgatctcagtctcggccctcagcgagggcagagaagcttcgggcgcggcaaagcagtggcgtcgtgcgcagagctacgataggcgtggacagaacagcgggaagaaaagacaagatacagaagttgagggtatagaggaggaggtcgaaggatatgagcatgactttgggatacatatggatgtggacggtgatgtttatgatgatgatcatggagtacctgagatgatcggtgaactgtttgcagcggcagaggctgattga

SEQ ID NO: 40706 - DNA, 264 bp, Zea mays
  Peptide Sequence Number=SeqID_84081
atggcagtgcgggcgcgggcgcggcacgggcgcgagcgcacggcggtggtgggcgaggtcgtggcgggcgaggtcgcggcggcggtgggcaggggcgcggtgggcgagggcgcggcagcggcgcgtgagagtgagagtgagagtgagagtgagagagtgaggaagaaagcactgaccgttgatggcaagttcacagccatgttgagtgagcatggtgctcgaagtttccgatccgctcctgaaatcggtcgtaacttgtgctaa

SEQ ID NO: 40707 - DNA, 816 bp, Zea mays
  Peptide Sequence Number=SeqID_84082
atgagcggcttcggggctgcttccggtgccacctcccaccgaggcagccgggagaggtttctccgccgacgagatagtcggagccacccacggactgacctccgactccacggccttggtagcttgtcctcgccccccgagtggggtcgtgggcgagggccttgtcgcagcagcgtctaccctgaggtcatcgctgctgttgtttggccgcctggagcggaggtcattgtcgctgctgccggagcgggcgtcggcgagccacctggggttttgtcgccccgcaggccctccaatgtggggggttgttcgtacctgcgggggtggaaccggagttccgtttgtaatggcaccttgagtgccggtgtctgttcatcgtggctgtcggggcctgaacatgcatatgagtccctcggctcggtcggccttgccgcccgaggcttctcttgcttagttaaaggaaccctcggccgctcttcgatgagccggagccagaggcagcggtgccagcacggacagaggcagagttggctcgaaaagaagcttcgtcggtcggagcctggccgggccgtccactggcgggaccgacgccggagtcgggttgccgaggccatgagccgggctgacgtcctcgggggacagctggctgaggctacggagcggccggttgagccgtctgctagggccgggttcccggaggagaccctagcggcgatggcgcaggcgtggtgccgacaggttccttcgaggtggagatcctccgaccgtgttgtcgttcgaggccgggttggactccgccaaaggtggagtcgatgttga

SEQ ID NO: 40708 - DNA, 411 bp, Zea mays
  Peptide Sequence Number=SeqID_84083
cccgtgtgtagacgcttccaggtgcttctctcctcgcatcttctctgcgtctccgtcctcatcacgcgctccctcctcctcccaaaccccaccctccactgcttgcccgcggctccggcgacagccgctttacactccgattccctccaccgccgctccaaaggtccagccgccatcgcttcgggctccagatcccagcgccagcgccccaaaggtcagacatggatgcacccgattttccctgccctcttctatgcctgtgatagagtcatcaggaaatttcatgagaacgactaccattcaagtattgtgaggcgccccttctctataactgtggcaccaggagataactacttgactgtgcatatccgcacgctgggtgaccggacatccaaactttcgattctctga

SEQ ID NO: 40709 - DNA, 390 bp, Zea mays
  Peptide Sequence Number=SeqID_84084
atggcgtactgcgagagcactgggctgggatgggcggggcggtctacgtggggagacaaaggcgtcactcaggtgatagcgagcgcgacgcggacgttccagccaccaccacgcaccgtaggttaccggccgccccggccgtaccctcctcggcgacgtcgcagatcgaaacgcgcaccaccagcggccgtacggtgggcgcaggcgaagcagcacgcacagccggccaacgctggcgccgctattgaagttgaagcatgcccacctactccagcgcatcataatggcagacgctacgggcgctggccgtacgacgtgagcctggggccattcgtttggccatttccgggtgtgcctttgcacgaggccggcctcgcccttggcctctag

SEQ ID NO: 40710 - DNA, 770 bp, Zea mays
  Peptide Sequence Number=SeqID_84085
tcctcccccggcagcggctctccgctgccaaccaactccaccaacaccccccacaacagcaggagaaaaaaagggacgagccatggccatggactcttcctcctccggctccgagcccacgtcctcgtcctctgctgaggctcctgcgtccccaaccgcgtcgtcctccgaatcctccgccgcgggcagcaagaagcggcggcgcagcaaggacgggcaccacccgacgtaccgcggcgtgcgcatgcgggcctgggggcaagtgggtgtcggagatccgggagccgcgcaagaagtcgcgcatctggctcggcaccttcgccaccgccgagatggcggcgcgcgcccacgacgtagccgcgctggcgatcaagggccgcgccgcgcacctcaacttcccggagctcgcgaacgatctgccccgcccggccaccgccgcgcccaaggacgtccaggccgccgccgcgctcgccgcggccgcggacttccaggcgcccgccaatgcagccgccgccacggaccccgacgacggcccggccgccgccgccgactccgcgtccgcctcgccgccgccgccgccgccacagctggacaaccccgacgacgctctgttcgacctccccgacctcctcctcgacctcagacacggggcctcgtcgtgccagctctcgtgcgcgccgtcgtggtacgacgacgcgtgcttctccggcgccggcgccggcgccggcgcgttgttccgcctggaggagccgctgctgtgggagtactga

SEQ ID NO: 40711 - DNA, 417 bp, Zea mays
  Peptide Sequence Number=SeqID_84086
atgggggggcctgcggagcaacagaagaccgacgaacggcgcgtcgtcactcgctccagcagcggcgacgacgacaacttctgctccggggggccaaacagcggcaacgatgacctcagggcggatgccgctgccaggaggcccccgcccatgcccaaactcgtgaggcaaggacgggcagaaggccgtagagttggaggtgactctccctacttgcgtccccagccgtcgtgggctgagtcttctccaacatgctccaaggtcctccccctacggcgcgggggctgggtcccacacgtcatgcaagccggcccagagcagaagaagccaaaccgccgcgcacggtgcatgcaaccgcccagcggttacaagcggccctccacttttgcccagaccagcgggcgaaagggcgggtag

SEQ ID NO: 40712 - DNA, 144 bp, Zea mays
  Peptide Sequence Number=SeqID_84087
atgcggcggccgcctgtgcatgcactgaggatgagcgcgctgctgctgctcctctgcctgtgcgcgtttcccgccccggcacgcttgtgcaacataagacaagttagaaatttaactatctacgtgcggttattgatgtcttag

SEQ ID NO: 40713 - DNA, 729 bp, Zea mays
  Peptide Sequence Number=SeqID_84088
atggaagaagagcgagcactgtccccggtgtccgatgccagcaccacctgcagcagctccggcggtaccggccccaactcccctatcacttcgtcgcagtctgtggacgacacctgcggtggcgccggcagctcgagcagccggaagcggccgcgccgggagctgaagcacccgacgtaccgcggcgtgcgcatgcgtgcgtggggcaagtgggtgtccgagatccgtgagccccgcaagaagtcgcgcatctggctgggcaccttcgacacccccgagatggcggcgcgcgcgcacgacgtcgccgcgctcgccatcaagggccgcgccgcgcacctcaacttcccggggatgtcccacgaactgccccgcgccgcatcggcggcgcccgaggacgtgcgcgccgcggcggcgctcgcggccgcgatggagatggagagcgtggcgccgcccacgccgcctggcgattctagccacagcgcccgcaatgacgagaacgaagagccggccgcatcgagctcatccggcaacgacgccgacaatgcgcagagcgaagagcaggctgcgccgtcggagcactcggtgctggccgacgggcacgtccttgatctcgcgctcttcgagctgccggacgttctactcgagttcggcttcgcgccgccgccgccgttgacgtcttgtgcctacgatttgtcctgggatgagccgttgctgctctgggagcactga

SEQ ID NO: 40714 - DNA, 963 bp, Zea mays
  Peptide Sequence Number=SeqID_84089
atgcgcctaggggtcccttttatagccccaaggcagctaggagccgttgagagcattccaggaaggcaattcttgccttctgtcgtctggcacaccggacagtccggtgcaccaccggacactgtccggtgcggatttctttccttctgtggcgcagccgaccgttggcgcctgggagccgttggcgcaccggacactgtccggtgccccctcccgatcgttggctcggccacgtgtctcgcgcagatcgcgcagccgaccgttggcctggccgaccgttggctcaccggacagtccggtgcacaccggacagtccgtttaggacccctctacgagggcagagggtccggcagcctgggggccagttctagagaatgggtactcgttccctggggtggtccggagctgtgtagccgcttagcttggttccgtaccctaagcctgcacgctccaccactctgcgacaggtccaggtcccagtcgaggctacctcctagggaccgggtctccaactctttcttaggtatgctggtatccagcctcgacacatcgagcctacatcccaggggggccaagtatgagctattcgacatcagcggggtcacgctggaagcgcgcggccgccgtctccacggcgtattgtacgacctcccaggcagcgttttcagtgtcggcagtcggatcggcgatcactaccaccgcccgtgggcatcctcccctagctccgtcgtagcgcagctgccgccgcaaccgccgcgcgcaggcctgccgcccaccctaaacacggtggcggccactgggaacagcggcgctagcggccaccaggtcctacaacttgccaacggcggcggcctcctcgatgcgtccgtcaagacgaaggagtcctcatcattggaggcgacgtcgaagccattaaagccaaagagatggaagcgtggcggcgcacggcgctcggcggcctag

SEQ ID NO: 40715 - DNA, 1518 bp, Zea mays
  Peptide Sequence Number=SeqID_84090
atgaccccggcaagggttgagatttgggagaggactggcactccggatcccgagaatcgcgctttgcacgagaccacggggctggatggtcgcggcatgctgaaacagcagctgcagcagcagcgaagtcggcggataccttgcctcagcctcgccattggcaaggaccagccagggaggcggtttggaagttcggcggaatcagttaatcaccggcgtccgaacgatgccgctcaaggcggccaaggtcacgcaatctcgttcccggggacacatacaaggatgcctgagccccgacatgtgggctcaggggcaaaatggaaggaagtagctaatgtctgtaacgccagggcagcgcgccttatccgcaataaatgtggcggccgcgtggcccagaggccttacgtcaggctccgcccgctggcttacgtcacgggcagtaggccacgtggcagcatcgagtctccgcctgagcgaggagcagaagcgcacacggtatggtccggacacgtatcggctccggacccccgcctggtcctgattaaggtccgggtatcctttgtcccagaatcccgggaccctgctgtgagtggcccggaccccacagagaggggtccgggacccgtctcaggggttcggattgtacccgtggaggtcctggaccttgcccggaggtccggtccgtatatgcaggggtccagcactttcccatgggggtacggacccattgttgataccttagaggatattgtcttctctggccacgtggcgtccctggagccgtccatgtgggtaccaacagtggcccctgtgcccacctcaggggaggatacgagcctgcaggtggggccaaagcttgattggcgattggcgcgccgcttccgtgcgcttgctgacaaaccaacgcccaaggagtatgactcgtgggcccgggcccccgtgtcagagactggaccgttgttctcagcagagatgaagaggcgcactaccgcaggcggtggttggctcgtggcggtttgccttctccgcactcggagacccgcacaccagcagagagtcttccttgaaaagggattcaccccgcgtgcagcagttacgctttcgcattctctcccaccgctgcgcccttttgcctccgagctctccgtgcccctttgcattcgcgctcctctgctttccgtcgtcgcagtcgccatggcctcgctagttcatcccgagcgcttccagtccgaggagacactcaacctggtgtgcaacctgctcggatggggcgcgccggcgttcgctggaaggatccgcgccgacgcctctccccttggcgatctcgccgtcggggagttcatgtccttcgtctcctacttctcctgcgggttgacgctgccgatctcgcctttcttcctggtgctgctggaggatctcggcctccaacttcagcacctcacgccccacccatcctccaggcggccatcttcacccacctctgcgagatgtttgtgggggtggcgcttcttctgctag

SEQ ID NO: 40716 - DNA, 354 bp, Zea mays
  Peptide Sequence Number=SeqID_84091
atgggcaagagcaagaaaggcggaagctcctcgcaccattccggcgataagcagaagcgcgagccaactccttcttcggaggacttcggcaattccgaatacttggaggaggagttctcctccgagtccgaagggattaccagtccatgcctctcccccgatgagttagaggtctcctcggacgagggggactcctctgactcgtccgaggaggggagcgatggcgacgacggcggcgagggcgacggcggcgacggcgatggcggtggtgacggcagcaagggcgacggcaagggcgacggcggcaacgtcaacggcaagggcggcagcggcggcggcaaggccagtggctag

SEQ ID NO: 40717 - DNA, 837 bp, Zea mays
  Peptide Sequence Number=SeqID_84092
atgcaatcctttattaggccgccagggaaaggaatcggcccaggcacagggaccgggaaaggggataccccgaaaaggatccttccctgtgaaggaaccaggctccgagccaccctactgatcagaggttcgaaggctggccccccggaagggttcgacagccgcctcagatcgcgtgggccctacacccactactggtcagaggttcgaaggtcggcccctcggaagggttccacggccgcctcaggctactcgggctccgcgcccattactgatcaggggttcgaaggctggcccccgaagggttcacagtcgcctcagacgccgagccgagggatgaccatggagggaggcatcgagccctcggaccccgtcaccaggggaccgggtccggcagatcacccgcagaggctcgggggctgctctcgcaaacccggctccggccgaaccgttgacagcgtcaacataccagcccgagaacttgggacccgaccgtacacccgggctacggccagctcgcatgagggaacaaccagaccagccgaagcattacgcaagacattaagacctcgaaggagtaaaaccactcctccgaggcctcgggggctacacccggcgggtgcgctcgcgcgcacccaccggaacaaaatgcaaccgagaaaggctggtccccttgcaaaaaagtgcgacgaaagcctccaagcgagtgctaacactcccttcgaggctcgggggctactgtcggggaccataattaggggtaccctcaaggctcctaattctcagctggtaacccccatcagcataaagctgcaaaggcctgatgggtgcgactaa

SEQ ID NO: 40718 - DNA, 363 bp, Zea mays
  Peptide Sequence Number=SeqID_84093
atggatctcccccctggccaccgtccgcggatctccctgtacaacctagctttgaagcagtcgcggcgcgagtttgccgcctgtgtggaggttgtggccgccgtcgcatgctaccatcgaggtcagcgtggcggagacgaccagcgcaacgacaccgatcaacgacatgccgcgctcgtgttcgtgcgcaacgaggagacgcgtgcaccgatcatcgacctggcgcgggtccagtgcgtcgagtctaggctcaagtacatccaccatggcggcgcgctcggctcgaggatggttcgggcagacaccgcggccatgtctctcccctgcggttcagatccccggattgagccgacgcctccttaa

SEQ ID NO: 40719 - DNA, 291 bp, Zea mays
  Peptide Sequence Number=SeqID_84094
atggccgacatcgaccaagacgagcccctcgatccaaaggccctcgccgaccccgacaacagcttctacgagatcaacggcgtgaggctgctcacacaagcaacaaagatcagatgccatattcacatatacccgacaagaaaaatgtcaaatagggttgcaaacaacacaaaagaatggtgcagtgcagaggcagaaccgtgcgtgtggacgccatcctcaattactgataacacagatagaagtgtaaatttaaataagtcaaaatttacagaagagactaacaactga

SEQ ID NO: 40720 - DNA, 420 bp, Zea mays
  Peptide Sequence Number=SeqID_84095
atgctgctgccgaggctgctgcatatgttggcaccacaacatctcggggtggccttggttatggggagatttccatgcaacccgatgcaccgtcgtaatgcccacggcgagcccaagatgctcaaggatgggctggacgacatggccaaaacctatcctggccgctttaagatctactatgtgttgaatcaggtttgtgtcacattctttagaaaatttgaagtgtttttacttgtgcatcctcctgagaactggaacggtggtgttgggtttgtgtctaaggaaatgatccaatctcattgtccagcgcctgctgaggacattcagatcctgagatgtggtcctcctccgatgaacaaggccatggctgcacaccttgacgagctcaactacacaaaggagatgcagttccagttctaa

SEQ ID NO: 40721 - DNA, 162 bp, Zea mays
  Peptide Sequence Number=SeqID_84096
atggtttcgagtggcttcgcatcgcaggctgccaagcccaccgagaagcaggtcaagttttcatttatcctacaaagtctgtttgatctcgctatggagcacaaccgcaataaggactcacaatcccatcacaatgcctttgacagtgactttgctttttaa

SEQ ID NO: 40722 - DNA, 921 bp, Zea mays
  Peptide Sequence Number=SeqID_84097
atgggcgcaccggacagtccggtgcgccaccggacaggcactgtttcttgtccgggcggcaccgatgttcgtgcagaggccgccactggcctgataagcctcgcctcctccatcccgccaccacagcacgcagctccggcatccccgacacagctctactggcagtcgcgtcgtccctccatcggctcccacgagttggaggagcgcatgacatgtctgcaattgctattcgaggacgcaatagatgacaggattctcgccaaagaggagcttggagcagcagccgacgagttcctgctctgcttgacgatgcgtcaacgggccttgacgcgcgagtactcgcgccttaccaacctgaagaggccttcggatctctccggtatgaccgaggccgaccgggcggcagaggcggagaggctgagggaggagaggctgcagaaggcgcgtcaactccaggaccagggggacatgagcggcgcccgtgagtgtgaaggtctggcacgcatcatcgacttcgatgtcaagcagggtggtagatacctcaactgtatctgctatgtcgatgacatctacaccttcgaccaaacagaggagtgcgtgcacacgcacggttctgcctctgcagccgcgacaccttgctcccgcacccgcttccgtcaatcacgcagcgcggcagcgctcccacccctcgtccgcctagatctggatcccgtcccccgtcatcggtgcctcctctcccacgcgaccgagacccgatcccgccgcttccccgtcaagctccccagtctctcctcaccttccttccctccccctcccctccctgctcggtccgtatggcggcttgcccccacgctgcgctcccaccaccactcgctgatcgccaggcttcggcagcaaacccagcaggctgctcccggatga

SEQ ID NO: 40723 - DNA, 442 bp, Zea mays
  Peptide Sequence Number=SeqID_84098
atggagtttgggacaacgaggatttactcgggccacatgcacgagatacaatgtttggggtattttgggaacagagttgggtgggcaccggtggctgaagatgtccctgagccggaggattcattagttgacgccaaacgctatggtggtgttggcaaaaagaaaaagataggtggactgattgcccaattttggtcttgcacattcacaccgaggactgggaagacgtcggtcgaagtagttgaaattgttccgtgtgccaagaataagagggccaccttcgttcgaaaggtggagtcggaggctattaagattgttgaaggggactctgatgatgctggggatgaccgagggaaacaggcgaagccccggtctgaagagggcacctcgaagggaaaggctatggtcacagcaactcaaaagaggaaaatagatgtgaaag

SEQ ID NO: 40724 - DNA, 483 bp, Zea mays
  Peptide Sequence Number=SeqID_84099
atgaacggcagtccctgggcgctgtgctcaagcaagggcgagagtcgggagagagaaaggagtggagaggagcgccctggcggctgggtgacttgcccgcgcggggatgtgcgcgacgtgctgggcgagcgcgtcgtacaggcatggcggtggcgctggacaccggctgggagcgcgcgcgtgctgggggcgcggccgcgcggtgctgctgggctgggccgcgagcggctactggggagcgcgcacgtgctgggccatggggaggggcgcgcggcgcgctgggccggggtggctgcggctgcgcgggtgggctgcgggggagcgctggcgcggggagccgagtgggccgcggctgggccagggaaggaggaggagctgaggaaggctgacacaaaagctaccctgacgtcggcgaggatgacgaattggtcattgctgttggccctcctctacatcaccgtcggcgccgagatgacgccatag

SEQ ID NO: 40725 - DNA, 681 bp, Zea mays
  Peptide Sequence Number=SeqID_84100
atggctccacactgttatgtagaattggatttcaaggaggtaaccagcaaaaaagccgccatcattaaccattatagtgaaatgaaggaaaagttaggctcagaagcttcaatttcaatcgcttgtgcaataacttatccatctatttcagaaaaaggtgaagtgataagcacacattacaagctattttccgctgatattcgtgacataccaaaactggattcagttattcgcatggctgaaatggatcctagcttgccgacctttataattgcagagtgtgtgcttatttacctggacccaactgccactggtgctattattcatcctgatgatgcatttggggagcaaatgattagaaatcttgagagtagaggatgcccccttctcggtataaatgctacaccaaccttgagtcacaaggagaaactttttcttggcaatggatggcagagagccgttgcatgggatatgctgaaaatctataatgacttcattgacagtcaagaaagacgcagcttgtgttatgctgcacctttccatgatgtcactgctgataaggctgcccgcaatggatgcaggatcgaacggttagaactgtttgatgagtttgaagagtggtatatgatgcaggaacactactgtgtggcctatggaatcaacgacgccgaggttatttga

SEQ ID NO: 40726 - DNA, 1092 bp, Zea mays
  Peptide Sequence Number=SeqID_84101
atggacaaggatcgtcagggagctgcgcagaagcgccaggcagtcgtcaggcttcatgagtccaggccgaagaggccgcggggggctacgaaggctgctgcccccggcggaagccagccgccgctggcagcgaagtcggctgtccctgcatccagcagggcgccggaggctgcgaaggcggctgtcgccggtggttccaagtctgtgaaggctgcccctgtgtccagcagggtgtctgaggctgcaaaggcggcccgagagttgccgctgccgggcaagcgcgtcgccgacttcgccaccgacattagtgtgaaagattatcttgttgggtcggacgaaggccaacttgttgttgttctgcctgccgtggcgaccgcggcggctgccgtggtgcccagggcgaagggcagtgctcttagtgccagcgtcgagataccggcactcactgccacgcgcgggcgtcggggggccctgacggcggttgtgtctaccaaagtcgagagactttggacgcaacatgccgacgccgtccgggaaaagtcggccgccaacagcaagtgccgcaagctggcggataaggtggccgcgctggagggtgagaggactgacctccggcgccaactggcggaggaaaggaaggaggctaatgaggccctcgccaaggcacagactgcgcaggcggaggccaatttggcacgggcggagggcagtcttgccaggcagcgcgccgaggagttggaggggcggctcaacgctctgcagacccgcgtggagagggccgaggcttcgacgcgctcggaggctgagcggacacgcaaacagcttatggattcataccatgagctgggcgcgcggaccgctgacttcgaagtgccggaccgagagcccggacttcgctgcctcgagtggatacatgaggagttgctggcgctccccgccatcgtggaggggtttatgtcctatgcctccctggtcacttgcgagggggcgatgaacgcgctcttcgcgaagggtgccggcactatgaggtcttcgaccaagctgatgaggatttcgagcgcgatatttacaaggttgaggaccctgtggtga

SEQ ID NO: 40727 - DNA, 1362 bp, Zea mays
  Peptide Sequence Number=SeqID_84102
atgtaccgagaggcgttgtggcagaagagaggtcgtcctcgggagttatatccggacgtatctagtaaggatgctcctgttcctcctgaactccccatgcctaactgtgactgtggcagactggcttgggtacatcaatcacaacatccagacacggctgctcgctgctactacctttgtggcactttggacggacatcagaggtgtttctttttccagtggatcgatggtcctgataaatttgaccctcgatatcttcttttcgttaattggttgagtggaaagaccagtcatgagcgttttaagcgttgggtacctcctcccccgaatcctccaccaatgacggatgcggagaaggagccatacgggtggcgtaagtgtcgtttcagagagtggttgtatggtcctttgtcccattggccagaggcagaggtaaaggaaaagagatacatggggtgggcggcagaagaggtcaaatttgatccagtactctgcaaatgtggtattgaagctaagtatggattagttccttcggagcttggtgttggatatttttgtggacatatggtcgattacgatgaggagacgagaaaatgcagttgggagagttacgacgacaaaggagaggtgatgcgcacaatagagtccaagagaataatgggacagaagatgcgttgtggatctcggctcgtcgattcgtacattaacgatcgcatacgcgacatgcgtagggaagcaaaatctgccttttatgatagcccgaagcgtgcagagtataggaggttgaaggcggcagatgagaagagagcacaggatgcaagggaatgggaagcggctcaagccgagaaacaaatgttggataatcttgctgatcgcctcaagggaaagattggaagcggcgtaaactatttggccgatgaggcacatgcgagatatgttcaggataaaatggcaacggttgagctgatggaggaggaggaggacgacacatctagattgagtgagcttatcgccctcgcagaggcaggattacatgaagaagaggaggacgacacgtcaaggttgagtgagctcatcgcactagctgaggcaggattacgtgctcaagaggaagaggatgagtttatgtctcaggccgccgcagaggtagaggcagcttattacaagaagaagtctgatgaggctgaggctgaggatgagctattctcccaagctgcagatgaagcagaagccaattattacaaaagaactggtgacaagagtgatgcaggacaatgcagcaagtggaatgaggttgttgttgaggattgcgcgacggatgactccgaagatgagttactcatagattgtgattcagactga

SEQ ID NO: 40728 - DNA, 1170 bp, Zea mays
  Peptide Sequence Number=SeqID_84103
atggggatgatccgcaagattattctaatgggtgtgcccctgcaggggaggagcaaaggcaaggcgcttacaagtgttaaaacttgggatgattcttcaagcgaagacgaacttccaaggacgtgcagccactggtcctcatcacgctcatcacgcaagtgccttatggcaagaggtaaaatgagcattccatcctctagtgatgaaagtagtagtgatgatgaaggtgagggaaagccctccatagatgagcttgcagaagccattaaatttttccaggatgtctgcactaagcaaaaggctcaacttaaaactttgaaaaataagttgattagctctcaaaatgattacaaaagtttgctagaaaaatttgaagtatttgcaaatttgaattgtgagctatcaactaaaattgagcaattagggtctagtgctccatccactgctatcgatgatggccttattagaaagaatgaaaaacataaggctaagttagctagctcccaagaagctattggaaatttgctagggaaaattgatattcttagcatacacaataatgagctaactactaagctagaaaacattggtagcaccccagaggcatccttagttaaaattcctgaaattattaacaaagatgcctctacctcttgctttgatttaattgatcattctaacccctacaatcaagttcttcttaagaatgttgttatagaaacatgttcggatgagattgcattggagaatgagcaattaaatcaagaggtggctctccttgggaaggctttgtatgacaagaaaggcaaagccaaacaaatccaacctccacgggataacaccattataggagtgaacaagcctgtgaagggcgaaactatgatttgtaggttatgccacaagaaaggccataagtctttccaatgcaaggcgaagactggggataagaaaaatccaacaagcaaagtctccaacacctacatcagcaaggtggacaaaaaggttgctacaccatattttatcaacaagaaaaagaatggaaatgtgatagcaatcaaggccaacaagcaagccaacaaagggaaaggggccaaacgcatttgggtgccaaaggaaattatttcaaccataaaaagcaccaagaaggtttggatcccaaaagggaagtga

SEQ ID NO: 40729 - DNA, 108 bp, Zea mays
  Peptide Sequence Number=SeqID_84104
atggcgccatcacgccgtccagctcatcatctacctgaagcccaacctaccactccattcaattgtcaaaatctaaaaaatatcatgactgaaaaattcttcttttaa

SEQ ID NO: 40730 - DNA, 165 bp, Zea mays
  Peptide Sequence Number=SeqID_84105
atggtttctgagtgtgttgccgaagatcttcctgagcaacaactggtgaaggcagaatgggaatcatggcttctgggtaaagtgtgcgacctttgcagattgttagaaactgatatatcagtcgtgctcacggttaagagcggccttgggatcctctttgattag

SEQ ID NO: 40731 - DNA, 231 bp, Zea mays
  Peptide Sequence Number=SeqID_84106
atggccagcccacctccggtcaccaccaccgacgacccgcaccttgacgtgatcgccagagacccccggacctcacccgacccttcgccggacctctaccgttgctgggggcacaatttaaaagatgcagataagattaagtccagggaccccgatgcaaagtcgttttccttaaacctttatgtttattcttttcaaatgagcagagaacttgggaaattcataacttga

SEQ ID NO: 40732 - DNA, 426 bp, Zea mays
  Peptide Sequence Number=SeqID_84107
atggcatcggcatggggtgcactgcagaggtcgacgtctcttgcatcgagagtgctggtggtggaggccattgattttcgtgatgtggtggtggcggaggcggtagagctgggatttcttggtgttgctggtatatgttgtggttttgctagtggggatggtaatgctcattgtggaattggtgctagttatattgttggggatgtccctggtgggatgtgccgagtctttgccatggaaaaggcaatagaaccttcgctgctatgggcttcggcctctacccctgcctctagtgtttccgctgaggccctgctgcgcaggcctgagttcgattatgggggcctgacccatgtattgctggactgcagaaacacctacgtgaagacccctgattgcatagtgaatggctatgtggtcgtcgactga

SEQ ID NO: 40733 - DNA, 636 bp, Zea mays
  Peptide Sequence Number=SeqID_84108
atggcccatatcaggtgcactgcacagcgtccactgcgtctcacagtgccaggtcagttcagtcacctggagagactgtatcgtcgcctgcacgaggagcaggagcgccgacgccaggagcaggagcagcaggactcctccccctcgcctcgacgggaggtggagtctaagagaccgcctgcccctatacctcagctagagatgccccctgcaccaccacagggcatcccggctgctggaggagacccaacggagacagagatgatgacgccggtggcagttcgagccacgatacggagctctcggaggagccgaagccggagggatggatcaccagacccatcactcgtgacgctgctctattgcttgttgttcagcggggtagctgatggcctcgacctgaagtactaccctcgccattcgaccggcagtgctggaggtgtgattgcctcgccagttggtgagagcaatcccaggctgaacaacatggtcaacttggctgtcgtgctcaacacagagttggaccacatccttgatgagttgggcaaggttcaggcagaggttgcggaattgcgtgctgagtgcgtagcacgccactatatggatggtggttctctcgcccctgtcgggctttag

SEQ ID NO: 40734 - DNA, 1023 bp, Zea mays
  Peptide Sequence Number=SeqID_84109
atggcactgccaagggcgggcttcagaaacatggcacgcccatcgcggcaattgtattcgtggcattataatcctagagtatttgaacatttagcatcgggctctgtgccctcgcgccgtttcttacctgggcgccgttactgtcctctctctgtggttgccgttactccccgaggcgagggttctcttatgttcttcgactggccgtcgtcttcctcgctccttcctccaccgggatctgttcctctcgcagtgcggtgccttcctcccatcgccctacccccttcaccaggctccgaacctgcgctattgtggtccattgccgccccgaccacgctggtgagatctattacttcgctaaccctagggtttccagagttggaggctggcatggaagctgccgcggagctatgttcccagaagctgtccgcggccgttgatgccgcccgtgacacaatgaaagcttcatctaccgcctgtatggttgctggtgattattgcgccacattttccttaggtaacgatgtggtttctactcttgatgttcttgaatccgctgtggcggcggaaaaaattgctatgagttcttacagccaggcgagtgcagccgtcgattgtgctaaggagactattgccaaatattctgaggttaaccataaacttgcgcaagcactcagatattctctgtctctaatgagtgatgcagctaagaaacttcaagatactgcctctttgtgctacacagatgaagatgttgtcgacggtttcaagctgactcaagtggctcgttccttggacgagttagctgaaacgctagaagttactgcaattgattgtcaggtctcgatgatggatccaacaactatattagaagctggctatggtagcgaagatagtgcggtgtgggaggacgtattccgtgaccgagaaataatgaatcagccattggaagcggagacactagctgagcactgtgctaagtgggggctgaattacaatgagatcagggatagatctgtgtaa

SEQ ID NO: 40735 - DNA, 147 bp, Zea mays
  Peptide Sequence Number=SeqID_84110
atggagagtcatgatctccgggcagaatgggaatcacggcttgtgggtggttatgagatcgatgattctggttatgactatggtactggcgaagatgaagccgtggaagaagacttccaggagttccaagattacgacgagttctag

SEQ ID NO: 40736 - DNA, 420 bp, Zea mays
  Peptide Sequence Number=SeqID_84111
atgaagagagcatcaccatgtaaaggtacaaaaaggtgccaaaggttcatctacaactatactaattcgactgtccggaataccgtagattattccggacaggagaagttttttttggaaaaacaggccaagcgcggaccgtccgggcccttgcggcggaccgtccgcgacacgaggatgtcactcggccagaaccaatgcaaaaatccaagtctgtgctgcggaccgtcccgatggaagaagcaagcaccgtctgagaccacacgcggaccgtccgggccctttgcggcggaccgtccgcgacaccgagttgacttcgaccaggaactacaattctgggacagtccgactaaaccgcgaccgtcaagctacaacgtgcggacgtccggctataaaatttcgcgacagtcgcgcatgtga

SEQ ID NO: 40737 - DNA, 174 bp, Zea mays
  Peptide Sequence Number=SeqID_84112
atgcaggtggcgtgcaaccgcaccatgggggcgcaccccttcggcttcgtcgcatttagcatggaggcccagggaccgggaaaggggatatttcaaaagggatccttctccgcgaaggaagcgggccccgatccctcctacatatcaggggttcgaaggctggcccctcggtag

SEQ ID NO: 40738 - DNA, 1212 bp, Zea mays
  Peptide Sequence Number=SeqID_84113
atgcatcgcgcccttccaccttccgagtccccgaatggggagcgcccgcgttgccttcgtcttgctgctgttggaggagcacgaccttgcgggggttggcacctttcagccatcgctcggcttcaaggattttcatcatgcagcccggctgcattccctcaccaatggtcatccaggatgatgaccaccagttcgatggtggggagaagcaagcggggctgcggcctctgccccgccctcagcttcaaggatcttcatcatccttgttgtggcggagggcgagctgagccggggttctacctctcgcaggggccggcaggccgcctcttccttcagcattcaggggagagggcactcaccggccttgcggagggggcgaacttcgacaacgcggggccggtcggccgcaagcgtcgtcagctccagcgtgcctggctcgttggctcatctggctctgtcgcagcctccgacgctgcctcctgccgcttgacccgggcgtggccgtccgtccaccgtacgggcggtcgttgcgccgtgggcaccgggggatcgtccaagacatcgcacgccactagggcggcgttcatgttcttggattgtcttgtcctcactccaacacgacgcctccacgcggaggtggccgctgtcgtcggtgctgaggtggtggtcgctagagggggtttctccgccgacgagaccgtcggcgccacccgtggacagacctccggctcgttggctttgatagcttgtcctcgcccctcaagtggggacgtgggcgagggccttgtcacagcaacgtctgccctgaggtcatcgctgttgttgtttagccgcccgaagcagaggtcgttgtcgctactggtgcagtggtcgccggcgagccacctggagtttgtcgtcccgcaggccctctggtgtggaggttgttcatacccgcgagagtggaaccggagttccatttgtaatggcaccctgagtgtgggtaaccttcggccgctctgcgatgagatggagccagaggcagcggtatcggcgtggacagaggcggagtcggctcaaaaagaggcttcgtcggcccaggagcaggtggcttcccaggccgaggaggtgcagcagcggcggctggagcttggccaggtcatccgcgagcgggaccaacctcggagtcacgctgccgaggccgtgagacgggctgatgtcctcgggggatag

SEQ ID NO: 40739 - DNA, 468 bp, Zea mays
  Peptide Sequence Number=SeqID_84114
atgggcaagagcaagaaaggtggtggctcttcgcatcactctggcgacaagcgcaagcgcgagccaaatccttcctcggaggacttcggcgactcggagtactcggaggaggagttcgcctctgagtccgagggctctccagctcctgcctctcccccggcgtcgtctgatgattcagacgactcccaggggatcgccgtggaggtatggacttacatccgggccgtcgagcgcgccgggctcaagggctcggatgagtcggagtattcctcggtcgaggagaattcctccgactcgtccgaggagggcagcggcggcgacggcggtgacgacgacgacgacggaggcgacagtgacggcggcggcgatagcggcaagggcggtgacggcagcggcaagggtgacagcagcgacggcggcggcggcagcaagggcagcagcaagggcagcaacaaggccagtggctag

SEQ ID NO: 40740 - DNA, 798 bp, Zea mays
  Peptide Sequence Number=SeqID_84115
atgtgtgatgatgtccaattatgtaatcgctgtgtacgtgagtttctgatcctgatggctcatattaggtgcactgcacataagtctgtgatccctttttgccttctcacctggcggagcgtccaatgcgtcgcacggtgcaagcaagaggtggagtctaggaggcagccttcccctgcacctcagccagatatgccccctgcaccaccacagagcatcctggccgctggaggagaccctaacggagatgatgccaacgccgatggcagttcgagccacgacacggagctctcggaggagctggagccggaggggtggattgctagacccatcactcgcgacgccgctcgcgggtgtcacttccacgatgctctcgataccttgctacgtcggtccttcgaccaacacacttggtctatcgagtaccgttgtgtagtctaccagcaccgtcacgggttatacccggaccagtggaaggctacttgcttggtgcgccgtccggacgatgatctccatggtgcagaggccttctcagagcactattccattactgagagggatactgccgaggcagccatgcaagatgcagcacgatgggcactttctcagtattgctcgttgttcagtggggtagctgacggccttgacctcaagtactaccctcgccgttcgaccgacagtgctggaggtgtgattgtctcgccagttggtgagggcaatcctaggctgaacaacatggtccacctggccgttgtgctcaacacagagctggaccacacccttgacgagttgggctag

SEQ ID NO: 40741 - DNA, 363 bp, Zea mays
  Peptide Sequence Number=SeqID_84116
atggcgtcgagcccgagctcatgtttctggccaaagcagatatcttgcttgttttgctacgagccgcagccgctgcgcctgcgcacgctgcagtcgctgatgatgcttacaacgagcacgggcgacctccggagcgccatggcggacatgccgatggcgtcgtacaaggcggagggccccggcgggtgcaagacggacgggttcctgtacaagtacaggaagggggaggaagtgcggatcgtttgcgtctgccacggcagcttcctcacaccggccgagttcgtggagcaagccggcggcggcgaggtccccaacccgctgcgccacatcgtcgtcaacccgcaccagtcggtgttcttgtag

SEQ ID NO: 40742 - DNA, 969 bp, Zea mays
  Peptide Sequence Number=SeqID_84117
atgaatccgatagccaccgccgccctcacgccatcctcatttttcgcctcaaaccgccgcttcgcccctcgcctccgctccgtcctccccgccgctgccatgtcttacgccgccgtatccgcctccgccccaagccccagctccggcactggggaacaggtgaaggcggccccgctcccgcactcgaccctcgagatcgcgggcgcccgccggggcctcctctcaggcttcgccagcctccgcgccccgtaccgtgccttccccgtactcgcgtcgaaccgacacgtcgagaccatcttcgctgcgctcacgcgatcgctccccgccgttaagctgcggcgcgagtgcctccgcgcccctgacgacggagccgtcgcgctcgactgggtctctggcgacgaccgtgtgcttccgaatgatgctccggtgcttatactcttgttctattctgcttcatttacaggggatctccgccaagttattggtcatattttaggacgttatcctcagtccaatgtctatgctaccggttggtctcttggagcgaatattcttgtgcgctaccttggcgaggaaactgataaatgccctttatctggcgcggtctccttgtgcaatccttttaatttggtaattgcagatgaagatttccacaaaggatttaacaacgtttatgataaagcattggctagggctttgacgactatatttaagaagcatgctctccttttcgaagggctggagggtgaatatgatatacccaaggcagcgaatgcaagaactgttagagattttgatgaggggttaacccgagtttcatttggtttcaagtcagtggatgattattactccaattcaagcagctcggattctatcaaggatgctgataatgacccaattgcaccatccaggggaattcctagagatgatatcaaggtatctgctattgtacacccctttttcacctaa

SEQ ID NO: 40743 - DNA, 390 bp, Zea mays
  Peptide Sequence Number=SeqID_84118
atgtcgtcggtattgaggaaatgggcaaggcctagcccactactcctcgtgctcctctcctgccggagcaacatcccactcgaccgtctaacccggtggcagggtggtaggccaagtcacaccatcaaccatttcctgaatggtacctgcaaaaattatgccacaagcaaggctgagtatactaatactcagctagacttaaccgtgaccgcacttgtacccaccatagctagcatgggagacccagtctcaggtcgcatgagggataaagtccgcgcccggcttcactcagaaattacaacttcggaggtgtatgatctacttgagttaaacaaggttaactttacttatgtaagacccttgggtggtatacttggtaaattgggttaa

SEQ ID NO: 40744 - DNA, 1284 bp, Zea mays
  Peptide Sequence Number=SeqID_84119
atggtttcctttcaagggggtcaccctccttttaaaggcaactctccccacttgcgtcctcagccatcgcggactgagtcttctccaacacgctccaaggtcctccccctacgacacgggggctgggtcccacgcatcgtgcaagctggcccaggacagaaggagccaaaaccgtcgcgcgcgatgcgcgcaactgcccagtggttacgagcattcctccactttcgcccagaccggcgggtgaaagggtggaccgccatgcaggcggtatgcaaccgcaccaagggggcgcaccctttcgattttgacgcgtccagcgtggaggcccaggcccacacgtcatgtaaccggcgcgccggttactacgtgcgagaaactgcaccgccacttgcgccagtaccgtgcctcctcgactgcggaaccagtgccgcgactcgaggtgaccctgcgcacggctcgacagcgccaaccgagcacatcagtcacgggtcagtcagccacgggagaaggcgcgacggtcgatacggccagaaatgggccggcagtaatggcggtggcaggcgggcggaagcagcggtcaagtcgacaggcgacacctttggcaggcgaagcaggcgacgcttcacctccgccataatgaccgcgtcaaaaaaggtgcaccacgtcattcgatttcgtatccttttccacttcctctttctctctcttgccacaggaaccgggaaaggggatactccgaaagggatccttctccgcgaaggaagcgggccccgagcccccctactgatcagaggttcgaaggctggcccctcggaagggttcaatagccgcctcagagcactcgggctccacgcccactactggtcagaggttcgaaggccggcccctcggaagggttcaacggccgcctcaggccactcgggctccgcgcccactactggtcagaggctggcccccgaagggttcgacagccacctcagacgcagagcgagggatgaccctgggtacgttcgatacataaccaaggctcgggctaccatcccgagagtgaggccgacagcagccaagtccggcctcgggcaccataggaagctccgcctcgcccgaccccagggctcggactcggactcggccccggaagacgacgaactccgcctcgcccgaccccagggctcggactcggcctcggccccggaagacgacgaacttcgcctcgcccgaccccagggctcggactcggcctcggcaccagaagacgacgaactccgcctcgcccgaccctag

SEQ ID NO: 40745 - DNA, 387 bp, Zea mays
  Peptide Sequence Number=SeqID_84120
atggcgctcgaggccagacttggctgctatcagcctcactctgtcgagtggcacaacagtcgaagcggcgcaagcgacgctgtcttcttgtcagggtggataaggtgtcaggccatccttgcattaaatgctcctgcaatacggtcggtcggtgtggcgatccggccaaggttgcttctcggcgaagactgggcctcgggcgagctgaaggtaggaaagcaagttggcgcccatcatccatacaagaaacatcatgacgacccgataggccggcttgatctactccacatggacttattcggcacgatcgcttacataagcatcgctgggagaaaaatcacaaacccaacagaccttaaagggattcttgagacgggctcaaaatga

SEQ ID NO: 40746 - DNA, 762 bp, Zea mays
  Peptide Sequence Number=SeqID_84121
atggcgggacaccatcgaccgactactcggtatggcacattctacctcgaccaggtcgaggacgcggtcatcccggcgccaacacgaggcgtcagcatctgtgcgctcgccctcagtgaggggtgcacagaccaacgacctccgggcagaactcaaccgcaggcgtgcgggagaggatgcccgggtatctttggaaagggtgcgcgagcgccgccaaaacatcgatggtcgcaacctcgatcgagatttcacggcggttgcaccgcagacgccaatgggcacccggtcccaaacgggtgtccccttagccggtgtgggctgcgcggcgttgtggccacccagggcggaggcaggaaaaaaaagagaaacaagaaccatggccacgaaaagccgtggttagctgtttcagttgctgctgccgccggaagccgaggcaagcgcagcaagcacccacggccccagggaagcagtggtgacacatgcccaatgcaccctaacagccgccactgtgccgccgactgtcgtgagattatcaagctcgcaaggcgcattagagagcggcgcgagcagtccttcaaggatggctcgccgccctaccgccggcaaagccagataggagctgatggaaaggccgcggctacagaaggacaagacctcgactaccagtcgcctgaggggtgcctaaaggacgtcttcatcggagattctgactccagagacgatggcgaccgtcgcaagaagctgtatgtaatgtacggctga

SEQ ID NO: 40747 - DNA, 450 bp, Zea mays
  Peptide Sequence Number=SeqID_84122
atggctacccaaatgtccctggccacgggagcgacagtggtggccgggaatttcagtggtgacgcgcggcggtcggaggatgagaggagcactggcgcgcgtgaattcgtgtcctatgccgtggcagtcactccggcgatggacataggattacagtggttcacggtgatccggtggaggtgccagggttttccctatttgggtcttgttttacccttcagatccctattcagggtgtataaaacatatgcaatgccaatgcttatgatgttatgctcaagttttagtgacagtaacaccaggggtgttacaaaacgggcaactgacctgacctggcaggaggaggacctcgccttcagggaggagatgtgggcaaggcggaacaagctgctggatgagcttgagctcgaagcagaggagaaagggaagtgtttggaggggaaagagtag

SEQ ID NO: 40748 - DNA, 591 bp, Zea mays
  Peptide Sequence Number=SeqID_84123
atgtcgtcggtatcgaggaaatgggcaaggcctagcccactactcctcgtgctcctctcctgccggagcaacatcccactcgaccgtccaacccggtggcagggtggtaggccaagtcacaccatcaaccatttcctgaatggcctcaccgccttggcatacaatgctccactgaccccggctgccgccgtgaagcggcgagatggctccggtgaagtggtcgaggacgtaggggaggtctcggggatcacaacggatgccagagaagatatgggtgcaaggaattggacagagactcaccggttagctctgtccacgcgcggcggcgaaagaccgaagtccagtgaggtcgatctcgggcctccggtgaagtccggcctagtccgagggcttggaaagcttcacgggccactggcggagctagccgaagcactggctcgacttgggggtggctggagtgggctggccacggtggccgaagctctggcggcaatggcgggcggaattgagctcgctggagctaaggagagggggctggccggtgaaggtgagcgcggggtgaagtggggcgcgcctggggaggctttatag

SEQ ID NO: 40749 - DNA, 372 bp, Zea mays
  Peptide Sequence Number=SeqID_84124
atggagagtcatgatctccgggcagaaagggaatcactgcttgtgggtggcaatgagaatgatggttttggtattgactctggtaatgctagtccactacagccaaataggacaattgttgggtatgttgatgtgtactcacccttgctctacacaccaaatccccctccccaggttgtcagcattgcaaccactgctcaggagaagatgaagccgtggaaggagacttccaggagttccaagattacgatgagttctaggcatgggttagcggcaacccccagtcggatgtctgtgaaggccgcgtgtatctacgtttcttttccgcactttgattattgtaaagactatgtggatgtctcagacatatga

SEQ ID NO: 40750 - DNA, 366 bp, Zea mays
  Peptide Sequence Number=SeqID_84125
atggcgatgactgtgaatggagaagattggaacccggggccggtaattgacttgccttttccggtcgcgcacgtgcgcaatcgcccgcaccgcgtacactcgctggccggtggccccactggcggtcagatccgctctcaacggattgccgaggatggtgggcacgtcgtcggcgcaaactccgcgcccaccctgcggatgaccgcgcggggttcaataccgggtcatggggggccacctcgcgcacctttccagaacctcccgccgccacaaaccgcctcgtccaccattccggccatagtgcggctcaaggattccgccaccgctcgggatcgacgtcctcgccctcattcgttccgtggatag

SEQ ID NO: 40751 - DNA, 546 bp, Zea mays
  Peptide Sequence Number=SeqID_84126
atgacaagtgggccccgcgaagcagcatctgtcagcgcgtgggcaacgactggtgactggccaatggagcccacccgccagaggaacgcgggagcggcaagctgcggctggcgcacgggctcaagttggcaagaccgtgcggcccagaggccttacgtcaggctccgcccgctagcttacgtcacgggcagtaggccacgtggcagcatcgggtctccgcctgagcgaggagcagaggcgtacacggtatggtccggacacgtgtcggctccggacccccgcctggccttgattaaggcctgggtattctttgtctcagaatcccgggaccctgctgtgagcggcccggaccccacacggaggggttcggaaaccatcctagggatccggcttgcgcccgtggaggtcctggaccttacccggaggtccggtctgcatatacaggggtctgacactttcccatgggggtccaaacccactgttgataccttggagtatatcgtcttctctggccacgtggcggccccgaagccgtccacgtggtga

SEQ ID NO: 40752 - DNA, 1302 bp, Zea mays
  Peptide Sequence Number=SeqID_84127
atggctcgtcttagacacaccgcacggaagtctgtcatccccttcttgccctctcatctcgctgagcgtccgcttcgccatccagtgaccggtcagtctagccacttggagaggctgcaccaccgcctgcacgaggagcaggagcgtcgacgacaggagcaggagcagcagggctcttctttcttgctccagcaggagatagagtctgtgaggagctgctcccctgtgctccccctggaggcaccccatgcaccaccactgagcgccccagcccctggagtagctgctggaggagacccagacgacggaggtggcgacagtagctcgagccacgacaccgacttttctaccgaccaggagttggaagcaggggcggacccacaggggggtccgggtgggccctggcacaccctaagccagacccaccagggaccccacccggccatcccagttggccaacgcgacgcccgttccaagttttcaacttctcgtcttcttcccacgatcggtttagatttctgtttgtggcgggctattcctggcggtttttcgttttctgatcgcaaatcatcagctgtttctgggcgtggtacagccggtgcagctcgtgtacctggtcgattcgatcggatccgccactggttggaaggatgggttgctcgacccatcactcgcgacgctgctcgtgggtgtcacttccacgatgtgctcaacaccctactacgttgggcactcgaccggcgtacctggtccatcgagtatcgttgtgtggtcttccagcacagtcgcggggtctacccggaccgctgggaggcgacctacttggtgcgccgtccggagaatggtctccggggtgcggagatctgctcagagcactattccatctctaagcgagactcagccaaggcggccatgcaagatgccgcacggcgtgcgctttcgcactactgttcagtgctcggtgggttagctgatggtctcaacctgaagtactacccccatcatccatctggcagcacaggaggcgtgattgtctcacctgttggtgaggacaatcctaggttgagcagcacagtcaacctagtcgccgtgctaaacacggagctggaccatgcgctagacaagctgagtagggctcatgctgagatctcccagctgcgggctgagcgcgcggagcatcgtcacctggaggatggctcccccgctcccgttgggactcagcacccgtaccactcacctcggcgtggacaccagtcctatggcaaccccgactgtaggaccaagataaatttaaaaccatag

SEQ ID NO: 40753 - DNA, 261 bp, Zea mays
  Peptide Sequence Number=SeqID_84128
atggagagtcatgatctccaggcagaaagggaatcactgcttgtgggtggcaatgagaatgatggttctggtattgactctggtaatgctagtccactacagccaaacaggacacttgttgagtatgttgatgtgtactcacccttgctctacacaccaaaccccccctccccaggttgtcagcattgcaaccactgctcaagagaagatgaagccgtggaaggagacttccaggagttccaagattacgacgagttctag

SEQ ID NO: 40754 - DNA, 1185 bp, Zea mays
  Peptide Sequence Number=SeqID_84129
atgccggggaaggcgaactgttgctgcccagctaggatgcaacattccgtcctctatcctcgctttcgtggcgaggacgggagtgaggacctaccgatgcgctttggggcggccggcgctcacaggtgtggcgttggtcgacaggtggacgccgccgtcggtgctgacgtggtggcagctggagaaagcttctccgccgtcaagaccgtcagcgccacctgcggaccgtcctccggctctttggctttaatgtctggttcgcgtcccttgagtggggacgcgaacgagagccttctggtggctgcgttcgtcctgggaccatggctgctgctgcagaggtcgctggcgagtcgcccggagcttgtcgccccgcaggctctccggaaccctcggccgctctgcgatgagccggagccgagggcagcggtgttagcgtggacagaggcagagttggctcgaaaagaagacttcatcggccggagcctggccgggccgtccactggtgggaccagcgccggagccggagatccttcgcccgtgttgccatccgaggctcggtcggacttcaccgaaggtggagttgacgccgagggtgctgctgctccccctccatcgacgtctgagcctgcaggatcggttcgcctgtacgagagttacttttcacggaaggtgatgagtgaggattctgctatcgatatagtcaagaaggcacgaaaaatcgtttcagcagaaaagttcccgagcattaagacttgttcggtcagcggaatcgcttatccgagcgtgagttatttatcgcagaaggtgatgagtgagactacccatctggagcttgacaggaagctgttcgtcaacacgcagcaggcccctacctggcgcgccaactgtcggcgtttcgaccccaggggtccctggaccgacgagcgtaaggagagggtccaggccatcctcgcattaaatgctcctgcgatatggtcggttggcgtggcgatctggccaaggttgcttctctgcgaagactgggcctcgggcgagccgaagctttgtgctgatgggggttaccagctaagattaggagtcttgggggtacccctaattatggtccccgacagagccgccaagcacaaagaagggggctcaacggctgacaggaagactggcatctttgaatcgattcatatctag

SEQ ID NO: 40755 - DNA, 1032 bp, Zea mays
  Peptide Sequence Number=SeqID_84130
atgcaggcggcatgcaaccgcaccaagggggcgcaccctttcgacttcgacacatccagcatggaggcccaggcccacacgtcatgtaaccggtgcgccggttactacgtgcaagaaactgcaccgccactcgcgccagtaccgcgccttctcgactgcggaaccggtgccacgactcgaggcgaccctgcgcatgacccgacagtgccaaccgagcacatcggtcacgggtcagtcagtcgcgggagaaggcgcgacagtcgatacagccagaaatgggccggtagtaatggcggtggcaagcggacagaagcagcagtcaagttgtcagcaagctcacgccccctcctgggacagcgaaagaaccctctcccacggtgtaaagacgacgcgcccgtgttccgttcctcgaacggctcgcgcacgcacgacggctgccccgcgaaccactcgtcccgtcgcattaactctgcggcaggacaggcggcacctttggcaggcgaagcagggaccgggaaaggggatactccgaaagggatccttctccacgaaggaagcgggccccgagcccccctactgatcagaggttcgaaggctggcccctcggaagggttcaacagccgcctcagagcactcgggctccgcgcccactactggtcagaggttcgaaggctggcccctcgaaagggctcaacggccgcctcaggccactcgggctccacgcccactactgatcaggggttcgtaggctggcccccgaagggttctgacagccgcctcagagcacgcagagcgagggatgaccttggaaaggcgacgcaggggcgtatgaaaaaagccgagtctgtccttgaccgtcctctcgctctgtgcggaggctcgggggctgctctcgcaaacccggctctagccaaaccgttgacagcgtcaacataccagcccgagaacttgggactcgactatgcacccgggctacggccagttcgcatgagggaacaaccagaccggccgaagaatcacgaaacgcgctaa

SEQ ID NO: 40756 - DNA, 339 bp, Zea mays
  Peptide Sequence Number=SeqID_84131
atggactccgcctcgctcgaccccagggcccggactcagcctcgacctcggacgacggactccacctcgcccgaccccaaggctcggacacagcctcggcctcggaagacggtctccgcctcgcccaacccagggcttggacacagcctcagcctcggaagacggtctccgcctcgcccgacccagggctcggactcaacctcgacctcggacgacggactccgcctcgcccgaccccagggctcggactcagcctcggcctcggaagacggactcgacctcggcctcggaggagcctccgcctcgcccgacctagggctcggaccgaccacgtcatag

SEQ ID NO: 40757 - DNA, 540 bp, Zea mays
  Peptide Sequence Number=SeqID_84132
atggcgaggaaagataatgcatcccaggaagcaccgtcgggtccggacctccacagaggaacaccggacccctgtgagtacgagtctagagctcccgaggggacataccggaccccccgggtgggtcccaggtcccccccaagagaggtccaggcctcagcaaggtcccgggacggggaggaccctggcacaggcaaggaggacgcaccgcctgccaccacgctgacgggcgacgcgccctctcagcatttaatgcgtcctgtccaatccgccagcatacgacgtcagggtcacccagcagacggcgcgcctgaccagcctgttggtgaacagtacgctcgtgccaagcggcgcacagtactcatcatcccttctacaagaagcttcctctgcacgccgaggatacggagatctcgggcgttagggcacaagaagattgccccagcagcaaatatttgtggctccaagcgctatattctttgtccctgggcccacctgtcggggcccagtacctttgtgcatgccccccttcagctataa

SEQ ID NO: 40758 - DNA, 1206 bp, Zea mays
  Peptide Sequence Number=SeqID_84133
atgcccaccggtaggtctggctcccatcagcatacatctgctgggaacgttgccgacgattcgtcagcggctaccgcagcctcatcagtgtcggcgccaggcccaccatcggcagcggccgaagaggtcccagttgcgtttgcccccaccgtgcaggatgacgctggtgctgaggtggcgccgttggacccgaggatccgcctgtcaccgtcgaggcaacgcctttggattcctaagttccaggcgtgggggggcgcgtccagttctgtccctccgccaactccggagggtccaaagattattcttaggcgaccgcttcggtctggcgtcgatcctggagcaacgctgactcccctccctcaggtgctggctcacgctcaccaggcccttcaggaaaccgaggtggctatccggcaggagtgggaggcgctcgagaccgagcaccagcgcctcggcgactggtgcacccaactggagaagcgcactaaggcggcgtcctgccaatttgcctcagagcgggccgagcttgagcaggagcgtgaggacttcaaggaggacatccagaaggtgtctgatcgagaggaggaggtgacccggaaggagagaagcttggtcaagaagaaggaacacttagaccaaaaggaggaagctgttacaccgctccatgataagctgaaagcttataacacagtgctagagaagaagcgggacaagcaggtcgcgggagaggcgaagctgcagcaggaacttgccaacaaagccagcgacattgcccgcgccgaggtgaacctcatggcgagggaagcttccttcgcgaaacgtgtgacgaaacctcccaagtcgtatggcccacctacagttgtccttgtccaacggaccttagacaaccctgtaggtgcccctgaatcacttgacaagtttggaatctgcttttcttacctttcgcaagagcgtttcacccgtcacgcagacattacaaacatcagagttatgagaatgcggaagcaattacataaacttacctttattttaaaaggaaccccccagacttctatttctttaccgcgtgaggaccacgatggtgagcggcgcggcagagctccggcgagcgcctggaccggccaaacggggcaaagactagcgcccaacttcggtcgaaaccgaattcacgccctaaccagcgtttcccctaagtcaattgcatga

SEQ ID NO: 40759 - DNA, 352 bp, Zea mays
  Peptide Sequence Number=SeqID_84134
atgggcatcacaagtaagatggacattgcaaaagtgatactcggatgcgtagctcggaaacaactgatcaagccaaggacggaggcaagaagagcttcgaggtaccaagtgcacgggagaaggtcaaggagactgaggaacccaaagccaagggatgttggagctaagaaatgtcaatctagatcaagccaagccaacttgatgatttatgagtccaacatcaaagctcaagcatcccgaaactcagctcagtctggcacaccggaatgtccggtggtgcaccggacagtgtcccggtgcgccaggctgactctgggtgaaaaggcccgcttctcgggaattcgtcggcgag

SEQ ID NO: 40760 - DNA, 456 bp, Zea mays
  Peptide Sequence Number=SeqID_84135
atggctaggagttggagaatggcgtggggaggctgcaggggagctcgagaacttttaaagggcgcggcctgccacggctattggctcacatgggcggtgtggcgcattggcctagaggcgtggtggtcgtggagtggctggccatggccggtggccaatgccacacgactggccgcctgctattcacgcttcctcactgcaccaaactgtcgaacacgtggtgaacgtcaaagtggctgcattggacggcatgaaatggcattttctgcttggaatcggaccatgttcactatagcaaagtttcttcccgctcaatgcactacaaatttggttgagggtgctcggacatttggtgaaagggttagtaggcaggaattagccctcgtggcgaggtcaatcacgcagtgcacggttgataaccagaggagaagtggtgctgcaattgcggggttctag

SEQ ID NO: 40761 - DNA, 243 bp, Zea mays
  Peptide Sequence Number=SeqID_84136
atggcggcggcctatgggtacgcgactcccaagcctctgcaatggcctatgggcggcggcctctgcaatggaatggatattcagaggaaaagtttgccgagaattgctccagtctggcggtctgacccggttgacttggaggaaggtgcggtgacggcggcgtgcctgcacaggtccagcccgttacgtgtcgccatggacgaaggattatatagttctagatctgtcttaggttatttttaa

SEQ ID NO: 40762 - DNA, 393 bp, Zea mays
  Peptide Sequence Number=SeqID_84137
atggacgtcctggatcactcggacgacgacgaggagcaccgacgtcagtacgccaccagcagcggcaggtcaggctccaggctcggcgcgtgccggcggaagcggaggtccggcggcagcagccaccagcacctgctgctcatggaccgtgtcggcggcagagaccgcggcgacggcgcgttggaggacaccgtgccgctgccggactacgagcgcctgtcccagtcgggcggcgcaggggcgggagccggtggatgcggcgccgggtctgacggcgactccaagaactccgaggacggcggctatgaagggaagaacaacgagaagaagaaaaagaagcggtcgtcctggctgccagaccccgaccgccggtggccggtgcagggcttctaa

SEQ ID NO: 40763 - DNA, 465 bp, Zea mays
  Peptide Sequence Number=SeqID_84138
atgaccatggagcacgccgccgtcgaccagcagcgcacggagtcgcttcatccggccaaacgcgagcatcgatttcttgggcttggttggagaaaggagtcgttgttgggaagagaggcagtggcgtttgtagcagacgaccgagtggaggtggcgctagccatggacagagatctgaggagcggcggcggcggccatgaatggaatcgaggagcgacagcttggactagagcacttgaaaactatctacctacatggttcctcgggtctcttctcaagttccttgctgtactgaaacatctgctagcaaagtgcctgggaagtttactgagtaaaattcatagttttttagcagtttattccaagctcatttttagcacatcatgcaattactgcaccagttcaatggctggatctggaccagcagaggtctatgaccacattcgaaagacctacgagacctaa

SEQ ID NO: 40764 - DNA, 3150 bp, Zea mays
  Peptide Sequence Number=SeqID_84139
atggcctcggctgctcgtgctcggcagtcggcacggtaccccgacgcactcggggcccgctggcccgggcgtgcgctgcctctgcaccgtgttccattggcagggaccaggggagctccgtccgccgaggcgaagacttggggagaggggagtgtcggccgccggggcaggaagcaggatgcgaccgccgatgcacggtcggcgaagctcaagggaaggaggcagaagagggctcctggtggtgggcagtggccagtgggcactgcagcggacctgggaatgtggcttgctcccaagatactctcaaagccatcaggataccatatgtttgttgattcttgtgtcctatatatatttgttgcccaggtgaccacaaaagtggaagccaaccccaacctcaggcagggcagcaggggctactgcattctaggattctgtacgcccgaggacagtcccgtaattgcgccccgcgcagggcctgcgagtgtgtgtgccactgccaccatagtacaccacagtgcccacaccactgttttaaatcccctgccgccgctcgtccccgccgtcgtcccccccttccatcattctcccaaaacgacaccgcagaattccccggccgcgccgatacccaccctacaccattccgcgattctaccaccggaaacggcggggagcgccatggcgtacatgtgcgccgacagcggcaacctcatggccatcgcgcagcaggtgatccagcagcagcaacaacagcagcagcaagagcaccagaggcaccaccaccaccacctaccgatgccgctcccgctcccgcccccgccgcgccaggcgctgcctatgccaccggccacggcgcccccgcacggccagatcccggcggcgtccctgccatacggcggcggcgcgtggccccaggcggaccatttcttccctgacgccttcgtgggcacgtccgcggccgatgcggtgttctcggacctcgccgccgccgcggacttcgactccgatgtctggatgaacagcctcatcggggacgcgccggtcttcgcggactccgacctcgagcgcctcatcttcaccaccccgccgccgccgccgcccgtacccgctcccgctcccgctcccgcttctgctgtggcccccgtcgacgcggcggcccagcccgaggccgccaccccggcgtcgcttccccagcctgccgccgtcgctgcgccggcagcgtgttcctctccgagctccctggacgccgcctgctccgcgcccatcctccagtccctcctcgcctgctcccgtacagcggccgctggcacggggctcgctgccgcggagctcgccgaggtgcgcgctgccgcttccgacgacggggaccccgcggagcgcgtggcgttatacttcgcggacgcgctggcgcgccggctcgcgtgcggcggcggggcgcaagcgcaaccctcgctggcggtggactcgcgcttcgcccccgacgagctcacgctctgctacaagacgctcaatgacgcctgcccctactccaagttcgcgcacctcaccgccaaccaggccatcctggaggctacgggcgcggcgaccaagattcacatcgttgacttcgggatcgtgcagggtatccaatgggcggcgctgctgcaggcactcgccactcgcccgggggagaagccgtcccgggtacgtatctccggcgtgccttcgccgtacctggggccaaagcctgcggcgtccctcgccgcaaccagtgcccgtctccgcgacttcgccaagcttctcggggtggacttcgagttcgtcccgttgctgcggccggtgcacgagctggatcggtcggatttcttggttgagcctgacgagaccgtagccgtcaatttcatgctccagttgtaccacctccttggcgactccgatgagcccgtgcgacgtgtcctccggctggttaagtcgctcgatccatcggtggttacccttggggaatacgaggtcagcctgaaccgagctgggttcgtcgatcgttttgccaatgcactgctgtattacaagccagtgttcgagtcgctggacgtggcgatgccacgggactcgccggagagggtgagggtggagcgatgcatgtttggggagcgcattcgaagggccattgggccagaggaaggcgcagagaggactgataggatggcggctagtagggagtggcagacgctgatggagtggtgtggctttgagcctgtcaagctcagcaactacgccatgagccaggccgatcttttgctctggaattacgattccaagtacaagtattcacttgttgagctgccaccggcgttcttgtctctggcttgggagaagcagccgctgctcaccattaccgctttcatccctagctggcagagtcccatcgtgcgctcggcgcgtgtaccggtccgtgtacgtgtgcggcctccgcgcggtccacggcgccacgctgccttcggccttcaaggagcgccccagtacgtgtgcccccgcgcgcggcgccaccgcgacggcggcagccccacggcaggcgcggccgcttataagcggctcctggcccgtgctctaggaacacatcgccgtgcgcgtgcgtccacttcattgctgctcatgtacccctacacgtttcgggcggccgccagcagcagcagcagcagcacggcactcgggttcgcgctcggccggatcggcggcaccacgaggagcggcggcgtcgctgcgccaggcttggtggtacccgccgcgggcgtagcacgcgggaggagcgtctcctcgacgccggccggcagcgcacccgtgccgggcgaccagggcgtcggcatggagcagccgaagcagcagcagcagcagcccaaggtgcccccgcaggacgccgccgggggcgagaacaagcgcgacgacatgcacaagcacaccagggacgtgatgacccactcgttcggggaggggtactcgacgcgctccgacgaggagggcttcggcggggtgtacggcgggaacgaccccgtggaacaccccggcgccgagatccatcctagccactccgagtacgacacgtcgcagggctcggaggtaaaggagaaggagaaggcgcgccacctcaaggacgagaagcatgccaccgcctag

SEQ ID NO: 40765 - DNA, 603 bp, Zea mays
  Peptide Sequence Number=SeqID_84140
atgcaggcagagataagcatagggagagcacaaggaagggcagaggttccgagcttgctgagcatgatctccacagatcgagcaaaaggaggtgtgaagaccatgaaagccatcgcagtgggaagtttcctaggaattacaccatttgagaatattgtcaattttaaaaacatcattaggcttcacaaggttgaaacaaaagaagtgaatgaacaagagagtagtagaggtcatgcagcattatccaagaagggccagaatcctcagccagataattcattgttgaatgaagtggaagaagatgccatatcagatgacgaaaaccacgaggattctagaaggggtcgctctaagttggagcgatggacaagccacaaagagatagaatatagtaatattgatgatgatagtacacaaacatttccgaccatcaaagctgatgttgaagccgatgaggtaggtaaatctcaagtttctgctgcagctggcaactcggacatcaatacaaatgttgatactgggcagacatctgataagatgactgaagaatgtgagcgtgaccgacatctagacacagttgagagggctcaagagacgaagtga

SEQ ID NO: 40766 - DNA, 480 bp, Zea mays
  Peptide Sequence Number=SeqID_84141
gcatacaaccatgctagtggagactggaggagtgtagagccgcagattattaaacgcaaactaggcaattacgcgatacagcagagctgcacagattccacagaaaatagcaaaccctcggtcccggtcccggtcccggccaactccgtctccccgctgcgccgccgccctaatcaccacgatgacgtctccccgcgccatcgcaagcgccgcgcgtccccgtccctatgtccaccccgctcgcctttcctcggcgtcgacgcggaccgtcgtcgcagatctagggcttcgccgcccgatttcgatatccgcggtcgccgctgcgatgccaagccctctgaggagaaggagaacggccatgccaagcccggaaaggatgaggacggcgacaaccgatctccccggcgcgacagggtttcagacagggaggaaggtagcgaacgccggaggatacgcgatatggtttctgacgacgagaag

SEQ ID NO: 40767 - DNA, 147 bp, Zea mays
  Peptide Sequence Number=SeqID_84142
atggagaagtgcaaaccaatcaagactcccatgcctacaaatggacatctcgacttagatgagggagacatcagatcaggatgccgcacacgaagaatgcgtcggcgccagagagtggcgatgatgaggatcctcgtcgccctttga

SEQ ID NO: 40768 - DNA, 2610 bp, Zea mays
  Peptide Sequence Number=SeqID_84143
atgtgcgggacagggatctgctggtggtggtttttgaggtcgacaacaacaccgatttgcttgcctcgaagaccaccagcatcgacgacgggcggcgtgaagaagctacaccacttctcgattcgctcgtctgatgctgcgtcgtcgtcccgggagtgggggagctgggcggagtgctccgtcgaccgcaagtgccacgactaccaccgctgccacaaggttcgccgacttaattcaagctatcctggaggtctggtatcttacatccagaatgccaaaaaacttcttgcggattcaaaggaaggcaaaaacccatatgatggtttcaccccttctgtagcacttccccgggaaacaactactggaaaatgtttccttcaactctatatagagtctatcctggcttttcaagaggccagctgcaaaatggttgatgaggggtgccaaacaaagattccatttgttattatgacttctgatgatacaaatgcgctaactatcaagcttttagagtcaaactcctactttggaatggaaccatctcaagtgaaaatactaaagcaggaaaaagtagcgtgtctagctgacaatgatgcaaggcttgcattagacccaagcgacaagtacaaaattcaggcaataccatcagcattaggtgtcagtgccaccaagggttacaatgtaaattctctcgctgttcctaggaaagccaaggaaacaattggaggaattaccaaacttactcatgtcgatggtagaacaatggtcatcaacgtagagtacaatcagcttgatccactccttcgtgcaactggacatcctgatggagattcaaattgcgagacaggctattctccatatcctggaaatataaaccagatatttggaaggcgcatgctggttcatcacagtcagagggttcgggtctggatatggagaggaacggatgcaatcatatttattgtccatatcctctccaaccaattgcctcagctgcacaaaagttcatcagagtcaagttccagctcatcttcagaatcttcaagcagcgacgatgagagttcaaggaagtccagatcacggtcgagatcaaagagaacaaggaaaagaagagccggtcaaagtccaagcgcagaggcagtgaaagcgaggaggaaggcccgttgctttatgttgtgttggcataaatcaccaaaaagggggagattgaaagagaaatgtgtccttgggtcatttctaagtattttggtgattgagtgccaacacaagtgcttaaatgagaatttatgttcatggatgaacaaagtgcaaatcaagagtaaagtttttaagttattcaggatcacctattcacccccctctaggtgctctcaccctttcaggcaggtcaagggcaagactgtttacttagagctgcaggaaggccgcaagaagcggcgtacggacagagaagcccgtgcagcggcagcagctgcagcagccgctgcgcaggccgcacttggagatcagccacagactccatccgatcagattgcattccgtgctcgtcgtctcacctcccggcctcgctcctcctctcacacctccgcttccactccgccacccactctgcctgctcccgtcactcctattgctccatccacctccacagccatacccactacctcctctacgccagcttccactgcttcccctgctcccgctcccgcttcagctcctcctgtccctccacctcgattccgggagcgtgatgagactgaggtccgtcctctggtttcggatcctcgtctgtttgatcttcagcgtgctactgcggcacgggtacgtcggttcaggtacgtacccgtggagtcttggctaccagctcagagagaccctgcagcaggtgatcttttcagcacacggattcaggagtcattcttcagagctcagatgtctgctcagatagctctgcgagtgcaccggcttttggatcttccagcctttctgcttgcagccggtgctgactctaaggcgcatctcacctatctgcctggccttcagacccttctgactatcagcggcagatatgttgaggagtgggtccgagtcttctacgcctctgtttggattgacccggatcatcactggatgaggttccgctttgagcgagaggatgtcacaattactgccagtcagatccgtcagctctttggattcccagagtcgccgactcgccttcacagcctctgctacggcacttctgaccttcctcgtcgccctcacggcggtgtggctccagggacagctcacgtcgcggctctgttctgcccgcctttcacagatgggtcgcgacgttcaccagcagactttactacaacagcaaagtacttatatgagctcatcagacggactcttctgccgaggatgggatacagggaggctaccactcatattcagctttggctccttggtgccctggtctcccactctgagtttgacgttgtggacttcctgatttgtgagatcgaggacaccgttctggatgggattcgtgctcgtcggcagttgccttatgctcactacttgtgccacatctttgcgcagctgattcagccccctcgattttag

SEQ ID NO: 40769 - DNA, 153 bp, Zea mays
  Peptide Sequence Number=SeqID_84144
atgacccagctcttggagttctacgaagctgaagaccctgagcatctgtttgatgatgatgaggatggttatgatcatgcttatggtaatggtaaagaaggtgtcgaggcggatctccaggagttccaggacttcgacgagttcgaggattag

SEQ ID NO: 40770 - DNA, 381 bp, Zea mays
  Peptide Sequence Number=SeqID_84145
atggaggaccagatcccttcgctcgctgaccttattaagtttggcagcttgctggatttccaacaacaatacagatttagtcgctgctgccatacaccagatgctcagatcttcttcaggcccttcgtcggtgaggagtatcacaagaaaatcaaatctaaaatgaaagaactttatttgattggacaaatcccaatttctgtaaattgtagacactatgaagttttagctgatcaaatgcagcctgtcttaattcgtcatctactgataccagcaatgccttggaattggatgcacttatgggatagcctacatgtcgtggaccttggtattttggttgaacatggattagggaaacttggatggcatgacagccaatga

SEQ ID NO: 40771 - DNA, 306 bp, Zea mays
  Peptide Sequence Number=SeqID_84146
atggcgaggtcctcagcggtggattcactgttggcggcgccgtggatgaaaggagacgtcgagattggaaggcgccgtggaggcacgtcaggagcagtggggtcgaggggcatcgtgagcgggtcggagaccgggaggacggtggctgccgtggaggatcctaggaacggtgccttccatcaaaggagcgtggatgggggcgatgatagcggggtaccgcaacggagagcggggcgagggaggatgtcagaggcgggggcagggcgggggcacggtggacgccctcactgtgatcttaaggtgtag

SEQ ID NO: 40772 - DNA, 1319 bp, Zea mays
  Peptide Sequence Number=SeqID_84147
atggcccacttggagctcccgattccgtggcacggctcaccgaagcagccgcgccgtcctacctatttaaagcgtgctccaactcgaacccttcacagaagatcagggtcggccagcggtgcggcccgtgagggcctcccgctcgtcagcttccttgcgcatctcaggccgttgcagcgcagcgccccgaggggcgcgccagaggcgcgcggataccgtccgcgccgacgacggctgccgggggcgcctagggcccccgggctttggccgccggcgcgggcgacaacggtccacgccccgagccgatcggcggaccagcaggagccgttccgcatacggccgagaacttgggcccggtccgtcgctgaggacgcctctccagactacaattcgggcggcgaggccgcccgattctcaagctgggctgctcccggttcgctcgccgttactaggggaatcctcggccgaatggccggccgcgcgccgggacgctgcaccgagaacaacaacttgatgtcgcccaccacgtgctgcgcccggcgcggttcgccggcagcccctgcttcggcccacctcgccgtgcggcgcggggggccagacgccacgtccctcgccccgcgggggggtgttgggagtgtcttttggcgtgacgcccaggcagacgtgccctccgccagaaggcttcgggcgcaacttgcgttcaaaaactcgatggttcgcgggattctgcaattcacaccaggtatcgcattttgctacgttcttcatcgatgcgagagccgagatatccgttgccgagagtcgtgtcgattaaggtgtaaccgctgccctgggagcggaaggcgggccgaccgctccgcggggcaggaggtagtactggtgttccttggcgcccggggcgccgtgggttctttttcgcggcaccccccttccccgcgggaggttcgggggggcagcgtgccgggccggagcccggcggcacgggtgactcgttcgcggtctgttttgtttaagggtcacggcaatgatccttccgcagacaagcatatgactactggcaggatcaaccaggtagcacgtcctcgcagacgggccagcgccggcctccgcgcggaggcgtcgtgccgggctggccgtcgttcattcgggcggaccgattcttgggcgcgtgacgccaacgcgtctccggccttcagcgtgagccacatccgagaccaaaagcgccagcgaggtgtcctcggtgccgccggccataggccgacggcggcacgaggcaaacgccgcgggcgctctcgagccgacgagccgcaccccggggg

SEQ ID NO: 40773 - DNA, 198 bp, Zea mays
  Peptide Sequence Number=SeqID_84148
atgacgaacggcccctcccagggggggcgtgagcttgtgccgccctcgggtgtcttgtcgcagccgaagcaccaggtcgcccacctggaggtctcgggaccggacccctcgggcgtggtagcgtcgcagggactgctggccctcgtcctcggggaaccgtattccaggtctatgggcaagatggcctcggccccatag

SEQ ID NO: 40774 - DNA, 963 bp, Zea mays
  Peptide Sequence Number=SeqID_84149
atgaaaatccttaaagccgaacgatggctgaaaggtaccaactcccgcggagttgcgttcccccaacgacaaggcggaaagacggcgggtatcccccatccgggggcttggaagccgtcgtgggctgagtcttctccaacacgctccaaggccctcctcctacagcgcgggggctgggtcccacacgtcatacaagccggcccagagcagaagaagccaaaccgccgcgcgcggtgcgtacaaccgcccagcggttacaagcggctctccacttttgcccagaccagcgggcgaaagggcgggcagccatgcaggcggcatgcaaccgtgccaagtgggcacacttctccgactcccaacacgcccagcatggaggcccaggcccacgcgtcatgcaaccggcgcgccgaatgcttcgtgcatgcaactgcaccgccacttgcgccaccaccgtgcctcctcgactgcggaaccaataccgcgactcgaggcgacccagcgcacgacccagcagcgccagcctggcacgacggtcaatgcggccaaaaatgggccggcagtaatggcggtggcaggcgggcaggagcagcggtcacgtccgggacaggcggcgcctccggcaggagaagcgagcgacgcttcgcctttgccataatgaccgcgtctaaaaagggaccgagaaagggggataccccgaaaaggatccttccccgtgaaggaaccaggctccgagcctccctactgatcaggggtttgaaggctggcccctcggaagggttcaacagccgcctcagagcacgtgggctccacacccactactggtcaggggatcgaaggccggcccctcggaagggttcaacggccgcctcaggctactcgggctccgcgcccactactgatcaggggttcgaaggctggcccccaaagggttcacagccgcctcagacacagagcgagggatga

SEQ ID NO: 40775 - DNA, 363 bp, Zea mays
  Peptide Sequence Number=SeqID_84150
atggaggcaagaagagctttgaggtaccgagtgcacgggagaaggccaaggaggccgaggaacctaaagccaggggtgaagaataagacttgcaaagtcaaggttgatcgagttgagaagagatatgttacaagtgaaagatctcttgtgggttttggtgatttggatgacaacccaattgaaatactagcattaaaggagaacacttcttttgtgagacttggtgtgcatatcttggagacaactgatcaagccaaggatgaagacaagaagagcttcgagcaactgacttcatgggagaaggtcaaggaggccaaggaacccaaagccaggggtgaagaagactttctaagtcaaggttga

SEQ ID NO: 40776 - DNA, 918 bp, Zea mays
  Peptide Sequence Number=SeqID_84151
atgaacacactattcatcaagtacataaagaaagttggtgcatttgtcaattcgaatgacatgaccgtgtactcatatagcccatacttggtgataaatgttgtctttggtatatctgaagaaacaaaagaatgtgtggcaccagtatcaaatagtactttcgctggatgggattcgactaggaacatacctactgccacatctggtgcatcctggattgcttcagcctccaagtggttcccttttcatggttgtagtcctggccacggcctcctgatgcttgttgtggtgctccttgtcttaatggggtgttcgagactggctgtcgctgagctgctttcttcaggcaatgagttgcccagtggccttgttccccatagtggaaacatccacgacctcctccttgtgttgggactgtctggttgctcgggttggttactcgggaaggaaggcgaggtgtctcgctactctaccgctgatactggtttcctccttattggttgtgttggtggtactactgctgctgccgagggaactgcctctggaactgctgttggtgcagacgttgatgctggtgctggtgttgatgtccttgaggtcttccatctcccggcgcttcctctcagtcatgatagtgctatctatcagatgttgaaatgtaaggaagggtctgaccaagtgcttaaactgcctgagtctgcattaggaacatctgctcgattgtcattgggggtggtggtggcaactgctgctggggtgtctcatcctggggtgcctactgctctggctgggcacgccttccacctcggcgcctgttgtcagacatctgtagaaagcatacacacatcagacttgaccctgcagtcttccagcataagaaaaagatatatagaagtcttcataacactgaacaaatga

SEQ ID NO: 40777 - DNA, 603 bp, Zea mays
  Peptide Sequence Number=SeqID_84152
atggctgtgttgatcgcgttgtgcgaggctacaatatacaacaggaggggtgatgcgagatttgattgtaatctgagaagcagtttagcaaaggcattacttcgcattcggccactgagtcaacaatcttgtctattcttggaggtgaaattctgccttcgctgctttcgtcttttaatcggacatcttgcacaattttttgcattttggggtgtattgctaggccttggccgtctgttctttgatcgggcgagggcccttagagtctttgttctcggtggtaagacaatgtacgttgcgctggccggggatgaagtctctctcaatgtttctggcgacctgctagtcctcgtatacggttattactccctgagaacctgggatcttcatgcacatgatgtggtttatgtccatgtgattgaaggcatgcatgaatatgatgtcagcttggctaccattattgatgaggactttgtgcagaccccaccctgcgcctcttcaatttatcaccagcgcgtctgcatgggcacactgtggaggtcgacgtctcttgcatcgaaggggacaaggctaattgttcttggagtttgtaggaaacggtga

SEQ ID NO: 40778 - DNA, 207 bp, Zea mays
  Peptide Sequence Number=SeqID_84153
atgaaggggacaccaaaatgtaatgaggaggatgccaaggtgaaggatgaagtggagatggatggtcgggtggtggagcagaaagtgcagatgacggcggtggcggtggagatccggaagaaggaatccggcgagctggtggccatcgggaggcagtggatgacggcctccaggcccaaagtcgctgctgctcacagcaagatatga

SEQ ID NO: 40779 - DNA, 159 bp, Zea mays
  Peptide Sequence Number=SeqID_84154
atgggcagctttggctgcagcgacagcacatcattggacgggctgttggtatctgctaattggtgcactggggctgctggtggtagcatccaaggagtgacgttaaaggtaggatggatgaacagtgagaagagtatgcggagaggagaaaagctgtag

SEQ ID NO: 40780 - DNA, 486 bp, Zea mays
  Peptide Sequence Number=SeqID_84155
atggcgaagatgcgccggtgtcactgtttatataaagctagcatagtccaaggaaacgcgtgcgcactgctccatctgatcaccagcgctgtagtagctctgcggcagaaacggcaacaatccatgatcgtccgtcgtcggcaggcaagctgccacggtcgaaggataggaatgacgtggcgcggccgctgggggctgcgactgcgagtgcgccatggcggcgtccggctgggcctgctgctccgggtacgcgtgcgcttgtccggcatcgtcgggctgctcctccggagcgtggaggacctcaggtgccggtgccgccccgccgccggaggcaggcgggcctgcgggtggtcggcgccgagagcgtcagggcctgggccgtgtcgccacgcccgactccccgagagggaccagacctcctacgcggaggccatcgccgactgcctcgagttcatcaagagcaggtcgtcgcctaccgtcctgtga

SEQ ID NO: 40781 - DNA, 309 bp, Zea mays
  Peptide Sequence Number=SeqID_84156
atggcgtcgcctccgcccgatgtggacctgggcaagctgagctacgagatcttctccctactcgagagcaagttcctcttcggcggcggctccgtgccgggcacgccagcgcgggcggcggctccgggccccggggaggaccgtggcagggtgcgggtgctggcgatcgacgggcgcgggccaggccccggcgacgcgctactggcagcggccgcgctcgcgaggctggaggcggcgctgcgcgtggcggcggacgggtcgcggggcggattgatcgggcggttgtttggctggggcagtctacactaa

SEQ ID NO: 40782 - DNA, 99 bp, Zea mays
  Peptide Sequence Number=SeqID_84157
atggggtccgggcacagtacttgctctgccaagtgctcaggaggtgaagctggtaacatggaggactttgaggagttccaggaatacgacgagttctag

SEQ ID NO: 40783 - DNA, 717 bp, Zea mays
  Peptide Sequence Number=SeqID_84158
atgtccgcgtccttcaggcatattggtctcctgttgctgggccgacatatcgaaatccttgacagccccacgtcgctccacgcaactcgccgctgcactgcgtcgctcgctggagttgcacctgcccacgcgtcgtgccgtgtctgcgcttgccgcgccctgctggtgcatgctggtgccatactacctcctcgccaagcgcacccaccttcgttggactccacagattttgccaactattgttgtgtgtcgtttcgatgttcgtcgcatccaaaagccttgtgcctagagacttcccataccgcgtcttcaccatcggagccctggagtccgctgcctaattctgatgtcgccaaaatcgtctttgcatcaccactcatagtagacgtcattgaacccgcctcactagatctcgtcgctatcatcatccacgagtccctgcgcctagtcctttgcgccgacgaagatatgatgatgaacttgatggatgctagtctagtgataccctcgatcatcttcctgtggaaggatgtccatgttctgttgtttcgtcggtccctgacgcttaagcttaggaaggaaattgatcagcgtaaaattattaggccattggggaccaggtcgtgggtcaaggaacaatttcgcttgcccgatgatatgagcctcgatgatccgtacatgcgggaggttttcaacatcgcagcccaaagattatga

SEQ ID NO: 40784 - DNA, 417 bp, Zea mays
  Peptide Sequence Number=SeqID_84159
atggcggtgctacggcggcggccgagctccggcaaggaatcgcggggcccccgatcggcaatcccaaccagagagacccggtgcgccttctacacccccaggcgaagcccccagatccgccaggataaattcccgagcggcggcaaggcgaattccgtggtggcggcacatgccctattctacgggaacgcggccacagatttttatacccaggcgcaaggcgattccaccctccaacttcctagcgaaacccggcatcaagttgttgcaacagatttccggaatctgtggagctcttcagcgacccagcaatggcggccgcgacggcattctgttagcggggaggacggaaacgcggtcaatcgtggggctcggcgtcagtgggagaaagcgtacccaggtgcgaatttcttttag

SEQ ID NO: 40785 - DNA, 462 bp, Zea mays
  Peptide Sequence Number=SeqID_84160
atggttcagatcatcgaacaccgcgacttgattctcgaggacttcctgatggaggaagaggcagcattttccatgccacgaagctccaaccgccctgcgaccggtgctgctgttatgcacgctacgcagcagcacacgcatgtgcagacatccagggctccgtcaagggctactcttggggcgttgtctgcagccaaggagttgctgcgcaaccccccaagttccacggcctcgccgggggccataaggcagtggcgtgaagatgtcgatcgactcctcggcttggcacattctggctcggccagtcccaggcctcggccattcaggcgtcagcgtgaggtgtcggcgtctgtgcactcaccctcagtgaggggtgcacggacctacgggcagagctcaaccgcaggcgtgcgggcgaggatgcccgaatctctctggagagggataaggacctacaagtag

SEQ ID NO: 40786 - DNA, 510 bp, Zea mays
  Peptide Sequence Number=SeqID_84161
atggcgcctcctgtgacgtggtcggtcaagccctgggttgggcgaggtggaggctccttcgaggccgaggtcgagtccgagcccctgggtcgggcgaggcggagaccgtcggctgaggccagggctgtgttcgagccctggggtcgggcgaagcggagttcgtcgtcttccagggctgagcccgagtccgagccctgggtcggggctaagcccgagtccgagccctgggtcgggcgaggcggagttcgtcgtcttccggggctgagcccgagtccgagccctggggtcgggcgaggtggagttcgtcgttttccggggctgagcccgagtccgagccctgggtcgggcgaggcggagcttcctatggcgctcgaggccagacttggctgctgtcagcctcactctgtcgagtggcacaacagtcggagcggcgcaggcggcgctgtccttttgtcaggccagtcggtggagcggcgaagtgactacggtcacttcggctctgtcgactga

SEQ ID NO: 40787 - DNA, 180 bp, Zea mays
  Peptide Sequence Number=SeqID_84162
atggtgcaatccccaactcaagacgaggaacatgtacctcaagacgacgaccgcccgagggcgtctcgagaagacgacgactgctcgagggcatctcgggaagacatcgaccgcccgagggtgtctcggcctttcagggtagaagccttgcatgatccgaactgggtgttgaccatgtag

SEQ ID NO: 40788 - DNA, 321 bp, Zea mays
  Peptide Sequence Number=SeqID_84163
atgacgccgctcgctcgaacctcgcgcctcatgcatcgccgtcgctactcgcacgtcgaggggcgccgcttgctcgtcggccttggaagtgccgccgcctcgggcccagggacgtcgccgcttgcccgcacaagggtcccgctgtcgctcgccctctggatcggggagccgccgccgcagacctgggcaccgccaccactactccggatcgaggaaccgccgccaccgcgcgtcgaggtcagggagccgcagtcaccggctgggagtccaccgccgcgcacgctctcgggcaaccaccgtcgtcgcacgcgccgtcactaa

SEQ ID NO: 40789 - DNA, 1230 bp, Zea mays
  Peptide Sequence Number=SeqID_84164
atgcgccggtgcgcggaggcgatcgcgagggccgtggtcgagttcctcgacgccgtcatcctggccttcatccgctcgtgcttcggcgcgcgcccccgccgcggctccgggcctccgagcttggtaagggacggacgatttcatgaggatttggctgacgggtgtggaattgatgaggagctcagacgcgaggcaagttacctgaagctatgcggcactatctctgaaaccccagctgaactacgcaatgagcaatcgtatgaaaacaatttggaaactactaatgagtgtgatagcaagctcacgtatggaccaccggcaaattgcaaattgctgtttgaagctaattcatcacaagggcaacgcaatcccagatgtgaggagcgtcactcgctcaggtctatactgaacagtgaagatgctgggcgtcatcatggagctgaatatgttcctcgttcagcttcctcggaaaagaggctgtttcaaaacatgcaacacaagccacttgattctggtggttcgccgtttccaactcctctagttctcagggatgacatgcagacccctgggacagcatacgcttcacacagagggacctctatatctggaaagcgtgtgcggactcggaaacaattcatataccctgtcctcagatccatcgagaacagacttcagcagattgaactgacagaagactcttcaccattggcatcgtccgatcctctaaaggagagagacttgggagcagattctaccaaggatccaacccaagcgtcttcaacttcagtggtcaaatcaggactgtctgaaactccatcatattctgcacctgatcctaatgcctcatatggagtagaagaatcactgtcaaaatccaactcggatgaaaagaacgctgcactgagcctgtcccgctggctgaaatcttcctccgcagatgctgagaatcaagatgatgaagactgcagctttctaactgagaagcctgtcttcatggttgcacctgatctcaacttggataccagtaaccctactcctaggttgcccaaggcatgggatggcaacggtatccccaacacaacgaccagatacagagaggatcagagggtcagttggcacaccacgccatttgaacaaagactgctgaaggtgttgtctgatgaggaccgttgccctccaaggaaagtcgtccgggggaagctgttccatctcgaggagacagctgagtag

SEQ ID NO: 40790 - DNA, 369 bp, Zea mays
  Peptide Sequence Number=SeqID_84165
atgagatttcgtccaaatattgttgtctctgggtccacaccgtacaatgaggataactggaaaaggcttcgcataggggaggcctattttacttccatgggaggatgcaaccgttgtcagatgatcaaccaatatcagagctcagggcaggtgatcaagtcaaaggaaccgctggcaactttagcatcgtatagacgaaaaaaggggaagattttgtttggtgtcctgttgaactatgaagacggcatggagggagaagatgatgccgttgtagagagatggatcaaagtggggcaagaggtacatacatacctcaatgatgacttgtgcacatacatacccggaagtttcacctgcacaagaggctga

SEQ ID NO: 40791 - DNA, 369 bp, Zea mays
  Peptide Sequence Number=SeqID_84166
atggcgtggggagaggacgaggctatcgaccccgacgtggcctcgatgggtcttcacgtctcggagcggatcggccgcgacgccgtttcctctccgccgccaagaccatcctccgcatccagctcagccaactctcctcgagcccaaaagcacaccgcgcgccatgtgaccaccgagagggcgaggcggtggtggccggtttcgacgttcctgcacgcgtgcgagggggaggcgatgacgaagctcaccaacgagaaggtgccctacttcaacgtgcccatctatctacagaacaagacccaaatcggcaaggttgaagagatcttcggccccatcaacgaatctatgagcacctcctcgcctccctaa

SEQ ID NO: 40792 - DNA, 975 bp, Zea mays
  Peptide Sequence Number=SeqID_84167
atgggccagagcaaggcggagtttttggagcagttcggtggggactacggttacccggacgcgcccaggggcatcgacgatctgcgggccgccgagttcaagcggctggaagggatggtttacctggaccatgctggtgcgacactgtactcagaggcacagatgacggatgttgctagagaccttatgtctaatgtctatgggaatcctcgtatccttaaatttgggtcttatgtcacgaaaatagtcagaacgatccaagcatggctacaagtgatattgttacttctgcgcggcatcagatatgctctgagcaaaggagctactgcatcagcagttgatgttcaagaggttatcgatccatcaaagagtcatgaaagtgacagtatgtttaaggtttcaaaacacctaaatcaaagaagaggtgatgatgtgcttctgcacaagtatcagaatgggagcctggcacctatttcaggaaacagtttaaatctatttgcattcccttcagagtgcaatttctcaggacataagttcaacctcagcttggtcaagttcatcaaggaagggaaatttatggatttgccatcacagcagcagggccagtggatggttctgatagatgctgcaaaaggatgtacaactgaaccaccaaacttaaccctgtattctgctgactttgttgtctgttcgttttacaagatatttggctatccaactggtcttggtgccttaatcgtaaaaaatggtatgcaacaagcagttatcatttctgagaactaccattattattcaccattttcaactactctgagacacaccatcactattcttcctcccttcgaaatatgcaacagtgcatgcccaaggaggccttgggcccagttgcaggcgtctctggtgaccatgtgtttccgtatggtcgattctgccctcaccatcaagtggaagattgtgagcagggccggctcatga

SEQ ID NO: 40793 - DNA, 1020 bp, Zea mays
  Peptide Sequence Number=SeqID_84168
atggcatatttcaaagggaggaaaaatgaggctgctagtttactgaacaagacatacttcagtggagtattcttttgtaattcttatggcataggaacggtagctgcttcaattgctgacatcgactttgttcagaaaagaaaaagcattgagcaagctcttgaggatggaacaatctcattcttgagcatatcttctcttcgacatggatttaagataatcaatatgctaactatctcggctattgcacggtacctgtcagagatatattttggtcctgatatcctgtctatggcgtacttctcatttgagttgttctcttgtaggcatactgcatctcttgctacttatgtgagaaataaaatgctagagctgaagcatagcaatgggaaaaatgtttgcatgatctatggacagacttctaaggtgaatcatctgaaaatgggtcctacaatcacattcaatttgaaaagagaagatgacacctggtttggatatcgtgagacgggctgcttttgtaaccctggtgcatgtgctaagtatgttggtttgtcgcactcagatcttgtttccaattttgaggctgggcatgtttgttgggatggtaatgatgtaataaatgggaaaccaactggtgctgtgaggatatcatttggctatatgtctacatatgaagatgcagaggaatttctgaagttcctacggtcatcttttgtgtccaaacctgtaggattgaacaatgaatacatggtgaatatggatactcttaatttagtagatgattggagccaacaagctctttcagttattcgcttgaaatccataactatctatcctgtaaaatcttgccaaggatttagtgtgcagagctggccactgacaactggtggtttaaaatatgacagagaatggcttctccaaggattaggtggtgaaattttgacgcaaaaaaaggccacaaatgcaacacaacatacgtatttccgcaacacttatctgttgaatatgacatttttatag

SEQ ID NO: 40794 - DNA, 390 bp, Zea mays
  Peptide Sequence Number=SeqID_84169
atggcagaggaccagatggtggtgaaggcgattcgggaggagtgcccctgggagtcgctccccaatcgccaccatactccagtccgcaccatcgattctagctgccaccacaccatcgacctcggacaccgccgcatggaggtctaccccggcctccaccaagatctaaccaagctaccagaatatgctctttgctatttcacaaaagaggcaaaaacaaaggaagttagggtttgggcacaagaattcacagagcaggaaggcaagtcaaagggcaacacgtatgggagttctcgtgactggagaaggggacgaagtagggcgacaatgacggatggcccattcgttggtggttgggagtttgcatggacactaggctattggaggtga

SEQ ID NO: 40795 - DNA, 672 bp, Zea mays
  Peptide Sequence Number=SeqID_84170
atggtgacctccggcttgatggtgggggaaagcgagccgggccgcggcctctgcccctccctcagcctcaaggattttcatcaccagggctggggaggggactgcaccgtgcctggctctcggacgcgagtggcttcggagcagctcgcggcgccggcgtctgccatggcagctggaagaggttctcccgccggcgagatagccaagaccggccacggaccgacctccaactctacggccttctgcccgtccttgcctcacgagtttgggcatgggcgggggcctcctggcagcagcatccaccctgaggtcagtgctgccgctgctcggccccccggagcagaagtcgacgtcgtcgccgctgctggagtgggtgacggcgcgccgttcgtcggtcttctgttgctccgcaggcccacccctatcgagtggggttactcgactgttggttgtctgaaccgctttaccaagcatgagtcgccccgtgtcaaggtgacgagtgagcgactgtccgggcgtgacgatgacgtcgtcctccagagtggggatccttggaccgcgtcgccgtccgaggctaggtcggaccttgctgaaggtgtcgtcgatgccgagggtgttactgcccccttccagcgtcaagacccgagcctgcaggatcagagtgtcttgtag

SEQ ID NO: 40796 - DNA, 354 bp, Zea mays
  Peptide Sequence Number=SeqID_84171
atggcgcttcctgttgacgtggctggcctgtgccctaggttgggcgtcgtggaggctcctccgaagccgaggtcgagtctgtcttccatggccgaggccgagtccgagcccctgggtcgggcgaggcagaggtcgttcggcagaggccagggcggagtccaagccctagggtcgggcgaagcggagttcgtcgtcttctggggccgaggccgagtccgagccctggggtcgggcgaagcagacccaagtccgagccctgggtcgggcggagcggagttcgccgtcttctggggcttagcccgagttcgagccctgggtcgggcggagcggagttcgccgtcttctggggcttag

SEQ ID NO: 40797 - DNA, 396 bp, Zea mays
  Peptide Sequence Number=SeqID_84172
atggaggttgagtatgatgacgaggatctagaaagagaagatgagacagatggctcgctcgaaagaatcgtcctccaagagcgaggcattggtagttcgagtgctcccggtcctctggtcgctcccggaggcgctggtcacaagcgacctcgccttgacgttccccaccaacgccgggcaccaagtaccatcccctcaggcctcagcctccatgccaataccaaggttgacatggatttgcgggaggatgttcgcggactacgagccgtcagcctccgcggcttcaagagcaagaaggccaccgccgccatgtccaacatggggctctccgagggcgagatgagcagtgactctaatcctcacggcggaggattaatcattgtcggacgtgtctga

SEQ ID NO: 40798 - DNA, 465 bp, Zea mays
  Peptide Sequence Number=SeqID_84173
atggccgataatggcaaaggcaagggcatcgtcatcagcaatcctcgcatgtcagatatatcacaaaaggagattgctcgaaaggcttcggacgagaaggctaaaagacgaccgtcgctagagggagtcttcagaggcttggaacaaacaagaatgcttgcaacaacagagaagtcgattagcaggccaagtcacactgagaagcagcacaccggatgcgacctcacgctgtcgatcggcctgtgggcggaggatgcgagcagcaacgacgtcgacggctcgagctccatcagcgaggagctgatgcctgctgctccggcagcgggcgctcgccgtgccgccgccgtgaaggaggagagcgaggcggcggctctaaacctggacctgaccatctcgtcgtcttattggctggccctgacgagtgacgacggcgcacgccgacgcacggccggctggcggcgctag

SEQ ID NO: 40799 - DNA, 858 bp, Zea mays
  Peptide Sequence Number=SeqID_84174
atgggtcggcgcgagacggagcgcgaaggggggaggaagccggagggagacaggcgtaaaaggggaaacccgcggccttcgtgtttgtcccgcgcccagggtaatgatggtgcctcctgtgatgtggtcggtccgagccctgggttgggcgaggtggaggcccctccgaggttgaggtcgagtctgtcttccgaggccgaggtcgagtccgagcccctgggtcgggcgaggcggagaccgtcggctgaggccagggctgagtccgagccctggggtcgggcgatgcggagttcgtcgtcttccagggctgagcccgagtccgagccctggggtcgggcgaagcggagttcgtcgtcttccggggctgagcctgagtccgagccctggggtcaggtgaagcggagtttgtcatcttccggggctgagcccgagtccgagccctggggtcaggcgaagcggagttcgtcgtcttctagggctgagcccgagtccgagccctggggtcgggcgaagcggagcgatgcggagcttcctatggcgcctgaggccggacttggctgctgccagcctcgctctgtcaagcagcacagcagtcggagcggcgcaggcggcgctgtcctcttgtcaggccggtcagtggagcggcgaagtgactgcggtcacttcggctctatcgacagaagggcgcgcgtcaggataaggtgtcaggccacctttgcattaaatgtttgcgttaaatgctcctgcgatacggtcggtcgatgtggcgacttggccaaggttgcttcttggcgaagactgggcctcgggagagccaaaggcctttgcagctttgtgctgatgggggttaccagctga

SEQ ID NO: 40800 - DNA, 1146 bp, Zea mays
  Peptide Sequence Number=SeqID_84175
atgaacaagacaccagcactcaaggtgccattacaaacggaactccggttccaactccgaaggtacgaacaaccccccacgattggagggcctgtggagcaacagaaggccgacggatggctcaccgccgcccgctccagcagcggtgacgacgacttctgctctgagcggccgaacagcatcagcgatgacctcagggcgaatgctactgccatagggccctcgcccacttcctcactcgagaggcaaggacgagcagaaggccgtagagttggaggtcagtccgtgggcggcaccggctatctcgtcggcggagaaacctcttctggctgccgtggcgaaaggcggcgccggaagcggttccgaagccgctcgggtcagagagccgggcatgcggcagctgccagcgccacgaacggcgaacgcccttccccccgatcactgagggaaggagcgggccgctgcccgcgcagagaccgaccccaactcggcgcactcccctccccagcactgatgatgaacatccttgaagttgagggagggacagaggtcgcagcccggcttgcttctccccacccaggggctggtgaccagcgggtgaaagggcggacagccatgcagtcggcatgcaaccgcgccaagtgggcgcaccccctcaactccaacgcgcccagcatggaggcccaggcccacacgtcatgcaaccggcgcgccggttgctacgtgcgagcaactgcaccacccctcgcgccactaccgtgcctcctcgactgcggaaccagtaccagactcgaggcaaccctgcatatggcccaacagtgccagccacgcgcatcggtcatgggccagtcagccgcgggagaaggcgcgacggtcgatgcggccaaaaatgggccggcagtaatggcggtggcaggcgggcggaagcagcggtcacgtcgtcagccaagctcacgtcccctcatgggacagcgagagaaccctctcccacggcgtgaagacggcgcgcccgtgatccgtcccttgaacggctcgcgcacgcgcaacggctgccccgcgaaccactcgccccgtcgcattaactccgcggcgggacatgcggcacctttggcaggagaagcgggcgacgcttcgccttcgccataa

SEQ ID NO: 40801 - DNA, 645 bp, Zea mays
  Peptide Sequence Number=SeqID_84176
atggaggctatggagggagacgagaaggaggcaagtagctctttcaaggcagaggcagacaatacgacgggaaaatggcgtctcctacctcggtcatcttccctcggaaaggaaaaggagaaagacacagtactattcagaggtttgaaggtcaggccctcagcaggctatgacttgaggtaccctaagacatattcgagaccctcgggagcgattcgtgacggaacgctagccgactcccatcgaatggagctcggaccctcgctcggattacctgaccggccctcgggtgcaaactccgcctcgcccgacactgcgttcgacctcggataccgtgttcgcctcgcccgagcttggcctcagctacttgctcgacctcgaatcccgcaggaggccactctatcgactgtgacgcacgtcaggagggattcgaccatcacctcaggaagacttccgcctcgtcggagctcggctttgaccttgacatctgcaacaaagggcatcccaacatcatccaaattaggagcgctgatgcatcccgtaaacagactttttcccatactgaagccctgttacaaccactacggtatgggtaacccctcggggggctcggacatgaagccgaacccacagcctcagctctga

SEQ ID NO: 40802 - DNA, 789 bp, Zea mays
  Peptide Sequence Number=SeqID_84177
atggtcgagtccaccacaggccccgacacgcccgcatggggtggggatgtcggcctgcacccccacaggctccacgacagccccccgaggcagggaggcggcccactcttccatgaccccacctcttccgtgactatggggacgggagccggctcggctgacgcccgcggctgggacagggacgctatcagcccctgcggggatatgtccgcgccactggaggggcccaccaagtgcggtgcggaccaaagtccggcctcggggttgaagcccaggccgccaaccgacacgcttccctaccggtcacatcctccagaaccggaggtcgggcggttcgaaagcctcgcaacccctgcggaagggatgaaaggagtaagacaggaagatcagaaacagggggataaaccaaagactctccagggacacatagccctaattagggcgcatcgggacaacaacggtgtagtccgccttccccatcatccccttcatccgctggaggaactcgtcggtggggagggcagccgaggccatccgggagctctccacagaagccttaggcgtcatctcaacgaggtggagtcggcgcttggtcagcggcagcaccctcctccggtggaatgcggcgacaaccccgaccgtgacggctgtgaagatggccgcctgagcgatggagttcgagttgaagttgtggaactccaccccatagtaatgcggaagtgcccacatgaagtggctcgccgacacccgaacccacgctcgatgaacgatgtgaagctcaccacatag

SEQ ID NO: 40803 - DNA, 273 bp, Zea mays
  Peptide Sequence Number=SeqID_84178
atgggttcgtcaggtgaaggtgaaggtgatgataaggatcctccacaccctcctaagcatgataaggggaaggcagtctacctcgagcaacatggtggcaagaagaagccttgtttggatagagccactcgagcacttaagaaagcatatggtctagctcttgaggctcatatcacttacctgcctggtttgtctgcactgcttagtctgggtggaggagatgttggcaacatggaggactttgaggagttccaggactacgacgagttctag

SEQ ID NO: 40804 - DNA, 120 bp, Zea mays
  Peptide Sequence Number=SeqID_84179
atgaataactgggtgtcagcgtttcggacccgcgaggaccgtcaaccgaccagtgaatttgtcgctgcgtgtccctgcccagatgagttgatgcaagatggaacacaagcgggaggatga

SEQ ID NO: 40805 - DNA, 372 bp, Zea mays
  Peptide Sequence Number=SeqID_84180
atggcggcagtcggtatatactatggagttggtggtggtggtgtgtcgcttcggcgggtccagggctgggaagacactcacgtcaccttcgaacccaggacagcgattaagtcgcaggtcctgacagacttcatcgttgactggacagggccaacatggcagcaagaagagtctccagagaaacacgtggaccgcgccaagaaagaagaggtcgacgcgttggctaaagcagcagccaaaggcgaggccttgccctccgacgtgttctaccacgtcatcggctcaccagctgtccgcaacccagaaggcttacaaataaccaatgacgtcgaaggccatcgcattgtcaacctcatcatggctgaagattag

SEQ ID NO: 40806 - DNA, 657 bp, Zea mays
  Peptide Sequence Number=SeqID_84181
atggcggagcgtaggggcctgaggagacagaaaccgagaccggtcgtcgttccccgatccggcactaagcgccgtgcccacaaaccgtcctttaccactactaaggcggtaaagcgtggtgctagaacatcggccggggcctcgtctcggccccacgtcgcccaggagaccacccaggagggcgccaaggtggcccagcacacccgcagggcgtcgaccgagcccgatattaccgcagccgaggcggttgccgtgggctcgatgccattgatggaggccatccccatctcttatggggatgagacgggggcaggagatgacgcgccaaccgtggcgtcacccacggtctttgaccttctacgtgccatccccgacacccccgatgccacgcggagctctggggcagggttatcgaggagcaacccctactttgtcctcgatgatacggaggagagggagatgtgggcggagttccgtatgatgactcgggccatgctacgtcgtgttaacgagcagttggcactaaagagtgccgaggtggcagacctgacgtcgctatgcaccgagctgaaagacgtggccatggccgagcgcgggaaggtgtctctgctggaggaggaggtgcggctactaagggcaagggtggccctactgtag

SEQ ID NO: 40807 - DNA, 390 bp, Zea mays
  Peptide Sequence Number=SeqID_84182
atggatcctaggtggtgtctgggcctcgcctggctcccctgcttcctagacgcgtgtgggtgtctggtcatcttcccggggcatgccgagttgatttccttcgttgaggatcccatggtcaatgtggaagcactccagccctctgagctgtcggagagtaactcgtcgcatgcatacaggaattacagtatggactctggatctcgcagttcggagaagtctaggccaaagcttggaccgtcttcctcctcagagtccagacatcccgaggggaaaggaagaccgacgtacaatccggtgacggagctggcgtcaaagcttggccagaaggggatggggttgaacacggatggttctcccccgcccttgatacgtcctgccaagaagtga

SEQ ID NO: 40808 - DNA, 177 bp, Zea mays
  Peptide Sequence Number=SeqID_84183
atgtggctctcaaagctgcttgtaactaagggggcaaaacagctgagcaaaaatgtggcaaagaatatgatgtcacacccggttttggaaggtccttacggagaggtactcaggaaacagcctgagtcccctaaagtatcacaagaacctcattgggataacatcatcgtatcataa

SEQ ID NO: 40809 - DNA, 1200 bp, Zea mays
  Peptide Sequence Number=SeqID_84184
atggcatcctcctcggggggcggcggaggccgtaggatgacccccggaggagactcctctgcctccgccggcggcaggaggatctaccgcacccagaccgccggcaacctcggcgactccatattcgacagcgaggtcgtcccgtcgtcgcttgtcgacatcgcccccatcctgcgtgtggccaacgaggtggaggccagcaacccgcgagtagcctacctctgccgcttctacgccttcgagaaggcgcatcgcctcgaccccacctccagcggccgtggtgtccgccagttcaaaactgcgctgttgcagaggctcgagagggagaacgatcccacgctcaagggcagggtcaagcagagtgacgccagagaaatgcagagcttctaccagctctactacaagaagtacattcaggcgcttcaaaaagttgctgataaagccgacagggctcagctcaccaaagcctatcaaactgcagccgtgctcttcgaggtcctcagagccgtcaatgtctcccagaaaatcgaagtcgataagtcgattctggagacgcacaaccaggtcgaggaaaagaagaagctataccttccttacaatatcctcccgcttgatcctgacagtgccaaccagcctatcatgctctatcctgagatccaagctgctttccatgctcttcgtaacactagaggtctgccatggcccaaggaacacgaaaagaagcgtgatgcacccaaggaacacgaaaagaagcgtgatgcagatcttcttgcctggcttcaggccatgtttggattccagaaagataacgtatccaaccaaagggagcatctcatactcttgcttgccaacgtgcacataagacagattcccaaatctgaccaacaaccaaagttggatgaccgagcactggatacagtaatgaagaagctatttaagaattacaagaggtggtgcaagtatcttggtcgcaaaagcagcttatggttgccgactatccaacaggaggtgcaacaacgcaaacttctctatatgggtctttatctgctcatatggggcgaggcagctaacctgagattcatgccagaatgtctttgctacatctatcatcattttctgagaatgcttatgttaggtgcaattttgcttcggtacaaggacaaccatgcggaagagttgaataaaatagtctccctctaa

SEQ ID NO: 40810 - DNA, 444 bp, Zea mays
  Peptide Sequence Number=SeqID_84185
atggagctcaaatcactaacacagagaatcaaatgcgtggactcggagtctggaagtcttagaatgtttcttaatagcttggtgtcctcctccatgtgcctaggggtctcttttatagccccaaggcagctaggagccgttagaggccaacttggaaggtgtcaaaggttcatctacaactatactaaatcgattgtccggaataccgtagattattccggacaggagaagctttttggaaaaacaggccaagcgcggaccgtccgggcccttgcggtggaccgtccgcgacacaaggatgaccctcggacagaaccaatgcaaaaatccgagtctgcactatggaccgtccggaggataagcgcggaccgtccggcctcaggcgcggaccgtccggtaggcaaggatccgaaaaacccgaaggtgacgggttcggaagaatga

SEQ ID NO: 40811 - DNA, 321 bp, Zea mays
  Peptide Sequence Number=SeqID_84186
atggcctttgaactctatggtatgttggctggaaatgtgagcccgacgactggtgaaaatgttaaaccagcttatggtggagaagaagaagccttcttgaaaagagttgtgactccaatctacaaagttatagagaaggaagtagagaggagcaagaccatgaaatcaaagcactcacactggagaaactacgatgatcttaatgagtacttttggtcaagagattgcttccgattgggatggcctatgcgatctgatgcagattttttcaagactccaaatgttcctcttcaccatgtggatggagtatgtaccttgtga

SEQ ID NO: 40812 - DNA, 477 bp, Zea mays
  Peptide Sequence Number=SeqID_84187
atgcactctaacacccccgcagtcgacactctagtgacgacagatgtcgagactggagcaaacctccgagaacaccggcatagggggacccttggtgaagatgtcagtgaactaagaagtcatcaagacacaaaggacatgaacaacaccaatggcaacatgctcgcggacgaagtggaggtcgatctcaacatgctttgtccgccggtgctgaacggggttggagagaacagcatagaagatatctggcctaatgaaggtgaggtactagagagcgccagcaaggctccagtacacagcgggatcactgacaggggcaccagcggaggagaccttagcctagatggtccgttgcaagatggcaatactggaggccgtaagaacaatgtcgtcgacatacagaaggggccagacagtgtcaccaccacgacgatagataaagagcgatctgtccgacttagcctcggcaaagcctag

SEQ ID NO: 40813 - DNA, 1431 bp, Zea mays
  Peptide Sequence Number=SeqID_84188
atggacatctgcgtggatgactaccgcgtgggtggtgtcatgatgttcgatgcccgcacggggcggggacttgtcgggtcggatgctgggaaactggctgctgtcccggctccggtggcggccgaggcgaagggtgcttcgcaggacccatggtccaagttttgtgccagcggcgagattactttggccgccgccgctaaagacgtggcgggttctgttgcgcagcagctgaagcatgcaacgcagcagctgaagcatgcgactgccttcgccgatcatgttgcgtcgggcgctctaacctcggagttcgctgctgagaggcaacgactcgagggcaggattgagcgcctctggacgcagcatatagaagctgtgcgggacaagtcagctgcggaaaacaagagtcgcaggctgatggagaagttggcggttgcggaggccgaaaaggaggacctcagccgtcagctggcggtggagaataaggatgcaaacagggcctgcactgaggcacaggctgcacgtgccgaggccaaacatgcgcgtgctgaggccaatctcgctcgccaacgcgctgaggaggcggaaacgagccacagcagcctgcgcgactgcctggacaaagcggaggcctctacccgcgtagaggtcgaccaggcgcatgcacagcttgcggacgcgtaccggcagcttggtgcgtggaccgctccctttgacgcatccggtaaggaggtgggcctccgcttccatggatggctacaggaggagttggaggtgctcccaacgattgtgacgggcctcatgtccttcgcctcgctcatcacctgcgaaggggctgtgaatgccttgtcccgcgagggatgcaggcacttcgaagtctttgaccgatcgaacgaagactttgaacgtggaatcttccaggttgaggacctggtgctgaagcgatcggccgaagcactttatgataggatgtgggaccctcacgaccgcgatactgtccgggagaggtccgaccgggcgatggagcagatggcgcataatgaggaggtcgaagacttcggggacctggagagcatgctgcccgaggcatcgggtgtgaaggaagggactgagggggagctagcgccgccgtccgatgttggcgaaggccccgttccgacgtatgggcctgcgcaagcaaccgctactgacgatactaattttatggcggacgcaaccgcagtgcctaccaatgacaatttatctggttctgaatctgggtctttttcgtctgatggtgagtttgggagtccgttttcctggaccgaagagtcttcagatgaagacttggattattttgttgcgttagatgtggctacggcggagtcctcgccgcgggtggaggttggcgaggtgtctgatcttcctagtgcgaggaccaagtgccggcgatga

SEQ ID NO: 40814 - DNA, 801 bp, Zea mays
  Peptide Sequence Number=SeqID_84189
atgcctaccttgggcgagcagttggtgcgaagtcctaccttcgctttggatttgcgcggctggaacccagccgcgtttgtgcgtgaagtagaggatggtgcagtgagaattgtggggcgatatgtgccgaggacggaggctttgcggagttgggatattcgcggttccaatgttcgtttgaaccttgttttcgagttgaaccgtctgccatatggcggttacccgagagacgacgctgctactactgtcgatcaccggggaaaaaaggcagcgactgcggttgaggaaggcccttcacggggagctgtgccggccactaaaaagagaaaactaggtactgcagctgaggggttgggggtctccgatcgttttgttgtggatttaatgggaacttgtgcgaccctcgggggaaagatgtcgtcgcccgagctccgggaatcttcggcgcgaatgctggaagttaccgggggtcgctggccgaggaatgttccgatccccctggcggccggcgaggacatgtttatgtctcgcttagcccgtgagatgaagttttttccttatggacggaatattgctgctgttgtatcgacaatgatggataaggatcgccaagatgcgacgcggaagcgtcgggcattcactagggttggggaccctagtcgtgaggtcaagaaggggtggggaatcgcgaagtccatcgcccccagcagtagcaagccactgccggctgcgaagcctgctgcccccggctccagcaaaccttcatcgggtgcgagggccgtcgctcctgccttctactga

SEQ ID NO: 40815 - DNA, 729 bp, Zea mays
  Peptide Sequence Number=SeqID_84190
atgaagaatgccttgaacacaactaattcgccctcacgctcaagaatctcctcagcgcccgggacgcgcccaacgccgtcaccaaagtaccccagctgctacatcttctgcacgcgaaccgaggaaatcctcgaggtgccgaactccaccatgtggcctggctgcacctccatcgccaccaaatctctcaaggtatcctcggacgacgaatcggccgatgacgcactcacagcagatgaggaagaagacattgctacgtaccgtcggcggcgacgcgcggtctgcttgacgcgagccagatctccgaatcagaagaacaaggagggcaggcgagcgggcgagcggtttgaaaaagttagggttttctggcgcacgcaaggacttgtgcagatattcaaatatgcaccacgtgaacaactaatcattcctgattttgtgttccagtatggtcttgaaatgaatggtggaaaaggcataatcacagacccaagtcgaagggaggcaatagggatcggcatgttcaaggctgagagctttgcatctaggcgcagtcatcgtgttcgacgttttgtgtgtaaggcaatcttatggtattattatgctgatactgtgcacaatttctattttagcatgggtagattactattcattagacttttcatttacctcatgtttatgggtgatttggataaacatgagtatatccttcatgtttacatattgtcttag

SEQ ID NO: 40816 - DNA, 1650 bp, Zea mays
  Peptide Sequence Number=SeqID_84191
atggaaaaggttgtggaagacttgggctcccccaaaatgcaagtttttcctttggttagcaataaggaacaagtgttggaccgctggcaggctccaaaggagaggattgcagtacccgcaaataacaacattggtgttgtcattgcgctttgggctcctattattcttgtctatttcatggatactcaaatttggtatgcaattttctcaacgctaattggtggtgtctatggggcttgtcgccgtcttggtgagacatctgaggataccagagaacaagaaaaaatagccgcaagatttgctcagatttggaatttaattatcacaagcttccgtgaggaagatttgatagacgacagagagaaggacttgttacttgttccatactgcaaagatcgtgatatggatataatccaatggccaccattcctgcttgccagcaagattccaatagcattggatatggccgcagatagtggtggaaaagatcgtgatctaaagaagaggatgaaatcggatccatattttacttatgctatcaaggaatgctatgcttctttcaaaaacatcatatatgaactagtgatcgattcacgagagagaggttacatacaaaagatcttcgatgcggtggatgagcacatagcagaagagactttgataaaggagctgaacatgagtaaccttcctaccctaagcaagaagttcattgagctgcttgacttactggaaagtaacaacaaagaagatcatgatcagatcatcatattgttccaagacatgcttgaagtggttacaagggacataatggttgaccagctcagcgagagaactgcacaccattgtattaagaagataaaggaagaataccaaaatacagaataccttaaaggcagaaataagcaaaagaaaaaaaacagaaaaagaagaaaaggtatagtcgttcaaaatttcttggtgtctcctataacaaaaaaacttggccgggagggaaacaccgccctcccgataaaaaggcttcgacttttactcacggtgaaggaatcggctatggatgtccctacaaacctggatgctaggaggaggatatctttctttgctaattctctttttatgtcgatgccagatgctccaaaagtgcggcaaatgttgcccttctctgtcttgactccttattataaagaagatgttcttttctcttcacaagcactagcagaacagaatgaggacggagtttccatccttttttatttgcaaaaaatctacccagatgaatggaaaaattttcttgaaagggtgcattgtgagagtgaagatcaactccacgagactgagcattctgaagagcagcttcgcctttgggcatcataccggggacaaactttgacaagaactgtaagagggatgatgtactacagacaagctttagtccttcaggcttcccttgatatggccagagatgatgaccttatggagggttttagagcagctgacctgttatctgaatctgatgaatcaccactattgactcaatgcaaagctatagctgatatgaaattcacatatgttgtatcatgccagcaatacggtattcagaaacgttctggtgatccacatgcacaggatattctgagattgatgaccacgtaa

SEQ ID NO: 40817 - DNA, 432 bp, Zea mays
  Peptide Sequence Number=SeqID_84192
atggccgagacgtcgatgccatgtggtggaggaggtggtggagaccaaggcaggaggtggagacacgccggcggtggagggctggagcgtgtagagaggccccgagctgtcacagcgggcgagaagggtcctggtggccagatccttcacagaaaaaccagaggggtcaaactcaatggaacaggagttgtcagtagtgaatcgacgaacagaaagaagattgtgggtgatgtggggagctacgagaacatcgttgaggcaccggagtcgatcacccagtcggaggggggtggggtcatcgccatggtgctgaaagcagcagcgagggaggtgctgtcccaaccaccagccggcggggaccaaggcgtcgaggtgtgggtccccgggggcaggagcgcgggcggagcctggggcacgacgggaacaccataa

SEQ ID NO: 40818 - DNA, 876 bp, Zea mays
  Peptide Sequence Number=SeqID_84193
atggtagacgagggcggggtggcgaatcgagccggagtcgacggggccgcgcgtggcgcaggcgaggtcgacggggccgcgcgtggcgcaggcgggatcgccggggccgtgcgtggtgcaggccggaccgacggggccgcgcgtggcgcaggcggggttgacggggccgcgcgtggcgcagacggggtcgacggggccgcgcgtggcgcaggcggggtcgacggggccacgcgtggcgcagtcggggtcgacggggccgcgcgtggcgcggaagaggtcgtgggggccgcacgaggagcaggcacagccgaacacgcgaaggtggtcataggaaggggctgtgccgtaaagggcgaagtggggggtagggtggcgtaccgccttcgagggaagacggttgaggaggtgggtggcagtatgcagggcctctgcccagtagctggcagggagagacgcctggaagaggagacagcggagcatgttagtggtggtgcggatcatgcgttcggctcggccgttctgggcagaagtgtaggggcacgagagacgcaactggacgccatgagtgaggaagaaggagcgagaggcgttgttatcgaactcgcggccattgtcacactgcagagcacggaccgggcgacgaaactgagtggatacccaggtgaagaagtgtgtgagggtggtgaatgtgtccgacttcaagcgaagcgggaaggtccagagaaaatgggaaaaatcatccaaaatcaccaggtaatatttataaccagaaagactgagtacaggggaggtccaaaggtcacaatgaaccagatcaaaagcctgctcagcccgagaagaagaagtagtaaatgggagacgagtatgtcggcctaa

SEQ ID NO: 40819 - DNA, 306 bp, Zea mays
  Peptide Sequence Number=SeqID_84194
atggatctggaacacaatatccatactcctttatctccttatgctgctcagaaatatcaaacttttcatgagcttgtcaataaccttcagaattctagagctgataaagacaaatggacccatccgtggggcaactctactttcagctcatccaagttctatagccttacttttcaatcaattcagccccctgctgcctttaactggatttggcagtctaaggctgcgcaggagaactgcgcgtcatttcatttaaggaagaaatacagactgctgaagttatgtgggtttccattggaatcatga

SEQ ID NO: 40820 - DNA, 564 bp, Zea mays
  Peptide Sequence Number=SeqID_84195
atggcagagggatccctggtgggagagaagaacccacgaattgaatcccttgttgatgtcatttttggggcttcgtcactagaggaggaggaaggtgaaagaaaaggtaccgaatgtggtaaatcttcgggatctgaaatgggttttgaagagccaagtgtttctctagaagcgtacatggttggacctactcgctcatatggcgaggagatggatgaagaagagaatgcttcgaagctaatagagcaagataaagctatgggctacaactctggagctatgttatttggcaggaggaaagatgtcttggcatatgtccccgatgccagagaagctaaaattgttaagaatgttgctcgaagcattgtgttcccagaaattgagacgacgttgagcaagttaaaaaagagaaagctttctcaaatcttggcttatacaagtattaagctaagaaggagaataaaagttaaggagcaagatggaactatcgttgagcttcgtgcaaatcttaaagggaaaaagaagaaattaatgcaaagggcgaagaaaatgcaaagctactag

SEQ ID NO: 40821 - DNA, 459 bp, Zea mays
  Peptide Sequence Number=SeqID_84196
atggctagaattcgcacaactgctagattagccacttccacctcgttagaggcccatcagagagaggaaaacactttggacaccacattgatttctgaagtcatgaaggctttcgtgacaatgaagtccaagagtagctcgaatgctacggaggaagaaaacgaagatcaaccaacgaagccgagctatattgagaagggtcgatccattctaaaggacaaatattttaaggcaatgaaggaacttgggtattttagtgacaaggtcaagacgaaagagtggttttatgctgaggtggattccgagaaacgagaggacttcaaggatatggtgatgagtccgctgaaggttagcttcagaccgaagagaccaaaacgcaaaatgggcggagctgctaaagatgcttacaaagctttcaatgttgttgctaagaagatcgggtctcatgatctaatctaa

SEQ ID NO: 40822 - DNA, 357 bp, Zea mays
  Peptide Sequence Number=SeqID_84197
atgaagctgtggaaggagacttccaggagttccaagattacgacgagttctaggagtgggttagcggcaacccccagtcggctgcctgtgaaggccgcgttatctacgtttcttttccgcactttgatttattgtcctcaagacgaagatactgtctgtaggcaacaagaacgaatgtcgaagctacaacgaacatgtgtgggaaagccgaagggggttcaagatctaaaccagccaataagaagtagaacaaggaagcacagagaagggtacaacatgtcagagtgcaaggacccttcatcaagtccaaatggtctcatgtaccgatcacattttctcaagaagacctttagctaa

SEQ ID NO: 40823 - DNA, 435 bp, Zea mays
  Peptide Sequence Number=SeqID_84198
atggggaccaaccctggaagagttactgtctattttgtggtgaagacaagggccatactacaagaatgtgccaaatcaccatccaaaagcagaaggagatcgcaaaagccgaagcccggcaaagtcaaccgaagcaggtcctacacactgcttcgtgtcactcaccctacataccagagtatgtgggtaatcatcctgcagcttctgttgcttcggctagtcagccacaggcttcctggccacagcttccacctccgccgccactacaacttgcctattcacgagcttcgttcttgtcataatgaaatatatctttcctatagacttacgaagctcaaaaactgcgaaagctcaaaagtcgttcctaaggagcgcagctgggtcgaagggctctggggaggagatagttcagctgcggtagaagacacaaattag

SEQ ID NO: 40824 - DNA, 492 bp, Zea mays
  Peptide Sequence Number=SeqID_84199
atgtgggccttcatgttggacgaggccgcaggaaccgacgacctcgtcacaggtcttcatccggcgacgcgtgggacgaagggtaaatctaccagtcgtcttgcctctgttggtgcagcgaggttggcgaaggcatcgagcgaagggtggcgtcttcgccttcgccccaacagcagcgcagaactgtatggattggacactaacatgcttccaaagtggcttcagaacacaaaattgcaggcgtggaagaagggagacggggaggctcaccgcggggaacgagggcggcgtggacggacggcgggcgcggcgtggacggacggacgacaggctcccttcttcgcgacggcggtcacagccgtgcggcggcgcggcgagggcgggcgggcgcatgcggcggtgcggcgcggcgagggcgggcaggcggcggcactagggattgagacgagcgagagcgagaaagtgcgggctgaggccgagatggacgattaa

SEQ ID NO: 40825 - DNA, 837 bp, Zea mays
  Peptide Sequence Number=SeqID_84200
atggttctgccgcgcctccgcatccgccccacatccgcccgcagtcgcatcacgccggcaaccccgccgcccgcccgcgctccatccctcgatccatccatccaccggcagccccgcatcctcgcctcgctcgcctcctccgccggtccgaccatcctcgcctcctccttctgcctttccctcactcctcccatcgcggaacatcgtggggaaccacgcctgcccagctcgcccctgcctccccctcccccgcatgcctccagcgccgccgccaccgtcccactcgctcctgcgagatccagatctggcgtggcggcatggctcagagtggcaacgcgccgcaaccgccgtcgcgcccacacgtgccctatccaaccaccatggagctcttcgccgtcaagcccatggcaggagcttgaccgccgcgacatcacgggccagcggccactggacgggctcctgctcggcgccagcgtcagaccgcccgctgctgaacaagcagaagaggccgtggcggtggtagggcttctcgtggatcaggcgtgcgaggacggcgacgagtggtccccctggcggaggcgcacgatggagagcgtgccagcgccgaggtcgacgctgcggtcggggtcgatgagagctgctaccttctcgaccaagaagtcaagaacatacgcggcgcctttccaaagcatctggtggactgccggcttcaccgttctcgcagaagtggtctaccgcctttggcagcatcatctcttccggtcgtcccaaggtgaagacatggcaataaagaaccagatgttccctgaagaagagagaacaccaaatgccagatga

SEQ ID NO: 40826 - DNA, 1170 bp, Zea mays
  Peptide Sequence Number=SeqID_84201
atgaaggactttgccattgagttgtcatctcccccagatgaagccactacgacttggcatctcatgatgaagtgtgacgggaacagtgggcgccaaatgttgggcactaacacacgtgggcgtgctgttaggtggacccaagcacttggaaagcaggtgagatctcaggtcctcggtgtctcacgccgcgcgtacacccttgaccgcggacgctgccatgtgggacccttgtgtcggatgtatcttctccgcatcgtgcggccagaaaaaggaatcgcgcgcaaacaactcgcctcgaccacctccgcacccaccagccgggtttaccgggtccgcgtggcgcaccgctcggggatcctggtgatgtgggcgggagagaagcctccgccgcgtccacagtttccgcccaagctcgccgtccatggaactcgggttccgattccacatttcgtcgcaagccgttggggtcaacgcgggtttgtaggattccgttctggtgttccgcagagcgctcggactctgctacggagtataaagccggggtacctcgtgcgcccctattccattggcaccctggcttgtgctcggggtcttcacgggcaaaaggatgccgcggtgcacagcgaattgctcatcggagctgtgattccgcgcctcaccgtggaccgagtcctcctcgccatcattcctgtcactgacgtgcgggcctgggtcctcggtgtctcacgccacgcgtacacccttgaccgcggacgctgccgtgtgggacccttgtgtcggatgtatcttctccgcatcgtgcggccagaaaaaggaatcgcgcgcaaacaactcgcctcgaccacctccgcacccaccagccgggtttaccgggtccgcgtggcgcaccgctcggggatcctggtgatgtgggcgggagagaagcctccgccgcgtccacagtttccgcccaagctcgccgtccatggaactcgggttccgattccacattccgtcgcaagccgttggggtcaacgcgggtttgtaggattccattctggtgttctgcagagcgctcggactccgctacggagtataaagccggggtacctcgtgcgcccctcttccattggcaccctggtgtttgaccgcgctgcacgagctaaacgccgccaccgtcgcaagccgtag

SEQ ID NO: 40827 - DNA, 525 bp, Zea mays
  Peptide Sequence Number=SeqID_84202
atgggagaggtgggattttattacggaaagagcgaagtggtgaaggcggcggttgttgtggcgcttagggacgcggagacttctgcctgtcggccgtcggcaggctggtaccgtttctcaaaccgaaccacacctgggggcacagatgtgggtgcggtcgtgcggagatggtggtggcagcggatccgacaagctgataagacaagaagacgttggaaggaaggaaggaagcgggcgaacaaaattgtggaccctggttccatggtgatgaaaatacaaaagtcaaattttggtcaacaaaatgaaatttggatcattccaaacaaaattgtggaccctggttccatgatggcaaggacacagaagaacaaagccactgctcaccatcttggtcttctgaaggcactaaagatgcaaatggaggttcagaagcgactacatgagcaactagaggacattgagagttatgacgaggaccttgattttgaggttgatgatggagctgaggatgaacctaaagcatga

SEQ ID NO: 40828 - DNA, 2124 bp, Zea mays
  Peptide Sequence Number=SeqID_84203
atggaaaaggaagggcaccagaacaatagcagcagcaatgaacaagatcatgacggcttcaccatggacgaaataccggatctttcctggagcagccatacggaatatgacgtggatgctctcctaggagcagtggaccaagtgaacactactcagacagatgatgatgaggaccagagtagtcatgtgagtgagcagacaccttcgaaccgtacgaaacgtttcactatggatcagattcaacaactcgaagctcagttcagagtgtgtcgccacccaaatcttgacgcgcgtcaggaacttgccgctaaaactggtttagaggaaaggcaggtgaaggcttgtggtgacgagaacaagggcattcggcaagaacttggcaagctgaaagctgagaatgaggagctgaagcaacgcatgctgaatccaatatgcttcaggtgtcgcaaccctacactggcaacccagccaacgtcagagaaacggcgccttctgaacgaaaacgcgaggctcagggacgagtacgtgcgcgccaaggcttacctggacaggctcatccgcgagggagcggagcgccgtgcctcaccctctgctcatctgcatctgggaggatctgctacactcgtctcgcacgctgaacgtgccatggaagagttggtgatgttagcaacaaaaggtgagccgatgtggctgccggccatggacggcgagacgctcaatcaccaggagtacgtcctgcagacgttcccagggctacttgggctctgtcctccggggtttgtggaggaggcaacaagggagtctgatacgatcagaggcactgccatgtacctcgtcagcgtcctcacggatgcgaaccagtggtgtgagatgtttcctggcaccgtggcgtatatggatgcagagctgtgggtgcaatcgccgcgcctgctcaaccgcagcgtcaagttcctgaggtttagcaagaagttgtccaacaggcggtgggcgatggcagacgtgtcagtagttgatggcgtctgtggagttgagcccggtggcagcagcaccggctgcaggttgctgccctccggctgcctccttgaggacatgagcggtggctattgcaaggtcacatgggtcgtccacgccgagtacgacgagactagtgtgccatccctcttcagaccttttctacaatctgggcaggcccttggtgcctaccgttggctcagatgtctccagaggcagtgcgagtacatcactgtcctgcgatccagccttgttcttccaagcagtagcagcagcttctcagccatatcgacgctgggcgtggggagaaggagcgtcatggagctggcgcgccgaatgacagcgagcttctacgccgccgtctccgggccggtgactgtgccggcaaccagcagcgttgacgagtggcgcgttagcagtggcagcggcgccgagagggtggaggcagtggtgcgcctggcggtatggaactgcgccgacatcatgccaggggaaccagccgtcacggttctgagcgccaccaccaccgtgtggctgccaggcacgccgccaatgcgtgtccgcgagtacctcttcgatttgcagcgccgtggtgagtgggatgcccatgccgatggcggtgaagtgcaggaactgggctccgtcgccacgtcttcgcgcctccatggcaacgccgtctccgtcctccaatccactagttctgtggacactgatgggacggacagcaaagtgctgatcctgcaagagacgaccaccgacgtgtcatgctctctagtggtgtacagcctcgttgaggagaacttgatgcgtggcatcatggacggccgcgagaggagcaacgttttcgtcctgccgtctgggtttgccatcctgccagacggccatgggagggctcacgctggcgacactgctgcaacaaacagctccgctagtgctgccatcgacgacgaccacagcagcaatgctgcagggtcacttgtcaccgttgccttccaaacaccgttgcctggcaaccctgacaccggggcctttgaagacgcatgtctccagctctgccatgccatagcgaagatcaaggctgccgtgggtgctagtgacataatccctgtctga

SEQ ID NO: 40829 - DNA, 195 bp, Zea mays
  Peptide Sequence Number=SeqID_84204
atggctaggccaaccatggttgtttgtctcttttccttcatttacattattacactcgatgtgttgaattgtttattttgcctcttactgcatgatgccccttttagggtcaagatgtgggtgattctctcgcagtccgatcacgacctggatgatgcattagatgggtttggcaagaaggacgtcaagacatag

SEQ ID NO: 40830 - DNA, 450 bp, Zea mays
  Peptide Sequence Number=SeqID_84205
atgcgcccaggccccagcccacggcgaagcaccgattcacggtggggccattgccgggaaagcgcaatccaaggcagcggcgcactaatagctaaatcctggggttttacgagcaattgggttgtccgtgaatctaaggaagaggaagcttgcgcatgcactccggtgagggattaccgggctgccagcacgccgcgcaccccaattgtgagggtaacaccccgccggaccctcctctattggctcggatcatttcacgaggctaggtggacgacgcgcatcaagattgtctacggcggcgacaacaccagaacacaccgcagttcgctcggtagggcagaggacgcaaggcgagcggacgtgcggcgcagctccacagaagtcgccatggttgttgcggtagtggacgagaacgacgctgacatcgtggtcccacgcggaagtggctag

SEQ ID NO: 40831 - DNA, 207 bp, Zea mays
  Peptide Sequence Number=SeqID_84206
atggccgacgcctacggcggacaggccataccggccggtggggctttatcgtcctccgcagcgtgcttgaacgccgagcacaggttttggtttcaaattaaattggggcatatggagattaggaatggacctccggactcaatggcctcttcggtacaatacccctctatcatggatgcctcgggacgagcacgggttgatacatag

SEQ ID NO: 40832 - DNA, 426 bp, Zea mays
  Peptide Sequence Number=SeqID_84207
atgcagcggagggcgtcgccgctgctgctcgtgcggggacgtagaccagcggaggagcacatgaggaggagctcggcgagcacagtacaggcgctgcttgagctcggaccagagaaggtccctgcgtgccaggtgctgggaggaggggagctcgttgcggccaccaagaagagacccggcagggaggcaagctacaagaaaaagggaaacaccatggtcattcaaggcaccatgggggctcccgcgccgaacagggaactaggtggaggggcgctcggtagagaggagcagggggcgtcgaccacgacttgggagaggcagccagctgcagtttgtgatcgagatggacgagaaagctcaaattttggcagaaagatcggatcaacgtcgtcttacaaaatttcttgcgccctgtttgcaaaataa

SEQ ID NO: 40833 - DNA, 297 bp, Zea mays
  Peptide Sequence Number=SeqID_84208
atggcgaagcctggccacgctactcctcctggtcctctcctgcggaagcagcaacccactcgaccgtctatctcggtggcagggatgaaggccaagtcacaccagcaaccaaatcatccaaggagtacctgcaaaaattatgccacaagcaaggctgattatactaatactcagctagacttacccgggctcactgccttggcgtacaatgctccactgaccccggctgccgccgtgcagtggccacacttgtacccaccatatccggaatgggagaccacatctcaggacaagtga

SEQ ID NO: 40834 - DNA, 639 bp, Zea mays
  Peptide Sequence Number=SeqID_84209
atgagcattgtggatcgacgttgggcgaaccaaatggataccccattatatggagtagcactatatttgaaccctggaaaattctacaatatcaaagcaggtgttgatgaaggctatgttggagagctaaggggttgctttaatgacgtgcttgtcaaaatggtggtagatgaggatcttagagagaagattgatgcccaagatgttctttatgagaacaaaagagaggcatttgcaaatccaatggctataaaaaatgcacaaacaaggaatccacaagactttgattgggacaatgaatgggttgatccattagctaattcttctcatgttagcaatgctcttggagatgatttcaatttatcgtgggaccaagttgatgaagctattggtgcatctgcacatctcagaggtcgtaattttcctaggagagctgctggtgggtgtgtgagaaggaatgaagaccttgaggaagaggagactaatttagcaaatgaagatgacgaggatgaggaatatattcttgatgatcttgatgtggaagatgaaattgaaggaagcaatagtggaaacgatggtgatgatcaaggcgtggatgctcatggtcttaattttgatgagttcgatgatggttactaa

SEQ ID NO: 40835 - DNA, 474 bp, Zea mays
  Peptide Sequence Number=SeqID_84210
atggacaaggttgtccgtgcggggcggatcctgatgagaaggcctagtgttgtggtgcctgaagacattgttgccgatgttcttgctgtgcccgatgtcggtgtcgcactggtggtgcacatggtggttccgggcgagattcttggtagacgacgccgcaattcctcgccgtggtccgccgtcgccgcggacccaccctcctccatgggcaacggattccactacgtgattgatttggaagagggccgcctggccgttggatttccgatgagcggaggtcgtgatggtcacgccgatgtgcggatcgtctccgaggatggtcgaggcgcgaggaattggactatggcttaccggtttgtcgtggccacgtgcaccggtagagagaacaactctaacgagggtggaacggcttctccggtgaagcagcgtctggtttcttgctccgaggagctctacggggctctggggaactag

SEQ ID NO: 40836 - DNA, 225 bp, Zea mays
  Peptide Sequence Number=SeqID_84211
atgctcgtccctgcgcagctgcgctatgcgcggcctagccgcggtgcagcgccgcagcccagcacgctcgccatgccttgccgctgctcctggccgctggctgcgatgcgctgctgcccgtctatcgctgcctgcctgcgcggcggcgtggccagccagcccgcggcggcgcagcttgtggccctgttcggtcagcaagtcgccatcgtgctcggctgttcctag

SEQ ID NO: 40837 - DNA, 345 bp, Zea mays
  Peptide Sequence Number=SeqID_84212
atggcgaggccgagctgggagggggaagccgcggaggagggtgccatggatggccaaggggagaaaccgagctgggggccggtcataggtggaagaagggggcgctgcgagagggagagcagaggcgccacgccatggacgccggcgagctcgctgctcgagctcgaaccagaggagatgccgcgccctggctggagcagaggtggcgttggggaagaaggccccctgtcccagccgctcgccaggaggaacagggagggtgccacgccatggctggccttgctccctgcactctgcctgctgcgcgtgggggaagaaaccagggagagaagaaatggcggctag

SEQ ID NO: 40838 - DNA, 345 bp, Zea mays
  Peptide Sequence Number=SeqID_84213
atggcgaggccgagctgggagggggaagccgcggaggagggtgccatggatggccgaggggagaaaccgagctgggggccggtcataggtggaagaagagggcgctgcgagagggagagcagaggcgccacgccatggacgccggcgagctcgctgctcgagctcgaaccagaggagatgtcgcgccctggctggagcagaggtggcgttggggaagaaggccccctgtcccagccgctcgccaggaggaacagggagggtgccatgccatggctggccttgctccctgcgctctgcctgctgcgcgtgggggaagaaaccagggagagaagaaatggcagctag

SEQ ID NO: 40839 - DNA, 237 bp, Zea mays
  Peptide Sequence Number=SeqID_84214
atgtattttaggcaaagcttgcaaggcgttaaagaagaggaagcaaccaatggtgaagttggggatgttttatccccgaacaaggatggaaaagaggaggctttaaagggtaggttcaaagtatcttcggacttgaatcagaaagggagaagctcaaaagatacgaaggttgacacagtgccgaagctgtggagcaggaaagcttcggcatgttcgcagaaaggggaaccgacttaa

SEQ ID NO: 40840 - DNA, 492 bp, Zea mays
  Peptide Sequence Number=SeqID_84215
atgcccgccgggtgtttgctgttttgcgcagccccaatatcgtcgtcgttcaccccggtgctcgacctctccttcaacgccttcgacagcgccatccccggcgcgctcgccaacctcacctgcctcgtcacgctcgctgtagtgctctcgctggcaagatgccctcttaatgtagtgttgtaccttcttcttagtatttcgaacaatctggatgtttccaaaaaggtgtctggatctgatggggtttccgctaagagatctactagatcgaggtttagccaggatcatgctgccaaatcaaaagcaaagctcaagggcgctttctctttacttggactgaacaatgacaccttcaaaggacctcgtacctccaaaaggtttcagttgaaggacatgtcctggagatcaaaggattaccatgcccaaaatggtgaggatgcaatagaattggacgaaggcgatgaggatgcaatatatcaaaacaagacataa

SEQ ID NO: 40841 - DNA, 243 bp, Zea mays
  Peptide Sequence Number=SeqID_84216
atgggttcaacatcggaaaagatgtacctctgccaggtaccaaactttgggtttgaaatgattaagctgagaccgggatccacttttagtaagcatttttgcaaaacagagtctttgattattgagaagccttaccttgactcccttataaccagcatacccttgagagtcttttctttagtcgggtggtaccgaaggaagaacaccaggactgaagttgcgggaggaaaggatcctccataa

SEQ ID NO: 40842 - DNA, 273 bp, Zea mays
  Peptide Sequence Number=SeqID_84217
atgggtgccgtcaaacttatgggaaaaaatcgacggcccccgtcgaacttaaaaacgcacgttcttaatgttaagttcgacggtacccacgttcttaaccttaagttcgacggtacccacgttcttaagattaagttcgacggggccgtcgaacttacttctctaagttcatccaaaaatcgccgtcggctatattcgtcggtaaacccacgttcttacggatcgtgtttgcgattggagaacaagaggttaattgatgtgcgcgatttgtag

SEQ ID NO: 40843 - DNA, 591 bp, Zea mays
  Peptide Sequence Number=SeqID_84218
atggagctcttggagaagcaggagttggagggatggattgctagacccatcactcgtgacgccgctcatggttgtcacttccacgacgttgtcgacaccttgttgcgtcgggccttcgaccgacacacttggtccattgagtatcgttgtgtagtctaccagcatcatcacaggttatacccagaccagtgggaggctacttgcttggtgcgccatccggacgatgatctccggggtgcagaggacttttcagagcatcattctatcactgagagggacactaccgaggcagccatgcaagatgctgcatggcatgcactttcactttactgctcgttgtttagtagggtagctgacggcctcggcctgaagtactaccctcatcattcgaccggcagtgctggaggtgcgattgtctcgccctttggtgagggcaatcccaggctgagcagcatggtcaacctggtcgtcgtgctcaacaccgagctggaccacgcccttgacgagttgcacccttactgctcgctgtaccatggtcgctttgcttctggcacccctaactgcagaacccagatagatttagagccatag

SEQ ID NO: 40844 - DNA, 93 bp, Zea mays
  Peptide Sequence Number=SeqID_84219
atggctggagttgaagaagaagatgaagtgtggatcattgatcgcgtaaaactcaagccatttgatcgctatccaatggtggagatcgagtag

SEQ ID NO: 40845 - DNA, 720 bp, Zea mays
  Peptide Sequence Number=SeqID_84220
atgacttctcacggatcctccgatgacggaaatgcactgacccacactgacggacttgcacgagagggctttcctcgcattttgtgggaggtacttcagggggccggatacgcgacaccccctcagtacgcggtgcagcagttcgagaagcaccaagtgccccgctgtagggtgaggatgaccttggagcctcatcccctgcagccgggctggcgctctttggactccgagtcttttggataccgaggggaggatacgatcgaggcgatcgctctgcatggattgactactttctgcgggttccatcctttggagctggctacccaccccattggcttgttccccactgagagggaggacaaccccaatgtggaaggatcaggtggagcatgccaaggacatctgggccatctacccaggacagactgcgcacttgaccgtatggtgcatgaatgctctgtaccgtctgcagagttggaggagctagtgggcaccagggagaacaccatcgaggttctagaggatcagctcattaacactcagcagcagcttgctgaggctaacgagcacctggatatgcatcaccaggagatccaggacctggaggtcaacgaggacgtcgacatcgagggaggagatgagcctgcctccagtgtggacactgctggctcgggaagaccaccttcccccgagtcgagtgttgcttcgttcgctcactag

SEQ ID NO: 40846 - DNA, 405 bp, Zea mays
  Peptide Sequence Number=SeqID_84221
atggcccggagtcggtcggtccacgcgcgcaggcggggatgctcgtcggctgcgaggagaccggcctggtcacggcgagatagttcaatcaaaaggaatcggtcggagactcactgggtagctcggtccacgcgcggcggcggaagaccgaagtccggtgaggttgatctcgggcctccggtgaagtctggtcgggtccgagggcttggcgagcttcacgggctactggcggagctagccgaagcactggcctgcccagaggatggctggggtgggctggccacggtggccgaagctctggcggcaatggcgggcggaattaagctcgccggagctaaggggaagtggctggccggtgagggtgagtgcggggcgaagtggggcgcgcctgagaaggctttatag

SEQ ID NO: 40847 - DNA, 297 bp, Zea mays
  Peptide Sequence Number=SeqID_84222
atgggaggacaaccacaagggtattggggtcgtgctgcaaccctaggatgcgtccctaatggacccaacttgatacatgacccattgggccaaaatagggtgacgcagcaccatgggcagaaaaggcaggaaatgtctcgggggtttataaacatgggaggacgaccacaagggtattggggtcgtgctgcaaccctaggatgcgtctctaatggacccaactcgatacacgacccattgggccaaaatagggtgacacagcaccatgggcagaaaaggcaggaaatgtctcggtaa

SEQ ID NO: 40848 - DNA, 1489 bp, Zea mays
  Peptide Sequence Number=SeqID_84223
cttgattcgtgagttgttttatgccgccgacgagctgctccgccgtgaaccacccccctccggtgcccctgccccgacccagaccccaccagagcattccccgtgccctccccaactttcccggccactcaggtcgccccagaggcccgccaaacgcccgcgcccctcgtctccggcgagtcctccgccgcggggacgagcgccgccgccccagctagccgtaggagaagcccaggccggccacccgatccccaccgtccgtcccagatcgggcggccccgctttaattaggccaagcccaatcctggacgtccgcccgagatccagcggcccaggcccgcttcccccacaccccgtccccctgccgttgggccccgcctgtcagtccgcccgcgcgctcgcgctgcccgtcggccccgcctgtcagtccgcccgcgcgctcgcgctgcccgccggccccgcctgtcagcccgcccgcgcccgcgctgccgtttgggccctgcctgtcagcggcgtgctcgcgctgcccgcccggccccgcccgtcagcctctcaggccgccgcgcgctctcacctggagagactgcaccaccgcctgcgtgaggagcaggaacgccggcgccagcatagagagcagcagggctcttcctccccaccccagcgagaggtggagtccgtgaggccccgttcctctgttgcccagctggaggcgccccctgcgccaccgcgggacgccccggctgttggaggagctactggaggaggttctggaggagaccccgacgacgacgacttagaccacagcacggagtcttctgagccgcaggaggcggaaggatgggtcgcccgacccatcacccgtgacgccgctcgcggttgtcacttccacgacgcactcgacaccttgctgcgccaggctttcgaccggcacacctggtcgatcgagtatcgttgtgtagtctaccagcacagtcgcgggaggtacccggaccgctgggaggctacctgcctagttcgccgtccggaggatgacctccggggtgcggaggccgtttcggagcactattccatctccgagagggacactgcagaggcggcaatgcaagatgcagcacggcgtgcactctcccagtactgttctttgttcggtggggtgtccgacggtcttaaccttcggtactacccccgccgccctactggcagcaccgagagtgtggttgtctcacctgttggtgagggtaaccctaggttgagcagcacagtcaacctagtcgcagtgcttaacactgagctggatcactctctggacgagctaagcagggctcgaacggagattgcggagttgcgtgctgagttggcagagcgccatcaccaggagggtggttcccccgctcctgttgggactcagcacccataccgctcaccgccacgtggtcaccacacttatggttcccctgcctgtaagaccaggatagatctggatccttag

SEQ ID NO: 40849 - DNA, 81 bp, Zea mays
  Peptide Sequence Number=SeqID_84224
atgcggcttcatacccttagagatgatgtggttttataccctcagaggtgcttgttgctcatcaagggaagtgggaagtag

SEQ ID NO: 40850 - DNA, 276 bp, Zea mays
  Peptide Sequence Number=SeqID_84225
atgtactgtttgatgtccggtgcaccggtatgggcgtgcctgacgtctgcgcgcgcattaaatgcaccgcagggagccgttggcgccgcagggagccgttgctccgctggcacaccggacagtccggtgcacaccggacagtccggcgcaacaggaagctccgcctcgcccgacctcatgctccggcctcaggaggaggtctccgccttgcccgacctcaggctccagcctcgggaggaggtctccgcctcgcccgactgtcacacccggctttaa

SEQ ID NO: 40851 - DNA, 462 bp, Zea mays
  Peptide Sequence Number=SeqID_84226
atgcaaccggcgcgacggtcactacgtgcgaggaaactgcaccgccacctgcgccaatgccacgtcttctcgactgtggaaccagtgccgcgacttgaggtggcctcgcgcgtgacccaacagtgccaattgggtgcagcggtcatgggtcagtcagccgcggggggcaagcgacaccgctggtgggcgaagcaggcgacatttcacctctgccataaaggccgcgtcaaaaaagtgactaagaagggggatatttcggaaaggatccttccccgcgaaggaaacaggcccccgagccctcttactgatcaggggttcgaaggcttgcccctcggaagggttcgacagccgccccagagcacccgggttccgcgcccatcactgatcaagggttcgaaggccggcccctcagaagggtttgacagccgccccagagcactcgggctccgcgcccactactga

SEQ ID NO: 40852 - DNA, 834 bp, Zea mays
  Peptide Sequence Number=SeqID_84227
atggggcgcacccatgtggctttcttctcgctgttgtttgagaagcgtgacctggtggagattggcgctctccagccatcgctaacttcaaggattttcgtcatgcagccccggctgcattccctcaccaatggtcagtttggtggggagaagcaagccgggctgcggcctctgccccgccctcagcttcaaggatcttcgtcatccgggctgaggtggaggagcgcaccgagtggggggttgcctccgcgtgggtcggtgacccttttcttcccccggcgtttgggggagaaaggcatcctccagccctgtagaggcgtcctccaaccatgcgggggaaggcgaactgttgctccctggccagggtgcagctttccgtctttcatccgggtgacgggcatgccgcgtgcgggccggccacgtctaggtcctcctcgcaccgtcagctgcaccggggggttgctcaacacgtcgttcgccacgagggcggtactcgtgttctgggatggcctcggcgaggacgggagtgaggacctgctggtgcgctttggggcggccgctgttcgccggcgcggtgtcggtgggttcgatcccacagacggcaccctccgactcttcagccttaacggcttatcctcgcccctcgtgttgggacgtgggcgagggcattttcacagcagcgtctgtcctgaggtcatcgttgctgctgttcagccgcccgaggtggaggtcgttgtcgctgctgccgcagaggtcgtcggcaagccgcttggagttcgttatcccgtgggccccctggccgggagaaccgccgagggtcctgccgacgtctaa

SEQ ID NO: 40853 - DNA, 153 bp, Zea mays
  Peptide Sequence Number=SeqID_84228
atgaagctatctcagtcttcagacatggaatatgaacaaaaatgcacagaaacttgtaccaacaacataatgaaccccaatggaaatgaagtaaatgatgccaacgacaatattcctaccttaacaactatgaacgagaaaaatgagtcatag

SEQ ID NO: 40854 - DNA, 639 bp, Zea mays
  Peptide Sequence Number=SeqID_84229
atgacgtcggtggttctcaagccccctacggaagcaaggagacgtcagcaggatccatacagcaccgacagctgtactgctacagggctcaaggcactcctccgacgcaacaccccattgtacagctgggcatctccttacgtctataaaagggggtgtccagggccccacggggaggacgaggacggacaaggagagggggagagggacagagggacgagcatacgaacatacgatggaacacaagatgtgggacaagccttgtattatcctgcagcagggatgccgctcgcagtaggggttacaagcgtgtcgcgtgagggagagagagagggctcgagcacagctgacaacgcggcaaggaccctgctgatgtctccttgctgtcgtaaggggctgagagcaatcggcgtcatggcgcacgcggggcaccatcattacccgtcgctgagtccgagcccagggtccgtcgaggcggagacttctcttgtggccgaggccggggtcgggcgaggacgcgattcctcccgagaccggagtcgaggccgagcccgggggtcgggcgaggcggagacctcctcccgaggctggagcgtgaggtcgggcgaggcgaagcttcctgttgcgctcagggcttga

SEQ ID NO: 40855 - DNA, 459 bp, Zea mays
  Peptide Sequence Number=SeqID_84230
atggtggaaaatgttgagtgtggattgatttcggggaaatgtaagggttttgcacgtgcagtggtggaaactattgactgcgggttgattttgagggaatgtggcagcgagccagcgagccagcgacccacccgactctgttccaacgagccttccctcccaaacttgcacgctgcccccgcgctcgcctccgcccccgatccagatccaggtactcttcctttcgccgcggctgagaagcaactctccctctctgtcctcttcctgtcgccgcactcattttctcttgccgggtggaatagggaacggccatacaccatggcggatttctccaagtcttttggaagttttgaaaactccacccatgacctttttgatggaataagttatgtgtggagcacagtccgcagtccgcacaacatctctgctgcaggacagcagcaacacagcagcttttag

SEQ ID NO: 40856 - DNA, 930 bp, Zea mays
  Peptide Sequence Number=SeqID_84231
atggacgtggaagcgcgcaaggactcgacgccaacgacacgcggcaaggttatgcgccgcctcctggtggtgctcaactgcgggatgctggcattgggcaccacggcggggccgctcctcacccgcctctactacgacaagggtggccagcgacagtggctctccgcgtggctccagtccgtcggctggccactgctgctgctccccgtggcggcttcctacgccgcgcgccgcgcgcgcgaccgggccgcccctgtcctgctcaccccgccacgcgtgctgctggccgccgcgggactcggcgtcgccacgggcgcggacaacttcatctacgcctacagcctccggtacctgccggtctccacctccgcgatcctcatctcgacgcagctcgccttcacggtcttcttcgcgttcctcatcgtgcgccagcgcctgacgcccgccacggtcaacgccgtggcgctgctcacggcgggcgccgccgtgctgggcctgcacgtctcgtccgaccgccccgcgggagtcacccgggggaagtacttgctgggcttcgccctggccctcggcgccgcggcgctctacgggctcatcctgccgctggtcgagctcacgtacaagcgagcggcgggcggcggccgcgcggtcacgtacgcgctggtgatggagatgcagctggtgatggggttcttcgccaccgtattctgcaccgtcggcatgatcatcgacaaggacttccagatggtctcccacttcgacgagatcgacgccatcgtgatcacggaaggcttcgccgtcggacgatgggacgaggagctggatagaattaaagatcaaagcgtgtcgaccaagttgtcctgtaatttggttggcatgctctgttcccgaagagtggagcctaggaagaggaaggtgcgtagatcaaaataa

SEQ ID NO: 40857 - DNA, 1185 bp, Zea mays
  Peptide Sequence Number=SeqID_84232
atggacgtagaagcgcgtaagtccgacgcgccgcccgcgcgcggcaaggcgatgcaccgctttctcgtagcgctcaactgcgggatgctggcggtgggagccatcggcgggccgctcctgagccggctctacttcagcaagggcgggcaccggcagtggctgtccgcgtggctggagaccggcgggtggccgctgctggtgattcccgtggcggcgtcgttcgtggcccgccgcgcgcgcgacaggggcgccccggtcctgctcgcgccgccgcggatcctgctggccgccgcgggcctcggcgtggccacgggcgcggacgacttcatctacgccttcgggctcgcgtacctcccggtgtccacgtccgcgatcctgatctcgacgcagctggcgttcacggtgttcttcgcgttcctcgtggtgcggcagcgcctgacggccgcgtccgtgaacgccgtggcgctgctgacggtgggcgccgtggtgctgggcctgcacgtctcgtcggaccggcccccgggcgtcaccaggggccagtactggctgggcttcgtgctgacgctcggcgccgcggcgctctacggcctcgtcctgccgctcgtggagctcgcctacaggcgcgccgcgggcgccggcggccgcgccgtgacgtacgcgctggtggtggagatgcagctggtgatgggcttcttcgccaccgcgttctgcaccgtcggcatggtcgtcaacaaggatttccagggggcacaccggctggctaactggcagcagcagtgcccgcgcgccgaaatgcctccggacgacggcataataatcggtgcggcgatcccgcgggaggcgaggcggtacaagcttggggaggcgcggtactacgcggtgctggcgtggtcggcggtgctgtggcagtgcttcttcctgggcgcggtgggcgtcatcttctgcgtgcacacgctgctggcgggcatcctcatcgcggtgttcatcccggtgacggaggtggcggccgtcatcttcctgcgcgagaggttcagtagcgagaaaggcgtggcgctggtgctctcgctctggggcctcgcgtcctactcctacggcgagtggagcgaggccagggccaagaagaggaagaccaggacggaggagggcgccgcagccgcggaggccctgcagcaggcgaacccgtga

SEQ ID NO: 40858 - DNA, 336 bp, Zea mays
  Peptide Sequence Number=SeqID_84233
atgggcgagcgcagaggagaagcatctcctgccgccgacatccacgggagcaggaatcagtgtcgctgtgaggagaccaccgaccatcagcgaggaagaacgctgggtgtgacaatcttcaatgagactgaccgcctcaatttgcgctaccttgtcagggagcgcctccttgttggccatcgctttaagggcgatggggtgtggcttggtgtagtgaggaagaggtctgttagcgacgtcgtcgatgtacctcgcctcttggccatcatgcgcccgctcacaaatttcccaagaatctcctcggatgtcatcttagtgtacctagggttctcatga

SEQ ID NO: 40859 - DNA, 261 bp, Zea mays
  Peptide Sequence Number=SeqID_84234
atgggcactccacacagtcagcttgctatgctccaaggtgcagctttcaagcctacaactcctgacatcggtggcaatatgtgtttgtgtactggagcatggaggactagcagcatccaaggaaatactgaaggactgaaggatgatggaggcaccagcgtccggctaggggtgagcgacggcaggccagcaacgctcaaagtgcggctaggttgccagcatagcaccgcgctatggtgcgttgacccgaactgggcgtag

SEQ ID NO: 40860 - DNA, 1920 bp, Zea mays
  Peptide Sequence Number=SeqID_84235
atgaacagacaccggcactcaaggtgccattacaaacggaactccagttccgcccccgcgggtatgaacaacctccacatcagagagcctgcgagacgacaaactcttggtgactcgctggcgacctctgcagcagcagcgatggtcctaggacggacgctgctgccggaaggctctcgttcgcgtccccacttaaggggcgcgaaccagacattaaagccaaagagccggagcaacagttcgccttccccggcatggctagaggacgcctccttcgcagagctggaggatggtttccacccccagaagctggaagaagaggtggccagccgacccgtgcgggaggtagagctctggctcgcctcgctctccgccccagcaaggatgatgaagatccttgaagctgagggcggggcgcaggtcgcagcccgactcgcttctccccaccatcaagttggtggtcaccgtcttgggacagaagaagccaaaccgccgcgcgcggagcgcacaacagcccagcggttacaagcattcctccactatggcccggaccagcgggtgaaagggcggaccgccatgcaggcggcatgcaaccgcaccaagggggtgcaccctttcgacttcgacgcgtccagcatggaggcccaggcccacatgtcatgtaaccggcgcgccggttactacgtgcaagaaactgcaccgccactcgcgccagtaccgcgcctcctcgactgcggaaccggtgccgcgactcgaggcgaccctgcgcatgacccgacagtgccaaccgagcacattggtcacgggtcagtcagccgtgagagaaggcgcgacggtcgatacgaccagaaatgggccggcagtaatggcggtggcaggcgggcggaagcagcagtcaagtcatcagcaagctcacgtcccctcctgggacagcaagagagccctctcccacggagtgaagacgacgcgcccgtgttccgttcctcgaatggctcgcgcacgcacaacggctgccccgcgaaccactcgtcccgtcgcattaactctgcggcaggacaggcggggaagcaggcgacgcttcacctccgccataatgaccgcgtcaaaaaagggaccgggaaaggggacactccgaaagggatccttctccgcgaaggaagcgggccccgagcccccctactgatcagaggttcgaaggctggcccctcggaagggttcaacagccgcctcagagcactcgggctccgcgcccactactggtcagaggttcgaaggctggcccctcggaagggttcaacggccgcctcaagccactcgggctccgcgcccactactgatcaggggttcgtaggctggcccccgaagggttcgacagccgcctcagagcatgcagagcgagggatgaccctgggctcgggggctgctctcttaaacccggctccggccaaaccgttgacagcgtcaacataccagctcgagaacttgggactcgactatgcacccgggctacgaccactaagtccggcctcgggcgccataggaagctccgcctcgcccgaccctagggctcgggctcaacctcgacgctggacgacggactccgcctcgcccgaccccagggctcggacacagcctcggcctcgggagacggtctccccctcgcccgacccagggctcgggctcaacctcgacgctggacggcggactccgcctcgcccgaccccagggctcggacacaacctcggcctcgggagacggtctccgcctcgcccgacccagggctcggactcaacctcgacctcgaaagatgagctccgcctcgcccgatcccagggctcagactcagcctcgacctcggaggagcctccgcctcgctcgacctcgggctcggacccgccaccatcattaccctacccctag

SEQ ID NO: 40861 - DNA, 396 bp, Zea mays
  Peptide Sequence Number=SeqID_84236
atggccggatctgccccctccatggatgccccttgttgttccctgcgcctagctctctctatccagcgccccccattttcttccatggaaaaccagcagcgagcccccttcctcgctgttcgtcgtggtgcccgccggctgttcggcaaaatgcgcagcaacccgcgcgctgccggctcgctgtttcgtgaagcccagtggacagcacgccgccaacgctcactgtgggttgctgtttttgcgcagcccccttgtcgtcgtcattcacccccggagaggaaccctgcgttttgcgagaagaaggccaatcattcaacgctcgtcggatgttggagcgatgcacaaatcggaatcaccgtcattcttgcaaacaccgtttgggtttgtttatggtga

SEQ ID NO: 40862 - DNA, 336 bp, Zea mays
  Peptide Sequence Number=SeqID_84237
atggggagggggaagagatccctgctgctggcgccattggggaagcttgcctgggcgcctgccatgggggagcttgctgctgcgccaggaaaaaggagtccacgccatggctgctggcggccaagagagcacagcgagatgggaaaaaaagagagcagcggcgtcgcgccatgggcaggaaagctgctcgccatgggagggaaaagctcctgctcgccatggacagaaaaagggagggaggaagggcgctggagaacagggaagagcgccatggctgttgggggcgccatgggagcttggagctcggctccctgcgtgctggctgctgcgctgtga

SEQ ID NO: 40863 - DNA, 810 bp, Zea mays
  Peptide Sequence Number=SeqID_84238
atgcaggcggcatgcaaccgcgccaagtggacgcgcttctccgactcccgacacgcccagcatggaggcccaggcccacgcgtcacgcaaccggcgcgccggatgcttcatgcaagcaactgcaccgccacttgcgccaccaccgtgcctcctcgattgcggaaccaataccgcgactcgagggctcggactcgggctaagccccggaagacggcgaactccgctccgcccgacccagggctcggactcgggctaagccccggaagacggcgaactccgctccgcccgacccagggctcggactcaggctcagccccagaagacgacgaactccgcttcgcccgaccccagggctcggactccgcccagacctctgccgacgacctccgcctcgcccgacccaggggctcggactcggcctcggccatggaagacagactcgacctcggcttcggaggagcctccacatcgcccaacctaggggcgcaggccagccacggccctcttagagagggttggcctcgcggggacgaggacgagacaggcgctcgctcggagccgctcgcttccctcaccagcgtggacgcttgtaaccccctactgcaagcgcacccgacctgggcgcgggacgaacacgaaggccgcgggattcccacctctctcacgccggtctccggtcgcctcgcttctccccccttcgcgctcgccctcgcgctcgacccatctgggctggggcacgtggcgacactcactcgtcggcccaagggaccccccggtctcgaaacgccgacacttttctaccccatatga

SEQ ID NO: 40864 - DNA, 888 bp, Zea mays
  Peptide Sequence Number=SeqID_84239
atggaaaaagaaaaaacgggtccgacccgaatatccgggtatttaccgggtagtattgactccgtatccgacccgaatccgaagctgcactatccgggtattacctgtatccgtcccgaatataaaaatactcgtatctgtatccgaaaaagggtatttgcactatccgtatccggtacctggcgggaagtcctcaattttattgtatttttagtggctgaaggttttcatggggtttcctggactgttcagtgcgacatagttcaacagttcatgcttggtgccttgcctcaggacaaagagcatgtgcctccatatcctcataatggtcatcaacttccagtggaattttttggattggggcagcctgtgcccaacttccaatttgacctcaacatccctcccactggtgaaattgaagaagatgttgtgagtaacaacattgctgatgatggttgggacccatggccggctgaacaggatccacttgtggatgctcagtcccctgtgacttctgaagcagttaacagaaagaaacgtgcagccttggtcgacactgaagtgagaaggagtgcaaggctcagagaaaaggccaaaggctttaagccttgttttggaataaaaaataactgctcgtgctgtgctggggcatcaccgccatctctctcccacatgactatcaagaagttgggcactgacttctgcaatgttgacccccacaagttgagccttgatgctttaaataactctaggtcctccagtgctgccatccagaggcctcgttcctcgtcttgctccaggaatgagccaagttcttcgtctgaagaccagagggaggcttctgatatggatgatgacacggagtctcatccctcagcggggctgtaa

SEQ ID NO: 40865 - DNA, 885 bp, Zea mays
  Peptide Sequence Number=SeqID_84240
atgtcttcacgctcccttatgcatcgtgtctttccaccttccgagcccccggatgggggatacccgccgtctttccgcctcatcgttggaggaacgcaactccgtgggagttggtacctttcagccatcgttcggcttcaaggattttcatcatgcagcccggctgcacccctctgccggcggtcacccaagatggtgacctccagcttgatggtgggggaaagcgagccgggctgcggcctctgcccctccctaagcctcaaggattttcatcaccagggctggggaggggactgcaccatgcctggctctcggacgcgagtggcttcggagccgctcgcggcgccggcgtctgccacggcagctggaagaggttcttccgccgacgagatagccggggccgcccacggaccgacctccaactctacggccttctgcccgtccttgcctcacgagtttgggcatgggcgggggcctcctggcagcagcagccgccctgaggttagtgctgccgctattcggccccccggagcagaagtcgtcgtcgtcgctgctgctggagcgggcgacggcgcgccgttcgtcggtcttctgttgctccgcaggccctcccccatcgagtggggttgttcgtacctgcggaggtggaaccagagttccgtttgtaatagcactttgaatgccaactcgcctgttggttgtctgaaccgcttcaccaagcgtgagtcgccccgtgtcaaggtgacgagtgagagcgaagatcctcggaccgtgtcaccgtccgaggctaggtcggacctcgccgaaggtgtcgtcgatgccgagggtgctgctgcccccttccagcgtcaaggcccgagcctgcaggatcagattgtcttgtag

SEQ ID NO: 40866 - DNA, 270 bp, Zea mays
  Peptide Sequence Number=SeqID_84241
atggcaaagaacattggattttcgaagcttgaagatggtctatctgccatgctcctacatgatcttccagattatctagcctacaaaagcttaaagaagcacgatgacgatgctctcgccgagctagtcacgacgatgttctgggttgccccggaagatgaacggacggagagaaatttctcgccggagttgttgctagagtttgggcgggagtcaaacttcgatgagctgttcatatcggcttatggctgcgagcttagcttgtggtag

SEQ ID NO: 40867 - DNA, 603 bp, Zea mays
  Peptide Sequence Number=SeqID_84242
gccgatataggcctttcaatgggtatttcagagacagaagttgctaaagaaagctctgacattataatcttggatgatgacttcacgtcagttgtcaagaagtctacctgggaacctcttgttacaaatatcatgtggagaaacttgtttgttcaggccctttaccaagtagcaattcttctgattttcgattttgatggaatcttcaatgagttcaatgcacgaaaacccgaggaaaagaatgtcttcaaaggggccacgaagaatcacctgttcatgggaataatcggtataacgacagtatttcagatactgataattcagttcctggggaagttcttcaaaatagtgaggcttggttggagactatggttggtttcaattgctatcggccttgtgagttggcccctggcttatgtgggtaaatttattcctgtgcccgtaagacctctcccggactatttcaagccccgctgttgtcggaaaccgccgcgccgaggtgagtctctggatgttggctttgttccttttctgcgtcagtttcgatccagaactcaggtattaatcggtaatgcagacgaggaggaaggtgggcaaagttaa

SEQ ID NO: 40868 - DNA, 885 bp, Zea mays
  Peptide Sequence Number=SeqID_84243
atggccaacttccttgctgatcctaggcctttcgtccctctggagttggtgcttgatgatgctgacattgatcgctgctcgcgggcttgggttcatgttgcgcttggccaagaagctcgtcgcgatgactttgtcattgcaaccggtcttgaaggagtagtccctttggatgttggcattttcgaaatgggtagtctttttcagaaggatatactgctaactagtgacatctacaatggggaaggcactttgcttgggaataataatgcaattgccgacctagaagacaacatccctccaaatcgtaaccctcacccataccaaaagatgacaatgatgaggatttcctacagacaaagagatttcatggaaaacttggtcaatcagaacatatggggtattcaagaagctcatggtgaacctgtttgggacaatgttgttctgaacatgggtcttgcacatgactggcctatgaggcctcaacaacctcaagctgctaccctccaccctatggctccggctgctcaagaccagttggtgttggacactgatgacaacgctattgatgtggattccatttcttcatccaacaacgcccttgttaggagaggaaatcaaaattgtctccctttccatcaggctagggaatcttctctctggggatcttttcctatatccttaaatttacagtcctcagaaatgctagagtgggtgtctttttttatctcgaaagagatggatggttccaccttgcaaaagatggttgttgatcgatgcggtgtgccacccgaggaggcttcactgagggtgctccttcttcgccctacctcgtgggcaacagaaggcaccactgctgacacaaccctagatgttcctcatgattaa

SEQ ID NO: 40869 - DNA, 201 bp, Zea mays
  Peptide Sequence Number=SeqID_84244
atgcatggcgtgggcaagacgtccacggctacaatgtttgcagcaacgctgaattgccattccccaggcaggaaccaaccttgtgggcgcggtgacgagtgcatgtccatattatcggaaagcagcaacaatatagaagagattgatgcttcgacctttctcaggaatgcccgtgaagagattgatacttcaaggttctga

SEQ ID NO: 40870 - DNA, 285 bp, Zea mays
  Peptide Sequence Number=SeqID_84245
atggggccattaagatttgagttagggatcaaggtgaacacgcttgatctttggctcaagcaattgagagaaaccctaggtgacactggggtgtcacagccttccccccttaaaggaatctcgtcccaagattcgggtcagagtccccccggggtgaagcgaaggattcgaaggacaggaggaggggttgggtgtgattacgtaccagtttccttaggtaggcaatcggggaagttggatctcaagaattcctcggtctcccaagtagcctcttcctctgagtga

SEQ ID NO: 40871 - DNA, 363 bp, Zea mays
  Peptide Sequence Number=SeqID_84246
atgggcaagaacaacaagcgcaagcgtgagccaactcctccatcggaggattttggtgactcggagtactcagaggaggagttctcctctgagtctgaggggtacctgagcgcccagcgccttgtgttaaggacgcatgtgccctcagctacccaggacgaggccgcacggtgggaggacctcgtcgcaggccttcgtctggcgtcgtaccgggcgaagggtgtccctgcccgttttgtcttcgtcggaccagcggcaccagcgagggcttcgagcggagggtggcggctatgccttcgccccaacatttgccctccgagggaccagttcgacaaagtcacctggtgccgaagacgtcgctag

SEQ ID NO: 40872 - DNA, 1263 bp, Zea mays
  Peptide Sequence Number=SeqID_84247
atgtcatcgtcattctcgccggaggtggatgggaaccacagcgacgacgagaaagacggcgtcggtgttctacctgaggatcaggtgttcgagatacttacgcgcgtccccctcgacgacctcgccacatgccgcatggtgtccacccggtggcgcaggatcacgtatgagccggcgttcgcgccgctgcactgcagccgcaccgccgccgtgtcgggctacctcgtccagagcttgacgcacaaccgctaccgcgcagacttcgtctcgatgccctgctcaccgccggcgccggcggtggcaatctcgctcgacttcctgccgtccgcgcacgtccgcgtcgtggccgtggccgcgcaccgcggcctcgtgtgctgcgtcgacgtcgacgcgatgcggccgacgtgctactacgtgtgcaagccggccacgcgacagtggcgggcgctgccgaacccgcgggtgcggttcgacacggtggctgtggccatggaggcccggccctccggtgccaccagggcggagttcaagatcgtccgcttctcgcgatcggtagtcgtcaagccgggggaccggctgcgctgcgaggtgttcgactcgcgacagttcgcgtggagccaagctccgcacgtgccgctcggcccgttctccctccaggcccaggcgcccgccgtgcgcgcgcacggcgcgatgcactggctccgctggtccgaccacaacacgggcgcgcaggacgtcttcgcgttcgacgttgaggccgtgaagtggaggctcatcgcgctgccgcaggaggtggaccagatggacaatccgtgggcgcgcaagaagattggcgccgtggaggggaggctgtgcctgctggtgctcacgcacgcagctggcgctgtgaacgaggaggtgctggaggtgtgggagatggctaactacggagaaggaagatggacgaagaagatgacaataagcttgaaggacctccacgagcacgacaggcgggcggtgatccacggtgtcctccactcctctgatgtcgccttcttctgcagcttctacagagtcatgtggtatgatttcaggaagggaaagatggccgaggtccaagtcaagaacataggcataggcctacaacaaattttcaagtacgaatcggacttcaatctatgcaaaatagggcctaagaggcccatagagggggctgcggtagcagcagtcatgggtcctcaaggaagattagataagattataagattagttgagattatctag

SEQ ID NO: 40873 - DNA, 609 bp, Zea mays
  Peptide Sequence Number=SeqID_84248
atgggagacttgtggaccaacataagggctgatctcgcaaatatacaagccacgctccagaaggttgagcaagggctgctgcaaatcaaaatagcagtgcaacatgagcagcaccagctggcgttgtccgcacggctccagacgtcggcggctgtgggcatacaagctgctgctcgtggctttcttgcacgacggagagtgcgggagatgcgccgacagatgctcgaggcagccttggtgacagctgacctcggcacacgagggcacatccttgccctgtcggacggccatcagcagcggctccgggacgctatctccaagtgcgagcatggtacgtgtcccgccagcgacgaacttcaactctacggcagcggcgataaggaaggcactcccttcgtcatcggcaagggcacactatttagcgccaccacattccgctaccggtcgccacgagggcgcctccgctggttattgttgcgacctattccaggtgcccgttcatgtgctcccctttcgtctagatggcgtccatgggatccaggtggctgcacacgtgcaagtccaatgcgcggagggtgtccgccttatcttatgaggtcaaaaaattag

SEQ ID NO: 40874 - DNA, 177 bp, Zea mays
  Peptide Sequence Number=SeqID_84249
atgggccaccgtgaggcccgcgcgccccgggaccacctcacaagggagctcggccaggtccgcggcctcctcttccgcaccgactgggcgtggccagtgccaggtggcctgacggccgggcatagagtggagtttgaatatgagatgagaatggataagctgctggtgatagtctaa

SEQ ID NO: 40875 - DNA, 1209 bp, Zea mays
  Peptide Sequence Number=SeqID_84250
atggcccaagggcacatttccctttcagatagcacaatctttgttatgatcacatctaatattgaaaagctaccaagcaattccatagagtggtactttattgtctttgttgacattggtgccattgacaaagctattgaagaggccatgtttgggatcttcgcgaatgctgattgtaatctcgccgacggagagtacgtgctcatccccgagcaaggaactgtccaagaggaggaccaggagcaagctcccgaggctgctatcgaggatctccccgcagccccagctattgaaggcaagccccgctatggtgggtacaagtgcggtcactgcacggcggcagccggggtcagtggagcattgtatgccaaggcggtgcgattcaggaaatggttgatgtccatctcgggtgctgttttgaaagggaagcttgctcctatctacctcttccatggtcagcatggcgtgggcaagacgtccacggctacaatgtttgcagcagcgctgaattgccgttccccaggcgggaaccagccttgtgggcgcggtgacgagtgcatggccatattatcggaaagcagcaacaatatagaagagattgatgcttcgacctttctcaggaatgcctgtgaagtccctgcctcttcacacttcaaggttctgatcgttgataattgccagcacatggataaggaaggatggtacgctatctacaatagccttgaagggattcctgatagcacaatctttgttatgatcacatctgatattgaaaagctaccgagcaattccatagagtggtactttattgtctttgttgacattggtgccattgacaaagctgttgaagaggccatgtttgggatcttcgcgaatgctggtcaagtctgcagtgctacgtcttgtctactgctgcatgagaaaattgcaaaacaatttttggatagattggttggatgggcaaagattataaaagtctcagatccattggagaaaggctgtcgagtggattcagttattagtgacagacagtatgagaagataaagaagttcatctcgactacaggaagtgaaggtgccacaaatctatatgagcgcatttcaagggctcttcactctggtattatttggataaattgcttgcacttgcaatgggaccccggtggaattgatgtcatgtatcagcttgggggcaagccgattttttaa

SEQ ID NO: 40876 - DNA, 366 bp, Zea mays
  Peptide Sequence Number=SeqID_84251
atgggccggatcgtacgtgggcctccgaacaggacgaggccgcacggtgggaggacctcgtcgcaggccttcgtctggcgtcgtaccgggcgaagggtgtcctgcccgttttgtcttcgtcggaccagcggcaccagcgagggcttcgagcggagggtggcggagtactcctcggatgaggaggactcgtccgaggaggacggtggcggcgacggcgaggacgacgacgacgacaatgacgacgacggaggcggtggcggcggtgacggtgacggtagtggcaggggcgacagcggtggcggcggcaacagcaggggaagcaacaggggtggcagcggcggcggcagcaacagggctagtggctaa

SEQ ID NO: 40877 - DNA, 432 bp, Zea mays
  Peptide Sequence Number=SeqID_84252
atgcacccgggctacggccagttcgcatgggggaacaaccagaccggccgaagcatcacgaaacgcgctaagacctcgaaggagtcaaaccactccttcgaggcctcgggggctacacccggcggaatgaggttgacagcagccaagtccggcctcgggcgccataggaagctccgcctcgcccgaccccagggctcggcccctgtctcggcctcggaagacgacgaactccgcctcgcccgagcccagggctcgggctcagcctttgcctcggacgacggtctcggcctcgcccgacccggggctcggactcgacctcgacctcggaagacagactcgacctcgacctcggaggagcctccgcctcgcccgacccagggcacggaccgaccacgtcacagaggaggccatcattaccctacccctagctag

SEQ ID NO: 40878 - DNA, 717 bp, Zea mays
  Peptide Sequence Number=SeqID_84253
atggcggccgacaacccgctcgccggcggcggaatcgacgacatcttccccgcgtggtggaagaacaacattcgagctcgccccgtcctctcccctgccaacggaggaggaggcgaggcaaccaaggccaagcgggaggccgcgcttcgtcggctgtcaagcgaatcgacgtccccagctccgcggaggtccgccaccgtcgccccgagccaccgtcgcgccattgccgccgccgaggagtccccggagcccgccttgagagtaatcccgccgccgagccgttccgccgtgaaccgccccctccggtgcccctgccccgacccagaccccaccagaggactccccgtgccctccccaaccttcccggccactcaggtcgccccagagacccgccaaacgcccgcgcccctcgtctccggtgagctctccgccgcggggacgagcgccgccgccccagctagccgtaggagaagcccaggcccacttccccctcaccccgtctccctgccgtttgggccccgcctgtcagcccgcccgcgcgcgcgctctgcccgccggccccgcctgtcagcccgcccgcgcgcgctctgcccgccggccccgcctgtcagcctgcccgcgccccgcactgcccgcccggtcccgcctgtcagtcgcccaggccgccgcgcgctcgcgcgcccgcccgcaggatctaatcctggccgttcgctttag

SEQ ID NO: 40879 - DNA, 864 bp, Zea mays
  Peptide Sequence Number=SeqID_84254
atgtcttctcactcccttatgcatcgcgtctttccaccttccaagcccccggatgggggatacccgccgtcttttcgcctcatcgttggaggaacgcaactccgtgggagttggtacatttcagccatcgttcggcttcaaggattttcatcacacggcccggttgctcccctccgctggtggtcacccaagacggtgacctctagctcctggatggggagaggcaagccgggctgtgatcccgatcccgccctcagcatcgagggtgttcgtcatccttgctggggcggggagcgaggcgagtcggggctctacctcctgcgcgggtcggcgggccacctcttcttccagcttctggtggtggcaatcgccctccagccctatggcggagacgtcctccagccatgccggggaaggcgaactattgctgcccagctaggatgcaacattccgccctctccctcgcattcgcggcgaggacggcagcgaggacctgccggtgcgcttgggagtggcccgctctttggctttaatagctggttcacgtcccttgagcgggaccgcgaacgagagccctccggtggccgcgtccacccgggaccatggctgctgctgcagaggtcgttggcaggtcccccgacgttcgtcgctccgcaggctcgagactcgcctgttgattatctgaaccgcttcaccaagcatgagtcgccccgtgtcaaggtgacgagtgagagtggggatccctggaccgcgtcgccgtctgaggctaggtcggacctcgctgaaggtgtcatcgatgccgagggtgctactgcccccttccagcatcaagacccgagcctgcaggatcagagtgtcttgtag

SEQ ID NO: 40880 - DNA, 663 bp, Zea mays
  Peptide Sequence Number=SeqID_84255
atggggagcactcgcgtcgccttcgtcttgtcgtcgtcgggggaacgcaacttcgcggaagttggcagctcggctgcatcccctcgccggtggtcacccaagacggtgaccaccagtttgatggtggggagaagcaagccgggctgcgacctctgcctcgccctcagcttcaaggatcttcatcatcctggctggggcggaggccggactgagccggagctctacctcccgcgcgggttcgtgggtcaccttctccctcagcattcaggggagagggcgctcaccggcctagcgggagggtcggacttcgacaacgcggggctggtcggcggcgagcgtcgtctgcttcagcgcgttgggctcgctggctcagctggctctggctcggctcccggtgccccctcccgccgcgagagcggttgtcgcaccgcgcgcaccggaggaccgcccaagatgtcgcgcgctgctagggcggcgttcgtgttcttgggctgtcctgtctttgctccggtacggcgcctctacgcggagcttgtcctcgccccctcgagtggggacgtgggcgagggccttgttgcagcagcgtccgccctgaggccatcgctgttgttgtttggccacctggagcggaggtcgttgtcgctgctgccggagcgggcggcg

SEQ ID NO: 40881 - DNA, 600 bp, Zea mays
  Peptide Sequence Number=SeqID_84256
atgcaggcggcatgcaaccgcaccaagggagcgcaccctttcgacttcgacgcgtccagcatggaggcccaggcccacacgtcatgtaaccggctcgccagttactacgtgcgagaaactgcaccgccactcgcgccagtaccgcacctcctcgactgcggaaccggtgctgcgactcgaggcgaccctgcgcatgacccaacagtgccaaccgagcacatcggtcacgggtcagtcagccgcgggagaaggcgcgacggtcgatatggccagaaatgggccgggaccggtaaaggggatactccgaaagggatccttctccgcaaaggaagcgggccccgagcccccctactgatcagaggttcgaaggctggcccctcggaagggttcaacagccgcctcagagcactcgggctccgcgcccactactggtcagaggttcgaaggctgacccctcagaagggttcaacggccgcctcaggccactcgggctccgcgcccactactgatcaggggttcgtaggctggcccccgaagggttcgacagccgcctcagagcacgcagagcgagggatgaccctgggtacgttcgatacataa

SEQ ID NO: 40882 - DNA, 729 bp, Zea mays
  Peptide Sequence Number=SeqID_84257
atggcgccctgcaagccctgtgacgacggcggctctcagctctcttacggaagcagggggacgtcagcaaggactcaaccactccgacagctgtccctccgccaggctccgttgctcctccgacagccacgacatcacaccagcagggtgccaagggccctcttagagaaggttggccgcgcggggacgaggacgggacaggcgctctcttggggccgctcgcttccctcacccgcgtggacgcttgtaaccccctactgcaagcgcacccgacctgggcgcgggacgaacacgaaggccgcgggatttccacctctctcacgcccgtctccggccacctcgcttccccccttcgcgctcgcccacgcgctcgacccatctaggctggggcacgcggcacactcactcgtcggcttagggacccccggtctcgaaacgccgacaaaactacacttcgtaaacagtgcacaacgttacacgctattgttgtcatacccgaacctcaccgcggttcgcctcggccgcgccgcgcgtcttctccaagagcgcctcaacctcgacagcagtcgcttcaccgccgcagctggccggcggccgccgctcctggcgtggacgagccgcccgcccaagccgctgcccccgtcgaaagaatcaaagaaagacaaccgtcgaccaccaacaatggaagcatgtgcacttgctttagtgacgacctccatcgccagctag

SEQ ID NO: 40883 - DNA, 429 bp, Zea mays
  Peptide Sequence Number=SeqID_84258
atggccggttctaaggatcacaccgaggtctccaccagcaacatcatcaagccgaccctagaggaactatttgttaatgatcaacaacgctttgaggatatcatgaagcaaaatgagaaagaagtgttgcaacaactcgtgaatgacgtaagaaggaaaaggagaagtacttatcacaattcacgctggatcgccaccagaagatcatccgccaaggggttagcacttctgtatgaagaatttaccgtcccgaattttccctcatatgaacctaatacagagccagttttacctaacacattggctataaatgggtcatcactaacccagccatcatatggtatgccgatgaacacattcacaacacaaccaccatcaccactgcctaacacacaaccaacagggcatgaccagacagcgcgagcctaa

SEQ ID NO: 40884 - DNA, 1197 bp, Zea mays
  Peptide Sequence Number=SeqID_84259
atgccgaccggcgccacggcggtgcctacactaccggaatcagctcctttgccgtgtgtctccgacactcggcaaaggctattttacactcggcacagaatgatcggcgaactgtacatcggcaacagcctctttgccgagtactatttgtcgggcactcggcaaagaaaagtcaccgtcatggcgccaagtgacggtgacggatcctttgccgagtgccttctgtggcactcggcaaagaggccaattttgccgagtgtttgctcgagaggccctcggcaaagactgatccagtgggccccaccgccagtccctgtgccgagagctctaataggcactcggcaaaggagtcttttttgccgagtgtctggtggactggcactcggcaaagaaccctccagtgggcccctttaccaatatctttgccgagtgccttggcaacagcactcgacaaagatgtctttgccggttcccagggctcggactcgggctaagccccggaagacggcgaactccgcaccgcccgacccacggctcggactcgggctaagcttcggaagacggcgaactccgctccgcccgacccaggggctcggacttcgggctaggccccgggaggacagcgaacttccgctccgctcgacccagggctcgggactcgggctaggccccgaaagaagacgaactccgctccgccagacccagggctcggactcgggctcagccccagaagacgacgaactccgcttcgcccgaccccagggctcggactccgccctggcctctaccgaacgacctccgcctcgcccgacccaggagctcgggctcggccccgaccatggaagacagactcgacctcggcttcggaggagcctccacgtcgcccgacctagggcacaggcccgccacgtcaacaggaagcgccatcatcaccctaccccgagccgactcgggccgcagagaacaagaccgtgggacgtcagcaaggactcaaccactccgacagctgtccctccgccaggctccgttgctcctccgacagccacgacatcacaccagcagggtgccaagaaggttggccgcgcgggggacgaggacggaacaggcgctctctttgggggccgcttcgcttccctcacccgcgttggacgctttgtaacccccctaaatgcaagcgcacccgacctgggcgcgtga

SEQ ID NO: 40885 - DNA, 321 bp, Zea mays
  Peptide Sequence Number=SeqID_84260
atggctgaaaggcggcgcttctggcaggagaagcgggcgacgcttcgccttcgccgtaataaccgcgtcaaaaaaaggaaccgggctccgagcccccctactgatcagaggttcgaaggctggccctccgaggggttcaacagtcgcctcagatcgcgtgggccctacacccactactggtcagaggttcgaaggccggcccccccgaagggctccacggccgcctcaggctactcgggctccgcgcccattactgatcaggggttcgaaggctggcccccgaagggttcacagtcgcctcagacgccgagcgagggataa

SEQ ID NO: 40886 - DNA, 561 bp, Zea mays
  Peptide Sequence Number=SeqID_84261
atgcagcccggctgtatccccccgtcggtggtcacccaagatggtgacctccggcttgatggtgggggaaagcgagccgggctgcggcctctgcccctccctcagcctcaaggattttcatcaccagggctggggaggggagtgtgccgagttgaggtcggcccccgcatgggcggcggcccgctccttcactcaattatcggagggaagggcggtcgtcgttcgtggcgctggcagctgcaccgtgcctggctctcggacgcgagtggcttcggagccgctcgcggcgccggcgtccgccacggcagcttgaagagcatccgccctgaggtcagtgctgccgctgttcggccccccggagcagaagtcgtcgtcgtcgccgctgctggagcagccgggttgtccgtcagcgggaccgacgccggagttgatcagccgaggcctcggaccgggctggcgcccttggaggatgacctcgctgaaggtgtcgtcgaagccgagggtgctacagcccccttccagcgtgaagacccgagcctgcaggatcagattgtcttgtag

SEQ ID NO: 40887 - DNA, 942 bp, Zea mays
  Peptide Sequence Number=SeqID_84262
atgaccgaccaaaccaaactacggcgtgaggcggacagcgccgtttccgctcataccggcgaggaatctgtcacgttctgcgtggtactgcgcctgatgtcatcaccgacaccctccagcccatcccagagaaccacggtgccgcccatcgggtcccgacgaatggcgggagcatgggccgaccatggcggatccgcggcgagcagctccgccgaagaggaattccgtgcggcctggtacataatctggttcgcgacgagggacgagaggagggatgcagcacggtattataatctgggcgaaagggagccgagcccgagcagacgcggtagctctgctgttaagtgggccccacaagtcggcgttccctcccacacggctgggcagcgggacccgcatccagtgaagggggcggccagttgggcaagcgcagtgagtgaagtaaggatgggccaaatgtcgggcggagcggagttcgccgtcttccgggtcttagcccgagtccgagccctggggtcgggcggagcggagttcgccgtcttccgggtcttagcccgagtccgagccctggggtcgggcggagcggagttcgccgtcttccgggtcttagcccgagtccgagccctgggtcgggcggagcggagcttcctatggcacctttggcaaggcctgactgcctgtcagactcactctgttgagtggcactgcagtcggagtggcgcaggcggcgctgtccttctgttagaccggtcagtggtgcggcggagtgacggcgggttgcttctcagcgaagccaaggcttcgggcgagccggagatgcgtccgccgttaaaaggggggcctcgggcgagacggaagtccctcgagctttatgctgatgggggttaccagctgagaattaggcgtcttgagggtacccctaattatggtccccgacagtag

SEQ ID NO: 40888 - DNA, 216 bp, Zea mays
  Peptide Sequence Number=SeqID_84263
atggcggatccgcggcgagcagctccgccgaagaggaattccgtgcggcctggcgtcacacgagctgagctaggggaaggggataactctgtcgaaaggggcccacgcggcagtgccagatttaggtgcgcagacgcggtagctctgctgttaagtgggccccacaagtcggcgttccctcccacacggctgggcagcgggacccgcatccagtga

SEQ ID NO: 40889 - DNA, 285 bp, Zea mays
  Peptide Sequence Number=SeqID_84264
atggcaatcggtcggacttgcgtctctggccatggaagggagaccaggagcatcgccttaacgcggggaagctgtagctaccagaaaatcagcgcgggaggccacgaatccatggctattcctcgtcggagtatgagcgcggtcgcggatccgcctcgcgccatgaaccgtgcggtcgtcgccataatcagagggcgtggcggcgccgccgtcctggccagtcgtgtggagaagatgtcggagcaccgtccgatcatgcaccagtggctgcgattagaagcttaa

SEQ ID NO: 40890 - DNA, 726 bp, Zea mays
  Peptide Sequence Number=SeqID_84265
atggcggcggagacggcggcgattggaggccgaccgtcgtcgcagccttcgcaggcgtgcaagtcggccgcgctctccgccgccgcttcgccggcctcctccgctcaccgctctgctctgttcagtgggaacgggtcagggggtagatacatcagcaacgggaagttgttgtccagacggcctcgtggaatcgattccaagaagaggctctggactaatgtccttcttgctcttaatgtcctggcttatgtcgctcaggtagcatcacaaggaaagcttctcatgtggggagccaagttcaattgtttctctttgaactctattgggcccatggttgaaatgttaagtggtcctagaagatatctagctgtttatttcagttcggcgctggcaggttcactgatgagctaccgttttagtgcgtcacctgctgttggtgcgtcaggtgccatttttggattgacttttgtttcttatgtacaccacatttatgttttgtcaaaaaatagtcctggtcttgtcctattgaaatataaatctctgatacaactgggtatgggcctcctttcaaggggaattgataactggggccatctgggaggcttgcttgggggagttgccatggcatggttcctaggtccggcatggcaatatcagtacgtggcaaaggatggtagagcggttttcaaagacagggctccagtcctccgactaataaaggggtag

SEQ ID NO: 40891 - DNA, 207 bp, Zea mays
  Peptide Sequence Number=SeqID_84266
atggccgacgagcacgccgatcccatcccttcgcgccatcccgtagagctcgtcgccccgaatgatttattgaatacggagcctaggagcgacaagcaatttgaggctgttccccacggcttccacaaattagggcccctgtctctgttacaaggtactggtgctcccagtcccagtcccaggctgggcaaaatcgttctagactag

SEQ ID NO: 40892 - DNA, 552 bp, Zea mays
  Peptide Sequence Number=SeqID_84267
atggcgcttcctgttgacgtggcgggcctgtgccctaggtcgggcgacgtgggggctcctccgaagccggggtcgagtctgtcttctctggccgaggccgagcccgagcccccgggtcgggcgaggcggagatcgttcggcagaggcccgggcggagtccgagccctggggtcgggcgaagcggagttcgtcgtcttccgggtcttagcccgagtccgagccctggggtcgagcggagcggagttcgccgtcttccgggtcttagcccgagtccgagccctggggtcgggcggagcggagttcgccgtcttccgggtcttagcccgagtccgagcccctgggtcgggcggagcggagcttcctatggcgcctttggcaaggcctgactgcctgtcagactcacttctgttgagtggcactgcagtcagagtggcgcaggcggcgctgtccttctgtcagaccggtcagtggtgcggcggagtgacggcggtcacttcggctctgccggggggcgcgcatcaggataaaggtgtcaggccacctttgcgttaa

SEQ ID NO: 40893 - DNA, 453 bp, Zea mays
  Peptide Sequence Number=SeqID_84268
atgggcaagagcaagaaaggcaaaagttcatcgcaccactccggcgaaaagcggaagcgtgagctgagtcccccctccgatgacttcggtgactccaagtactcggaggagaagttctcctctgagtccaaggggtcgccaatctacgcctctcccccggtgtcgtccgatgactcggacgattcccaggggatcaccgccgaggtgtggacgtacatccgggtcgtcgagtgctccgggctcgagggctcggatgagtcggagatctcatcggacgagggggattcctccgactcgtccgaggaggggagcggtgatgacggcaacgacgagggcgacggcggcgacaagggcgacggtgacggcggcaagggcgacgtcggcagcggcaaggacgacggcggcagcggcagggccagtggcaaagcgccattggcttatatattagtatag

SEQ ID NO: 40894 - DNA, 448 bp, Zea mays
  Peptide Sequence Number=SeqID_84269
atgtccggtgccccagccacgtcaccagtaccgttggaatctgaccgttggagttctgacttctgggcccgcctcgatgtccggtggcgcattggacatgaactgttcagtgtccggcgcgggtccgtctgtgacggacacggcggtggtggcgaggaggaggaggacttgaggagcgttggggtgagcggagcaaaccagatgcgctcggaatggggaagcccttcgatgtggagctcggcggcggcgcgggaggcctcgagatcgccggagccgggaggcggtggcccatggggagggcgagtcttcggcgcgatcgggcgggcggtttcgttccggtgcgtcttcgtgctcctgctcgcggcaggggtgctcataccggtgctgttcctgctcgtgccctcgcgccagcaggggtacctctcagacgaccacgacgtgctcgctg

SEQ ID NO: 40895 - DNA, 858 bp, Zea mays
  Peptide Sequence Number=SeqID_84270
atgttggtgcttcagttcaacattgtgatggcatacatggctaggagacagagggaggctgaaatcaaagttggtttcactttggaaaagccagtgtcattccttacttctcacatagacaaactagggaatgacatatttgaagatattggtgtacctaatagcaaggtttccattgtttcaatgcaccccttgacctctaaatactttacacatatcgtttttggtgttcttccttatccaaaagatgcttcaataagtttaccggctctaagtgtgctgagatcatccttaatagagatgatgctccagcaggtgaacctatccttaacaccatcactgtttgggcacccatcttctttcgagctattgagattccctggaggaattacagtaattcctgcacagtctggttttacatgggtgaacacagaccccctattcaactttatgttgaacaactccatttatcagattttgggtaatcttacagagctcaaggatcagctgaaacttggattgaacttaaggtcatacgagaaaatatattttcagttcaggaatgagattggttcttcagttgaagctccagcaactattgtggcatcagtattagatggaagcagcaatcttttaccagatagattgagacaactagctaagctaatcagagaacctgatgcgaggaatcttggacttaatcactctgtatttggtaaacccatctccggctccatcgccatcacaatcaccttctccaagcatgccgacatccttgtcaccttaccctgcatcaagtctccctggtccagctttagccccttcatggagcagacacccttgctttccatgttttag

SEQ ID NO: 40896 - DNA, 183 bp, Zea mays
  Peptide Sequence Number=SeqID_84271
atggggtgcgttcgattcgagcagggagatagagctgatgaagatggcccgcgtgcaagtggctggcgcgagcctttcttcccggtacctattatagttatagcatccattattgcgacacctgttattggtcatttaaatgcaaacattagtgttctcgaggctctagtgatggtgccctag

SEQ ID NO: 40897 - DNA, 456 bp, Zea mays
  Peptide Sequence Number=SeqID_84272
atgagggtcccgagcaccggtctagcgaaccaccacgccgctatcgtcgagggacgacaacgtcaccatgatcgtcgtccattggctctggtcatcacaaagctcagtgacttgctaggggaggatcagggactcggggacgaagacctccctagtaatcccctacaccagaactccgacgaaagggagggcttggccttctactgcttgcggtcgagggaaggcccgctggcatggagcctgaatggcgtgctccttctcctccgggtcctattccagagtgagacatatcgagtctcaactactgcaaacaatctaatgccagcgacgaccgtgtgtagtgtgctcgactgctcgtgtcttcgacatcgactcttcgtttacggtctgcccgagcgcccgacgggcgacagccgtgtcttcggcagacggcagctggagcctggagaacactga

SEQ ID NO: 40898 - DNA, 291 bp, Zea mays
  Peptide Sequence Number=SeqID_84273
atggagaacagcgggatccaatcgcagaggagcatgtcttcgatcagcacgttggctcagtccagcgatcagcatacggcaggaagtagcagcaacccgaatgagtttatgaatcaaggtcttatgctctggaaccagaccagacaacagtgggttggaagcaaaaaacgccactctagatctcaacagcctcgagaaccaaagttgagctttcttaagctgaacttgtactcgcaggaaatggtagatttgcttgtggacgcttgggagcaagaaggcctttatgattag

SEQ ID NO: 40899 - DNA, 288 bp, Zea mays
  Peptide Sequence Number=SeqID_84274
atggcgttcaccagcccacgacggcgctttccagacgcgatgccccagaggttggctaaggtctacgcaacggacaacggcgaggtccacgcgctgctggcactacgggcttgctccagttattggcgccctaccacaactcctgagaaggggctcgccggcacgctcccacccgtcgtcgcaggactctgctccctaaacggcctctacctccactacaacgcgctctcccgatcttcttttaattctcctccgattcgtcacctgcgcacggaatcccctccgtag

SEQ ID NO: 40900 - DNA, 651 bp, Zea mays
  Peptide Sequence Number=SeqID_84275
atgacgatttcatccttctttctgctgctgctggaggagttcaggcttcagcttcagcacctcatgccccactccatcctccaaatggcaatcttcgtccacctctgcgagatgttcgtgggcgtgggccactacacctccctttttctccacttcttcgtgttggtcaagtctgggaagagcaaggacgatatcgacgcctactatttccagacgaggacccggaggagaaggagcacgccattcaggctccatgcctgcggagtcaaagactgggaacagcaacctaggtttgggaagcatgttgccactgcctccattacaaccacagcgatcaccactacctccttctgtgagaggcagcagcaacagctctatttcagcaggcattatattgtcaattctttgaaaggaaacaagagaaaagcaagtggaagctctatgggtgcaccaattggtcagtcgtcatctttagcacaagcagctgaaaataaagatgcaaataaattggttgtcgcaggcacaagtaatactggtactagagctgtagcttctgttgatatagcgagccttgatgatgatgatgaggacatacaagaggagatgactggaataggaaagagagaaaagaggattggatcaatgcagtaa

SEQ ID NO: 40901 - DNA, 426 bp, Zea mays
  Peptide Sequence Number=SeqID_84276
atggcgatccagcgggagtgggaggcgcttgaggcagagctccatcgccttagcgactggcacgtccgactggaggagcgcactaaggcgacgtctcatcaagttgcctccgaacgatccaaactcgaggaagaccataaggattacaagagggaccttcgaagggtatacgagttacgaccgggagatggaggcatcttggagggagcggaaggtggcccgaagccggagggaggaggccgcgacctaaaacgagggccttcttgcggagttcaagccaagctggaggccaaggaccaaattctagaaacccagcgggtgcagcaggcggagtccaccgaagagctgcgcaaatggagactagagctccaggacatggctagcaacgtcacccttgtcgaggaaaacattaaggaggagaagtga

SEQ ID NO: 40902 - DNA, 498 bp, Zea mays
  Peptide Sequence Number=SeqID_84277
atgggtcgagcgtgtgggcgagcacaaaggggggagaggcgcgaggcggccggagtccggcgtgagagtggtgggaatcccgcggccttcgtgttcgtcccgcgcccaggtcggctgagagccgccgtcgtcacagggctagtggggcgccatcattgcctatctggcggagctagccagatgggacaccggtcttgttctctgcggcccgagtcggctcggggcagggtgatgatggcgctccctgttgacgtggcgggcctgtgccctaggtcgggcgacgtggaggctcctccaaagccgaggtcgagtctgtcttccatggccgaggccgagcccgagcccctgggtcgggcgaggcggaggttgttcggcagaggccaaggcggagtccgagccctggggtcgggcgaagcggagttcgtcgtcttccggggcctagcccgagttcgagccctgggtcgggcggagcggagtttgtcgtcttccggggcttag

SEQ ID NO: 40903 - DNA, 546 bp, Zea mays
  Peptide Sequence Number=SeqID_84278
atgtcgtcgattccgccgccggcgggcgggttgtcagccgccattgtcgttgtcgcgcggcggtggaaggagtatcatgttgtagctgccgtcgaaggacatgaactcaagactcccgaaacggagcaccgtcccgggccggagaggttgctggagactgcccatctggagcttgacgggaagttgttcgtcagcacgcagcaggcccctacctggcgcgccaactgtcggcgtttcgagaccgggggtccctcaggccgacaagtcgggcgacgtggaggctcctccgaagccgacgtcgagtctgtcttccatggccgaggccgagcccgagcccctgggtcgggcgaggcggaggttgttcggcagaggccagagcggagtccgagccctggggtcgggcgaagcggagttcgtcgtcttccggggcctagcccgagtccgagccctgggtcgggcggagcggagttcgccgtcttccggggcttagcccgagtccgagccctgggtcgggcggagcggagttcgccgtcttccggggcttag

SEQ ID NO: 40904 - DNA, 216 bp, Zea mays
  Peptide Sequence Number=SeqID_84279
atggacattgtctatgtggatctcgatgtgcttaacttagatacaactggtcaagcaaaggatggaggcaagaagaaattcgagatacctagtgcacgggagaaggtcaaggagaccaaggcgcaagagactccaacctgtggagattcttgtgaagagattgattttgatataaggaagaccatggcactcaagtttgatctttggatcacttga

SEQ ID NO: 40905 - DNA, 588 bp, Zea mays
  Peptide Sequence Number=SeqID_84280
atgaagcacgacgacggaggaacagacgccggaacgtgtggcgacatcacgaggctggggaacgggaccaggcatagcccgtatcccgggacaaagcttcagaagtgggagaaactcccgacgagcgagtacaccgagaaagacataattctcgccgtcgtgatcgccgacaagctcaggaacgagagcgggagcaagccgagcaagatagcggatggcctcccgcgaactccggacgtggaaggctaccggcggctgcttactcgagcagctaatcaccttctgactgggcgaactgggctgaaaccgagctggaggaaagaggaggaacagctgggcgaggccgcgacgagggacgctagggaggagcgcgcgtcacagggagccactcggctgggcgtgcgcagggagctcagggagagagaagcaggcgcgatggagaagagagaagaacaggggcgcgcgttaaggctggagcaggagcacgccggcgagctcgcgcggccgacgagcagagcaggagggagctccggccggactcggcagaggaagctagggggtcatgaaagtcgcctagagggggggtga

SEQ ID NO: 40906 - DNA, 600 bp, Zea mays
  Peptide Sequence Number=SeqID_84281
atggagcataggtatgatcctacctccattaatcatgatttggtgttgatgggtcaaaccccagacgatgtggacgacgtgcacgatggtctggaggatctctttggttccattgcccctacccctaaccctaccataaaccttggcgacgacaatgtcgctgccgagggcgaggctctcccagatactactgcctccactacgacaagcacaggtagaaagaggaaatgcacatccgatgtctgggaggatatggataagattttcgccactgaaaatgatggcattagtagcagttctggtctgggtgctggtctgggtgcctttggtgccagtagcagttctgggatggttcctgaactctcaagaaggacatctgctagtgctttgcttcatgcagcaagcactcttgccctgccattccctgccgcacccgctgcttgcttcccctgcttctccttctcgtctcccatggccgtgcgtgcccaggctcctactcggccgcgctctgtcgagctcctccccgaactccgccccgctatggcgctggccgcctcatccatgccggttctctgctcggccatggaaatcgcgacctga

SEQ ID NO: 40907 - DNA, 288 bp, Zea mays
  Peptide Sequence Number=SeqID_84282
atggccaaagaggcaggtggtgttctgcgggttccttgcgggagtcgccgtcgggctgctgctcccactcccactggtggtaaacctgggcgtagtaggaggattgctggagttggggttgagcggttgtcagttcccctgccagctaagggcttgttcgagaccgtctctgaggctcttgacgagtatgcccgagtgttcagcaaacagttgtcagaggtccagatcaaagccttagctgcgctttttggctcgactgttccattggagctgcaagggtgcagctga

SEQ ID NO: 40908 - DNA, 165 bp, Zea mays
  Peptide Sequence Number=SeqID_84283
atggtctgtggatctgcttccggctctagatctgatctggtaagtctctctgttcttctatctggctatatctctgtgtctctggatctgctgtcgctggatcttctctatcgccgacggagctggtgctccgaccttcggctaaggtcgaggtcgtggccgtga

SEQ ID NO: 40909 - DNA, 324 bp, Zea mays
  Peptide Sequence Number=SeqID_84284
atggagaagacagaggagaggcagatccacagatccagtacaccggagtccatagcagaggggggaagcgctagggaatggggatacaggatattgttaccgacgacgtgccgaggatggggcatccaggaagcacggcgcgcgatgaccgacgcctcgacgtcgacggaactgggtgcgaggcggcggacgacggggcgaggcggcgagccggttaggcgttgcttgaccaacctgaaaccacgccccaatgtcctaatagcaattaaagagcacggaaagccggaaagggcagctggtgaggcagtgattatgtcccgataa

SEQ ID NO: 40910 - DNA, 1032 bp, Zea mays
  Peptide Sequence Number=SeqID_84285
atggccatgatgatgtatatggaaggggaactgttgatggtgcatttgcctggtcgcacagataatgaaataaaaaacttttggaataccagaataaagaagactgagaaacagggtttgcctatctatccggaacatgtgctttctcaggttaagcaaccgcaacaagacatgaactgtgaaactcctggattgtcacatggcaagaaacggataagagagattgagattcatgatcttatggatgtcaaaatcttatttcagcaccttgactatcataaggatctagtggttccaacaaaacctttgaaacgccgtgcatctattggtagtctgaaaatttctggtgagactaaggaaacctattgttccactgatttgaactatgtattggcaaggagtgagtcggtgcctactggtagtgccattgccagtggttatccagtcgagctcccttcaatccaaagttccagctctaccctaagtaatgactggttgcttcaatgtgtttcggcttctgttgaacaacagattcatagctccattcaatctacagaaaccatttcatcgcaaaccactggcctgctccacacaatgtctgaaatatcttttgaaacactgattccaatggtataccctatgattcattcttttggctactctgaacatgaaagctctccgaatactgatattcaagctgcaaacttatctttaggttcagatgatgttagccagtattatcaagttgctagtttttttgatcctggggtccctgatacagagctaggggcaagtttcttcaatgacacaccaccagaaacaagttttttgaaccaacagaagcaagttggtcaagcaactacccagacaagcactacagcagcagcggctgctgcttatcagtctagggcatctgggcagggcaagtgcctggttctcagattggaggcactggttttcagggtggatattgacagaactagatatatcaactctcaacattgttttatgacccacctttgctactactag

SEQ ID NO: 40911 - DNA, 978 bp, Zea mays
  Peptide Sequence Number=SeqID_84286
atgtggggtacattcaggaagattgttataatggatgctaggtggtctttacataccattaaagtttggggcgatttactaaacaaaaatgcactacgctgggcgttggctaatgagaattatagcatcataattgggaccatgtttcggcggttcagaaaacaagagtgtctcgaatcaactgaccatacaacaatacacttcaaaccgttccatcacaacacccattattttgaacatcagatgggacataatgccggtcgcaaaccattcacagacatctctagcaatatcattagaggtgatcaaaatgaattgctcggaccaatggtcgatgctaaggagcgtaagaggaaacgggatagggaaagatatgcagcgatgtccgttgaacaaaaaaacgagaagaataggaagcgtcgtgaagcacgtcaacaaaacaagggacacaatgtgatgcccaatgtgtcaggaggtgaccaaaatgaacagcttaggttgtataatcagacaccaaggcagaaagagggaaagttagagtacataagaaaacgtagagcactgcaagcaagcactttgaatcaggggtccatcgccatggaggtcccaacatatacctctgaggttgtacaccctacagcagatgtatcagaacctgattcatcctctgataacacatgcgactgggttatccctgaatacaccagtacacctttcatgccagcttcaacaaaaactgaggatgtcgattcatccgatatgtctactgggccactaagacgtaaacatcatgttctgcctggtgaaagacaagctatcttagcccgtcaaaacaagaaatttgaagcaaacattgcacgtaacatgactactttgactgaggatactatcagtgacgtcggacaaatggatgattcgacacaacccggttcaactatagagatcaacaacactggtaattattctaaccagttttaa

SEQ ID NO: 40912 - DNA, 3354 bp, Zea mays
  Peptide Sequence Number=SeqID_84287
atgccgacctcctcttcttccgctgccgctacgccgccggccgacgcctcgccgccggccaacgcctcgtctgaggagacgctgagtagtttgatggcggaggagttgcgcgccggcgattttgtggattttggcgtgtcgcggatgtcgtcggtccacgtgcaagatatgcagcggttgggttacttcggcggcggagttgctcgtgtcccggggacggaggaagtcctcgagccggagggcgagttggttgtgttcgaggcgttcttcgccgccggtctccgcctgcctgcgcaccaatttgttggcgaagtcggcggacagccatcggtcgaagtctttgcgaagtattattgcttgcactggcagaagaggatgattggagatgaagttgctcagtttgggtcctgcacgtttacgccgaagaccggcaagaccacgatgcaggtggtcgagttggttccttgcgcccgcaacaagtggggcaactggaatgagttttggttttacgttgctgagggtaccgtcgaagaccatgagggactccccgtgtccgagatgtgttctcatttttactcagcatacccgccctttgaggtggcggaggaggatgcggacgaaggggcccttcggtgcgccgccggcctgagcagtgggcgcgatttggttgaagaatttgtggcatacggggtatggcccttggcgcatggctgggcgttgggcgaagtgtgccctcgccagatgcctttccatggtgggagggtggtgcgaagtcccgccttcgcgctgaatctgcaaaaccgcgatccggccgcctttgtgcgtgaggcggaggatggggcagtgcggctcgttggtcgttacgtgcaaaggagagagggccagcgcagctgggaaatccgcgggtcgaatgaccgtctgaacagggtttttgaattgaatcaattgccgtatgacggctatcctggtcaagacgatgtggaccgccgtgggaagaaaccggtggtggagactagagacgaccctgcgccggcggccgccccatcctctaagaagaggaaactaggtactgccatgggaggacttggggtttccgatggttttgctagagagttgatgaggacatgcgcggccccggggggaaggatgtcttcgcccgagctctgggagtcttcggctcggatgctgagggttaccgggggttgttggcctaggaatgttcctatcccccgtgcggctggcgaggacttttctacatctcgcatggttcgtgaatggagagtttttccttacaggcggaatattgctgctgttgtgtcggcagtgatggacaaggatcgccagggagctgcacacaagcgccaggcggttgtcaggcttcatgaagccaggccgaagaagcaacggggagctccgaaggctacggcccccggcggaggcaagccgccgctggcggcaaagtcgggcgtccctgcatctagcaaggcgccggaggcaatggcaggcaccagaggctccaaatcgacgaaggttgtgccgccgtccagcagagtgccggaggtcgcgaaggcggcccgagcgttgccgtcgtcaggcaagcgtgtcgtcgactttgccaccgatattagtgtggacgactatcttggtgggtcggacgaaggccaacttgctatagttgcgcctgccgcggcgaccacgacggctgccgccgtgccgaaggcgaagggcggggctcttagcgccggaggcgagatgtcggcactcgcggcggtcagggatgaggcgggcgctgtgtcccgccggctgaaggaggtgacggaggcactgagtcaggtggctgacttcgccaaccgcacaacgtcgggggccctcacggcagttgtgtctgccgaagtcgagagacttcggacgcaacatgctgacgccgtccgtgaaaaatcggccgccgacagtaagtgccgcaagctggcggacaaggtggccgcactggagagggagaagactgacctccgacgccaactggtgggggagaggagggagaccaacgaggccctcgcccaggcgcaggctgcgcaggcggaggccaatctggcgcgggcggagggcaatcttgccagggagcgcgccgagcagctgcacgatcggctcaccgccctggagagccgtgtggagagggccgaggccgcgtcgcgcgcggaggcggagcggacgcgcaaacagcttatggattcataccatgagctgggcgcgcggaccggtgactttgaagtgccggaccgagagcccggacttcgctgcctggagtgggtgcaggaggagttgcaggcactccccactatcgtggaggggtttatgtcatatgcctccctggtcacctgcgagggggcgatgaacgcgctctcctgcaaagggtgccggcacttcgaggtcttcgaccaagccgatgaagattttgagcgagatatctacaaggttgaggaccccatagtgaaggaatccgccggagccatctacgaccagatgtggggtccgcacggtcgcgaggtggtcagggagcgggccgagacggcgagggctcaggcggcgcgtggcgagagggtggatgacttcagggcgttgaacagcgtgctgcctgacccggagccgaccccggcggaggccgcgtccggggccgccctggagccgcccccggagactgcggaaggcgcgccggatgcccccgcatccgctacggccggcggagacctgcctccagagaccgccgaaggcgcgcctgatgcccccgcagccgctgcgccgagtgctgaagatcctgcgacggtggcggcggaggcgacagcggaggcaacggcggaggctcccgcaacggcagggtcttcgcaggttcaagattttgggcctgcgcacgcaaccgccactactaaatttttggcggcttcaaccgtggatggtggtaataaatgtgatggttctgcatctgagttttctgattttgctgactctgggagctcggttgagtggactgaggagtcgtcggaggaggacttggactactttgcggccttggatgtggctgcggcggaggcttcaccgcatgctgcggacacagaagatgtgcctggtcctagtactgggcgccggcgacgaagggcggttgcgaagcgcagagtgagtgaagcggagggaggtcggcttcgtgtgagtagggctggccggcaggaactattgtctttgccagccgccgtgagtacaggtgaaggggaattgcaaagtctttttgcgggtgaggagcttaggataatgttgtttaattatagggagatgggaattattcctaaggttgagccgatgtag

SEQ ID NO: 40913 - DNA, 264 bp, Zea mays
  Peptide Sequence Number=SeqID_84288
atggccacgcacagggccgggggctcgcgcgccatggccgaccgcgccgagcgcggcgccatggccgggccacgccaagcaggggggtcgggcacgccgcacggggaagggcagcggctgcgccgcgcagggagagggtcgccggaccgggcgggcatgccgcacggggaggggccacggagctggggcgggcatgccgcgcggggagaggctggggcggtggaagaagggggcgaggaagggagagaactctgcataaggtaa

SEQ ID NO: 40914 - DNA, 942 bp, Zea mays
  Peptide Sequence Number=SeqID_84289
atggctgaaaggtaccaacttccacgaagttgtgttcctccaatgacaaggcggaaggattgcgggtgtcccccatccgggggctcggaaagtggaaagacacggtgcataagggagcgcgaagacatggtcgcctttcaagggggtcaccctccttttaaaggcgactctccctacttgtgtccccagccgtcgtgggctgagtcttctccaacacgctccaaggtcctccccctacggcgtgggggctgggtcccacgcgtcatgcaaactggcccggggcagaagaagccaaaccactgcgcccgcggcgggacaggcggcgcctcaggcaggagaagcaagcgacgcttcgccttcgccataatgaccgggtcaaaaaagggaccgggagagggggataccccgaaaaggatccttctccatgaaggaaacagccgcctcagagcacttgggttccacgcccactactggtcagaggttcgaaggtcggcccctcggaagggttcaacggccgcctcaggccactcgggctccgtgcccactactgatcagggcgggaacgatcttgtaacggaatcccatcagagggaggcatcgagccctcgaaccccgtcgaaaggggaccgggtccggcagatcacccgcagctcaccggagacaccatgttcggcgccctccgagggcaacatggcgctttcccccctcctccttgcggaaaggcgacgcaggggcgtatgtaaaaaagtcgagtctgtccttgaccgtcctctcgccctgtgcagaggctcgggggctgctctcgcaaacccggctccggccaaaccgttgacagcgtcaacataccagcccgagaacttgggacccgaccgtgcacccgggctacggccagctcgcatgagggaacaaccagaccagccgaagcattgcgcgaggcattaa

SEQ ID NO: 40915 - DNA, 54 bp, Zea mays
  Peptide Sequence Number=SeqID_84290
atgcccatcttgctaaagatctttctgctaagtgcaaagccaatgagggagtga

SEQ ID NO: 40916 - DNA, 3132 bp, Zea mays
  Peptide Sequence Number=SeqID_84291
atggcccatccgaccaagtcccccgttgaacaagtttgcgaggcggagcggacaaccaagtcccccaccgagcaagtctacaaggtgaagcgaacgaccagtacccccgtcgagcaagtttgtgaggcagagcggacgaccgagtcccctgagcaagtcggtgaggcggagcggacgaccaagtcccccaccgagcaagtctgtgaggcagagcggatgacaaagtccccgccgagcaacccgtcccggtcatccagccagaccccatatttcatcaggacagcatggaacgactcctgccaagctgaagctattgcctcacttgtccagaaatacaattggagggaagtcattcctatcatcgaggacgatgattccaacactagatttatccctgatctcgttgatgccctgggacatgtcgatactcgtgttccgtacaggtgcaagatccatccttctgctggagaagatgagataaagcatgctatatcaagcttaaaagaatattggacaagtgtctttgttgtgcgcatgtcatatcagttagcccttaagtttttccagcttgctaaggatgagggaatgatgggccagggctttgtctggattacagcatatggtttgacagatatcttcaatgtagttggttatcctgcacttgatgtgatggaaggtgttgttgggattgagccttatgttcaagaaactgcgaaactaaacaaatttaggcaaagatggtgtgagaaatataggtcagaaaatcctggtacatcaattaatgagtctataacgtctggtctgtatgcgtatgatacagtatgggcaatagcattggctgcagagaaggccggatatgttaattctgattttgtgctatctgaaacaaacaatggttccactgatttcaacaaaataagtacttctagggctgctaaaaaatttcatgctgcattcttggaggttaatttcacaggcattactggccaatttgtcattcaagatatgcagttccagttagtatcaacaacttacaaaataatcaatgtagttggtcatgagaggagagcagttggtttttggactccaggattgaacatatccagaattctagaaaagaaagatgatatcagtactattgtatggccaggaggcagtgagaagacacctagaggatggcttttgccagtgaataaagtactcaaaataggagtacctgggaaatctgggtttagcagttttataagatctgaagatggtatccccaagggtttctgcattgacatatttgaggaagttattagtaaactgccctacaaagttcccaagcactatgtggagtttggaaatggaaaaggagaaagtaatggaacttatgacgaactcgtctacaaagtttatcttaaggaatttgatgcggtagtaggtgacataacaattttagccaaccgttctctatatgtggactacactctcccttatactgagtccggggtacgcatgctggttccagtttgggaccggagacagaagactgcatggacattcctagaacctttaacagctgatctatggttacgaactggagccttcattgtcttcaccggctttgtagtttggtttatcgagcacagaacaaatcaggaattcagaggaccgccagccactcaaattggatcactcttctacttctccttctcaacatttgtatttgctcatagggagaggattgtgaacaacttgtcaagaattacagtagtagtttggctttttgtggtgctaatattgcagcagagttatactgcaagcttaagctcaattctcactgtagaacagcttcaaccaacagtcaccaatttagatgaagttatcaggcgaggggattatgttggctacctcagtgattctttcatgcctgagcttttgaaaaggttgaaaattaatgaaacaaaaatgatcgctttcagctctcctgaggagtacaatgacgccctatcaactagaaaagttgccgtcattgttgatgaaataccatatctcaaagtgtttctctcaaagtcaaggcttcgtctactcaagggacgcggcctcgcctcgcccgagcccagcctcgggcgggaactcaccaaccgaccgtatcgcaggtgcattcaatgcaaggatcgtctggcgccttatcctgacacgcgtgcctcaatcggcaaggtcgaacctcaggcgccacaggaagctccgcctcgcccgaccttgggcctcggcctcaggagaagtctccgcctcgcccgaccccagggcacggcccccgcctcggcctcggaaggtggtctccgccttgtccgactccagggctcggcctcaacttcgacctcggaaggtggtctccgcctcgcccgaccccagggcccggcctcaacctcgacctcggaaggaatcgcgtcctcgcccgaccccggcctcggcctcaggaggagtctccgcctcgcccgaccttgggctcggaccgaccacgccgcaggggggctcaaacgctcctccgacggccacgacaccacgtacacagggctcgaacgctcctccgacagccacgttggcatgtacatagggttctggctcctatctgtcggacacgcattccctcgaggctctccacttacgtctgaaatttcaaggggaatacttgaattagcatcaaatggcagaatggatgaactggagaaacagttgtatggcgatacatcgtgcccggacaaagatgactcccaaacttcaagcagccttacatcgcgtagctttcttgggttgttcatcatcactgggacatcttcattactggctctaatttcgcatgttattgcaactctttatgatcatcggagtcattggatcaacggcggcagtcagatatcatggcgtgaattgctcgctgttctcttcaagatctttcatgagcgtgatagctctaatactccagataaggaggagcctggaatggaaggtatatatcctactgcagctgagactccatgtagcatgtctactcacgtcatcaagaacgctgattcaggcactgatatggtaagcacaccagatgaccagaagaagaaactccatgcaattgaatcggggtcctag

SEQ ID NO: 40917 - DNA, 699 bp, Zea mays
  Peptide Sequence Number=SeqID_84292
atggagttcatgcttacctcacccttctctgtgtcgcggaacagccaagcacgttacattagcactgctataagtgatggtccgggatgcttgatgctgaggtgtcctgatccgtcctgtgctgctgctgttggacaagatatgataaattcactggctaatgttgaggatacggaaaagtatgggcgatatcttcgcagatcttacattgaagataatagaaagaatatgcaccagggctatcccaaagaaacactggtgcgtttccttaaggctagagagtggaatgtagcaaaggctcataaaatgattgtagaatgtttgaattggaggattcaaaatgaaattgatagtgtgctggagaggcctatagccccagtagatttatacagatcaatatgtgattcacaacttattggcctgtcaggatacacaaaggagttgactggacattgtttggttattatggtctgtaggatcataggtctcccaatttttggcattggtgttgggcatagcacatatgacaaagcttcggctacaactacagccaaaatcataaaagtgtctggtttgaagctatcagcactaagccaaataaaggattccggctctcatcaagtgactccccctcatgttgactttgcggatgtctcaattctagtggtggagctacgaaacaacaatccaatgtcctga

SEQ ID NO: 40918 - DNA, 267 bp, Zea mays
  Peptide Sequence Number=SeqID_84293
atggtgaataggaacggtatcgttagatttgacctacttttgttgaatgtgcagactgttatgctagatttattttttatgcgtctagaggtgctggttgcgaggaagatattgggaggctcagctgataaaactggtgatggcgatgacttggcttccggcattgctgataatagcaaaggctttataactattcatgagattgaactgctagccaaaagcgactgctgtggtcatttagatgtagacggtatcactccattctaa

SEQ ID NO: 40919 - DNA, 303 bp, Zea mays
  Peptide Sequence Number=SeqID_84294
atgaagctcccagagccaggaaacgaactctacctcgccggagacacaggatcaacgtcgccggacttcaccagatcactggccggaacacacgccgccgacgagcccgacagcctgcgcacgtggcccgaccaattccggccatcaccgacgatgagccactataatctcgctgacggggagtacatcctcgttccggagcaaggagttgctcaggaggtagcccaggatccagcaccagagtctgccatcgaggatctgcctgccccagctttggaaggcaagccccgattttatgcataa

SEQ ID NO: 40920 - DNA, 183 bp, Zea mays
  Peptide Sequence Number=SeqID_84295
atggcagtcggggtcagtgaggcattgtacaccaaggcggtgggcctctttctgttgccagggaatcgagggagatggttgatgttctctggaggatatggttgctgcagtgacttggccgtctaccttgccaccgggttggacagtcgagtgggaccctacctcagctggggaggagcatga

SEQ ID NO: 40921 - DNA, 219 bp, Zea mays
  Peptide Sequence Number=SeqID_84296
atggtgtctggcgagatagctcgaatgatgggaagtcctgggttttatgatgtgggtgaagtccagatttgttccgacctcctgaatcacgcgtgcagagatcacgacggagatcacggtggagatcgcggcattcgcctgaggttgttacagagtccgcgcggtgaagaaggtcctgacgtgggggtcccaccggtcattgatgcggtgtccgactag

SEQ ID NO: 40922 - DNA, 810 bp, Zea mays
  Peptide Sequence Number=SeqID_84297
atggaggttgagggaatgggggtgcagcaggtggaggacggagaggaggaggtgcaggcgccgaggaaggaggaagcgtccccggcaaaggagctcgatctcctcggcgctctcggctcggatcaaccgccggaggtagaggcggtggcgccgagaaaagagaaggagaaggcaatggtggcggagccggaggacgacaagtcgccggcgactgcgcctggtggcgcggagaagaagcgcacgttcaagtgcaactactgcctgcgtaagttctacacctcgcaggcgctgggtggccaccagaacgcccacaagcgcgagcgctcgctcgccaagcagcgcggcgccgcagtggctgcggcggcggggcgcgggctgtacgggggcgccgatcccttcccgccgccgcaccacctccgcttccaacacgcatggccgtactccgccggcggcagcaggccgtcgtcgttccctgggttcggacggggctctgccgcggcgccgttctacggcatgcaccactggtgggccgcgcacgcgcacgcgcacacgcagccgtctatggcgggactcacccgccgcaccggtgccgacgaccgcacagtctacgcgcctcacggatacggctcctcgtcgaaggcccctgcccctgccgtcctcgactccgggctgtctggcctccggtggtccggcgccgccgtcgacagtggcgctgcagccagcggcgaccctggcgtcgcacagcatgaagcgccaacgcagcacgaggaggcgaagagttgcaagatagacctagacctcaggctctag

SEQ ID NO: 40923 - DNA, 84 bp, Zea mays
  Peptide Sequence Number=SeqID_84298
atggaggtgggggctgtcggggttgggagctccttgggagtagtgatgtgcggccaagggaggtggtcgctgaatgctgactga

SEQ ID NO: 40924 - DNA, 276 bp, Zea mays
  Peptide Sequence Number=SeqID_84299
atgtcggtcggtaacaccccggtcagtaccaaccacgtccgctccaacgacgtcgctattgttcgccttgaccggtcgagtaggacggtgtcgacaactgtagcaaaatggttcgtgccgattgcacgagggacagtggacaaggtttacagccaacaggctgtttcggtctggggcaccggactgtccggtggtgcaccggacagtgtccggtgcgccaggctgcctcgacctgaagacgccgctctcaggaatttgccgacggcgtacggctaa

SEQ ID NO: 40925 - DNA, 132 bp, Zea mays
  Peptide Sequence Number=SeqID_84300
atgacgacttataggccgctcgagttactccacatggatctattcggcctaatcgcttacataagcatcggcgggagaaaaatctcaaacccaagagactttaaagaggttcttaagacgggctcaaaatga

SEQ ID NO: 40926 - DNA, 462 bp, Zea mays
  Peptide Sequence Number=SeqID_84301
atgtggacgccctcctcagacgcaggcgttcctcctcggacacacctcgaagatgaaaacccgtcgttgagggaatccaccggcggcgcaaaaagaagaacccacgacggcgctggagtcacacgaggtcaccaggtggttgagctcaagcctacggagcccgcggggtccgcggccatcaacggaagggagccagcttctgacccagtgtttctgtctgaggcaatccctggtgtcgcggacggtttgccgcaagggcccacacgaggcgaaggtcatggggcagggggcacgtgcgcagtcgagcgcgaaggggaggcagaggcatccaggttctgggatgtatactactgggactcctattgggtcatcagctacctcttcacctaccgtgcactaggacaacgggccactaaacgtggatctgacctgacccaagcggcggcggtggcgagggagtga

SEQ ID NO: 40927 - DNA, 90 bp, Zea mays
  Peptide Sequence Number=SeqID_84302
atgggagaccacgtctcaggtcgcgtgaggggtaaagtctgcgggcaggttcactcagaaattcgacagattcaggtgttgggcttgtga

SEQ ID NO: 40928 - DNA, 175 bp, Zea mays
  Peptide Sequence Number=SeqID_84303
ccgtgctcgcggttatgagcggccaagggagctccagagattagtgatacttgatcagagatactttggtacaggtgacaatgagattgatggttctgattacgattatggtattggcgaagatgaagctgtggaaggagacttccaggagttccaagactacgacgagttctag

SEQ ID NO: 40929 - DNA, 63 bp, Zea mays
  Peptide Sequence Number=SeqID_84304
atggctgcggctgcggcatcgttgctgctgcctgcagtatgtcttggtacaacacgccaatga

SEQ ID NO: 40930 - DNA, 2697 bp, Zea mays
  Peptide Sequence Number=SeqID_84305
atgacgatgaagcagctagtacagttagtggccaagccgttaacgccgccaccaccctgctgcagctcctcgtcacaagacgatgaagacgacgatgtggtgcggcaactggttatgggccgttggcgttcgtccctatcgtcaggcctccgtgccgccctcgcctgcaccatcgtgggcctcgtctccctctacgcaccggacgccctccgcagacacatcaccttcccggccttctcctacgtcgtcacggtcatcctcgtcacggacgccacactcggcacggccctgcgcggcgcggtgagcgcgctccacggcaccctcatgggcgccgcgccgtccgtggtggcgctgtggctcgcgcaccgcacgggcgccgcggagtcggcggtggccacgtcggccgtggtggcgctgacggcgttcgcggtggcgctcccggagtcggtgggcccggtggcgaagcggatcgcgctggggcaggccatcataatctacgtggcccgcaggttccagccgggggagcgccccagccgcggctgggtgctgctgcacccggccaacgtggtggcgtgcacggcgctcggggtggcggcggcgctgctggccgtgctgcttccctggccgaggctggccacacgggaggccaaagacaagagcaggacgtacaaggtggttgcctcagagagggtcagggtcctggctgatgccttcgtcgttgccgctgctgtgggtgtggaggaggccgatgaggggtgcagcaggcagcggcgatggcagatagcggcgtgcatgtcggaggccaagcggctggcctccgcaagtacaacactcctcagccgcatgaacgccatcaaggaggatttgcagtgggagcagagagcagtggcggtggcggtggaggagaaggataacaagggcagcatcgagatgctcctggcaggaatgcagatcgcactcgcgaccatgcaacaagccgacggcggccatgggaggaatataaacatggtcggccttgtcatggcgatgagggaccagatacgcctcgcgcttctcacgcccaacaacaagcagcagagcagatcaacatgcacgcccagctaccagttgccagctacgagcttcgactatcgcaaccacgagcagcatcagcgggcgtcttttttgttcatcttctctctctaccagctccatcattgctgctgcgatggtggtcccaagacgccttcgacggcagctaccatgctgcccaacgccaagcaggtagcgccggcggcaaccacgacgacacgccaaaagctactactactggagcaaccagcagccgacttactgccggacgacgagcaagaagaagaagaagaagcaggtcagcatgtggagcaggacgacggaccatcttcacaagctggggcagccactgcaggagaggagaaggctacagcgacggcggcagcggcggcgaccaaggacaagcacagcaggcagacacgcagctgtcgccggctcgtggcggcggccaagtgcggcttctccctcggcctcgccgtcctgctgggcctgctcttcagcaacgaccacggcttctggtcgggcctcatcgtcgccacaaccatgacggcggggcgcgaatccacctgggccgtggccgtggcgcgcgcccacggcaccgccctgggctccatctacggcgtgctgggctgcctgctcatgtcgcagcagcagctcgtggccatggacctgcgcttcgtggccctcctcccctggatggtcctcgccaccttcctcaaacgcagccgcgcctacggccccgccggcggcgtggcggccgcgctgtcggtcgtcatcatcatggggcgccgctacgacgagcctcccatggccttcaccatcgcgcgcctggtggagaccttcataggcatctcctgcgtcgtcctggcggaccttgtgttccagcccggggcgaggccgtcggtgcaggccagggagcagctcgcccgctgcatcgccgcgctggcagcctgcagccgccttgttgttgctgaccctgctgcttcatcagaattattgaagagggtgcagcaggagctggccctcttgaggaagcacgccgcggaggccggcagcgagcccacctacctgtggctgccgccgttcccggcggcctgctacgaaacgatccagggcagccttggcaggatggcacagctgctgcagctctaccatcaggcacgccgctacatgagtgtgtctttgtcccagcagcaggtggacgtggacgatgatatcaacaccatccaacaccggcgcttcagcaacctcgcctccacctccctcggccactgccttcacatgctgacagcagcagaaggcaaggaggccaacaaaaagcccaaggcccaggtcgtcgttgaccttgaggctgggactgcggctgcctgtggctgctgctacagggatgacgaggtggtgggctccttcgtagcgcaggcaagagagctgctgttgaacgatgacgacgacgacgatagcgttgagcaacaacaagaggaggagaggtttttggcagtgtgctgcctgggctccattgtcctgtgcatggaagagatcctcaaggaggcccggcggctggaggcgcacatcctagacctcaacaacaacctgcaactcaaatcagcactcgctgatatattatag

SEQ ID NO: 40931 - DNA, 2472 bp, Zea mays
  Peptide Sequence Number=SeqID_84306
atggacccttaccttggcgccgttatcattggcgccgaggtaacacatagtggcgccaaggcatttgggcagtcatccacaagcccatttggtaacaacaactcgtttggaactccccagggatttggccagtcttccactgctgccaacaatccctttgccccaaaaccatttggcagcccgaccacgccttttggggcacagactggaagctcgctctttgcaactacatctactggtgccttcggtcagcagcaatccgctcccgcatttggcacaacatccactggtgcctttggtcagcagcaatccactcccacgtttggcaccccatcctcctctcagttcgggagctctacaccagccttcggtgcatcccccactcctgcctttggtgccacatcctctgggtctttgttcggacagaagccaagttttgggggttttggatcatctcctagccagtcaagtccttttggtagcacgttccagcaaacacaaccaacatttggaacgacgccggcatttggtaccatgactactcctgcatttggtacaagtacaccagcctttggcaccacaactgcaccagccttcggtgccacgactaccccagcatttggttcaacatcaacatctttattcggtgcttctagcaccccagtgtttggttctacagcctttggcacatctgctactggttttggaacttcagggactacagcattcggtgtgagtagtactactacaggttttggatcttcaagcacaccttcatttggcacatcagctagcgtgttcggttttggttcttcaccatcttttggacaaacaacagtttcttctggcagcactccctttggaacaactccttcaccctttggtgcaccagttcctgcatttggctcgcagacagcagcaccagcttttggacaacctcagtttgctaatcaagctggaggaaccagaataaaaccttattctcaaacaccagatgttgacagtgctactagtggtactcagcctgctgcaaaacttgattccatatcggcaatgcctgaatacaaagacaagagtcatgaagaattgaggtgggaagactaccagcgtggagataagggtggaccaaacacttctggaactcaagcagtggcacctagctttccgtcactaatacaacagaatgctccaaacccattttcgacaagcaatccattttcaacaaacaatccatttgctcctaagcctgctccaactattacttcaccattcaacacctcatttaacaatgcatcagttacaagttcgagcccattcacatcatcccctagtaccacaatgtttgggcaaacagccaacatttcaaccatcggcccctgctcaaacttcgaacttattctccttccaacctccaattcaaccagaactcctaccctgtccagtatggtcatgcagcctgctcctgtttcaaatccatttgggatgcttccagcaatgcctcacatgtccattggaaatggtggatcttcaccttcagttcaatatggaatatcaagtttgccggttgtggagaagcttcttccaagtagatcattgtccatggcgtttcctaggcatttggcacagagaaggataaaactgctgccgagaaaatataatccaatatctgatggcaaggttccattctttgctgatgatgaagaatctccagcaacaccaaaggcagacgctttttttgtccctagagagaacccaaggaatctggtaattcgtccaattgagcagtggccttcgcggagagaaactgaccgacaattgactgtgaagaatgctactgatttgaacaaatatgaagatgcttccattgaaagtgagcgtggtaagtctgcctctgccatgtcaccaagcagcaggcctcctgcagtggaaaatgacaatcagcatgaggctagggccatggctcaacatgggaatgggaatgctacttcagtcgagaggttattgcctaagcttccacgtgcagattacttcacagagcctagtatagaggagcttgcggccaaagaacgtgcggaggcaggctactgcggtcgagtgagggactttgttgtggggcgacatggctacggcagcatcatttttcttggggagacggacgtgaggtgcctggatctggagtcaatagtggagtttaacaaccgggaggtggttgtttacaaggacgacagcaagaagccccctgtgggtgaggggctgaacaaggctgcggaggtgactctactgaacatcaagtgcgtaaataagaagactggggaggagtactgtgaggggacaagggtggagaggtacagggagatgctgatgaagaaggcggaggagcagggcgcggagtttgtgtcctttgatgctgccaagggagagtggaagttcagggtgaagcatttcagcgcctatgggctcccttgttgttaa

SEQ ID NO: 40932 - DNA, 1287 bp, Zea mays
  Peptide Sequence Number=SeqID_84307
atggcgagggagcgggagagcatgaagcaacgatttccaagcagcagcacgcgttccaagtctgaggcagctgtgcaaacgcgggcatcaagagcaccatcgcccaaagtcaatcctgctactccaggtccaggcccaggggtgaaggccagaccaagatcggctgccgccgccgccgccgccaccaccatggcagcgacgaggaggcagcctgccgtgcctatgcccgtgtggaagtcggagacggcagaggaggaggtggtgcggctgcgcggggaggttgatgccttgcagaaagaggtgcagcgtctgctccgcctcaacgcagagctccggaccaaccatgacgctgcagccagcaacagatcacaacctcccagcaagatttcggcttccggagtagtcgttgcaccgccgccgccgccgcccccgccgccaccgccaccgccaccgcacctaaagcagcgaggagtccgtttcccttcagctccgagcacaagcccggcgagcaaggccactgcgctggtcgacatgtacaactcgctgcaggccagcaacaagccgtcaaagcgcacagacaaaagtagcagccatagcagcatcgttgacgagctgcagaaccgctccaggcacttgctagcgatcaaagcagacgtggaaacaaaagccgagttcatcaactatctcatcgacagaatccacactagtacctacaccggcgtggaacaagtactcacctttgtggactggctggaccaacaactctcgactctgactgatgagtcagccgtcttgaagcacttcaactggcctgagaggaaagccgatgcgcttcgtgaagcggcatctgaataccgacacatcaactgtcttctaacagagatctcttcctccttaagaagagacgaagacgatggtggtagcagtagcactctcaggaagatttcaagcttgctagataaattggagaagagcatgagcagactggtggatctaaggagatcggcgatgccgtcctacaaagagttgaggattccaacgaactggatgcttgattcagggatggcctcaaagatgagattggcatcggtgagtcttgcgaaactgtataccaagacagtcctcaaggaactggatgcaagtgggacgacggggaacaaggctgctctggttgctcagagcgtgcgcttcacctacagagtccaccagtttgctgggggccttgactgcgaagcaatgcatgcctttgaagagctaagaaggcgggttcagttgctctctcaataa

SEQ ID NO: 40933 - DNA, 411 bp, Zea mays
  Peptide Sequence Number=SeqID_84308
atggcctccttctccctctcccagccggggccgacggccacaacgcctgagacaaagctagggttcgagggagccccaaccgcggggtccatcgccaacgcgtggtcgtggtccatcgccaacgcgtggtccatcggatcaagggagcgctaccccaaggaggccgccgctgttgggatcaagggagcgctgaggaactcggagcagaggctcacgatctcgccgtccgtcagcggcctcccgccgtcctcgggaatgtgggacgaagagctcctcctgccgacgccgcagcgagacgagcttctcccagcgtcggcggaacacgagcttggtcacccacgggaggaaggagaagacctggaagctgaggaagttgtcgaggagctcccgctgcgtgttatgtggcgctag

SEQ ID NO: 40934 - DNA, 336 bp, Zea mays
  Peptide Sequence Number=SeqID_84309
atgcccacgcgcggctctctctctcaccccctgtctcatcccgcccacacacacgtgctcctctcgcacctagcgccaggtcgagccgccgccgcgccacctcgagcggtcgcgccgctgccacgccaccgcgagccgcgccgccaccgcgaccaggtcgcgccgccgcgacagggctgcgccaccgcgaccgggcctgcgtcgccgcgagcgggcctcgccgctgcccggctcgccagctcgcccccaacccgcccgggccgcgcctctgccaccgctcctccacctcgcgcgtcgccgccaccgtgcccaaccgcgctcgctgtgagattttag

SEQ ID NO: 40935 - DNA, 2685 bp, Zea mays
  Peptide Sequence Number=SeqID_84310
atggcggcgccgctgctcttctacgacctcggcctcatcgcgtcctcatcctccggtgatggacgcgatggcaactcctcctcctcccgcctccaactcttagccaccacggcgcgcgctctcgagcttggctacgccggcgtcgctctcgaccaccaccaccgcggcctcctcgccgactcccacgtctgccgcaccgacacttacgcgcccctctcctctctcccgctcccatcctcagacgctctccatcgtcgccgcctcgcctctcccgcctccgaggccttccgccagtacacccgcatcaccctctccctcgactcagctgcagccaccgcttcggcgctcgccccctccgccgcccgcctcctccgcacttacgaactcgtcgcagcccgccccctcacccaggccgcattcgatcacctctgtcagacacccctctcagcccaacaccttgacctcatttccatcgatttctcctcccacggtaagatgcccttccgcatcaagccacccatgctcaagctcgccctgcaaaaggggctgcatttcgagatcgcctactccccactcctttctactgacgtcaatgacaagaggaatctcattgctcaagtcaagctattggtggactggaccaaaggaaaaaatctcatcatctcaagcgctgctcatactgcttcccagatcagagggccctatgatgtcatcaacctatctgcttacttacttggcattcccattgaccgagcaaaagctgctatgtccacgagctgcaggtcacttgttttgaaggctatgaggaagaaacacttttacaaagaaacaattagagttgacaggttattaccaaatgaagagttgagttcaacaaaattcaagcttgctgattggatcggttggaattctgtatcatctgaaggagtagcaaatcagctggaaccttcttctaactttgatgaggttcctggttcacccgtatgtggtataatggaagggtcacacgaaaaaactcatagtcctgatctgtctgtcgtttccaaactgccagaacaacctagtcatcaagaacaattcccatcccagacccaagaagatacactacaagttgacagaactgtagttgtgacagactctgggcaatcatctatcttcccagcatctttcaattatcagaatgctatacttgagaaggctgaaaacaatgaagtttttgtgaatccttttgtgcagcctggtgcaggttgttctgctgacccagaaattatcgtcaagcatgttgaattcgtgcaggacacaatggaagtagatacaatagaatcatgcaggacaaaactcatgggtgacaatattgcttcgacctctgatactagtactaagctagcatgttcttctcttctccatggcagagagctttctggtactagtcttgaggatcaggggccaggtcactctagtgaaagcctagctaatgagaagtatgatatgaaatatcacactgattgcacctacggtgtgaacgataagaccctattggttcaagaaattctttctggtgccgatatttggcctgaggacaaggattcagatgggtctgctggaatgcaagttgataatgaggcttccagaggtacttcagaatcactggagtgtcccccatgtggggtagatgacaaggcaccatctgatctttcattttactcgagtcataaattatgcacggatgttgcaattctgcccaaagtagtggagggaaaagtagagcaaagtagggatgaaaacatagtacaaactgtggaaaatgaagcagaatctgttgacacaaaaacaagaacatctatttcagtggaacctatgtcccatggtcaggagatcagctcaactattcatacaagaaacactggtgcaagctgtgaaagtgatgagctgaaagaacagaattctaagaacacagatgcttctttggataaaagtgttgctaaaatgcatgaactactaaaatttccttatccaagtggtaaggttgagatgtccacaatcagaccagatggtgatgccatccttccctctcagccagacgccttgcttgcccatggaggagcgttcctgccttctcgtcttttttgttcgcagcaggctcctgccattgttcctccacctattgccagccagctgcacgccatcatcacccactcgtcgtcgtcgtcgtcgtccggcatcatggctgctgcagcaacgtcctcgtcgtcgtttcgccggacgtcgagcacaggagacctcaccgtcctcctggaggagcaaaggggagcggcaaggtacagcgctgaggagcgccgggagcgcgtcgacaagtaccggagcaagcgcaaccaacgcaacttccaaaagaagatcacgtatgcctgcaggaagacgctcgcagacaaccgtcccagggtgaagggccgcttcgcgcgcgatggcggcgactacgcagagacgacggaggcagatgcaactgcagaccaccatgtccatgccccagcactgccagcagcagcatatcagccagtagagttagaggcagagtcgccggctgtacgggagttgcctgctggcatcaacgtagtagcagagctctgcgctgacgacgatgagatgctggccgcttaccttggagtctcctccatcagtttagtatag

SEQ ID NO: 40936 - DNA, 561 bp, Zea mays
  Peptide Sequence Number=SeqID_84311
atggctttcaaaggactcccgcgtgattcccgagggtccctcgaagtcttcaatccagacgcccctgtttcagatcgagcaaccacctccccgtttctcctccctcctgcggccgcgtcccatcccagcctcctcgccgccggagatggcggcgatgctgacgtgggtcgggcgacacagagggccgccgagtggggcctcgtcctccagaccgacgagcacaccggccgcccccagggtgtcgtcgcccgtccctccggttccaaccgcaccagcgagagtggcaactccatcgacgagagggccgccgccgccggtgctggtagagctctcccccgggtgtcggaggagcttcgcgccgcgctctcagcgttccagcagaccttcgtcgtgtccgatgccacccgccctgaccaccccatcctctacgccagcgctggattcttcaacatgacgggctactcctccaatgaggtcgtcggaaggaactggatgcaagtggaagtaagtaagtacacggaaggtttcttcaaggacctgaaactgaccgtgggacagtaa

SEQ ID NO: 40937 - DNA, 2526 bp, Zea mays
  Peptide Sequence Number=SeqID_84312
atggcgcttcctgttgacgtggctggcctgcgcccaaggttgggcgacgtggaggctcctccgaagccgaagtcgagtctgtcttccatggccgaggccgagtccgagcccctaggtcgggcgaggcggaggtcgtcggcagaggccagggcggtgtccgagtccgagccctggggtcgggcgaagcggagttcgtcgtcttccggcccgagtccgagccctgggtcaggcgaagcggagttcgccgtcttccgggtcttagcccaagtccgagccctgggtcgggcggagcggagttcgccgtcttccggggcctggcttcctgtcagcatcactctgtcaagtggcgctgcagtcggagtggcgcaggcggcgctgtccttctgtcagaccggtcagtggagcggcgaagtgacggcgctttatgctgatgggggttaccagctgagaattaggagtcttgagggtacccctaattatggtccccgacacggtgggcgcaatccgccacccggccagggagatttcctctccgacaaaatggatgttaagacagcattcataaatggagagctagatgaggaaatctacatggagcagccaactgggtttgtagcaaacggtcaagaaggcatgaacctccgcgggcgtgcccggacccctgggacgggccctggaccccctgtgcagggttcgggccatgcacagcaaggtcctaggacagaacatgcacaggaccttgggcaggacctaggtgggggtccggtgacgacacgtgtccggacccagtctggtgcggacctgtccgcttgcgccgctgctccccgcccgggcagagacctgacgctgccacgtgtcctactgcgcgtgacgcgatgtgccgcctcagcatttaatgagccctgtccattccgctggcagggatgtgccgcctcagcatttaatgtgccctgtccactccactggcaggcggcgaccaggccgtcccgcaggcggaaatcttccgctgcacgccaatgctacacaggccgcaaatatcagggcacaaggagatggcactggcgatcagcattagttgctccaaggattacacctattatgttcctggacccgcatgtcggggctcagcacccttggcgggtgcatttcgccacccggccggagatttcctcttcgacatttggcgtgccaggtagggggttaggctttgaatttttgcttgttcttctactcgacatcatgggccacatcgtcgagcaccaagatcgcgtgcctgaggacttcatgctagaggaggaggctgcctcttccacacctcgggccaccaacctccctgcgcctggtgcggcggctgctgtgcactcagcgcagcagcacactcccacacaaacatctagggcatctagggcagcgacaggggcgctgtctgcagccagggaactgctgcgttaccctcctagctctacggcctcgccgggagccatgaagcagtggcgcgatgacgtcgactgcctactcagcatggcgcactttggctcaaccagggccaagcctcgatcatcttggcgccaacatgaggtgtcggcatcagtgcgttccccctcggtgaggaccgcgccaactggggacctatgggcggagctcaactgccggcgagcgggcgaggacggtccagtctctctggagaggtctaacgacctgcggacagaactcaaccgcaggcgtgcggcaccgcagactacaacgggtgccctgatccaagcgggtctcccattggccggcgtgggctgcgccgcgctggaggatcatctccgcacagctatttggccatccaagttccggtcgcacctgccggagaagtacgacgattcttccatcatcatcgctttccgccagggagtgcgtgatgaaaagatgttgaagttagccacgcacgacgtggaaactatcaccacactctttgccctggccgacaagtgtgccagagctgccgagggccgtgcatggcactcgacaccacagaccggggtcaccaagacgggtggctcgggtgccgtctcccaagacggcaaaaagaagaaaaagaagaaacgtagtcacgagaagccgcagattgccgctccgatcgttgcagcggcggctgggggccggagcgagcgcaacaagcgcccccggccgcagggtggaaacagtggcacatgccctgtgcaccccaacagtcaccatagtgcctcagagtgccgcaagataatcaagctcgcgaagcgcgtcagtgagcggcacgagcagtcctccaaggatggctccccaccccgtcgccggtctggcaaggagaaggtcgacgatggcgaagtagctgcggggaaacgagagctcggatatcagtcacccgagggggacctcaaggacatcttcaccggagactccgactccggcgacgacgacgaccgccgcaagaagctgtacgtgatttacggcgggagctgggagctcacctcccacaggaacgtcaagtccctgtgttga

SEQ ID NO: 40938 - DNA, 546 bp, Zea mays
  Peptide Sequence Number=SeqID_84313
atgccaacggtatacagcgagtcgctctttgtggaggttacggccaagttcggggattcatcagtgctgggcgcggaactgcagattaccaacatgttcggtaataccttcctgcacagcttcgacaaagatccgatgtttgccagcagctttattgtgcagcatgcgtcaatcatcatgtcgatttcgcagatctctgaaaccctgttcattctgaccatcccgttcttcttaagccgctacggtattaagaacgtaatgatgatcagtattgtggcgtggatcctgcgttttgcgctgtttgcttacggcgacccgactccgttcggtactgtactgctggtactgtcgatgatcgtttacggttgcgcattcgacttcttcaacatctctggttcggtgtttgtcgaaaaagaagttagcccggcaattcgcgccagtgcacaagggatgttcctgatgatgactaacggcttcggctgtatcctcggcggcatcgtgaaagtcgctgcggttaaaagcaccgggcttcggcgatcgtcgtaa

SEQ ID NO: 40939 - DNA, 165 bp, Zea mays
  Peptide Sequence Number=SeqID_84314
atgtctgaagataagaagactgctgctgagatgaagctgagcctcgacgaagagaaaaacttgggtggtggtgaagactctgaagatcgtccctggcgaccaagccattcagtttatggtaaatcaactatcaaagagaatccttcttgtgaacttgagaggaag

SEQ ID NO: 40940 - DNA, 597 bp, Zea mays
  Peptide Sequence Number=SeqID_84315
aggcactccgctataattcaccggactgtccggtgtacaccggacagtgtccggtgctccaaggaagagcggcctccggaactcgccagcctcgagaaaatgcagcggctgctccgctataattcaccggacatgtccggcgcattcaatgcgcgccagaagcgcgcagaagtcaggcacgcccatactggcgcaccggacattgaacagtacatgtcccggtgtgcaccggacatccaggcgggcccagaagacagaagctccaacggtcggaatccaacggcattggtgacgtggctggcacaccggacatgtccggtgtgcaccggactgtccggtgcaccatacgacagacagcctccaccaacggtcatgtttggtggaggctgtctgtcgtatggtgcaccggacagtccggtgcacaccggacatgtccggtgtgccagccacgtcaccaatgccgttggattccgaccgttggagcttctgtcttctgggcccgcctggatgtccggtgactgttggcgcgaagtagccgttgctctgctggttcatcggacagtccggtgtacaccggacatgtccggtgaattatag

SEQ ID NO: 40941 - DNA, 348 bp, Zea mays
  Peptide Sequence Number=SeqID_84316
atggagtcgcgcgagattgccgccgcgcggcgcggagcgtggcgaagacccttccctcctcccaggtcggaacttcggaagttaaataggagctcccgtgacccgttctcccctcatctgccgtcatcgcacgagcgccttccccagaaacccccgccgccattgttcagaccgcggaagaaccgtgtggagatctctgggacacagggagcaaccagacagcgaggaattcctcgccggaagcacttctccgccgcgggccgcactgctccagaggtggattatgtcaagacgccattgaagaagagcccgttgctgaggatcctggtgaacagcaggttgaagtag

SEQ ID NO: 40942 - DNA, 138 bp, Zea mays
  Peptide Sequence Number=SeqID_84317
atggcccacctgccagtgagcggaagggcgcgcgcgtgcgggagtccggccagatgggccgcgcgggttagatttgttaggtgggccgaattcaggttgttggcccatccagattcaagaatttcttttaggatttaa

SEQ ID NO: 40943 - DNA, 1905 bp, Zea mays
  Peptide Sequence Number=SeqID_84318
atgtcgcagccgacggcggcggtggccgcggaggcgcagccgcagggtcgcggcctcgcggggcgccagggcggcggtggcggccttgggcagagcatctctggcatcgtgcggatggcggtgttctggtacttcgcggccaagttcttcgggcccaagcgcccgcccgcggaccccgggatgctcatgtccaacctcttccagaagggcgagccaatggtgagaacgccctcggtcatcttggttgttagtgggcgagattttggttcgaagaggcgtcttaggtctgtcgatgtttgcttgtcagtgggttcaggttctgcagtgcgggatatgtggatgtatttatcagagagtgacaagttcaatgattttgctaatgatgacgcacttatttggcatgagacaaacataccatatgcagtatggggacctaccagtactagaacacgatcattaacatactacccttcagaggctctcaagcataatggatctttgtatgctcatgtttactttgcccgctcgggttaccctgtggacccaacagatcctgaatatgagcagaaatctgcatttgggaggacgcaccctgttgtggcattcttgccaaaatcaaaagctggtaaaaagaagagcttgcttggggattcagaagagcctgaagagcaagcaccacctaaggttgttattttcatcctttgtcactcagagaataaagaacttgaggataaagatgagggtccgactgaatatttatcttattggaaaccaaatgtaacagtaaatcttgttgaagacttcacacgattgacagatctgaatgtggatccagctacaggcgattattatcctacagtattcttcaacgagttttggcttttgagggataaattaatagcgctcaatgagtctgtgaaggaattgcccttaaaccttgaagttggtcctattagcatgaccaagtggcagttttttttacagattgagcagtccttccaggttcatcgtagttatggaagtatgcttgaaggcgaggctgatgaactcaagagggttttccttgaaggaaatccttatcttcttggattgactatgattgtttctctattacactctctgtttgatttcctggccttcaaaaatgatattcagttctggaacaagaacaagtccatggaaggtctatcggcaaaatctgtggttctgaattttgtgtgtcaactaattgttttcctgtaccttcttgacaatgacacttcatggatgatccttgctagctctggaattggtgtttgcattgagttttggaagatcggaaaagcgatgcatattgaagtcgatagaagtggaaaaattcccatgttgaggttccgagatcgtgaatcatatgcacagaataagaccaaagagtacgatgctattgcaatgaagtacctcacctatgtcctcttcctccttgtgatcggtttctctatctattcactaaagtatgaaaagcacaagagctggtactcatggatactttcttctatgacaagttgtgtgtacatgtttggtttcatcatgatgtgcccccaattatttatcaactacaagctgaagtctgttgctcatatgccatggagacaaatgacctacaagttcctcaacactataattgatgacctttttgcattcgtcattaaaatgccaatgcttcatcgtctctcggttttcagagatgatgttatcttcttgatatacgtctaccagaggtggaaatatccggtcgacaagaagcgtgtcaacgagtttggcttcggaggcgaggaggaacccgcagcccaggagactttggaaggaagtgatccagcagctgcagcagcagcagccgagccaacggaggacaagaaaaccaagtga

SEQ ID NO: 40944 - DNA, 60 bp, Zea mays
  Peptide Sequence Number=SeqID_84319
atggcggatatggcaatgggtaccagtgactcaatattcgatgggtatttactccattag

SEQ ID NO: 40945 - DNA, 225 bp, Zea mays
  Peptide Sequence Number=SeqID_84320
atggggcgacctcgtcataggtcttcgtccggtgacgtatgggacgaaggcgattacggtgaaggcatcgagcgaagggtggcgtcttcgccttcgctccaacatttaccctccgagggaccagttcgactaagtcatctggtgccgaagacgtcgctagatggcggatacgctgccctcgctcgaagtggttctgcgggggtttttgatatgaccgttgattga

SEQ ID NO: 40946 - DNA, 2442 bp, Zea mays
  Peptide Sequence Number=SeqID_84321
atgccttcccgtggtgggatgctggtgcgaagtcccgccttcacactggatttgcatagccgcgatcccgccgcattcgtgcgtgaggcggaggatggggcagtgcgggttgttggccggtacgtgccgaagacggagggccagcgtagctgggatatacgcgggtccaacgatcgcttgaacagggtcttcgagttgaaccgtctgccgtatggcggttatcccgggcaagacgatgtggatcgtcgcgggaagaaaccggcggcagaggctggagacgaccccgcgccggcggccgccccatcctctaagaagaggaagctaggtactgctatgggaggactgggggtttccgatggttttgctagggaattgatgaggacatgcgcggcccccgggggttggtggcctaagaatgttcctatcccccgcgcggccggcgaagacttttttacatctcgcatggttcgtgaatggagagtttttccttatggacggaatattgctgctgttgtgtcggcagtgatggacaaggaccgtcaaggagctgcgcagaagcgccaggcggccgtcaggctgcctgaggctaggccgaagaggtcgcgggggactgcgaaggctgctgcccccgacggcagccaaccgacgctggcggcgaagtcggccgcccctaggtccagcagggtgccggaggctgtgaaggcggccgccgccggcggaaccaagtctgtcccggccggagtcgcgaaggcccgagaattgcctccgccgggcaagcgcgttgctgacttcgccaccgatattagcgtggaggattatctcgttgggtcaggcgaggggcaacttgttgttgttccgcctgtggtggcgaccgcggcggctgccgtggtgcctggggcgaggggtagcgctgtcagcgccggtggtgagattccggcactcactgccgtcaaggacgaggcgggcgctgtgtcccgccggctgaaggaggcattaagtcaggcggctgacttcgctgaccgcgtggcgtcgggggcccttacggcggttgtgtctgccgaagttgagagacttcgggctcaacatgctgacgccgtccgggaaaagtcggccgccgacagcaagtgccgcaagctggcggagaaggtggccgcgctggagggcgagaggactgacctccagcgccaactggcagaggagagaagggaggctaatgaggccttcgccaaggcgcagtctgcgcgggcggaggccaatttggcgcgggtggagggtagccttgccagacagcgcgccgaggaatgggaggagcggttcaacgccctgcagacccgtgtggagagggccgaggcctcgacgcgcacggaggctgagcggacacacaaacagcttatggactcgtaccacgagctgggcgcgcggaccgctgacttcgaagtgccagatcaagagcccggacttcgctgcctcgagtggctgcaggaggagttgctggcgctccccgccattgtggagggctttatgtcctatgcctccctggtcacctgcgaaggggcgatgaacgcgctgtcccgcgaagggtgccgacactatgaggtcttcgaccaagctgatgaggattttgagcgcgagatttacaaggttgaggaccctgtggtgaaggaatccgcgggagccctcttcgatcggatgtggggtccccacggtcgggaggtggcgcgtaacgagaaagtggaggacttcggggctttgaacagcgcgccgcctgattcggagtcgaacccggtggcggctgtgtccgaagtcgccccggcgccgcccccagaaaccgtcgaaggcgcccctgatgcccccacagcccctgcggccggcggtggctcgtcgccaacttctgcgccgagggctgaggatcctgtgaagatggcggcggagtcggcggcggaggatcccacgacggctgggtcttcgcaggttcaagattttgggcctgcgcacgcaaccgctactgctaattttttggcggctttgaccgtggatgatgggaatgaatcggatgaatctgcgtctaagttttctgattttggtgactctgggagttcggttgagtggactgaagagtcgtcggatgaggacttggattactttgcggccttggatgtggcggcggcggagacttcgccgcgtgctgtggacgctaaagttgtgcctggtctaagtgcggggcgtaggcggcgaagggcggttgcgaagcgtagagtgagtgaggcggacggcggtcggcttcgtgtgggcagggctggcaggcaggaactgttgtccttgccggccgttgcgagtgtaggtgagggggagctgcgaagtctttttgcgggtaaggagatgaggataatgctatttaactatagggagatgggaattattccgaaggttgagccgatgtaa

SEQ ID NO: 40947 - DNA, 762 bp, Zea mays
  Peptide Sequence Number=SeqID_84322
atgaagctgtggaaggagacttccaggagttccaagactacgacgagttctaggtgtgggttagcggcaaccccccagtcggttgcctgtgaaggccgcgttatctacgtttcttttccgcactttgatttattaggactaccacatccgggtggactgggccaccgtagcccaccccatgacgaatgggcagggactcaagccaaggatctacaacaacctcaacaagttcggcaggcgatgtatgaaggaactcccctcggtggtctggagtctaaggacgacgccaagccgagccacgggcttcacaccgttttttctagtctatggggccgaggctatcttgcccacagacttagaatacggctccccgaagacgaggacatacgacgcccgaagcaaccagaccaaccgagaagactcattggaccagctggaagaggctcgggacatggccttactacactcggcgtggtatcagtagtccctgcgacgctaccacgcccgaggggttcggtcccgagacctccaggtgggcgacttggtgcttcggctacgacaagacgcccgaaggcgccacaagctcacacctccctgggaagggccattcatcatcgccaagattttgaagcccggaacatacaagctggccaacagtcaagtcgaggtctacaacaacgcttggaacatccgacagctacgtcgcttctacccttaagatgttttcaagtcttcatatacctcgtttacatacacaaataa

SEQ ID NO: 40948 - DNA, 543 bp, Zea mays
  Peptide Sequence Number=SeqID_84323
atgggtccacaggtcccagtgagggtcaatccccaagtatccttcacaaaccgccgcaaagatggcggcttgcgagatggagttgggactgaggttgtgcagctccaccctattgacgtgcagaatcgcccacataaatcggcttgccggcactccaaatccccgctcgtgaaaggaaacgaagctcaccacataccccggcggcggggacggggcggctccgctcggaagggccatccactccggctgcgagtcaccggagagggcgaagcaaaccctcagcaacaagggcctccagggaccgggaaaggggatactccgaaagggatccttctgcgcgaaggaagcggaccccgagcccccctactgatcagaggttcgaaggctggcccctcggaagggttcaacagccgcctcagaacactcgggctccacgcccactactggtcagaggttcgaaggctggcccctcggaagggttcaacggccgcctcaggccactcgggctccgcgcccactactgatcaggggttcgtaggctag

SEQ ID NO: 40949 - DNA, 384 bp, Zea mays
  Peptide Sequence Number=SeqID_84324
atgggcgtgcctgacgcctgcgcgctctggcgcgcatttattgctgttgcaggcgaccgttggcgcgaagtagccgttgttccgcagttgcaccggacagtctggcgcgccccacttcgccccgcactcaccctcaccggccagccactttcccttagctccggcgagctcaattccgcccgccattgccgccagagcttcggccaccgtggccagtccactccagccatcctcaagccggactcctcgccgccgtcgagcatccccacctgcgcgcgtggaccgaccgactccggccatctccgacggcgacccgcacaccgttgtgatccccgagacctcccctacgtcctcgaccacttcaccggagcaatctcgccgctg

SEQ ID NO: 40950 - DNA, 1029 bp, Zea mays
  Peptide Sequence Number=SeqID_84325
atggggggcgcccgcgttgctttcgtcttgctgtcgttggaggagcgcaacttcgcggaagttggtacctttcagccatcgctcggcttcaaggattttcatcaggtagcccggctgcatcccctcgctgatgcttcaaggatcttcatcatccttgctggggaggagggcgaggcgagccggggcctgccttcgcgtgggctggcgtcccgcttcttcctccggcttctgggggtggaaaccatcctccagctctgtggaggaggcgccctccagccgtgccggggaaggcgaactgctgctgcccagtccagggtgcagcattccgtcctttgtccgggcgacggtggccagccgcaccagggggtctcacaacacgtcgtacaccgcgagggcggtactcatgttctaggacggtcccattctcgttttcgtgacgaggacgggagcgaggacctgccggtgcgctttggggcggccggtgcccgctggtgcgatgttggtgggcaggtggacgccgccgccggtgctgaggtggtggcagctggagaaagcttctccgccgatgagaccgtcagcgccacccgcggatcgacctccggctctttggctttaatgtctggttctcgtccctcgagtggggacacgaacgagagcctttcagcggtagcgttcgtcctgggaccatcgctgctgctgcagaggtcgctggcgagtcacccggagtttgtcgtcccgcaggctctccgatgtggaggttgtttatacccgcgggagtggaactggagttccgtttgtaatggcaccttgagtgccgttaaagaaaaccctcggctgctctgcgatgagccggagccggaggcagcggtgtcagcatggacagaggcagagtcggctcgaaaaggaaacttcatcggcccaggagcaggtggagatcctccgaccgtgtcgccgtccgaggccgggtcggattccaccgaaggtggagtcgacgtcgagggtgctgctgctccccctactgatgtctga

SEQ ID NO: 40951 - DNA, 930 bp, Zea mays
  Peptide Sequence Number=SeqID_84326
atggaggcccgggcccacatgtcatgtaaccggcgcaacggttactacgtgcaaggaaaccgcaccgccactcgcgccaatgccgcgtctactcgactgcagaaccagtgccacgactcgaggcagccctgcgcggaccaggaaagaggatattccgaaaaggatccttcccagcgaaggaaacgggccccgagccgtcctactgatcaggggggttcgaaggctagcccctcggaagggttcgacagccgccccaaagcacgcagagtcagcgggaacgattttgtaacggaatcccaccggagggaggcattgagccctcaggccctatcgaatgggtccgggtccggcaaatcacctgcaggcctcggcctcagcgtcggcctcgggagaaggtctccgcctcgcccgaccccaggcctcggcctcagcctcggcctcgggaggagtcacaacctcacccgacctcagcctcggcctcaggagaagtctccgcctcgcccgacctgggcctcggaccgactacactacaggggatacatcattaccctactcctagctagctgcctcaggctacgaatgaacaagaccggtgtcccatctaaggttactccgacaacaggtaatgatggttctccgtgtgtgcccatgacgtcggatcactctcaacctcctacgaaaacaaggaaacgtcagcaggatccatgccgcaccgacaactgtgcttctacagggctcaaggcccttctccgacggccacttagaccatctacagctggactaagctcctcgcaatcgacgcgagatacgtttgaagacgtgccccacgacgacgatgacgaacacgacgactctagcgctggtgccgcaggtcaggaggagattggaccatcacagctacaggatgctccgacaactcagccatcatag

SEQ ID NO: 40952 - DNA, 384 bp, Zea mays
  Peptide Sequence Number=SeqID_84327
atggagtggtcacggacggaggacggtgttggactgcggcggtcgtggattcgggcatcgccgggggggaaggcctcgaatcccggatccctgtcacggcggacgcggcgcagggcagcggtcgcggacagcttcggcgcggggcgagggaagcagggcagcggccgcggacggcttcggcgtggggagaggaaagctgggcagcggtcgcggacggcttcgggagatgggggcagggacacgtcgctggcgggggcgggattgcagggaagggacggcgcgggcgggggcgggattgcagagaggaagacggcgcaggcgggggctggagcgggggcacgggccagcactactggtcgaggctatggcccaagcacagcatga

SEQ ID NO: 40953 - DNA, 213 bp, Zea mays
  Peptide Sequence Number=SeqID_84328
atggaggacgaacaccatatggaaaaggaccaccaaacggcggagcggacgaaggaggaacaccataggatctatatggagaaggaccataccgactcaggaaacgaggacgggcaagaaaatcctcccaacgacgatgggcgggagaaagatcatcgaaaaagatctacacaccagcaggggttccgggacattctggagattgctcgttga

SEQ ID NO: 40954 - DNA, 270 bp, Zea mays
  Peptide Sequence Number=SeqID_84329
atggaacatggaccagctagcgaggacgatgacgatggaggccttgttcatggtgatttgaccacgtcaaacatgatgattaagaacagtaacaatcaattgcaaacttatgtgggtaacagcactgatcttgatgataaaccagatggagaaaatccttgcggcgtacagaaaggcttcgaagcaatggtgttccacccagaacaagctggctcaaggtatggcatggtcttgttggcccctgtggcagcgcatggccttcgttgctag

SEQ ID NO: 40955 - DNA, 150 bp, Zea mays
  Peptide Sequence Number=SeqID_84330
atgatgggtgacaggtacatagaagtggtagaagcatatcaagtcgacaccgtggaagggaagggaagaggcgagcatacctgttcgttgctggagaaggacacgatgaagacctgggcatctggaggcgacataggtagtatacgctag

SEQ ID NO: 40956 - DNA, 420 bp, Zea mays
  Peptide Sequence Number=SeqID_84331
atggagattgaaggatttgttcgagattatttatgccctcggacaaagctacattccagtctccgcgatcgaagcaaactaatggaacaaatgctagtaaatgacagcctgcaagctaagatgcgacggcgaagatattcaggggagaatggatcaacagagaactcacccaaagaacaggggaaacagagtcgggcgaggctgcgatggctgcctccgtgtgacttggagtggagcggcggattggagcagagcgatgccgcgagcagagagcgggtcggcgttagcgacgagcagggagcggggcggcgtgagcagcgagcgatgccgcgagcagggagcggcgtgagcggcgagcgatgccgcgagcggagcgggacggctaaccctagccactttctgacgctttccgatgggtga

SEQ ID NO: 40957 - DNA, 585 bp, Zea mays
  Peptide Sequence Number=SeqID_84332
atggacaagaaccaaaatttagcatatgctccttatattatggctctcatcaaagccaagacaagatttgaggggccctgcgagattgttcacacaccgtttagaccctttaagaatgagatagggtttctcaccaggccactcactcccttcccagatgatgaggaagaccctggctataatgcaggagcagctcctgatgttgaggccgcgcatatgcctcctcctccacctcctcctcagtctcagcagtattggcagcctggtccaggctactttgaaccctattttcacaatatgcataactgggatgcgctcaactctgagttttctgactttagtgatcacattcaaactactgtcactgatcctatcatgaccaggctgaataatatgcaacatagttttcaagataacatgggtgctctgtccagccaatttgacaatctttctactaatgacagcatgcatgatatcagtcagaggcagcaacaactccagcaagattttggccagttctcctctctttttgacacattcagctctcactactacaacatgcatcctccacccagtgatcagtga

SEQ ID NO: 40958 - DNA, 171 bp, Zea mays
  Peptide Sequence Number=SeqID_84333
atggtggttgagggcgaggagtggggacggcggttgaggccggggcgcggcgacgacagcgacgacggcgaaggcgcgggcgtggaacggctgggcgagggcgagggcgaaggagcagcggtgggtgagggcgtggcggcgtcgggtgagggcagcggctgcggcgcgtga

SEQ ID NO: 40959 - DNA, 951 bp, Zea mays
  Peptide Sequence Number=SeqID_84334
atggaagaaaaacacctccacgtgttcgacaccttctgcccgcgccagagcacgctcgcgcgcgccctcgcgtgcacagcgccgcgcccgagccaagctagcgccatggcccgcgcccgcgcttataaaaccctcccagacttagattgtacccttccgcgtaccctcaaacctcaccgaagtctagctcgtcgccgtttgctcgtgcgcagcgagtccgcggccgcccaatccctctgccatcgtagaccggccagtggagccattcccaactccgtccagcccccggagaagaccgtgcacacctccgtgaagctccccgagcaaggaatcggagtttgcttcgccggagaggccagtccacgctcgccggagttctcaaccccgccggagtacgtggaccgggtaaaccactcaaccatccttcgattccttgtgcacacggtcgctatgttaccccgtgaagctcaccatgccctcggattgaaccagtttgccgtggtttggccggtatactcgccgccgacgaggacacccgcctgcacgcgtggaccgggcgattccggccatccccgacgtcaagccgtacctcgacgtgaccgccagagtctccccgagccaaccccacccttcgccggacctccctcgccgccgacatatcccctcacgcgacctgagacgaggtctcccattccggttatggtgggtacaagtgcggtcactgcacgacggccagtcggggtcagtggggcattgtacgccaaggcggtgagccctgatctgttgccagggaatcaatggggacggttgatgtgtgtggggacggagtgcccctacatgtcgtgttctctagaggaaatggttgctggaataacttggccgtccaccttgccaccgggttggactgtcgagtgggaccctgcctcggctgaggaggagcatgaggagtga

SEQ ID NO: 40960 - DNA, 1344 bp, Zea mays
  Peptide Sequence Number=SeqID_84335
atggagagtcatgatctccgggcagaaagggaatcacgacttgtgggtaaagtgcgcaacctctgcagagtgtttgaaactgatatatcagccgtgctcgcggttatgagcggccaagggagctccagtggcaatgagattgatggttctggttatgactatggtgctggtaagtggtattctttccgtttggaaagggttgtcagcattgcaaccactgctcaggcgaagatgaagctgtggaaggagacttccaggagttccaagactacgacgagttctaggtgtgggttagcggcaacccccagtcggctgcctgtgaaggccgcgatggctcgacttagacacactgcacgaaagtccgtcatccccttcttaccctcccgccttgctgagcgtccgcttcgccgtcccgtggccggacagtccagccacttggagagactgcaccaccgcctgcatgaggagcaggaacgtcgacgacaggagcagcagggctcttccttctcgctccagcaggagatagagtccgtgaggagctgctcccccgtgcttcccctggaggcgccccctgcaccaccactgggcgccccagcttctggagtagctgctggaggagacccagacgacggaggtggcgacgacagctcgagccacgacaccgacttctctgctaaccatgagccagaaggatgggttgctcgacccatcactcgcgacgctgctcgcgggtgtcacttccacgatgcgctcgacaccctgctacgtcgggcacttaaccggcatacttggtccatcgagtatcgctgtgtggtctaccagcacagtcgcggggtctacccggaccgctgggaggcaacctgcttggtgcgccgctcagagaacagtctccagggtgcggaggcctgctcagagcactattctatctctgagcgggactcagctgagacagccatgcaagatgctgcacggcgtgcgctttcgcactactgctcggttttcggtggagtagctgacggtcttgacctgaagtattacccccgctgtccatctggcagcacaggaggcgtgattgtctcacctgtcggtgagggcaatcctaggttgagcagcacagtcaacctagccgccgtgctaaacacggagctggaccatgcactagacgagctgagtagggctcgtgctgagatcgccctgctgcgggctgagcgtgcggaacgtcgtcacctggatggtggttcccccgctcccgtcgggactcagcacccgtaccgctcacctcggcgtggacaccagtcttatggcaatcccgactgcaagaccaagataactctagaaccatag

SEQ ID NO: 40961 - DNA, 300 bp, Zea mays
  Peptide Sequence Number=SeqID_84336
atgaacgtatgtgagctcactcttgctgtctcacacccccacaggtcaagaacagctatcctagctatagccatatgtcctcaactcggatggcaactccaggaggaaggccaaagaagaccaacatcgtcaaggaaggagaaggagatcaacctcgacatggaagaatacgagtcaaatcaagatctcgagataattcaagattcaccacccaagatgaagtctttccttattatactcatccttgccacgacctatacttgccataaccgtacctcatctgacctaatagatggctag

SEQ ID NO: 40962 - DNA, 393 bp, Zea mays
  Peptide Sequence Number=SeqID_84337
atgggtgtgcgggtcggcggcgtggaaagcttggagtcgtcggcctcaaccgtgcctgcggagtctggtggtggtcggggagcttcgcgagaccacgtggaacgtgtacagatcgtcctcgggagcgattacctgctggcgtggaaggaattgctcaccatcgaccacgggcggccgtggaatcgtcgagcaccgtgggcggaactcgaatcattagataggtcggggaaggctggggcgccgctgcaaccagtcatcgacgagatgctgtcgtggctgtttttgcgcgggcgctgtcggcaagcgggagaagagacagtggctgaggatcccggtgttcagcagatagaagttgctgagcatgagctcattgaaggcaagttatgcccttga

SEQ ID NO: 40963 - DNA, 324 bp, Zea mays
  Peptide Sequence Number=SeqID_84338
atggcgcgcactaaaactacccagcgcaaatcaactggacctcagggtgtgcctcaacatcagctggcctctaggcatgaaggaagcagcagtggaagcaacgaccctatcggggagttgatggccagagtggattgcctcagatcagaactacgccacatgccatcccagacccatgcacatgatgggacagttacatcctgcggcggggaggacactcccaatctgccacccgtacctcctaccttggtcgaggctatcgctgccttggtcaacgccaccgccgccaacatgcgctttctacgcgaaatggcgggcaactaa

SEQ ID NO: 40964 - DNA, 381 bp, Zea mays
  Peptide Sequence Number=SeqID_84339
atgaggaggagccacggtgtgccatggaaggaagcagggaggggcgccgagtacaggggcagaggagcagggagaaacgacggctggttgggggagctcggacgcagggagaggcttctgccgcgggtgcccatgggaggaggggcttgctgccgtgggagagggaaaaggtccctgctgctggtcagggccctattggcaccccattggccaccgtgggcggcagctatttactggccggctgcagccattggcacagaaattggtgcccaaccactggtcgggtgctggcagcggcagactgcctgcgccacgcggtggcgctgtggcgtgcgggcacgggaaagaaaacagatgctgatgaaatttgtaaggagctaa

SEQ ID NO: 40965 - DNA, 423 bp, Zea mays
  Peptide Sequence Number=SeqID_84340
atgaacaggttcaagaacgtggtgctgcgcaagtgcaagagcctgtcatcacgggtagggcgcccgccgagcgcgtcgccgtcgtacaggtacagcagcctccggtccatgtccatgtccacccggcgggacgcgggcgccgccgccgccgatgccgacgaagccacggcggctgccgtgggcggcggcgcggcggcggtgatcgtgggcagctcgcggcggcggtacgtgatcagcgcggagcacctcagccacccgctgatcgccgcgctcatcgacgacgacgagcggcacaaggagcccgtggccgtcaactgcgaggtggtgctgttcgaccacctgctgtggatgctggacaacgccgtcgacctccacgacgacgacgacgccatgagggagctggcccagctctacgcgtgctga

SEQ ID NO: 40966 - DNA, 624 bp, Zea mays
  Peptide Sequence Number=SeqID_84341
atggcccaaggcgacatgctgatacaaaatgacattcagaacacgagaggggcatcaaagagaatatccagaacagtttccagtcgtcttcctcgtggagaagcggcaaggcgagtttgtccgagtctcacgccccgttcctcgtcgacggcggccacgggatgtgacaagtggtatcagagcttctggtcctcggcgaagacggtgatcaacgacggcgtgctggagtcgccaccggacctcatgaacttccttggcagcatcgacccgtgcgacgaaagacagagcgggctgagggagctgtggaacgacatgtactgctgcgtggtggagcccacgaggtggaagaagcaggacaagggcgacaacctcctagtggcgctaaacagggcatgggcggagcttctgaagaacaatggttgggcgaatccacgatctagagaaggagagcgttggtggggacttgatggacagggtgacaaaggttttgattatccaatgttcgatgaaatgtctgctgaggagatggtctgggatgcagaagtgctacttggatgtgattcaggtggcctatgtgaaagggaaataggctcacacattttcctaaatgattttggtggttga

SEQ ID NO: 40967 - DNA, 1437 bp, Zea mays
  Peptide Sequence Number=SeqID_84342
atggctgaaaggtaccaacttccacgaagttgcgttcctccaacgacaagggggaaggattgcgggtgttccccatccgggggctcggaaggtggaaagacacgatgcataagggagcgcgaagacatggtcgcctttcaagggggtcaccctccttttaaaggagactctccctacttgcgtccccagccgtcgcgggctgagtcttctccaacacgctccaaggtcctcctcctacggcgcgggggctgggtcccacgcgtcatgcaagctggcccagagcagaagaagccaaaccgccgcgcgcggtgcatgcaactgcccagcggttacgagcattcctccactttcgcccagaccagcggaagcagcggtcacgtcgtcagccaagctcacgtcgcctcgtgggacagtgagagaaccctctctcacggcgtgaagacgacgcgcccatgttccgttcctcgaacggcccgcgcacgcgcaacggctgccccgcaaaccactcgccccatcgcattaactccgcggcgggacaggcggcgcctttggcaggagaagcgagcgacgcttcgccttcgccataatgaccgcgtcaaaaagggaccgggaaagggggataccccgaaagggatccttctccgcgaaggaaacgggcctcgagcccccctactgatcagaggttcaaaggctggcccctcggaggggttcaacagccgcctcagagcgctcaggctccgcgcccactactggtcagaggttcgaaggccggcccctcggaagggttcaacggccgcctcaggccactcgggctccgcgcccactactgatcagggcgccgcctgcgccgctctgactgccgtgccactcgacagagtgaggctgacagtagccaagtccgacctcaggcgccataggaatctccgcttcgcccgaccccaaggctcggactcgggctcagccctggaagacgacgaactccgcatcgcccgaccccagggctcggactcgggctcagctccggaagactacgaactccgcatcgcccgaccccagggctcggactcgggctcagccccagaagacgacgaactccgcttcgcccgaccccagggctcggactcgggctcagccccagaagacgacgaactccgcttcgcccgaccccagggctcggactcagccctggcctcagccgacggtctccgcctcgcccgacccaggggctcggactcgacctcggtctcggaagacagactcgacctcgacctcggaggagcctccacctcgcccaacctagggctcagaccgaccacgtcacaggaggcgccatcattaccctaccccaagctgactcaggctacggggaacaaggtcggcgtcccatctggctcgctctaccaaacatgtaatgatgacgccccacacgctctatga

SEQ ID NO: 40968 - DNA, 519 bp, Zea mays
  Peptide Sequence Number=SeqID_84343
atggccttactacactcggtgcggtaccagcagtccctgcgacgctaccacgcccgaggggttcggtcccgagacctccaggctcggatcttgacagttgaagggagcagcagcaccctcggcatcaactacaccttcggcgaggcccgacctagcctcggacggaatccggctcaagcagatggctcaggccggtcaccccgaagcctcagccagctgtcccccgagggcatcggctcggtttgtggcctcggcaactcaactccgacgtcggtcccgccagtggacgacccggccaggctcggccgaccaaatcttcttttcgaagccaactttgcctttgttcgtgctgacaccactacctctggcttcggctcatcgaagagcgaccgagggtttcctttaactaagcaagagaagcctcggacagcaaggccgaccgagccgagggactcctacgcctccgggatacggatacctcactcgtcaccttcacacgaggtgactcacgcttggtga

SEQ ID NO: 40969 - DNA, 795 bp, Zea mays
  Peptide Sequence Number=SeqID_84344
atggatgaggagatgcaaactgaaactcacatgcatgaaggtttactgaagcaacttgctcaaggtggagaagccttaaaagaatcagctaacaaggatgatgttggtgatgatgtggtggctttgagaggtgaagaagccccagaagaatcaaccatgaaggattctgatgttgaagatgaggccagcaggcctcacccaccaagtgaggttatgccaaatgattcacttcttgtggatgagccggacgaaggtccagccatgccatggatgcacagtgggaggggagctatgccatggttgatgggttgtttggatatgcatggaccaacagcatggggcctgagtgttggagcatctggttggggtcatcaaggtggtatttctacttcactcatgcctagggtgcaaactattgtaccaagttctaagggaggagctgacattcagcctatgcaggttgacgagaatgatcctccaccgaagaaactaaagatgaaacttgctgttagctgtgtgggctattgcggagctgatttgaaggcattatgtacagaagcagctattagagtatttagaaagatgtattctcatgtctatgctagtgatgacaagttctcctatgaaaatgtcaagggatcaactccagtattgtacattttgaaggatatgaatgagccatccatcttcaatggccctgaggtcctcattacaaaggatgcaatgcactatggagatgttgaacatcgagaaatgcataatatatatgggtactactttcatatggctacctag

SEQ ID NO: 40970 - DNA, 1317 bp, Zea mays
  Peptide Sequence Number=SeqID_84345
atgcggggcggaggaggagtagggggaagggatgctgcggcagcggcaggagggaaggccgggccaggcgccggcgccggcgccgacttcgagtttctgctcggcgggtgcgccgccgcctgctccatgctccccgccgacgagctcttctccgggggcaagctggtcccactccgcatccccgcgtccacggacgagacggcggccggggcggaggccgaggtagccgcgcagtcgacgctgccgccgccgccgccgaagcaggagcagcagcagcagccggagacgccgcgggcggcggcggagcccaaggtccccgcgaggaggtggcgtgatctgctgcgtctgcggaagcagcaggcgtcgccgggcgccgcggcggacccgaggccgctgcgccggctcctccgccgcggccccaagcccccggagccggagccgtcgctgagcctgccgttgctccgcgagcccggcccggaggagcccaacgtcaccaccaaggctaccgaaaagacggcgtcgtcgcagcaccagagcctgctgcctcccaagatccggctgtccgcgccgcagcagcagacgtcggcgcccccacccgcgcccccgcctccccctccgtcggcggtggcggccgacagcccgcgcctgaacgcggcgggaaaggtggtgttcaacgggctcgggcgcagctccagcagcccgagcagcctggccggcgggcggcgccaccgcagcggcagcgcgggcgccatggagcggtcgtactcggcgcacgtgcgcgtggcgcccgtgctcaacgtgcccgtctgctcgctccgcggctcccgcaagtccgccgccgccttgggcatcgaccgcctcttcgccccgtcgtcgtcgggcgctgcctcctcctccgccggcgcggccaagaagaacagggccgcaaagaaggacgtgggccccggcgcccaccgcttgtcggtgcgggaatgcgggttcgtcttgcggcgccgcggtgagctattgattgctggtggtagctcgccccgggcaccggcgatgggctgcttcccgtgcttcggctccacgcgcgaggaggagctcaagtactacggaaccaagggccccgacggaggcaatggcggtggtgggcgggcgaccgcgtcctcgtcctcgtccgctgcagctggcggtggaggcggccgggtagaagaggccgtggtggcgccgccgcgtgctcagaggggccccgcagatctccctcctgacaaggagtctttggattggaacactaggatgaaaattgctgcgggtgctgctggagtacctgcatga

SEQ ID NO: 40971 - DNA, 759 bp, Zea mays
  Peptide Sequence Number=SeqID_84346
atggcggcagcagacgagcggaagcggcggtcaaatcgtctgcaggctcatgtcccctcctggagcagtaggggagccctctcccatgacgcaaagcaggcgtcgtttcaccgccgccatgatgaccgcgtcaaaaaaaggggctgggaaaggggatatttcgaaagggatccttctccgcgaaggaaacgggccctgagccctcctactgatcaggggctggcccctcagaagggttcgacagccgcctcagagcactcgggctccgcgctcactactgatcaggggttcgaaggctggcccctcggaagggagcgattttgtaacggaatcccaccagagggaggcatcgagccctcggaccctatcgaacaggaaaacagcgccgctcgcccctctccgactgttgtgccacccgctagggtgaggctgacaacagctaagttcagcctcaggcgcaacagaaagctccgcctcgcccgaccttgggcctcggcctcaagaggaggtctccgcctcgcccgaccccagggctcggcccccgcctcggccttggagggtggtctccgcctcgcccgaccccagggctcggcctccgcctcgcccgaccctagggctcggcctcaacctcgacctcaggaggaatcgcgtcctcgctcgaccccggcctcagcctcaggaggagtctctgcctcgcccgaccttgggctcggaccgaccgcgccacggaggatgcatcattaccctacccctagctag

SEQ ID NO: 40972 - DNA, 750 bp, Zea mays
  Peptide Sequence Number=SeqID_84347
atgcccggaggtcacggcccagcactccagtcccccaattctcccctctacaagccgatccatgacaagggaacgacagcgaaccaacaggaagccgagaaggatgagctcgacactagccacgttgaggcgggttcgtcggtgaaattgaaccccggcggtctggtggaccccagttgtcggcaccaacggcgtggtaggctgacgcggccacgcgaggtggttagtgggccgagaaccaaggaatgggcccaagcgcaggcagggtcgctgccgcggccaggcgggaagaccgccaccacggcgtgcgggcataggcaacaccggcctcggcacgagggcgcaggacaccctggccacgacatgggctggctggccagcctcggccatgcacgggaaccgcgctgggataccaggccatgcgtgggcaacgccgccagccacatcgcgggcggtttaggccagtccaactgttgtcgtcggactgtggcccgcgatgtggttggcggtgtcgctcgcgcgtggccaggtctcctagcacggttgccgcgcatggctggggctagccagccagctcgtgccgtggccagggcatgccgcgctcgcgcgccgaggccggtgttggcatgtgcccgcgcgccgtggtggtggccttcccgcgtggccgcgacagcctactcgcgcgcccgcgtggctgtggcggcggcctgctcgcgccatggcagcgccttgctgcggcctgccagctag

SEQ ID NO: 40973 - DNA, 1059 bp, Zea mays
  Peptide Sequence Number=SeqID_84348
atggcgcctccgtgggtactgtctccactgcgattcgagttccggaaaggcggaaaactggggtcgcttgggcagtgcgtatggaccgttgattcactcgacaacggccgcgatgaagatccattggccgaggagtctggtgttcagcaggtagaagttgctgagcaggagctcgttgaaggcaagttcgcccatccccacgcgacctgcctcgactaccgcaacccgagcgcccgcgccgcgccgatcctgcaccgcgcgcgcgactgcctcgcgccgccagccgcgccctgcgcgcagccaggccggacgcgcccagctgctcgccgcgacatcgaccgcagctctgacccgagcagaggaccgacgccccgacgaggaccccaaccgcgcgacccaggccgtcgagtgcccagaccgatcgcgcccctgcacgcccgctccacccacgccaggaccgagcagcacagccccgagccgcgactacaagaccggcacccgaagcccaggcgccgcgacaccgccgtgtcgagccccgtccgtttcttgttcgcaagtaatggagtttactgccgtccgttttcccaccctccccattacctccattcaagctccatgaacgccattcatggcagccatgaagaccggccaccatttcatccccctggcgcccctctctctccttctcctccctctataaattggacgccgagctcctctttctcctcccctacccgagctctcttcctccctaagctccctctctctctctcccactcgcccacgccgtcgccggagttcgtctacgttgtcatcgtccgccttgctgtccgtggaacctcgccggagtcgacgccatcgcgcacggaattcgcccacgtcgtcgtagtctgccttgccgtccgtggagactcaccggagctcgctgttcctcactggagacgtgcccaaacactcactgacgattacgtcgttccctgcccgtcgaacactctccctcgtcgacgttcatccaagaccgccgttcatcccaaggttgaaaacaaccccaaaagttaa

SEQ ID NO: 40974 - DNA, 1212 bp, Zea mays
  Peptide Sequence Number=SeqID_84349
atgcatcgtgcccttccaccttccgagcccccggatggggagcacccgtgttgcctttgtcttgctgccgttggaggagcacgacctcgcaggggttggcacccttcagccatcgctcggcttcaaggattttcatcatgcagcccggctgcattccctcaccaatggtcatccaggatgatgaccactagttcaatggtggggagaagcaagccgggctgcggcctctgccccaccctcagcttcaaggatcttcatcatccttgctgtggtggggggcaagctgagccggagttctacctcccgcatgggccggtgggccgcctcttccttcagcattcaggggagagggcgctcaccggccttgcggagggggcgaacttcgacaacgcggggccggtcggccgcaagcgtcgtcagctccagcgtgcctggctcgctggctcagctggctctgtcgcggcctccgacgctgcctcctgccgcttgatccgggcatggccatccgtccaccgcacgggcggtcgttgcgccgggcgcaccgggggaccatccaagacgtcgcacgccactagggcggcgttcgtgttcttggattgtcttgtcctcactcaagcacgacgcctccgcacggaggctggggcggccgccagaggaggtttctctgccgacgagaccgtcggcgccgcccgcggacagacctccggctctttggctttgacagcttgtcctcgcccctcgtgtggggacgtgggcgagggccttcctacaacagcatttgccctaaggtcatcgctgctgctgtttagccgcccgaggcggaggtcgttgtcgctgctgctgcagtggttgtcggcgagccacctggagttggttatcccgcaggccctctggcgtggaagttgttcatacctgcgggagtggaaccggagttctgtttgtaatggcaccctgagtgtgggtgcttcccttgctcagtttgagaaccttcggctgctctgcgatgagctggagccagaggcagcggtgttggcgtggacagaggcggagtcagctcgagaagaggcttcgtcggcccaggagcgggtggcttcccaggccgaggaggtgcagcagcggcggctggagcctggccaggtcatccgtgagcgggaccaacctcggagtcacgctgccgaggccgtgagccgggctgatgtcctcgggggatag

SEQ ID NO: 40975 - DNA, 642 bp, Zea mays
  Peptide Sequence Number=SeqID_84350
atggccgtcgttgtcgctgccgcgctgcgggggaaggagtaccatgtcgtagctatcgtcgagggacatgaactcgagactcccaaaacggagcagcatcccgggctgaagaggttgctggagactacccatctggaactcaacgagaagttgttcgtcaacacgcagcaggcccctacctggcgcaccaactatcggcgtttcgaccccggggggtccctggaccgacgagtaaaattgtcgctgcgtgtcccagcccagatgggttggcgcgagatggaacacaagggggaaaacgcggctcgtgttatcctgcgccagggggatgcgcttgcagtaggggttacaagcgttcgcgcgagagagagaggcagagaggtgcctgagccctgtgtacatgccaacgtggctgtcagagaggtgctagagccctgtgtacgcggtatcgtggccgtcggaggatcgcttgagccctgtagaagcacagctgtcggggctgctgggaccttgctgacgtctccttgcttccgtagggggctgagaaccaccgtcgtcatggacgcacgcggggagccatcattacttgttaccggggcgagcctggatgggatgctggtcttgttcccccgtagtctgagctag

SEQ ID NO: 40976 - DNA, 684 bp, Zea mays
  Peptide Sequence Number=SeqID_84351
atggtcggagagcatgcagcccctgatctagctttggtgctttctttggatgtcccagagtcgaaggctaaaaacttagctgtggcaacagaaaccactacttcccatgccgaagctgctacggacccatatgaaggattggacgaggacatcactgatattgatattgaagaggacaatattatcatttgtcctacaaagccgagtcatgtggacttcagaaagtcgaagattaaagaaggacacattgaggtactcactaggctatgcccgagactatggagctacccgtcattgaggagactacctagacgacgatgcaaaggacaaggatactgctgcaacaattgtagcgaccaaggatattatgccacatattgtagttttggcgatgccaaaaagcccgaaggtccaaacagcgccccgactacaatacctttggcggttatgatggccaaggagagaactcattctacgaagcctgcaatggtacatgacaagggaaaagagcccatagaaattgaggaggccaaaaaagccattgaggatgacacgccactaggagaagggccatttgatcaagagcttggaggccgactgttggggacttgttctcaaatgctaagaattaagaacaaggcaacacaaaaaatgttaagtgttaaggcccttcgtcctccataa

SEQ ID NO: 40977 - DNA, 255 bp, Zea mays
  Peptide Sequence Number=SeqID_84352
atggcggacaatataggttttccaaagctggaaaccatactgtcgactatgccgtcaaaagattttttagactacctggcctatacacaattgaagggtccgatcatgagcaaggcactgaaaaatagaagaaacattgaaagtgaagctgctaagaaggaaattttgaagcttcgctctgaggtgtatgggctttgcttcgattgcgaggaaaaagagaagtcttttaaaattttggagaaggacttcatttaa

SEQ ID NO: 40978 - DNA, 378 bp, Zea mays
  Peptide Sequence Number=SeqID_84353
atggagagtcatgatctccgggcagaaagggaatcacggcttgtgggtggcaatgagattgatggttctggttatgactatggtgctgctagtccactgcagccaaacaggatacttgctgagtatgttgatgtgtactcacccttgctctacacaccaaacccccccatccccagggttgtcagcattgcaaccactgctcaggcgaagatgaagctgtggaaggagacttccaggagttccaagactaagacgagttctaggtgtgggttagcggcaacccccagtcggctgcctgtgaaggccgcggttatctacgtttcttttccgcactttgatttattgtgcttgttgctcatcaagggaagtgggaagtag

SEQ ID NO: 40979 - DNA, 174 bp, Zea mays
  Peptide Sequence Number=SeqID_84354
atggagagtcatgatctccgggcagaatgggaatcacggcttgtgggtggctatgagatcgatggttttggttatgactatggtgctggttgtcagcattgcaaccactgctcaggcgaagatgaagctgtggaaggagacttccaggagttccaagactacgacgagttctag

SEQ ID NO: 40980 - DNA, 969 bp, Zea mays
  Peptide Sequence Number=SeqID_84355
atggttgccccgcctcctcctgcggcggggaaggtgacgggacaggcccggatgctgctcttccgccatggggggaagacgtcgtcgattccgccgccgtcgggcgggctgacggtcgtcgttgtcgtcgtcgcacggcggaggaaggagcaccatgtcgtagctaccgtcgagggacatgaactcgagactcccaaaacggagcagcgtcccgggctggagaggttgctggaaactacccatctggagcttaacgggaagctgttcgtcaacacgcagcaggcccctacctggcgcgccaactatcggcgtttcgaccccgggggtccctggaccgacgaggcagatgcgcttgcagtagggggttacaagcgttcgcgagggagagagagagagcctgtccgtcagcccgtcctccctcgcggccaccttctcgcgaggcggagaccgtcttccgaggtcgaggttgagtccgagcgctggggtcgggcgaggcggagaccgtcttccgaggtcgaagcgggggccgagccccggggtcgggcgaggcggagcttcctatggcgcctgaggctggactcggctgctgtcagcctcaccctggcgggtggcacagcagtcggagcagggcaggcggcgctgttttcctgtcaggcgatccttgcattgaatgctcctgcgatacggtcggttggcgaggcgatctggccaaggttgcttcactgcgaagcctgcccaagctgggcctcgagcgagtcgaaggcttttgcagcttgtgctgatggtgattaccagccgagtttgggaatcttgggggtcggcctgcccgagcctagacaactcctaggatctctcctccccgacggggtccctcccgggagcgagatccaggcgccgccggcgatcttccgccgcccctgcgcacgcgcggaccgttcggccctagggagcggactgtccggccgttag

SEQ ID NO: 40981 - DNA, 972 bp, Zea mays
  Peptide Sequence Number=SeqID_84356
atggcggccactttcgccctcctccttctcctgatcctgtcctcgtcggtccgcgccgcccccgacgccgtggtgtccaggatcgccttcggatcctgtgccaaccagagcgagccccagcccatttggaacgccgtcgcggggttcgacccgcaggtgttcgtctggctcggggacaacgtctacggcgacaacaagcgcccattccgggtcttcgggagggagcgcaccgtggggccctggaagaacgtgccgcgcttctacccttccaccgaggaggagctgcggaggcggtaccagctcgccagggcgcagcccgggtacgccaggctcagggagagggctcaggttcttggaacatgggatgaccatgattatggattgaatgatgcaggaaaagaacttagtgggaaagtgattgctcaaaggcttatgttagatttcttggatgaacctgaagacagtaaacggaggaaacaagctggtgtttatgcctcatacatgtttggccctgaaggaaaacgtgtgaagagacctggagtgctatttattagtggggatgtccatttcggagaaatcaccagattcgattgtggagctgaatacccatcatatgatgttacttcgagtggtcttacccaatctgtcgagaactctgtgccagaagtgtttcaacctcttatgagacttctggcaatactaacaccaactaccatgcgagttttgagcccaaattgccaatataaatcatgccaaccaaattttggagcgattgaaattgattggaacgctgtacctccgcggattaaacttgaactaagagatgttgaggagctcccatggctaacacgataccggcttgctctgatgctgtttgtcatcatagctgtttttgcggtggttgtggtgatgctagcgatcgcctgcttgtcaaactttaccaagtccagtaagaaaagcaagaaggaatag

SEQ ID NO: 40982 - DNA, 417 bp, Zea mays
  Peptide Sequence Number=SeqID_84357
atgggtcggcgcgagacggagcgcgaaggggggaagaagccggagggagacaggcgtacaagggggaaacccgcggccttcgtgtttgtcccgcgcccaggtcgggtgctgtcggcgtttcgagacaggggggtccctaagccgacgagtgagtgttctgcgtgccccagcccagatgggtcgagcgcgtgggcgagcgcgaaggggggagaggcgaggcggccggagccgagcgtgagagaggtggaagtcccgcggccttcgtgttcgtcccgcgcccaggtcagtcgtaaggagaggatccaggtgtacaatggggatgtagcagagtgctacgtgtctagcggagggagagctagcgccctaggtacatgccaatgtggcagccggagagatctaggcaccctgctggcgtga

SEQ ID NO: 40983 - DNA, 1659 bp, Zea mays
  Peptide Sequence Number=SeqID_84358
atggagcttgggaggcgccatcattgcctatctggcggagctggtcagatgggacaccggtcttgttctctgcggcccgagtcggctcggggtagagtggtgatggcgctccctgttgacgtggcgggcccgcgcccgaggccgggcgacgtgggggctcctccgaaactggggtcgaatctgtcttccgttgccgaggccgagcccgagccaaggggtcggtcgaggcggaagtcgttcggccgaggccagggcggagtccgagccctggggtcgggcgaggcggagtttcgtcgtcttccgggtcttagcccgagtccgagccctggggtcgggcggagcggagttcgccgtcttccgggtcttagcccgagtccgagccctggggtcgggcggagcggagttcgccgtcttccgggtcttagcccgagtccgagccctggggtcgggcggagcggagttcgccgtcttccgggtcttagcccgagtccgagcccctgggggtcgggcggagcggagttcgccgtcttccgggtcttagcccgagtccgagccctggggtcggggcggagcggagttcgccgtcttccgggtcttagcccgagtccgagccctggggtcgggcggagcggaactggccagtggagcggtggagtgacggcggtcaccttggctctgccggaggcgcgtgtcaggatagagctttatgctgatgggggttaccagctgagaattaggcgtcttgagggtacccctaattatggtccccgacagggtaatgatggcgccgcctgtgacgtggtcggtccgagccctaggttgggcgaggtggaggctcctccgaggtcgaggtcgagtctgtcttccgaggccgaggtcgagtccgagcccctgggtcgggcgaggcggagaccgtcggctgaggctagggctgagtccgagccttggggtcgggctaagcagagttcgtcgtcttctggggctgagcccgagtccgagccctggggtcgggcgaagcggagttcgtcgtctttcggggctgagcccgagtccgagccctggggtcgggcgaagaggagttcgtcgtcttccggggctgagcccgagtccgagccctggggtcgggcgaagcggagttcgtcgtcttccggggctgagcccgagtccaagccctggggtcgggcgaagcggagttcgtcgtcttccggggctgagcccgagtccgagccctggggtcgggtgaagcggagttcgtcgtcttctagggctgagcccgagtccgagccctggggtcgggcgaagcggagttcgccgtcttccggggctgagcccgagtctgagccctggggtcgggcgaagcggagtttcctatggcgcctggggccgggcttggctgctgtcagcctcactctgtcgtgtggcacagcagtcggagcggcgcaggcggcgctgtcctcttgtcaggctggtcagtggagcggcgaagccacctttgcattaaatgcccctgcgatttggtcggttggcgtggcaatttggccaaggttgcttcttggtgaagactgggcctcgggcgagccgaagctttgtgctgatgggggttaccagctgagatttaggagccttgagggtacccctaattatggtccccgacagtag

SEQ ID NO: 40984 - DNA, 915 bp, Zea mays
  Peptide Sequence Number=SeqID_84359
atggcgaagaagcggaagcacaccgacgcccaggcagagacggccggcgcagagaagccagacgactccgcaccggcgcgcccggagcgcacgctcttcggcttcaaggatccggcccccgacgccgtgcctgactccgcggcctccagggccgcggtggcgccgtttaggaacagggagaaggacgtgttgtcgatgctcccgcacgcgaagaaggacagcaaggtcgagtcgaagcagagcaaggggaacgctctcaacgagatgctcgagctcaggagctgctccagttgtctcttcttcgagtgccgaaaacagaaggatctttacctttggatggtgaagtctcctggaggaccatcagtgaaatttctagttaatgctgttcacaccatggaggagttgaagcttacgggtaaccatctgaaagggtcacggccacttcttacattttctacaaattttgatgagcaacctcattggaagcttgtgaaggaaattataactcatatatttgctactcctaaagatcaccgtaaagcaaaacctttccatgaccatgtatttgtcttctccattgtggatggccatgtttggtttcgaaactaccagatttctgttccccacaatgagattgataaagttgataaaggtggtatggataaaatgacacttattgaggttggccccaggttctgtttgaatccaatcaaaatatttggtggtagttttggtggtcctacatggtatgagaacccatactacatttcccccaatcagatccgtgcactagagaagaggcagaaggcaggcaaatatgccaagaaggtgaaggccaaggtgaggaggaagatgcacgagatggagaacacgctggagcctgatgagtttgctgagctctggaaaggggagtag

SEQ ID NO: 40985 - DNA, 321 bp, Zea mays
  Peptide Sequence Number=SeqID_84360
atggccattgttcagccaaagccagctctgtctgggtgcaccggactgtccggtggtgcaccggacagtgtccgtttttccattctcttgttgatgacacccctagacattacgtttctgtacatagatctcgtgagtcgtgaagcaattgatgcgcggactccggtgattccacaaccgaacccggtggagctgccagcgatctcgggcaacggcgccaacgagattctcggtcatggcctccttgagcacggactccgcgggtgtgactgccgtgactctcggtcagatccgcggcaccaggtgaagattaggatctag

SEQ ID NO: 40986 - DNA, 1212 bp, Zea mays
  Peptide Sequence Number=SeqID_84361
atgccgcgcctcgccgccgccgccgccgtctcacgccgcgccggcgaggccctgcgccgcggcgcgtttgggggactgcggcctctctcctccctgcaaccgttaaacgccgcctccagcgacgaggtgctcgttgaaggaaagacaagtgcgcgcgctgccgtgctcaaccgccctggctacctcaacgccctcaccaccaccatggttgccattcttgatggcattactatgggtggtggtggaggtgtttccatccctggaacattccgtgttgcaactgataggacagtctttgcaactccagaagttcatattggattccatcctgatgctgcagcctccttttatttgtcgcatctaactggccatgttggggaatatgtggccttgaccggtgaaaagcttaatggaacagatatgattgctcttggccttgctacacactatttcatgagtggccatctggatctgatcgatgaacgacttgcaaagttagtaactgatgatccatcagttattgattcgtcccttgcacaatatggagacatgcccgtgggcgcggtctcgccccaccctgccacaaccgttttggcctaccccagcgccgacagcctgctccccaccagcgttgcccacctccttccagcaggcctgctcccaggcgccatcgccatcgatgttgcgctcgaccttttccccgccgcgtcgaccaccttgagcgtagggggttttgtccccaacccccacaccagcgagcttgtctgctccaggccggtgccgctggcccctggatttgtgcctcctccctcagttccgtgcgctgcaccaaccctcaccatggcgcctctccctctcgctgcggctttcaccagtgtgggccacctcaccgccagcgtcgtcaacagcatgcccaccgacagcctccccacaggtgcgggcgcgagcgcccccttcgccacctctactgctgccgggacgagtgcactctactttgcatcaaccgaccttctctccactgccgcggcaacactacaggtagacgtttccccagccacctggaccgcgtcctccctcacccacgccagcgtcctcggccctgctcccatggccgctctcggcacatccaccgaggtccccccaccctcggtgcctctggatccgcccaaatccgccacgcccgctgtgcacatcctccttcacgacggctag

SEQ ID NO: 40987 - DNA, 801 bp, Zea mays
  Peptide Sequence Number=SeqID_84362
atggcgctccgcaagctctgtgacgacggcggcccccggctctcttacggaagcaggacaaccactctgctacatccccattgtacacctggatcctctccttacgactataaaaggaaggaccagggccttctcagaggaggttggccgcgcgggaccgaggacgggacaggcgctctcttgggccgctcgcttccctcacccgcgtggacgcttgtaacccccctactgcaagcgcacctgacctgggcgcgggacgaacacgaaggtcgcgggacttacacctctctcacgctcgactccggccacctcgcctctccccccttcgcgctcgcccacgcgctcgacccatctgggctggggcacgcagcacactcactcgtcggcttagggacccccctgtctcgaaacgccgacaggggcggggcgaatttcgcctgcgggggcctagggcggccggtccgcggcacggtggcgggtgtccgcggcggcgaagccgccggcgcccgggagggggagagggatggaggggacggcgagctccgacgagcttccatgatggcgggcatggagcaaacggcgacgagacggctcgggcaggctgaggatgaggggacggctcgggcacagtggcggggttgtcgcggaggctggcgagcattaatggcgaggcgacgaggcgaggggtgctcggcggcgatcgcgcccggtgagggatgggcgagggagaaggagctgactggtggggtcgggctgccagtgagagaggtccgcgcgagagagagaggggcggggtgctga

SEQ ID NO: 40988 - DNA, 444 bp, Zea mays
  Peptide Sequence Number=SeqID_84363
atggctaggaaaaaggatagggaggactacgccaacgctttatggaccagaggttccgcgctgcgagagaggaagacgggatggtggttgcaaccccccaccgcgaacaccgcgcggtcatgggacgtccgcgacattcccgggaggatgaagatgagctccacgcaggttacacacgatgaccagtgggcccccaagcgcagtgtgagaacaggatcgcaacgcgggtgcaaatcagtgtatgatgcgtgggtcccacgtggaagcagtagcggtggggcgcacgcggaggaactggctgacatgtgggtcccaccacgcagcggcccagccggtacccacgcgagtcccacgggtgctgacgggcagggcccacttggcagcgccgacgcttgctctgggctgcgctggatccgaaaggggaaatgggccaaaacgtggtag

SEQ ID NO: 40989 - DNA, 234 bp, Zea mays
  Peptide Sequence Number=SeqID_84364
atgaggttcgtgggcatcttcgatagtgtcttgttggtgtttcctacctcgttccgacaagtaaatttattatgcgtgttccgggctccggagggtgtgcgcagagggtgcaagatttatgcagatgaaggccagatggaggtgttggagcgttacgacaatgcgacgagccgtgtcgttaacaagttgtctgtggatgaattcattcgcgacactcctgatcctgcattgtaa

SEQ ID NO: 40990 - DNA, 1104 bp, Zea mays
  Peptide Sequence Number=SeqID_84365
atggcggcggcaggcgggcggaggcagcagtcaaatcgtctgcaggctcacgccccctcctggagcagcaggagagccctctcccacgacgtgaagacgaagcgcccgtgttccgttcctcgaacggctcacgcaacggctgccccgcgaaccactcgtcctgtcgcattaactccacggcaggacaggcgacacctttggcaggcgaagcgggcgacgcttcacctccgccataatgaccgcgtcaaaaaagggaccgggaaaggggatactccgaaagggatccttctccgcgaaggaagcgggccccgagccctcctactaatcagaggttcgaaggctggcccctcggaatggttcgacagccgcctcagagcactcgggctccacgcccattactggtcagaggttcgaatgttggcccctcggaagggttcgacaaccgcctcaggccactcgggctccgcacccactactgatcaggggttcgaaggctggccccccgaagggttcgacaaccgcctcagaacacgcagagcgagggatgactctgggtacgtccgatacatggccgaggctcgggctacgctcccgagaggcccggggactgctctcgcaaacccggctccagccaaaccgttgacagcgtcaacataccagcccgagaactcggaacctgaccatgcacccgggctacgaccagaaaacagcgccgcctgccctgctccgactgctgcgccactcgctagagtgaggctgacagcaaccaaatccagcctcaggcgccataggaagctccgcctcgcccgaccccagggctcggactcaacctcagcctcggacgatggactccgcctcgcccgaccccagggctcggactcaacctcgacctcggacgacggtctccgcctcgcccgaccccagggctcaaactcagcctcgacctcggaggagtcaccacctcgcccgacctcgggctcggaccgaccacgccgcagggggccccttacggaagcaaggagatgtcagcaaggacccgacagctccgacagctgtgctcctacagggctcaagcgctcctccgacggccacgacatcacatga

SEQ ID NO: 40991 - DNA, 633 bp, Zea mays
  Peptide Sequence Number=SeqID_84366
atggcgtcctccgacgaacccgactctcgctcaaagaaccctgccatgcagccgagctcgccactatcctccgagtatgcatttcaaggcacttctccagcctggccggcccgcagcccttccatacagttcgtgtccaacgtcgttgtcggtgacggcgacgcggtggcagcgtccctgagcgcctgcccgtcgtcgacggcgagctcgtctcgtgggagctcatcggacattgagatccaggtgctgttccaggggggcgacgacgacgatggctccacgacgacgtcgccggcggcagcgtggtcgcgcagcacgtctttccgtgggtgcagcgacggcgagctggatgtggaggccgggaggtcaaggctgctgcgggcgcattcgtcggtgaggtcggtggaggagttcatccagcgcgactgcacgggggagctgaggtggagtgctctggagggagggcttcagttcgcctccaagtcgcggagtaacgcagctttactagacgtatttacacatgaaactaagaaaaatagctactcgctttcatccagatatgcattgcattctacacacacagtggtccgcttgagcgtgacgatgacaaagctcgccaagctgttgaaatag

SEQ ID NO: 40992 - DNA, 1878 bp, Zea mays
  Peptide Sequence Number=SeqID_84367
atgagagtgcgcacaagcgagctgtggcaggctggcagctggcattgggaaaatcaggcaactcaacttgatagatcaaaggatgaaggtgagaatgaatcttacagttcaaccatatatcctcttccggacaattatgccgatcaaccagaattgtttacgcaagcatatctttgcagctgcgacagaaactcaactagcagaatcacagggaaggatattaagcaggcgattatgttcagtgcctctttgaacaagctcacattaaaccaagatgaggccaccgaatacacaaatttgatcctagaagaacttcagacaggtcaaggagtcctccagatgaatgtcatgagcaagggcctgtcaagggatctccaaccaacctgcgggccaataccagtgccaatgaaatgcagccgacagcgacatatacttactgcaaccgtagtcttcttccaagctcactggaggcgtatatttgtggttttcttgtggctcatggcatgtgctgcactcttcacatggaagttcatgcagtacagacagcggttggctttcgaggtaatggggtactgcctgtcgacagccaagggggctgcagagacgctcaagctcaacatggccattgtgctcctacctgtttgccgcaacacggtcacttggctcaggagaagccgtgttatcaactcggtcatcccatttaatgacaatattaacttccacaagcttgttgcagcgggaattgtgatcggtgtaatccttcatggaggcatccacctggcatgcgacttcccaaggatcacaaggacagataaggccttctttggacgcacaattgccgctgactttgggtaccaccagccatcctacctggagatagtggtatcaaccgaggggacaactggtatagcaatggtggtactaatgtttgtcgcattcttgcttgctagtagtccttcgagaagaaatccaggaatgctgccacctctcgtcagacagttagctgggttcaatgccttctggtactcgcaccatgtgttcatcgctgtctatgtgctcctcattgtgcattccatgttcctattcctagcaaaggatgtagcagagaagacgacgtggatgtatgtcgcaattcctgtggtgatctacattggagaacggatgttcaggatggtcagatctatggtgttcgatgtcaagatcctcaatgccacagtttatccagggatggtacttgcactcaaggtgacaaagcctccaggttttcggtatcaaagtggaatgtatgtatttgtccaatgtccagaagtatcaaagtttgaatggcacccattttcccttacatctgctccagacgatgatcacttgagcatccatataagatctcttggtgattggagctaccaaatgtatgatgtcttccaacaggggcatggcaacttaaattatcactctgaccgactgaagaaggcctacttttattgggtgacaagagagcaaggatcctttgagtggttcagggatatcatgaaagaggtttcggttctagacagcaagcagggtgtgatagaaatgtataactacctgacaagtgtctaccaagaaggtgataagcggtcgatgctaataagtgcgattcaagcacttcattttgcacgccatggcattgatatcatctcaaaaactcctgttcatacgcacttttcgaggccaaactggcctagagtgctacatggccttgcaagaaggcatatcggggagaggataggggttttctactgtggtccggacgatttgggaaggcagctggagaagctctgccacaaagtgaacacaaaaacattcacgcgatttgtgttccacaaggagcatttctaa

SEQ ID NO: 40993 - DNA, 1308 bp, Zea mays
  Peptide Sequence Number=SeqID_84368
atgccgtcggcttccctccgcctcgccgtcgtcggcgcgggcgcggcgggcctggttgccgcccgcgagctacgccgcgagggccatgcgcccgtcgtcttcgagcgcgccgccgccgttgggggcacttggctctacacgcctcccgccacgtcctccgacccgctcggcgccgcggcgacgcattccagcctctacgcatcgctccgcaccaacctgccacgcgagaccatgggcttcctcgacttccccttcgccgctggcgccgcgggctccccgagaccccccgccgggtttcccgggcacgaggaggtgctccgctacctggaggcgttcgcgcgccggttcgacctgctccggctcgtccgcttcgagacggaggtgctcagtgtgaggagggaagacggagggaggtgggctgtgacgtcgaggaagctcggggataaggggagcggcgaggaggagttctatgatgccgtcgtggtctgcaatggtcactacacggagccacgcctcgccgtcattcccgtgatcaattcttacacttaccgaacttcgacaggggtagatgcttggccagggaagcagatgcatagccacaattaccgtgtgccggagccattccttgatcaagtagtgatcataattggggcctcggcaagtgcagttgacatttcgagagacatcgcaagcatggcggaagagatatggaagcttttatctactggaggagctgccacagttagtgttgtggcgaatctaatgctcgggctgcagattgaccatgcgcaggaggatggcactgtggtgttccaggatggcagctcaatcaaagctgatgttatcatgcactgcactgggtatagtgatctgcagtatcacttgcatcccgtttcctacaaaagcatgccattttgcgttaatttggaatctgataatgtgcttcttgcatttgttatccccttcccactgtttgaactccaaagtaagtgggttgctagagttctatcaggacggattaatcttccatccgaagacaggatgatggaagatgtgaaggctttctatttgaaactagaagcacatggatggcctaagagatacacacataattttgcaaattaccagtttgagtatgatgattggctcgctgagcaatgtggccatccaccagtcgaagaatggaggaagcagatgtatgctgtaacttcaatgaacaaggcagctcgtcctgagagttaccgtgatgaatgggatgacgagcatctggtggccgaagcaaatgaatacttcaagaaattcttgtaa

SEQ ID NO: 40994 - DNA, 378 bp, Zea mays
  Peptide Sequence Number=SeqID_84369
atggtgcagccctgcagttggggaatcctcctcgccgtccttgtcacggcagccgtcgtcgtcccgccggcgaccgcgacggtggcgagcatcgaccttggctcatctccttcccggccttacggaagcggaagagggaccaatggcgtcgtccctctccctcgtgcccccaagctcatcgccgtctccaccggcgcaggagctaggaagctaccacagccctgtcggtgttttgggtccgaccgcacacccggggttgcccctcaaggtgtttttaggagtaggacggtgtcgacgactgtagcaaaatggttcgtgccaggtgcacgagggacagtgaacaatgtttacaggttcgggccgcttagagatgcgtaa

SEQ ID NO: 40995 - DNA, 1965 bp, Zea mays
  Peptide Sequence Number=SeqID_84370
atgcacgtactcggcgatttcctgaagcaccgggtcatgccactacaggggaggccgcgtctgtgttgctggtttactggccccaacgacataggcaggatccagcgcgggcctgggactgacctgacctgggagcagttggaaatttttttgagggggatcattggtgaggcttttatccccgaatccttgatgcctcctcagggcatttcgccgctctgcgacaatccagggttgcgatcagcggtgctggcccggctgccaacccttgatgagagtggggtggcggtccgccaaaccggcggccaggacccccaccgggggatccatattcccggtgcaccagtaggaggtccccagcctgctgatgtggcccccagagtcccctctgcgggccccagttcctcgaacaagggcaagggccctgcatgcagctcctctactccgaacaccgccgggaggtcggagggagtaaggcggcaccgactgcgtcgcgccgatgggtcctttgtctcggaccttccccttggttcggactccccccagaagcgtcagaagacagctggtggggctaaggaggccgatcctcgggtccaggacgggcagaggggcgtgagccctctgccgccacctccttcaggttcgacaccaccaccgcctacgtcagaccggccgccgtcaccgcgggggcagcggcagcagggacggcagcagcaacaacaacaacgggcgccctgcttccaagggccccttcttcagcttctgtggacgctcatcccccttcagctactgtgcccgccggcggggcctggttcccagcagcaaacatctgacggggacgtcgccggcgatccgtcagcggctaccgtagattcatcagcgtcagtgccaagcccagcattggcagtggccgaagaggttctcgctgcgtctgcctccaccgtgcagggtgatgctggcgctgaggtggcgccatcggacccccaggatccgcctgttaccgccgaggcgacgccttcggggccccaagttccagctggggtccggaggtggcaacattgccaacggctgttgcagactcagaggcgacgataccttcaggtgcaccgtcggtggaaggaggtacgcttagaccaaagggaggaggccgtcacaacgctccatgataagctgaaagcttataatacggtgttggagaaacagcgggacaagcaggctgcggttgaggtgaagctgcagaagcttcaacaggaactcaccgacaaggcccgcgacattgctcgcgccgaggaaagcctcaaggcgagggaagcttccctagcaaaatgggcaactgatctcacctggcaggaggaggacctcgcctttagggaggagatgtgggcaaggcggaacaagctgctggatgagcttgagctcgaagcggaggagagaagggagcgtttggagggaaaagtgtgggaactggaggagcgggtccatcagttccaggcagcgcaagctgcccaggcgacgcagacaggctcggacccccaggcggtggaggtgatgaggaagacactcgacgacctccgggctgagcaacgcatcggggcccagcgcatcgccgcctgggctggtgaggcaagcacgacgttggtgccgttgggggtgagccccatcccggcgctggtgcggccagcgtccatctccgacgcgctcccggtactggattccgctgctgagcgtcttcgacgtctggatcggattcttggtgcctgcttggaggccgagggcagcagactttgccggtcggcggtagaatatgtcttgacatgcttccggagccacgactcggctgcctccttggggccagtcatcgcgggtccggtggccgatactgaagatgctgcccgggagggcgtgcaggacgttgtggacgcggtggtcgggcgctttcagcgggatcctactgacgatgagtag

SEQ ID NO: 40996 - DNA, 1368 bp, Zea mays
  Peptide Sequence Number=SeqID_84371
atggctgaaaggtaccaactcccacggagttgcgttcccccaatgacaaggcggaaggactgcgggcatcccccatccgggggctcggaaggtggaaagacacgacgcataagggagcgcgaagacatggtcgcctttcaagggggtcaccctccttttaaaggcgactctccctacttgtgtccccagccgtcacgggctgagtcttctccagcacgctccaaggtcctcccactacggcgcgggggctgggccccacgcgtcatgcaagccggcccagggtggaagaagccaaaccgccgcgcgcggtgcatgcaaccgtccagcggttacaagcgtccctccacttttgcccagaccagcgggcaaaagggcgggcagccatgcaggcggcatgcaaccgcgccaagtgggcgcacctctccgacttccagcgcgcccagcatggaagcccaggcccacgcgtcatgcaaccagcgcgccggatgctgcgtgcgagcaactgcaccgccacccgcgccactgccacgcctcctcgactgcggaaccagtaccgcgactcgaggcaaccctacgcacgacccagcaatgccagcctggcgcgacgggcaatgcggccaaaaatgggccggcagtaatggcggtggcaggcgggcaggagcagcggtcacgtcgagaagcaagcgacgcttcgccttcaccataacgaccgcgtcaaaagaggctccgagcctccctactgatcagaggttcgaaggctggcccctcgaagggttcaacagccgcctcagagcgcatgggctctacacccactactggtcagaggttcgaaggccggcccctcggaagggttcaacgaccgcctcaggctactcgggctccgcacccactactgatcaaggcgggaacgatcttgtaacggaatcccaccagagggaggcatcgagccctcggaccccgtcgataggggaccaggtccggcagatcacccgcaggtacttttgggcgcgcctctgggcctctagccgacccctagcgaatggggcacggacgtccgctcggattacccgccagcagctcaccggagacaccatgttcggcgccctccgagggcaacatggcggttttcccctcctccttgcggaaaggcgacgcaggggcgtatgtaaaaaagtcgagtctatccctgaccatcctctcgccctgtgcagaggctcgggggctgctctcgcaaacccggctccggccaaaccgttgacagcgtcaacataccagcccgagaacttgggacccgaccgtgcacccgggctacgaccagctcgcatgagggaacgaccagaccagccaaagcattgcgcgaggcgttaa

SEQ ID NO: 40997 - DNA, 435 bp, Zea mays
  Peptide Sequence Number=SeqID_84372
atggagcaccgtcccgggttggagaggttgctagagactgcccatctggagcttgacgggaagctgttcgtcaacacgcagcaggcccctacctggcgcgccaactgtcagcgtttcgagaccgggggatccctgggccgacgagtgaatgtcgtcgcgtgccccagcccagatgggtcgagcgcgagggcgagcgcgaaggggggagagttgggcgatgaggaagctcctccgaagccgaaaacgagtctgtcttccatggccgaggtcgagtccgagcccctgggtcgggcgaggcggagttcgtcgtcttctagggctgagcccaagtccgagccctgggtcgggctgagcggagtttgtcgtcttctatggctgagcccaagtccgagccctgggtcgggcggagcggagttcatcgtcttctggggctga

SEQ ID NO: 40998 - DNA, 743 bp, Zea mays
  Peptide Sequence Number=SeqID_84373
ggtcggacgagggccagcttgctatagctgcggctggcgcggcgatcgtgacggctgccatagtgccgagggcgaagggcgaagctcttggcgccggaggcgaggtgtcggccctcgcggtggtcagggacgaggcgggcgcagcgacccgccggctgaagggagtgacggaggcgctgagtcaggcgacggaggcgctgagtcaggtggctgacttcaccagccgtactgcgtcgggggccattacagcggctttgtctgccgaattcgagagactttggacgcaacatgccgacgctgtccgtgagaaatcggcctccgacagcaagtgccgtaaactggatgacagggtggccgccctggagaaggaaaaggctgacctccggcgccagctggcgggggagaggagggaggccaacgaagccatcgccaaagagcaggctgcgcaggcggaggccaagctggcgcgggcggaaggcaatattgccaaggagctcgccggacatctgcaggagcggctcaccgccctggagagccgcacgaagggggccgaggccgcgatgcgtgcggaggccgaacggacgcgtacacagcttatggatacatatcgtgagctgggtgcgcggactggtgacttcgaggtgccggaccgggagcccgggcttcgttgtctggaatgggtgcaggaggagctgcaggaactccccgctgtcgtgggggggggggggtttgtgacaccctag

SEQ ID NO: 40999 - DNA, 327 bp, Zea mays
  Peptide Sequence Number=SeqID_84374
atgcgaggtggagcaaggcacccaaacgagcagccatggggcaccaaggaagggaagcgccagccatggaggtgctcggccctggggaagaaggggccggctagggatgagctgggcgtcggcgtgctcccagggagcttctgctcctgcgcgcacgaagaagagaaggaggagaatgggcgccggctgctctcctgcagggagcaagcgccatggacagaagctcggctggagcaggcccgcgcgagggagaaggacagggcgtcagcaaggggctgcaacggtggagtgctcggccctggtcgagctccacgcgagggagcctag

SEQ ID NO: 41000 - DNA, 303 bp, Zea mays
  Peptide Sequence Number=SeqID_84375
atgcgggggaaggcgaactgctgctgccttgtcagggtgcagctgttcgtcctccacccgagcgacggtcgtgccgtgcataggtggctgttgtcgccggtgctgaagtggtggtggccgccgctggtgaggcttcccaccgcagcggtggttgcttccgtcgatgggaccgtcagtgccgcctgcgctccggacctccggctctttggctttaatggctggttctcgtcccccatgaggggacatgaacaagggcctttcagcagtagtgtttgccctgaggccatcgctgctgctatctag

SEQ ID NO: 41001 - DNA, 162 bp, Zea mays
  Peptide Sequence Number=SeqID_84376
atggcgcccaagagaaaaactgcgaactcgtctgctgcggtgatccccgcaatcgaccccaacagtcagttacctttcgcagaacattcagccgctgaaagacagggcctatccggcatatctgtatcgagggctggccgattcaacccgggttaccaatag

SEQ ID NO: 41002 - DNA, 723 bp, Zea mays
  Peptide Sequence Number=SeqID_84377
atggaggacggtgccgccgccgccgtattgatccgcgctgcggcgagttcggcgccgtatcgccactccgccttcctatccgcgctttgggctccgtcgtcccagttcccatctccggccaccactatttccgactcggtcagcatcggtcgggatttctcatcaggggaactcaagccaccgcatccacttcgcacgagcaccgtagttcaaccatcccttggtggtctggcggattcgacagggtgcgtggatcgtgctcaggactattggaccggggaatcatgtgtcccgtggatggaattgctcaccggatcgggctcacccgcggccgcgccgcatcacactatggtcggggtcgtcatcgcaaaatcattggtaagcgccacgttccctgtgttaatttcactcacccgaagtatagagccgattgagctagacgatagatcaccggagcccttagaatttctcgttggtgtggttgatggccgcggggccgctgtgcctcgtgggcagaccgcctccatcgcttcaaaccttcaaaataccaagaatgtcgatgaccaactcaagtacttggtgtactgtatggagaatgcgattctaaatctgccacatggtcaggatcagatggtttggcacattgattttgctggtttcaacttagcaggcgccgacgggcttgggacgtctgtcacgccgtggagcttgcggagcgcatga

SEQ ID NO: 41003 - DNA, 219 bp, Zea mays
  Peptide Sequence Number=SeqID_84378
atggtcgttggaagactgctgtcgcatggcgcaccggacagtccgttgaacttcaagttcaaccagggtccagggcaggttcaaccggtgtccagagaggttcaaccagggtccatggaaagttcagcgggggttttttttctggacctcactggtcaaaaccggttgaaccggtccgaggggaggttcaaccggtgtcagggtcacctaacggtctga

SEQ ID NO: 41004 - DNA, 342 bp, Zea mays
  Peptide Sequence Number=SeqID_84379
atgacggagggcgagcgacaatgctacttgacatgctgggggcatggtcggccgatgtggtatgcttcgtcgacatggactgcacagtggacttcatgccactgctcgactacacggaggagctcgcgcctaccgccatccaaggcagcaattagccattgtagtcggccaggttccccggcactaggaggcgggtggatggaaagccagtggagctacccacgccatctccgacagcaaactgtccttattgcaaataatgtgtcacttcttaacatagaggcacatgcacctacctatactagggaagatctgaagcggatgaaagaaatgacaccttag

SEQ ID NO: 41005 - DNA, 1161 bp, Zea mays
  Peptide Sequence Number=SeqID_84380
atggcggctgttgcgtcctccgctctacacgccgttggcgccgtcgcctccgccaagcccagatccgtcgcccccggtcacttggttattcctgcacaacattatctggacacggatatttatttatttgttccattttttcatggaggcagattgatggcgatggaggtacctgttttctgccgtcctgcaatgcaagtgaaactgcctgctgctgcgctgatcaacaactccctgaccaaatctgggcagcttgggactgcattgtttggtgccatttcaaaatacagaaacatttcaagattcatttctctcatctctcaaacatctacgaagaacataggtccatgttgtagcttcagctcgtcttctgatggtaatggatacatggctggaaactctagcgagagtgatgaagactatgttaattctactgtgctagaagcagttgaggtgagaagtgggtcagaaggatatgtgataaagatgcgagatggaaagaacttgtgttgtgtccatagtaattttcaagggagaaatattccagagagtgcaccacaacctgctattgttttgaggattgaagatggaagcagaactttactcctaatcattgttttggagatgccaagcgttcttctgatgccagttattcgtaatgtccacattgcacgagcgaccatatatcaagctgtcaaggaaatgattgataaaatgggttatgaggtaaaacttgttagggtaaacaaaagaattcaagaagcatactgtgctgatctttatttaacaaaggtcaatgatcctacagacaacaccaccttcgatcttcggccttcagatgccataaacactgctgttcgttgcaagggcttccgaaagtgcgcgacccccaaatcccaccatggtcgagcgtcgacaacgctgacctcgccccagatcgatagcgccaacatcaccccaaatcccaacagcaccgatagcgccaacctcgccccaaatcccgatagcgccgacatcgctgacagcacgcggcccccaaatcctgccatcgcccagacatcgccccagatcgactataatctggcagcccacaaccctgtcatccccgaccatggccccaaacctcgccccagatcgacgcagacctaccatcgacgctga

SEQ ID NO: 41006 - DNA, 204 bp, Zea mays
  Peptide Sequence Number=SeqID_84381
atgataaataaaaccaagatagttcttcttgacttgttgcagaactcaccgtactcgagatcaaagttgcaggcagacacgatcgagaacatcgtgaccaatattgcttcccaaaaaaatggcgaagaccgtagcgacaaatggaagaagatgcttgtcgagattgtgaaagtcaacatggagcaaagccggaggcatgtgtga

SEQ ID NO: 41007 - DNA, 447 bp, Zea mays
  Peptide Sequence Number=SeqID_84382
atgaagtattatttgaggtttgtatggtatctgaaggcagatgaagtattaattgaggtattgttgacgcagggaagtgatatacaacctatcgtggttgttcgtgtaaatgagatgatgacaataatttcaccaccaaatgttggaacttgctctcctgggcaagttgatccaacaggaaagtggaaagagtgtttgcaaagcttaatgtgggatggcaatagctctattgatctggcctctcaagggcactggacggggactgtcattacaggaaaggccctcgtggacaacacccccaagaggccttcgaagatgaagatgtcagcaaaagacagcgccaagagcaccccacccccgaaggcaccctacgcacctgcagctccggaggcgtaccgcaagcaccacctccaggctttgctccaccagagggcgaagacacaatag

SEQ ID NO: 41008 - DNA, 1893 bp, Zea mays
  Peptide Sequence Number=SeqID_84383
atgaacaaaaacactggcattcaaagtgccattacaaacggaacttcggtcccacctccgcagcaacaacagcgacccccgctccgggtggccgaactgcagcagcgagggcctcatggcggatgctgctgcaatcttgccctcgcccacgccgacgctcgaggggcgaggacaagtacaaagagtcggaggcccgaagcgcggatggtggcggtgatcccgtcggcaacggggacttctcgagccacctccacctcggcaccgacgacaggggccgtcgaccctccggcagatccccactcagatcctcccggacgagtggggcaccgacctccgcgcggaggcgccgtaccggtgcaaaggcaggaccgcccgataacacgaacgccgccctggcagtgcgcgatatcttgggcggtcctcccgtgcacacggcgcgacagccgccttccggcaggagggggcaccgggagccaagccgacgagcccgacgcgttgaggctgacgacgcccgccgtcgacctgccccgcgttgtcgaagtccgacccgcccgcagggccagtgagcaccctctccctcgaacgccgaaggagaggccgacccacgaacccgcgtgggaggtagagctccggctcagcccggcctccacaccagcgaggatgatgaacatccttgaagctgaggggtgggaccaagatcgcagcccggcttgcctctccccatccaggggctggtggtcaccgtctcgggtgaccgccggcggagggaaagacgatgggtatcccccatccgggggcttagaaggtggaaagacacgatgcataagggagtgcgaagacatggtcgccttccaagggggtcaccctccttttaaaggcgactctccctacttgcgtccccagccgtcgtgggctaagtcttctccaacacgctccaaggtcctcccctacggcgcgggggctgggtcccacacgtcatgcaagccgtccagagcagaagaagccaaaccgccgcgcgcggtgcatgcaatcgcccagcggttacaagtggctctccacttttgcccagaccagcgggcgaaagggcgggcagccatgcaggcggcatgcaaccgcgccaagtgggcgcacttctccgactcccaacacgcccagcatgggggcggaccaggaaagggggataccccgaaaaggatccttccccgtgaaggaaccaggctccgagcctccctactgatcagaggttcgaaggctggccccttggaagggttcgacagccgcctcagatcgcgtgggctctacacccactactggtcagaggttcgaaggccggccccccggaagggttcaacggccgcctcaggctactcgggctccgcgcccactactgatcaggggttcgaaggctggcccccgaagaggctcgggggctgctctcgcaaacctggctccggccgaaccgttgacagcgtcaacataccagctcgagaacttgggacccgaccgtacacccgggctacggccagctcgcatgagggaacgaccaggccagccaaagcattacgcgaggcattaagacctcggaggagtcaaaccactcctccgaggcctcgggggctacacccggcgggtgcgctcgcgcgcacccaccggaacaaaacgcaaccgagaagggctggtccccttgcaaaaaagtgcgacgaaagcctccaagcgagtgctaacactcccttcgaggctcgggggctactgtcggggaccataattaggggtaccctcaaggctcctaattctcagctgagccgaagtgaccgccgtcacttcgccgctccactgaccggcctgacagaaagacagcgccgcctgcgccgctccgactgcggtgccacttga

SEQ ID NO: 41009 - DNA, 1971 bp, Zea mays
  Peptide Sequence Number=SeqID_84384
atgccatcttcttcttcttccgccgacgccacgccgccggccgccgcctcgtctgaggagacgttgagtagcgtgatggtggaggagttgcgcgccggcgactctgttgaatttggagtgtcacggatgacgtctgcccgcattgaagatatgcagcggttgggctattttggcggcggagtcgctcgtgctccggggacggaggaagtccccgagccggagggcgagttggttgttttcgaggcgttcttcgtcgccggactccgcttgcctgcgcaccgggtcttcgaattaaatcaactgccgtacgacggctaccctggtcaagacgaagcggaccgccgtgggaagaaaccggtggtggagactggaggcgaccctgcgctggcggccgccgcctcctcgaaaaagagaaaattagtgatggacaaggatcgccaaggtgcggcgcgaaaacgccaggcgactgtgagggttcacgaagctcggccgaaaaggcagcggggaacggcgaaggctgaggcctccggcggaggcaagccgccgctgccggcgaaggtgggcgcctctgcgcctggcaaggcgccggaggtgacggtgggcgccggaggcgccaagctgacgaaggtggcgccgtctgtcagcggggtggaggaggctgcgaaggcggcccgaacgttaccgccgcccggcaaacgcgttgccgacttcggcaccgagattaatgtggaggattatcttggggggtcggacgagggcccgcttgctctagttgtgcctggcgcggcgatcgcgacggctgcgccagcgccgaaggcggggggggggggagagacccttggcgccggaggcgaggtgtctgccctcgcgcaggtcagggacgaggcgggcgtggcgacccgccggctgaagggagcgacagaggcgttgagtcgagcgacggaggcgctgagtcagctttgtctgccgaggtcgagagacttcggacgcaacatgctgacgctgtccgtgagaagtcggcctccgacagcaagtgccgcaaactggcggagaaagtggccaccctggaaaaggagaaggcccgacctccggcgccagctggcgggggagaggagggaggccaacgaagccatcgccaaagagcaggctgcgcaggcggaggccaggctggcgcgggcggaaggcaatatcgccaaggagctcgccggagagctgcagcggcggcttactgccctggagagccgcgcggagggggccgaggccgcgatgcgagcggaggccgaccggacgcgcacgcagctcatgactgcatatcgcgagctgggtgtgcggacgggtgacttcgaggtgccggagcgagaggccggacttcgctgtctggagtgggtgcaggaggaactgcaggagctccccactgtcttggcggggttgatgtcgttcacctccctggtcacctgcgaggcagcgatgaacgcgctctctcgcgaaggctgccggcactttgaggccctcgaccaggcggatgaggattttgggcgagatatctttgaggtcgaagaccccgtggtgaaggaatccgccggggccctctatgaccggatgtggggttcatacggtcgtgaggtggtccgggcgcgggccgaggctgcgagggctcaggcggagcgcggcgagcgggtggacgacttcggggcgctgaacagcgcgctgcctgacccggagacgacccctgcggaggccgcgactggagtcgccccgggaccgaccccggagactacggaagatgcaccaggcgcccctgcacctgccgcgtccggcgaagaccttcccccaaaggtggccgaaggcgcgcccgatgcccccgcagctgatgtgccgagcgctgaagatccggcggaggtgggggcggaggcagcggcggaggcctcggcggaggctcccgcagcggcagggccttcgcaggtggcatag

SEQ ID NO: 41010 - DNA, 81 bp, Zea mays
  Peptide Sequence Number=SeqID_84385
atgcggcttcatacccttagagatgatgtggttttataccctcagaggtgtttgttactcatcaaggggagtgggaagtag

SEQ ID NO: 41011 - DNA, 1233 bp, Zea mays
  Peptide Sequence Number=SeqID_84386
atgcccgaggctaggccgaagagggcgcgagggaccgtgaaggctgccgcccccggcggtagccagccgacgctggcagcgaagtcggccgcccctgggtccagtaaggtgccggatgtcgtgaaggcagccggcgccggtggagccaagtctgcctcgaccggagccgcgaaggcccgagaatttccttcgccagggaagcgcattgccgatttcggcactgatattagtgtggatgattatctcactggatcggacgaggggcaacttgttgttgttccgcctgcggtggcgaccacggtgtctgccacagtgcctggggcgaagggtagcgctctcagcgctggcggtgagatttcggcgctcaccgccgtcaaggacgaagcgggcactatgtctcgccggctgagggaggcatcgcagcggctaagtcaggcggctgacttcgctgaccgcgtggcgtcgggggcccttacgacggttgtgtctgccgaagtcgagagacttcgggcgcagcatgctgacgccgtccgggaaaagtcggccgccgatagcaagtgccgcaagctgacggagaaggtggccgcgctggagggtgagaggactgacctccggtgccagctggcggaggagaggagggaggctaatcaggccctcgccaaggcgcagtcggcgcaggcggaggccaatctggcgcgggtggagggtagtctcgccagccagcgcaccgaggaatgggagacgtggttcaacgctctgcaggcccgcatggagagggctgaggcttcgacgcgctcggaagttgagcggacgcgcaaacagctcatggactcataccgcgagctgggcgcgcggaccactgacttcgaagtgcccgaccgagagtcaggccttcgctgcctcgagtggctgcaagaggagttgttggcgctctcgaccattatggagggatttgtgtcctttgcttccctggtcacctgcgaaggggtgatgaacgcgctgtcctgcgaagggtgccgtcactatgaggtcttcgaccgatctgatgaggatttcgagcgcgagatttacaaggtcgaggaccctgtggtgaaggaatccgcgggagccctctttgaccggatgtggggcccccacggtcgggaggtggtcagggagcggtccgatcgggcgagggatcaggcggcgcgtgacgagaaagtggaggacttcagagctttgaacagcgtgtga

SEQ ID NO: 41012 - DNA, 996 bp, Zea mays
  Peptide Sequence Number=SeqID_84387
atggtcattcaggccttccgtttgttgatgagggtaaatccccgtgccgtgattattctttctcttttggtcttcagtggtgttttgtatgtgggagctagtacatcaccaattctggtctttgtgttctgtatatgtactctcagtctattcttctctgtctaccttacaaagtgggttcttgctaaggacgaaggacctccagaaatgtccgagatatctgatgccataagagatggcgctgaaggtttttttaggacacaatatggaactatttctaaaatggcatttattctggcctttgtcatccttggcatttatattttccgcactaccaccccacagcaggaggcatctggcttgggaagggcaacattagcctatattacagttgcctcttttctccttggagcgttatgttctggaatagctggttttgttggaatgtgggtgtccgtacgtgcaaatgtacgagtttcaagtgctgctcgtcgctctgcaagggaatcattgcagattgccgtccgtgctggtggtttctcagccattgtggttgtttgcatggctgtatttggcgtggcaatactgtactcaacattttatgtttggcttggagtagattcacctgggtcaatgaaggttaccgacttgcctcttctccttgtgggatatggttttggtgcctcttttgttgccctttttgctcagttgggtggtggaatatacacgaaagctgctgatgttggagctgatctggttggaaaagttgagcagggaataccagaagatgatcctcgtaacccagctgtcattgctgacttggtattgatgttctcaaaaactactcaggttggtgacaatgttggagattgtgctgcccgaggcgctgatctttttgagagcatagcagcagaaattatcagtgcaatgatacttggaggaacaatggcacagcgctgtaaaattgagggcaagtctcttttgcttaccctctaa

SEQ ID NO: 41013 - DNA, 312 bp, Zea mays
  Peptide Sequence Number=SeqID_84388
atggggaggctagaacccagggcagaatgggaatcacgacttgtgggtaaagtgtgcgacctctgcaaagtgttagaaactggtatatcagccgtgctcacagttaagagcggccttgtgtcctctttgattagaagaactttggttatgtcacacccgggttttaggggtccaaagcccggacgcgaacataatcaccagtttataggaagctccaatgcatggttcttgcctgaccgccatcgcagcaaaatcaaccaaggacctccctacactgaccactcccctactgcccttgcccctttcgggtaa

SEQ ID NO: 41014 - DNA, 441 bp, Zea mays
  Peptide Sequence Number=SeqID_84389
atgggcaagaacaacaagcgcaagcgtgagccgactcctccatccgaggacttcggtgattcggagtactcagaggaggagttctcctctgagtccgaggggtccctggctcccattcctctgcgtgagtcgtctaatgattcagacgactcccaggggcttgcggcggaggtctggacttacatccgggccgtcgagcgctccgggctcgagggctcggatgagtcggagtactcctcggacgaggaggactcgtccgaggaggacggcggcggcgatggcgaggacgatgatgacgacgacgaaggcggtggcggcggtgacggtgacgacggcggcaggggcagcagcggtggtggcaagggtgacgacggcggcagcagcaggggcggcagcggtggcggcggcagcagcaaggggagcaacaaggccagtggctaa

SEQ ID NO: 41015 - DNA, 573 bp, Zea mays
  Peptide Sequence Number=SeqID_84390
atgaccggaaacacaagccctctgctcccctgctcaacctccgatacagaacgtgctgcgcatagaggagaagatggcaaggctgatggaaggtctcactcacagatcccaggcgcggagatcctcagccctcgcagagttgcggcgctgcagcggcactgcgccaatcgaggattttaccccgcacccaaccaccccagcagcacaaggaagcccctttaccatgcgatgtacacaggtgaagggcgagtccgagcggagcagcagcgagatcaacgacggagttcgcgggttctggtggtaatagcctacggtgacttcgggttcctgtttcacgcgcggcccacggggaagacaatcctggcagcatgggtccaccaaccagagaggaaaaccagagggtccgagcgcgaccgtacaagcggtcccacacgccagagccaccgggatgacagccatgagagcgggcagtggctggccattgggccccacatgtcagcgcgaagagccaccagctgggccacgacgggggaaaggttaatgggccaaaaacacatgcttccaatcatataa

SEQ ID NO: 41016 - DNA, 1674 bp, Zea mays
  Peptide Sequence Number=SeqID_84391
atggctgtttccgactgcaaggttatgcaagaactgaccgaccccgagcttgcgttgtgtcgcaaagacaaggtgaaggctgtagagttgaagggccacggcaacgcgtgcttctctaggagggagttcgggaaagctctcaggttctattcgcaggcattgcgccatgtcccaattaattcgggtggcatggatgtgaacttggcttggtacaggaagggaatggtaaaaacagcgctcaagaattattcatctgcaatacatgatttagaggtggcattgagccaggaagtgacttcttcggggaagagtaacatagaacaagagctgaagttgattttagagaagcatgaaagtgtcaatgaagctgggacatcaaactgtgatagcaaggatagagatttgcctcttgcaggacaacctcataaaattgttatagagagtatttcaacaccaaacaaaggtagaggaatgatttctacagatgatatccccccagcttcgttgattcatgttgaggaccctcttgctgcgtttcttcataagcatgaactgaagccgatgttgtattctgtccttcatgtacaataccaatttattgttcaaaaagggtgccaggagcaatcagcaggtcatatttctcgtgatgaagatactaatcttggatattcaacgaatgttgcaaacctgagtataacttcgagttgcaagtctccaagatctaagctatttgctgaacataggcatgaatgtggaggtgcccactgggcagctgttttaccagctgatgtagttttagctggacgaataatagcacacagcatagtaaaaaggatgccgtctgggaagagctttgctttctctggcccaaatttgcccactggttacactcatggtggtcagacaagaaatcagacaagcttggaactcaagcttcagtcagatatgcctaagctggttcttttgatatttcaaatcaaagtcaattcaattgctattgtctgtatgaggtcgatggacagaggcccagagcacacaataaatagaggtttttatgtagctgaaggtgcaaaaatgtgtagtgtggagcaggtcagggttgcacaagctctttatgtatctggtagcctgttcaatcactcatgtcagcccaatgtgcacgcatattttctttcacgtgcgttcgtgctgagaactactgaatttataaagtccgggagcccagttgaactgtcatatggtccacaggttggcgagatgcatatttcagagagacagaagtcacttcaagagaattactacttcagttgtcaatgttcaagttgttcagagctaaacctatcagaccttgttatgaattcattctgttgtccacaaagcaactgccttggtgccatatcggaatcaacttactacaggtccaaagagaatttcgtgaatgtttcccttggaggatcttatgtctgcaaactatcattgcccgtacggttgaagaaacatacattcctagacaagactctcatcacagaggcattacaatctctaaaacaactcaagaagttgaggcacccatatagcaaggctctcgcgcaggccgaagacacaatcgcagaggcctttgcgaaggtcggagaccaagaactagcacgaaagcactgtgaagcatcaattcag

SEQ ID NO: 41017 - DNA, 447 bp, Zea mays
  Peptide Sequence Number=SeqID_84392
atggctgaaaggtaccaactcccacggagttgcgttcctccgacgatgaggcggaaagacggcgggtatcccccatccgggggcttggaaggcggcgcctctggcaggagaagtgggcgacgcttcgccttcgccataatgaccgcgtcagtaaagggaccgggaaagggggataccccgaaaaggatccttccccgtgaaggaaccatgcttcgagcctccctactgatcagaggttcgaaggctggccccccggaagggttcgacagccgcctcagatcgcgtgggccctacacccactactggtcagaggttcgaaggccggcccctcggaagggtttcacggccgcctcaggctactcgggcttcgcgcccattactgatcaggggttcgaaggctggcccccgaagggttcacagccgcctcagacgccgagcgagggatga

SEQ ID NO: 41018 - DNA, 1065 bp, Zea mays
  Peptide Sequence Number=SeqID_84393
atggcgcttcctgttgacgtggctggcctgcgtcctaggttgggcgacgtggaggctcctccgaagccgaggtcgagtctgtccttcatggccgaggccgagtccgagcccctgggtcgggcgaggtggaagtcgtcggccgaggccagggcggtgtccgagcccctgggggtcgggcgaagcggagttcgtcgtcttctggggctgagcccgagtccgagccctgggtcgggcggagcggacccgagtccgagccctgggtcgggcggagcggagttcgccgtcttccggggctttagcccgagtccgagccctgggtcgggcggagcggagttcgccgtcttccggggcttagcccgagtccgagccctgggtcgggcggagcggagttcgccgtcttccggggctgagcccgagtccgagccctgggtcgggcggagcttcctatggtgcctttggcagggcctggcttcctgtcagcatcactctgtcaagtggcgctgcagtcggagtggcgtaggtggcgctgtccttctgtcagaccggtcagtggagcggcgaagtgacggcggtcacttcggctctgccgggttgcttcttagcgaaggcagggcctcgggcgagctgaagatgtgtccgccgttggaggggggcctcgggcgagacggaaatcctccggggcctttgcagcattatgctgatgggggttaccagctgagaattaggagtcttgaggaagatattaactggcaaaaaactgcaacaagagaaagacatcagaaagatactgtacaggatgcctatcgcgtcgagctcggcccgcacgggctcgatggtccggagctcctggaaggccaactcgggccgctggtggatgcgccgctgcacgccgtgaagcccaacgcgcgcgcctcgctgaggagttccgccgtcgcgaggggtggtgcctcgccaggttgcagcaggcaacaaaggttgttgattgttgaagcggttaagaacttagataatcttcctgagtttaaactaattgacaacacaagcaacaataatgaagccttttag

SEQ ID NO: 41019 - DNA, 303 bp, Zea mays
  Peptide Sequence Number=SeqID_84394
atggcgcctcctgttgacgtggctggcctgcgccctaggttgggcaatgtggaggctcctccgaagccgaggtcgagtctgtcttccgtggccgaggccgagtccgagcccctgggtcgggcgaggcggaggtcgtcggctgaagccagggtggagtccgagccctggggtcgggcgaagcggagacttagcccgagtccgagccctgggccgggcggagcggagttcgccgtcttccgggacttagcccaagtccgagccctgggtcgggtgaagcggagttcgccgtcttccgggacttag

SEQ ID NO: 41020 - DNA, 3282 bp, Zea mays
  Peptide Sequence Number=SeqID_84395
atgatggtggtggtgacgccgcaggacgcaggccggccgacggcgcggtcggagcccgcggaggtcaccgatggcgcgtgccgctgggcggcccctatcatggatgccaccaggctccccgccggcaaggacaagatctaccagttcctcgtctatgagaccgggtcgagcaaggcggcgttgctgggggaggccacggtgaacctggcggactacgccgacgcgttgaagccgtcggcggtgacgctcccgctcaagggcagccccggcacgctgctgcacgtgaccatccagcgggtggtgggtggcgccggtgggtacggagacgacgcgagtgagagcggcgacgcctcgccggtggcaaagacgccacagagaagaacgacactgcagaaccagctgagccggtttgaggacgaggacggcgagaaggctagagcggccacggatgcgatgagtcctgtgcaagatggattgttgataacaaaacctccaggcatgaggtttccatcaagaagaaatgtgcctatgtctgttgacccagtgggccatctccacaatggcagcagtttcgatgctgtctcggtgtcaggttcagatgcaagttctgggagatatacccccaaaattagtgcgaccatgcacaactcatatcttcaggatagtagcaatgctctctcaccatttgccaacaatggcactgtgaggaacccattgaccagttcgggtgactggtcaggaagctcagctcctgatgctagtacagatgggtcaacgagcaattctggtgaggcagggttaagaggggaggatgacgacgtggagaagctaagaagtgaaatagccactttaaccaggaaattggatgtctcagatatggagttgcagactctccgaaagcaaattgtgaaggagagtcggcgtgggcaagatctctccaaggagatgagtagcctcagggaggagagggatgcactcagaagagaatatgaaggactgagaggggcaaagaagatgatccatgattcaaatggctcagggaaacggctctcagatgggtatgacccatggtcacaggttgaagaactgaagcaagatctgaatcatgagaagaatctaaatgcagatcttcgtctacaactgcaaaagatgcaggaatctaactctgagctgcttctggctgtgaaagatcttgatgagatgttggagcaaaagaacagagacatttccattttgcaagaggatacacaagaggatccacaggaggcagaatatgagcatgcactgtcaaatgtgcataattctggacgcaaaattgccttatctgaaacgagttcataccaagagaaggaagatgagcttatgctggatgcactggcaaagaagcgtgatgacatctctacctctgagcttgaaaagaaaatccttgagctgagcaatgaaatcgagttgtacaagaaagatcgtgaggatattgagatgcaaatggagcaacttgcacttgattatgagattctaaagcaagagaaccatgacatatcttcgaggctggagcaaacacaactgagggagcagctaaggatgcaatatgagtgttcagctcatttggctattataagtgatcttgaggccaatgtggagagcttggataatgaactccagacacaggctaaaaagtttgaggccgacatagcagaaataatgagtgcaaaggtggaacaagagcaacgggccattaaggctgaggattctctgaggaagataagatggaataatgcaactaccgcagaacgacttcaggaggaattcaaggtgttgtcttcacaagtatcttctgctttcagtgcaaacgaacaacagcttgtgcaagcaagaaaagaggttgcggagctgcagctgcagaagagccagttagaagagttacttcagaaggcccaaggagatcttggatcagttcaggatcagcaccgggtgaaggtccagcagttaataaccctagtggatttcaagtcaaaggagatagacaggctactgatggagctcaaaagcaagagtgatgagttccataaccaaaaaagatgtgatgaggcaaagctgaatgctctgtcagaagaaatcgacctactcaattccaagatcgacaagctatccagtgagagaaatgagctattcgaaaagaatgagcagaaagaaaaggaattagctggaattagcgaaaaggacatgcaattgcaagacaaaactgctgagattacttcactaaataaagagcttgtattcctcaaggaccaagtgaagatgcatttggacgaactgcacagtttaaaacgtttgaagaacgagagggaggaaacaattggaaaactgcaaatagatattgggtcactgaaactccagtgcgacaacttgaaaacttcgctgtccaagaaagagtctgagaaagacagccttgcctctcaggttctgaagctgagaagatcccttgaaacccgggacagggcgaaggcaaatggtcaaatttcagatgtgaaggacaatcagcatgctaataacaagcgcaccaagcacaataccggctccactgggagcattgctgcactgccaggcaccaacagacagggcgaagacggtgactgcaatggtcctgacatgaggaacaccactgaccagtcagcgaaaggagctggcctcaatgaaggagaggaacagggccatcgaggaggagctgaaggagctgcacgaacggtactcggagatcagcctgaggttcgcggaggtggaaggcgagcggcagcagctcgtgatgaccgttcggtcgctgaagaactccttgcggtgactgactcgtgctgcttcactcacactgtagctacaaagattttagacgataccggtgggcgttgtacagagcaaaaactcgtggaagagcttcgctatgttcaagttcaattctacttgatcatagatattgtcatgctctattccgtgggtgactccgatgcaatattcggccggcgtaccctggtgctccggtacttgtacttgaagttgaagcagtggcagtggccctggcacccaagacaagagcgcaattgggagtacagaaagatttccccatacatgtcatcaaagaagaaagaattccgcatgaagcaggccgcgcacaggcacagcccaccggagaaacggtctagtgaagtcaaacaggctgtgcacaggcacacacagcccagaggccacatcagaaattggtcaagcgaagtgaatggaatagatcaatag

SEQ ID NO: 41021 - DNA, 225 bp, Zea mays
  Peptide Sequence Number=SeqID_84396
atgccaggccttgccccagtatgcacggagcaccaccgacgtctgtgccccgacgtccaccgtcggagcaccgagccgagcaccgcccccaccgtcgttctgtccgcgttcgagcaccccgccgtcaagggttgcgacagacggaccctgcctgtcagactggcacccgcacccgtaaccatgccactgaccagcgggcctggacgcaccgtggcccgctattag

SEQ ID NO: 41022 - DNA, 630 bp, Zea mays
  Peptide Sequence Number=SeqID_84397
atgggtccacagatcccagtgggggtcaatccccaaaaacccttcgcaaaccgccgcgaagatggctgcttgcgcgatggagttggggctgagattgtgcagctccaccccgtagaaatgcaggatcgcccgcatgaaacgactcatcggcactccgaacccccgctcgtggaaagagacgaaactcagcacataccctggcggcggggatggggcggctccgcttgggggagcaatccactccggctgcgggtcaccggagaggggacgaagcaagccatcggcaacaagggcctccaaatcatccaccgtgacggtagagaaaggccacgggtcgcgcggtggaataacggccacccttcggccatcaccaagcaaaggaggtggtggcggagcggacaagggaccgggaaaggggatactccgaaagggatccttctccgtgaaggaaatgggccccgaaccatcctactgatcagaggttcgaaggctggcccctcagaagggttcgacagccgcctcagagcactcgggctccacgccctcctactgatcaggggttcgaaggctggccccacggaagggttcgacagccgcctcagaccactcgggctccgcgcccactactga

SEQ ID NO: 41023 - DNA, 276 bp, Zea mays
  Peptide Sequence Number=SeqID_84398
atgagcaacatatatggtatcaagtgtctgatgaggatcatcttcgctttgctattgttgaagtttttcagcgaaggcgccaatttcgatgttaatcttgaagacttctttggcatgttcagtgactctacagagtttttctcaaaccatcaagacttgctaaaaaaccctgacattcaaaagctaatgatttcatattggaaactaatacacaatcaaaggttctacttaaatgagaagagcataataccaagaacaactagtgtaaagaaataa

SEQ ID NO: 41024 - DNA, 570 bp, Zea mays
  Peptide Sequence Number=SeqID_84399
atgcaggtggcgtgcaaccgcaccatggtggcacacccctttggcttcgtcgcatccggcatggaggcccaggcccacgagtcatgtaaccggcgcgtcggttactacatgcaagaaaccgcaccgccacttgcgccaatgccgcgccttctcgactgcggaaccggtgctgcgactcgaggcagccctgcgcatgacccaacagtgccaatcgagcacaacgatcacaagtcagtcaaccgcgggaggaggcgcgacgggaccgggaaaggggatatttcgaaagggatccttctctgcgaaggaagcgggcctcgagccctcctactgatcaggggttcgaaggctggcccctcggaagggttcaacagtcgccccagagcgccccgggctccgcgcccactacttatcaggggttcgaaggctggcccctcggaagggttcgacagccgccccagaacacgtagagtgagagatgactctgggtacgtccgttacatggtcgaggctcgggctacgctcccgaggtaccctaggacatttccgagaccagcaggagcgattttgtaa

SEQ ID NO: 41025 - DNA, 363 bp, Zea mays
  Peptide Sequence Number=SeqID_84400
atgccgtttccccccccccctctcctgtcaaactgggcccgctggacagccccactgccctcttctgtttcctgcgcgtggattcctcagtcgcttgcatatgggcccacgccgacagcttcaacagcgggccgaagccatcacatttctccgctgtggatcccgcacgctcagccttccactcctgcattctatgacatgtggggccggcttcccagggtcaccttctacctcgcgctcggactcgctggtagcaacgatatccgcagaatccgcgcgggttcaacgaccctgcccggagcttgcgcgaaccgaccgccaccccgcggcaatataaatttcggcgcacctcctggggtataa

SEQ ID NO: 41026 - DNA, 309 bp, Zea mays
  Peptide Sequence Number=SeqID_84401
atggcgcacaggggcgacgggacggctcaggcaagcggggtgaagggacggctcgggcacagtgcgcaggggcgcatgatcccaaaccgagctggtgagcgcgttaatggcgaggcgacggggcggacggtggccggtggcgaatgtgccgataacctggtcacgagtgagggggcgaaggggctaacaggtggggcccgcttgccagagagggcgaacgcgaggggggaaagggcaggagtggctggcgggtggggccgggctgacaacgacgtggcgcgagcgcgggcgcaggaggtagtattttga

SEQ ID NO: 41027 - DNA, 180 bp, Zea mays
  Peptide Sequence Number=SeqID_84402
atgcaggtggcgtgcgaccgcaccacggggacacaccccttcgacttcgacgcgtccagcatggaggcccaggcccacacgtcatgtaaccggcgtgctggttactacggaccgggaaaggggatatttcgaaagggatccttctccatgaaggaagcgggccccgagccctcctactga

SEQ ID NO: 41028 - DNA, 150 bp, Zea mays
  Peptide Sequence Number=SeqID_84403
atggcctcggctaacgtgggaggtactggaggtgggtttggtgttgcttccctcccactggagatccccaattggatcgttgctaccactactgctatcttcatgtcgtgggacaagatgatgatggggtacaccgattgggccggttga

SEQ ID NO: 41029 - DNA, 1299 bp, Zea mays
  Peptide Sequence Number=SeqID_84404
atgcatcgctcccttccaccttctgagcccccggatggggagcacctgcgttgccttcgtcttgctgctgttggaggagcacgacctcgcgggggttggcgcccttcagccatcgctcggcttcaaggattttcatcatgcagcccggctgcattccctcaccaatggtcatccgtagggatgatcatcagccttgtggtggggagaagcaagccgagctgtggcctctgccccgccctcagcttcaaggatcttcatcatccgtgctggggaggagggcggggcgagtcggggcctacccccgcgtgggccggcgacccgcttcttcctccggcattcgggggagaaaggcatcctccagctgtgcggaggaggcgtcctctagccatgcgggggaaggcgaactactgctgcttggatagggtgcagttgtccgtcctccaccccgggcggcagtcgtgctgtgcgcgggtggttgctgtcaccggcctcgcggagcgggcgaactttgacagcgcgggcccgatcgggcatgtctgcggccctttccgcgtcgccgactgcaccgggggatcgtccaagacgtcgtatgcctctagggcggcgttcgtgttcttggattgtcttgtcctcactccagcacgacgcctccgcgcggaggccgagaaggtttctccaccgacgagaccgtcggctacctgcgatcggacccctagatctttggctttgatggcttgtcctcgcccctcgtgtgggggcgtgggtgagggcctttccacagcatcgtttgccctgaggtcatcgctgctgttgtttagccgcccgaagcggaggtcgttgtcgctgctggtgcagtggtcgccggcgagccacctggagtttgttgtcccgcaggccctctggtgtggaggttgttcatacccgcgggagtggaaccggagtcctaaccttcgaccgctctgcgatgagctggagccggaggcagcggtgttggcgtggacagaggcggagtcggctcgaaaatatgcttcgtcggcccaggagcaggtggcttcccaggccgaggaggtgcagcagtggcggctggagcttggccaggtcatccgcgagcgggaccaacctcggagtcacgctgccgaggccgtgagccgggctgaggttcccgggggacagctggctgaggctacggagcggccaactgagatccttccgcccgtgtcgccgtccgaggccgggccagattccgccgaaggtggaaacgacgccgagggtgctgctgctccctctgccgatgtctaa

SEQ ID NO: 41030 - DNA, 1641 bp, Zea mays
  Peptide Sequence Number=SeqID_84405
atgtcttcttcctcccttatgcgtcgtgtctttccatcttccaagcccccggatggggggtatccgctgtctttccgcctcctcgctggaggaacgcaactccgtgggagttggtacctttcagccatcgttcggcttcaaggattttcatcgtgcagcccggccgcttccccccgctggtggtcacccaagacggtgaccgctagttcccgggtggggagaagcaagccgggctgcgatcttggtcccaccctcagcttcgaggatgttcatcatcctcgctggggtgggggccgggctgagccggcgctctacctcccacgcgggttcgcgggtcaccccttcccgcggtgttcgagggagagggcgctcactggccctgcgggcggcccggacttcgacaacgtggggctgggtcggcggcgggcatcgtcacctccagcgtgtcaggcccgtcggcttggctcccggcggcccctcctgtcggagggcggctgccgcgccgtgtgtacgggaggaccacccaagatgtcgcgcgctgctagggcggcgttcgtgttctggggtggtcctgcctttgcaccgggatggcgccctcacacggaggtcgatgccccactcgcccgggagggtttgagtggggatctgtcggggagccggtgggccctgccgtcggtgccgaggcggaggcggctcgagaagtccccgtcaccgacggggtcaccaccaccatccgcgcctctggcccccagctcttcgcacctgtcctcgcccctcgagcgtcggtgtgggcgagggcaagattgcagcagcgcccaccctgaggcctgcgctgctgcagctcgaccatccgaggcgggggtcgttgtcgtcgtagtcagaacgggcggcggcgagccgctcgtgctaaaggttcactctcagccaataaaaagatcaagttttggattcaaccaaggagcaaagggccaaccgaaggcacctctggtctggcgcaccagactgtccggtgtgccaccggacagtgtccggtgcaccaccggacatgtccggtgcaccagaggactccaacgcaaactcgccaccttcgggaatttccagaggcactcgcgctataattcaccggactgtccggtgtacaccggacagtgtccgcgcgcgcagaagccaggtgtgcccatactggcacaccggacaaggaacagtagatgtccggtgtgcaccggatacccaggcgggcccacaagtcagaagttccaacggtcagaatccaacggcagtgatgacgtggcgggggcaccggacatgtctggctcctctagcttagttaaagagacccctcggccgctcttcgatgagccgaggccaggggtagcgatatcagctcgaacagaggcggagttggctcgaaaatgggaacctggcctcgggtcgggctggcgcccttggaagatggtcggccgaggtcctaggggtaaccggccgagccgcctgctcgggccggattcccggagaagtccctggaccgcgtcgccgtccgaggctgggtcggatctcgctgaaggcgtcgtcgatgccgagggtgctgtagcccccttccagcgtgaagatccgatcctgcaggatcagattaccttgtag

SEQ ID NO: 41031 - DNA, 765 bp, Zea mays
  Peptide Sequence Number=SeqID_84406
atgggtgacagccaatactccttctcgcttaccactttcagcccgtcgggaaagcttgtgcagatagagcacgcgctcacggctgtcggatccgggcagacctccctagggatcaaagctgccaacggtgtagtgattgccactgagaagaaactgccttctattttggtggatgaaacatctgtgcaaaagattcaggcactaacaccaaatattggagttgtctatagtgggatgggtccagattttcgtgttctggtgagaaaaagtcgaaagcaggcacagcagtattatcggttgtacaaggagcatatacctgtaacacagcttgtgcgagagactgctgctgtgatgcaggagttcacacagtcaggtggtgtaagaccatttggagtatcgctgttgattgctgggtatgatgacaatggcccacagttgtatcaggttgatccctcaggatcatacttctcctggaaggcatcagccatgggaaaaaatgtgtcaaatgcaaagacatttcttgaaaagagatacacagaggatatggagcttgatgatgccatccacactgcaattttgactttgaaagaaggatatgaggggcaaatttcctccaacaacattgaaatcggaattattcgagctgaccgtgagttcaaagttctaagcccatcagagatcaaggatttcttggaagaggtggaaatagcagcatcacttatgagcagccagcctgaagcttgtcttggttttatcactctgtaa

SEQ ID NO: 41032 - DNA, 744 bp, Zea mays
  Peptide Sequence Number=SeqID_84407
atgcaggcatctagggcaaggcttttcaaggagtacaaggaggtacagcgagagaagtcagctgaccctgatatccaattaatatgtgatgattctaacatattcaagtggactgctcttatcaagggcccttctgaaacaccttatgaaggtggtgtgtttcaacttgcattcgcaattccagagcagtatcctctgctgcctcctcaagttcgatttttgaccaaaactttccacccaaatgtgcatttcaagacaggtgagatttgtctggatatattgaagaatgcatggagccctatatggacccttcagtctgtttgtagagccataattgctctgatggcccaccctgaaccagacagcccacttaactgtgattcaggcaatctcctgcggtccggtgatatcagaggctatcaatcaatggcccgcatgtatacaaggctggcggccatgccaaagaaaggggaacgccgttgtgggcgtcttggtgcctgtcaggaagttgctgaagagcgtcagcgcctgccgcggcgcgtgcagaggcacctcgtgcccggctccgcggatggtgacgaacgtcaggccctcgtagacgaccgtccatccaccaacctgatttccggcggagaacggaagacgttagcgcgatggtccaaaaccctgctgcttctgaaaatttcggtcgctaggttacctgcagatggtcgtaccacagcgtccactcctggacggtcttga

SEQ ID NO: 41033 - DNA, 897 bp, Zea mays
  Peptide Sequence Number=SeqID_84408
atgtttcttcttgagaaacactccgctctccctttcctcctgcgattctccatctctttccctgctgcgtttcgtcgttctcttccccttcttttcctcagccacttcgctccctccctagcagcaaaaacctccacgaatcgccgacactccaacccggaagagccaacgagcccgtcgggaaagcttgtgcagatagagcacgcgctcacggctgtcggatccgggcagacctccctagggatcaaagctgccaacggtgtagtgattgccaccgagaagaaactgccttctattttagtggatgaaacatctgtgcaaaagattcaggcactaacaccaaatattggagttgtctatagtgggatgggtccagattttcgtgttctggtgagaaaaagtcgaaagcaggcacagcagtattatcggttgtacaaggagcatatacctgtaacacagcttgtgcgggagactgctgctgtgatgcaggagttcacacagtcaggtggtgtaagaccatttggagtatcactgttgattgctgggtatgatgacaatggcccacagttgtatcaggttgatccctcaggatcatacttctcctggaaggcatcagccatgggaaaaaatgtgtcaaatgcaaagacatttcttgaaaagagatacacagaggatatggaacttgatgatgccatccacactgcaattttgactttgaaagaaggatatgaggggcaaatttcctccaacaacattgaaatcggaattattcgagctgaccgtgagttcaaagttctaagcccatcagagatcaaggatttcttggaagaggtggaaatagcagcatcacttatgagcagccagcctgaagcttgtcttggttttatcactctgtaa

SEQ ID NO: 41034 - DNA, 204 bp, Zea mays
  Peptide Sequence Number=SeqID_84409
atggaccactctgaggcctcgaaggaaaaggtaacagaagaggaggtcaagctcgacaatgacttgatcaggaccaatatgactctaagcagtgttggtagtgatagtccaattgaggccaaaggtgtgacgtccgttgagtttaccatcgggaccaaaaccgtagctgcaacattcttcatcatcgagatagaaggcaactaa

SEQ ID NO: 41035 - DNA, 1044 bp, Zea mays
  Peptide Sequence Number=SeqID_84410
atggctgctagatcgggcggcggcaaccctagacggggaggtgtttgctgggacgcaagcgcgaggaagtgcaggggggacgctgacattaagggcccacttgtcatggtcggggtgggcataacgaggtgcgaggaagagccgcttcgtcgatggaaggtgagcgccgggattggaaagggattccaggggcatggagttgattgcgggggtggccgcagacgtgggaatgagtccgttgatggcggcgatgaaagcgcgaccaccatccgggatcggagcggagcgaaggatgtcggggggggtactgatgtggacgcctacgctctgctcttaagaagtagtagagatatgaggatagaagggaatgaggctgcgtcagatggcggtgtgggggcgcgacatgcggcgtccacagttccgcttggcgcacggttctgccatcgcgctgcgcgcctgccatctgcctccgccatcgcgcgcttcattcgccaccatcctcgctcgcttccctccatgcttcctgcagccgcgtgctcttccatcgatggcgcggatcccccacgcttgccatctccctccgccctcccgcgctctccctccgcgcttcctgcagccgtgcgctccttcgacggcgcgtatcccgcgctccgcaccgactccgtcatctacttccaccttcgcgagctcgccgccaccgcggggcccgtgcacccggcggccgtcgccaagtcgtcttccgccatcaacgccggcaccacggagctgctcgacctgtcgcgggacttctccgactactccaacttcaactctgacatctctggcgagctcgagcgcctcgcttccgcggcgggggcagcgcccagatccgacgcgccggacgcggtcgccgtggatctgaacgacctcgagtccatggatctatcggcggacgcggctccgctggagcgcgtggagtcgttcgtgctggcgtgcctgctggcgctggggcccgacgccggccgaacgcgcgacgtgaggccgcggctaggatacgcctgctag

SEQ ID NO: 41036 - DNA, 1611 bp, Zea mays
  Peptide Sequence Number=SeqID_84411
atgatgctacttgttgtggtgatagaggagaacggttgccagtttgagactatcatcaatagggaaggtaggacccgcttgctcctgcgtgcatgctcccggattagatggggctacagaccaccgattgcgaacatggaagcaatagcgaggccgtggcacaggagctgcggcaaggtctctccgtcgctcacgactagttcctactcgcagttccagccggtgctcgccgaccccacgggtgtcttcgcgctcggcttcctccgcgtcaactccaccatgctggaccttgccatcgtccacctcccgtctaccttcccgctctggcgcgcgatccccgaccgccccgcgccatggtctacagccgcctccctctccttcgacggcggcctcgtcctcaccgaccgcgcggccgacaaggtgctctggtccaccgctgccacctctgcctcggccggcgaccgcgccgtcctcctcaacacgtccaacctccaaatccagagcactggtggcagcagttcgcccgacgtggtgtggcagagcttcgactacccgccgaagaccatcgtccagggccagaacttcacctccgcaacgaaactctacagcttcgatcggcgcttcgccatgcggctggggagcaactacttcggcctgcacatcgagcccccgccgtcttcgggcggcgttgctgcggccatgtacttcaagcacatggcgatggaggccaaggcccagatcgtggctggcggcggcccgacctacgcgcgcgtggagcctgacggcttccccgccatgtaccagagggaggggccgcccgccgacgtgctctccttcgacaccttcaaccgcggagtccgcgccctccgccgcatgactctggagcccaacaggaacctccgtgcctactactggaacggcgcccggtgggcccttgactacactgccatcaacgacaacgatcgatgcgagctgcccaccacctacggcgcctacatcgtctgcgcggagcccagcggcagctgcgagtgcctggccaacgcgaccgatggctcgggctacgccgcggccgtgcccgcctccttcgcgagcaacctttgcggcaccacgggcggagaagtcggcgggctgtactgggcggtgcggcggtggggcgtggagccagtgaacaaggagctgctgcggtccgagcaggcggcgtccacgacggactgcgaggcgcggtgcgagcacaactgcagctgctggggcgcggtgtacagcaacaggaccggggtctgctatgtcatggactacccggcacagcttctggtggctagtgacgataggaagatgggctacttcaagatcatgagcctggaggaggaagggacgcgagggcgcggcgatgggcgcacgagcggggtcaaggcggccctccttgttgtcggtgtcgtgtcggtggtcactgctgctgcattcggggcgtacagggtgtgggacaggagacggcggagcgccgtggacgcgaggcggcagatgggtgccgctgatgatgggctctcgccggggccgtacaagaacctggggtccttcagctccgtcgagctcaccaactccttccgaaggtaa

SEQ ID NO: 41037 - DNA, 498 bp, Zea mays
  Peptide Sequence Number=SeqID_84412
atggagaaatcggtcgcatctcttctatcttcgtttcaaatccctaattccggtggcacacactaccggacacagttcctttgccgagcgtcgcagacactcggcaaaggctattttacactcgacaaaggctttgccgagtgtaacactcggcaaagaacgctcggcgaactgtacatcggcaacggcctctttgccgagtactttttgtcgggcactcggcaaagaaaagtcactgtcacggcgccaagtgacggtgacggatcctttgccgagtgtcttctttggcacttggcaaagaggccaattttgccgagtgtctgctatcacggccctcggcaaagacggctccagtgggccccaccgccaatccctgtaccgagagctctcgtaggcactcgacaaaggaggcttttttgccgagtgtctagtggactggcactcggcaaagagtcctccagtgggcccctttgccagtccctttgccgagtgccttga

SEQ ID NO: 41038 - DNA, 93 bp, Zea mays
  Peptide Sequence Number=SeqID_84413
atggcccccctgaggcgcgcacgacggcgaggtgggagcggctacggcatcggatcccaagggcacgcacgcggcggtggccccatgagttaa

SEQ ID NO: 41039 - DNA, 165 bp, Zea mays
  Peptide Sequence Number=SeqID_84414
atgtcgacaatgatggctctggatgccgatgaggatgacgaggttgtggatcagaaagattattctgagaaaggggacattgatcttcatcatgttgatacccacagacagcttgtagataacctcacaaaatcccttgatgagtccagttttgcacatttgtga

SEQ ID NO: 41040 - DNA, 222 bp, Zea mays
  Peptide Sequence Number=SeqID_84415
atggaggtgggcgccgacggcgtcgcgctcatcaccatcgccaacccgcccgtcaacgcgctccaccccatcattgtggaaactggaaacatcgctttcctagttttgtactactgctccacccccagtccaccttgccagttgcgctggcctctggagaaagtattttgcttaggcagagatagaactcaagtggtcgaagcaagaaaacagggccgttga

SEQ ID NO: 41041 - DNA, 237 bp, Zea mays
  Peptide Sequence Number=SeqID_84416
atggatgtgtctgtcggatcaagagctcgacacttgactgatgtggatggtgacttgtgggatctggtcaggagggatctccaactaaaggccaccttcctgtacattgacctgaacagtttgattgcctgtaacgagtgcgaggagcgtagggaggagatcacgcttctcgccaacgatttcttctactgcaaggatgagggtcaacaaaaagacacacagatcatccagatataa

SEQ ID NO: 41042 - DNA, 744 bp, Zea mays
  Peptide Sequence Number=SeqID_84417
atggcggcggcgagcgcgaatggaggagggtttaggggacgaggtaatggaagctctgggcttccattagtaccaggaagccccagccagagcccaccaaacccaaatcccaggcctctccgtccccaatcccccatccggcttgcccaccatgtcgtcgcagtgcccctactgccgcgcgtcggggccggcgcggtgcgcgacgacgcagccgccgctctcgcgcgctgtctccgagtgctccgcctgcgcccgaattgtcctcgagcgccacctccacacgcaccccttcttccccctcctcccctcactccatccgctcccccttgtcacccccccgacctcgccacagccatcgatcccgccccatctccttcccccggcgacgaagatgacgaggacccctttctccccgcgggcttcgtctctgccttctcggctttctccctcgagcgccaccccgtcctcgcccgctccgcctccaccttctccggacacctcgccgagctcgagcgcgcgctcgccgtcgacttcgccaccgcagcctccaacccggaccccgccggccccatggtctccgtcgacagcctccgcgcctacctccagatcgtcgacgtcgcctccatactaaggctcgacggggacatagcggaccacgctttcgagctcttcaaggattgctcgtccgctacttgcctcaggaatcgaagcgtcgaggcgctcgcgaccgccgcgctcgtgtag

SEQ ID NO: 41043 - DNA, 1420 bp, Zea mays
  Peptide Sequence Number=SeqID_84418
atggactacatggtgtttgaggttgctgaattggatggagcagcaatgatttgtcacattaacagcaaaatgaaatgttatttgttggttttaaacatcgaggctccgacgagatggctccaccagatccagaagacagaagtagagaagagaagtgaaccaaagcaagcaagcttcaagaacaaggtactggatcaacaactcctagcttattcgattcttgagtttgttctgatccgatcttcccttcctactcagcgctgccctattcgattccatttcgtgttcctctgtgctgctgtaggggagggggaggaggaggaggaggccatgcggctgccgtccgacgtgccgcgcggccacttcgcggtgtacgtgggcgagtggcggcgccggttcgtggtgcacatcgcgctgctggaccgccttgagttccgtccctgctgcggcgcgccgaggaggagttcgggttcgcgggcgccggcggtgccctcgtcctcccctgcgaggaggtcgccttccgctccctcacctccgcgctcgcctgcgcccggtgaacgcgcgcccgtgtcctgccgccacatgcttgggatttgcatgcccggcccccggccgctgcagcgccgcctattcattcggttcattggttcagcgagagcaccgtatctatcgattattagagaagaggaacaggagaggagacgttctccaccgggtcataggaatcctgacgagatggacgacaatacgaggttcgcagcagagagtcagaagaagcccatcgtcccagacgatgacctcgtggagctattgtggcacaatgggagcgtcatagcgcagccccaggcgcaccacaggccagcgccgccctctgaccgcgaccgcccgggcaccagcggcctcactaccgaggagaccgccgcgtggttcctgaacaccctcgacgacccgctagagaaggacctgtacacgcagctctggtacagcacgatcgccgatgccgccccacaacacgagggcacgttcccgggccctacctcgcatccttcgtcgccgccgccacccgttgggagcagcggcgtcgagtctagctgggccggcgacatctgctcgaccttctacggcagcaaccaggtgcccaggacgccgacggggatcagggggaaggacacagcattgcagtcggaggtgccgagcgatgccggcgcgcacgacggcacatcgtcatccggtgggtccgaaagcaactatgggggatccgggctgcccagtgacagcgtccatggccacaagaggaagggaatgtgtagagacgagtcagatagtcgaacgttattagctgctgctgatgtagagaagaagggaccggatcaaagaaaagatgcgtgcgttgcaagagttgatcccacactgcaacaag

SEQ ID NO: 41044 - DNA, 348 bp, Zea mays
  Peptide Sequence Number=SeqID_84419
atggacttaggtggtaggaagttatggtctaaggttataatgagtaggttaaacaaagccctgcaacatttccgccccaggtcatgctttccaaaatttggcaactttgcaattgacttgccaccaatctatcctaccatggaagcaggctctaatgattgtgggttctatgttataagatacattcactactatgactgcattgaaggatctttcaagtcatacatacaaccaaacaacaccagggatctacggtctcttgcactatactacatcacattccatcgcaagaacaaagccataccgctccttgcagacatccaaagatacaagttctcacggatgtag

SEQ ID NO: 41045 - DNA, 647 bp, Zea mays
  Peptide Sequence Number=SeqID_84420
ggttattgatgcgtgccgagcttgatataggtactagtgagagttgtggcaccagtggtggcaatgacatccaggtcgaagtgtatgaaaccgaagacgtagaaagagatgatttacgcaatgtagatgatgggaacgaggaaattgtagtggcgtctaatacaaatgaaggcaatactaacgatgttcaatgtaatatgtcgatacgtacattggaacagaacactgatatgcatctggttgctagtagtgctccggatgtggaagctagaacgaaactggagtttcatagggaaggtgtaaacttagcaagaccagataaggccaaacctaagggcagaacgatcaaaagtagtgaggaacaagttcttaggttgggtacgaaaggagcgaagaagatgagcagaatgtgccaaaagtgtggcatcgctgatggtcacaacagtcgtacttgtttaactgtggaggataataggattcgattggctagcctagctggacgcaagagaggtcgacctcctggttcgaggaacaaaatcggaggtgcagcaccacagtggaatgagacatcaacgtcaaaaaacgcacagtgtatgtcgaagatgatgattcatccggtagagagtagaataccaaaagaattatga

SEQ ID NO: 41046 - DNA, 345 bp, Zea mays
  Peptide Sequence Number=SeqID_84421
atgccgcagctgactgacagaacgaaacttcccaacatagttgacccagtgatcagggacacgatggacccaaagcatctgtaccaagatgatgacgatttactacagcaggcacttgcaatgtcaatggagggtggtgcttcaggatctgcagctgtgactgactctgctatggcagaagctgcttctacagttctagcacatacactcttcaaatgtctgtccaggatgcaaacatctgttaaagatttgctggcatcattgcacagccagggagaggaagagaagaaggaacacaagtcagacaaaacagaagacgagaagaactgcttcaagctggagtga

SEQ ID NO: 41047 - DNA, 1473 bp, Zea mays
  Peptide Sequence Number=SeqID_84422
atgaagcatgtggaccatcctccgaataatcccaaacgtataacaattcagtcaagccaggagtgtttcagtgttgacattctgtgcgcagaacagtctaatccatgtccagaagtgggaaatcctccaaatgttgacagtcaaactttgatcaatgaaacaatacagctggattctgatgaagatgacttcataccagctgttaagaagcgtaatgtttctgaaagccatacaagagttctaagaaaagttgtgacacaaaggataaaagctgatgatcttccccgacagaggctcaatgtcaggtgcaacccacaagatgtcattgcaagcattcacatattgaatgaaagacaacgtcaggccataagacgtaaaggtttctctaacattattgatatgacagtagatgcgctgtgtagtagatcacatcttcaatggttgatggataagcttgaccacaaggacatgacaattcgtcctggtccaggaaaggaactaaaaatcacaaaggacattatgcatcttatccttggtgtaccaaatcatggcggtggaaaaccattcgggattgatgaagcagttgcagcaagtaacttgagggcagagcttggtttggctaaaaatgagttcaatgtgacattgctacaggatcgtttaaggaaaggcgatgatgatgaccttaccattagatgtttcgttcttatcttattcaatcgtctgttgtttccaactgctagctggggcataacaaaccatgaagtgcttctgacagaagaaatgcaccgtttccacgagactgattggtgccagcttatttttaatgacctttgtgaagctgcgaagaagtggcataaccgaagcaccacaaacgtctccacgactatatacggatgctcaattgttgtcttattgtactacctggatcacctgcatgtagccgctgcccctcaaaataagcttagtacacctcgcataaaattctttgataagaatatcataaaagctttgactaaagccgacaagaggaaggcacgccatggggccgaacctttcggatattgtgaaccgaagtgcaggaccaacatttttgatgcactacgccctgcccctactcctcggcccacctttaacatccaacttccatcgattaaggagatgatgtcaaagaaacttgttgcatatgacttggaggttgacaaggcatgcttagccataaaagacagcattaacaaaattattgagaagcaatatgacatagcagacaactttatagagctgatcgacgaggtactacgtgtcgagtctgataatttagaaaacgagacagatgagccacaacaattgaggaattcgactaattcatcagtatatgcagcaacattcactacacgacggttcacttacaacgacctacggttggttgctaaaacggccttcagcgacctacggttggtcgctaaaaacttttag

SEQ ID NO: 41048 - DNA, 438 bp, Zea mays
  Peptide Sequence Number=SeqID_84423
atggcggacgccgcctctggccgcggccacgtcgtctaccctccccgctccgccgaggacatcttcaaggactaccgcgcccgccggtccgccatcctccgcgccctcactcacgaggtcgaggacttctacgcgcagtgcgatccagacaaggagaacctgtgcctgtacggctacgcgaacgaggcgtgggaggtggcgctgccggcagaggaggtgcccacggagctgccggagcctgcgctgggaatcaacttcgcgcgcgacggaatgaaccgccgggactggcttgcgctcgtcgccgtccactccgactcgtggctcctctccgtcgccttttactatgccgctcggcttaatcgtaatgaccggtacgctgcctccgaccgatccccactgccttacttctctcatcacagtgtttctgttaggatttga

SEQ ID NO: 41049 - DNA, 645 bp, Zea mays
  Peptide Sequence Number=SeqID_84424
atggcccgcgcccgcgcttataaaaccctcccagacttagattgtactcttccgcgcaccctccacacctcaccggagttagctcgtcgccgtttgcctccctcggagaagactgtgcacacccccgggaggctccccgagcaaggaatcggagagtacttcgccggagaagccagtccacgctcgccggagctctcaaccccgccggagtacgtggaccgggtaaaccactcaaccatccttcgattccttgcgcacacggtcgctgcgataccccgtgaagctcaccatgcccttggattgaaccagttcgccgtggtttggccggtacactcgccgccgacgagcacacccgcctgcgctcgtggaccggacgattccggccatccccgacgtcgagccgtacctcgacgtgaccgtcagagtctccccgagccaaccccacccttcgccggacctccctcgccgccgaatatgcttaaggatagggaaaatagaaaagactgtaatcttgctgacggagagtacatcctcgtgccggagcaaggagctgctcaggaggtagccctagatccagcaccagagcctgcaccagaggacctgcctgccactgctttggaaggcaagccccggttttatgcataa

SEQ ID NO: 41050 - DNA, 801 bp, Zea mays
  Peptide Sequence Number=SeqID_84425
atgccacaggttccttgtgggactgagaagaatcagaaaccacccaaatgctcaaagaaatgcaatatacctcgcctttgccgacacaagcttgaatgccggccccacaaatgccactatggagcctgcccaccttgcaagctgatctgcggggaagaatttccatgtgggcacacgtgtaaagaaaggtgtcatggccctatttctcctccaaactccgagttcacactgaaaccgacaaaaaagaaaatgggaaagcacatagaatgtacacctgggacaccgtgcccaccatgcaaagaggtggttttggtgtcatgctttgggcagcatcttggccaagaacgcactgtcaacacccgttgtgcatgcagcactctgaaacaagagtggcgatgtcaagatgtcctcaaggaataccgtaagtctggccgggatccaaaagaagtacctaaaagtcagtttggagttggcttacttgcctgcggtgaagattgcaagaagaagctgaaggctccagattcagagttgcatctccggaaaagtcaggagaacaagatccctgctgtggaagtcgtaaatgcacccaaacgcaggaagcggcgtgaccgtggacaagaagttaaaatttcgaaattccaggaagtgaagacttttgtgctgagagcgctactgattattttgctgtcaataatcgttgctgctggtctgtacctgttgtggaaaggtattttctggctttctgactggatgaacgaaatggaagagcagagggcgagtcaaaggtttatcatcgtctga

SEQ ID NO: 41051 - DNA, 411 bp, Zea mays
  Peptide Sequence Number=SeqID_84426
atgggatggtataattcctgttcgttttcatccctaagtgggacaagtgggggcaacaagaggaggaaagaattgttaatgatgatagcagtgattcaaataactctgaagagcaggatgatgattatgaagaaggtactcctattggtcgaggcccaggaggttctcaagactctttctctgatggactcgaaagtcagcctccgaaaatgtaagacctttgagcttgtcttgatgataatcgaagtgaaggatgaacattgtctaagtgagactcatgtgtataactcggagacaattggtcaagccaaggatggaggcaagaagaaatctgaggtaccgagtgcacgagatacagtcaaggaggccgaggtacccaaagctaggggtgaagaagtgaaagggaaatag

SEQ ID NO: 41052 - DNA, 450 bp, Zea mays
  Peptide Sequence Number=SeqID_84427
atgggcaagagtaacaaacgcaagcgcgagccaactcctccgtcagaggacttcggcgattcgaaatactcggaggaggagttctcctccgagtccgaggggtctccgactcccgtctctcccccggcgtcgtctgacgattcagacgactcccaggggattgccacggaggtctggacttacatccgggccgtcgagcgctccgggctcgcgggctcggatgagtcggagtactcctcggacgaggaggactcttcggactcatccgaggagggcggcggtggtgatgacggagacggcggcgacggcaggggcgatgatgacgacggcgatgatgacggtgacggcggcagcgagggcggcaacagtggcagcaagggcggcaacggcggcagcggcgacagcggcaggggcagcaacggcggcggcagcagcaaggctagtggctag

SEQ ID NO: 41053 - DNA, 585 bp, Zea mays
  Peptide Sequence Number=SeqID_84428
atgtgggcccagggacaaatggaaggaaggaaggcgacgcgccttatccgcaataaatgcagaggacacgcggcccagaggccttacgtcaggctccgcccgctggcttacgtcacgggcagtgggccacgtggcagcattgggtctccgcctaagtggggagctgaggcgtacacggtatggcccggacacatgtcagctccggacccccgcctggccttgactaaggtccgggtactctttgtcccagaatcctgggaccctgctgtgagtggcccgaacccttcacagaagggtatgggacccgtctcgggggtccggaggcgcggtactatcgtgagcggcggttcgacttctctgcaccaaggaaccagcgccaaggaggatgactcgtgggcccaggcccccgcgtcagagactgggccgttggttccggcggaggtgaagaggcgcgctaccgcgggcggcagcccgctccttttggcagttcgccttcctcgcacccggagaccgacgcccaaggagcatgactcatgggcccgggccccgtgtcagaggctgggccgctgctttcggcggagatga

SEQ ID NO: 41054 - DNA, 468 bp, Zea mays
  Peptide Sequence Number=SeqID_84429
atggccttgctagaccctctcgagtgcttccagtctgaggtggcactcaactcagtgcgcaacctgctcagaaggggtgtgtcggcgtttgctagaaggatccgtgtcggcgccactcccctcggcgatctcgccgctgaggagttcgtgctctccgtctccaacttttcctatgggttggcgctgccgatctcgcctttcttcgtgctgctgctggaggagctcggcctccaacctcagcacttcacgctccacttcatcctccaagcggccatcttcgcctacctctacgagatgtccctccaactccatgaggtgggaagcgagctgagctgtggctccatttctttggctttaatggcctcgacgttgcttccgacgatgaccgctggtccggttgccgatactagagatgccgcccgggaggtcgttcaagatgccgtggagacggcggccgcgcgcttctaa

SEQ ID NO: 41055 - DNA, 1545 bp, Zea mays
  Peptide Sequence Number=SeqID_84430
atggatcatattcaacccaagaacaccccgcacaatgaaccactgcctctaggccagaagcttatgctgcatcatggaagtgatgcaccccttagaattggtcattcaagtcatgagaatatgagacttagatcaaatgatcttccacctttaagtcacactgtgcaaactcaaggttatagagttgggaacccaggagcctcgcatgctccttttgttcattgtcatgctggaagttccagtagtcatttaccagaacctgctgtgaattatccacataggtcggaggaaggctttgctccagtgggttcccatatggacaacagaagggctgcaacgaagcgaaaagatcctattgtgcaccctgctgggatcagtgctactggttattatgttggaagttcttccaatactcagctatctaactctgtgcagccaaatcctgctccactttctgagcccttacttcgtcaaatacctttaagcattgaccgaagtggttgggatggcctacacttaattcatcaagaaggatttcagaggaatgtgagagcacgccagcgccacagccataatatttcattagagcccagaacagcttcaacctacccactaaacagtgttcatgtgccatcatttggttcaactacaagtgcttccttaagtatgtcagtggaaaggaaccaagcatctgtttctgtgccaacaagaaatgtaccatcaggtgcaccaggtatcactagcaggtccctgacaaggagggcttactatcctgtggttggaagtagcaactcaagcgttgatgtcgttccaactatctgtggatcatctggcgcagcaatatttgctaatggtggctatgctcttaatgctgatgctggaactgtttctatctaccctaatccagctcctgctacttcatctggctctataaccatgcccatgcccatgctccatcagatggtcattcagagccatccacctgctacctctgcagcaacctctacatccatgtggatcgctcaaccattacctgccagaactgctgcggcttctagacatgcaagacgcgtatcagcagggcttgccaacaatggaaggtacagaagggctaggagctcttactacagccttcatccactgatgatggtagaggcagagcggttcatgatggaccagttggtcttttacgaatcaagagcagcagccgctgacccccacagggacatgagactggacatcgacaacatgagctacgaggacctgttggctttgggagaatctatgggcaatgtcaacacaggcttggccgatgagaaaatttcgaagtgcgtgaaagaagtggtctgctgcagttccgaccagatgcaaaccgatcaagatgaccaggatgacgacggaagctgcgtcatctgcctggagggttacagagacaaggatatgctggggatactgaaatgcaggcacgacttccacgccggctgcatcaagaagtggctgcagacgaagaactcgtgcccggtgtgcaaagccgccgccgcctag

SEQ ID NO: 41056 - DNA, 459 bp, Zea mays
  Peptide Sequence Number=SeqID_84431
atggctagccccaaatctgatctgggagaaaacaccccgcaaaccctaacttccttgccccaaatacagagaatacaatacggtaatgaatcagtagtatacgcaatggatttgtgtagatcgtacctcggtcttcgtggatctggctcggtggaccgaatcgaagaggaagacgacgacggcgacgagcttctcttccttttgccggcagccttggacgaagtcggcgaacgacgaagtcgtttgccgatggcgactctccggcgacgagctgggggaacctcgcttggaacttcggttgcggtgggtcgcgcgtcctcggttcgaagtgctgcgacctctatgccgccagacccgccaccgcacgcccgcttctcgcccacctgcctcgatgccggcggcgaagcacgccggatcgagggctcagccccaggagatgcagtcgccagcgcggggtag

SEQ ID NO: 41057 - DNA, 2832 bp, Zea mays
  Peptide Sequence Number=SeqID_84432
atgtcgtcctcttcctcttctgctgccgatacaccgccggccggcgcgtcgtccgaggagacgctgagcaatgtggcggcggaggagttgcgcaccggcgacatagtggagtttggcgtgtcgcggatgtcctcggtccgtgtgcaagacatgcaacagcttgggtattttggcggcggagtggcacgtgtcccgggggtagaggaggtcctcgagccggaaggcgagttggtcgtcttcgaggctttttttgccgctggccttcgtctgcccacacatcgatttgtgggagaagttctacgtatattcgacgtccaggtccaccagctgacgccgaatgctgtgaaaaggaaaatcggaaataagattgctcaatttggatcttgcacatttacgccgaagaccggcaagatttcgatggaagtcgttgagttggttccctgcgcccgcaataaatggggcaactggtgggaattttggttctacgttgtcgaaggcacagtcgaagaccatttggggctccccgtggccgtcatgtgttcgcattattactcagcgtacctgcagtttgaggtagcggaggaggatgaagacgaaggggccctgcggtgcgcggctcgcatgagtagcggacgcgatctggttgaggagtttgtcgggtatggggcgctgggcgaagtatgccctcgccagatgccttcccgtggcgggatgctagtgcggagtcttgccttcgcactggatttgcatggccgagatcctgccgcattcgtgcgtgaggcggaggatggggcggtgcgaattgttggtcgctacgtgccaaagacggaggcccagcggagttgggatatacgcggaatcaacgaccgcctgaatagggtcttcgagttgaattgtttgtcatatggcgttgatgaggacatgcgcggcccctggggaaggatgtcttcgcccgagctccgggagtcttcggcgcggatgctggaggttaccgggggtcgatggcctaagaacgttcctatcccccgcgcggccggtgaagacttctttacatctcgcatggctcgtgacttgagagtgtttccttacggacggaatattgctgttgttgtgtcggcagtgatgaacaaggatcgccaggaagctgcgcagaagcgccgggcggtcatcaggattcccgaggctagaccgaagagggcgcgggggactgcgaaggctaccgcccccggcggtagccagccgacgctggcggagaagccggtcgccctaggtccaacaagggaattgccttcgccggggaaacgcattgccgacttcggcacgaatattagtgtggacgattatctcgttggatcaggcgaggggcaacttgttgttgttccgcctgcggtggcgaccacggtgtctgtcgcggtgcctagggtgaagggtagcgctctcagcgctggcggcgagattttggcggtcgctgccgtcaaggacgaagcgggcactgtgtcccgccgattgagggaggcgtcgcaacagctgagtcaagcggccgacttcaccgaccgtgtggcgtcgggggcccttactgcagatgtgtctgccgaagtcgagaaacttcgagcgcagcatgctgacgccgtccgggaaaagtcggctgcggatagcaagtgccgcaagctggcggagaaggtggccgccctggagggcgagaggacggacctccggcgccagctggtggaggagaggagggaggccaaccaggccatcgccaaggcacaggcggcgcaggcggaggccaaattggcgcgggtggaggggagtcttgccagccagcgcgtcgaggaatgggaggtgcggttcaacgctttgcaggcccgcatggagagggccgaggcctctacacgctcggaggttgagcggacgcgcaaacagctcgtggactcgtaccgcgagctgggcgcgcggactgctgacttcgaagtgcccgaccgagaggcgggccttcgcttcctcgagtggccgcaagaggaattgttggcgcttccgaccatcatggagagatttatgtcttttgcctccctcatcacctgtgaaggggcgttgaacgcgctgtcccgcgaggggtgcagtcactatgaggtcttcaaccgatctgatgaagattttgggcgcgagatttataaagtcgaagaccctgtggtgaaggactccgcggggccctcttcgaccggatgtggggcccctacggtcgggaggtggtcagggagcggtctgaccgggctcgtcgccagccactgcgccgatggtggagaatcccccgaaggcggcgacggagccagcagcggagatcccatggtggcggctgggtcttcacaggattttgggcctgcgcacgcaactgctattgctaattttatggcggcttcgaacgtggtcgctggaaatgaatcggatgagtctacgtttaagttttctgattttgatgactctgggagttcggttgagtggacggaagagtcttcgaatgaggacttgaattactttgcggccttggatgtggctgcggcggaggcttctccgcatgttacggatgctgaagttttgcctggttcgagtgctgggcgtaggcggcgaagggcggtggcaaagcgtagagtgagtgaagtggatggcggtcggcttcgtgtgggcagggctggcaagcgggaattgttgtcttcgccggttgggacgagtgtaggtgagggggagttgcgaagtctttttgagggtgaggaacttaggataatgctatttaactatagggagatggtaatcattccgaaggttgaaccaatgtaa

SEQ ID NO: 41058 - DNA, 762 bp, Zea mays
  Peptide Sequence Number=SeqID_84433
atgccgtcctcctacgctgccgctgcagccggatcctcttcccgcaagccgaatcgcacctccagcgctgccgcacccactcttcgcccaccagcaccctcaccgtcgccggcacccgctcccctggcggtgaaccctagcgtcatctctgattccgacccctcctcctactcatcttcctctgcggatgaggccgatttcgccgcctccgactccgcaactgcctctgttgtctctgcctacctctcggttgctggcgagggggccgacctctcgaaagttggcattttcctctcatccgccgcgcgccgccgatcgccgccgtgccttatctgcttcgatcctatacgcccctctgacccggtgtggtcatgctcttcatcctgctttgccatcctccacctcccctgcatccagtcatgggcgcaccagtcagcatccgggcccgccgtgccgtgcccaacctggggatgccccaagtgccgcttcgcctaccccaagtccgagatcccctcctcctacgtctgcttctgctccaagaccatagacccggctccggacccctggatcctcccccactcttgtggcgacgtctgtggccgccgtcttgatgcgaatctcgactccggcttgctggggagtcacaaatgtgagtgtggagagatattggaggagaaattgtgctctgaaaggattttccagtgcaagagggagtgtggtgggatgctagattgcgatatcacctggcagagcaacaagtag

SEQ ID NO: 41059 - DNA, 207 bp, Zea mays
  Peptide Sequence Number=SeqID_84434
atgggcggtggccgtgaatttcgagcaagacgcgcggcagtcggaggtggagaagaacactggcgcagtgaatacgtgttcaacgtcgtggcagctattccgagctatagatcagctacaggtttgtcacagcagccatgggcagattcttgctggatcatagttgaatttatgctcaaagtcgtagtgattgcactgtctgtctga

SEQ ID NO: 41060 - DNA, 216 bp, Zea mays
  Peptide Sequence Number=SeqID_84435
atgagcggtcatcgcgcgtggagcgggtgcggtttgggggctaggtgtggcgggggcggaggcggtggcacagcagcagcggtccagtcccgctcccgcaagctcgaccgtgaaccgtcgagcataccacccgctgttgcctgccgtgcgctggagtggcgagtgacagagcccacatcgatgtggatgcaggcacaggtgacggcggcggactag

SEQ ID NO: 41061 - DNA, 507 bp, Zea mays
  Peptide Sequence Number=SeqID_84436
atgcagagggaggtgggcccgcaggtccagccgatgcctccccacgccgcggccgccgtgaagaagcgcggcccgccgtggcccgccgccgcggggaactggaaccccaggctgtgggactgggacaggcgcgcgctcaccgccaggccgtcggccgatgcgctccgcctcgccggtggccagccccatcaggcgaccgaggtgcaccgtcagggggccgggggaagcggcgcgctgaagctccagctcggcccgcgggaatgctccgcgaccccgacggacgctagcccgacgtcgtccccgcctgcttcggggcagatcctggtggtcaggccgagcaagcaggtgcggtcaggatcgcctggcagcgtgggcggcggcggggctgccaacggaggcgcgggctacccgatgttccaggtggatgactgccggggggaggggagcacacgcagagagagggcaggggcagtctacactaatgacttaatagttagtagagattga

SEQ ID NO: 41062 - DNA, 501 bp, Zea mays
  Peptide Sequence Number=SeqID_84437
atggagctgaaggtcgacgacgttgggatccttgtttggagaagaacgacgaccgacgaggaggacatcggccaaagagcaacgaccgaacatccatggcagccggcgaagcacggtggagctgagacagggcagcgacgcacgccggtcctaatacatgccaccaccaactggggagaggagttattggtgttgcttcatccatccaatgcaaaccataagaagctcccaaccccacctcccaagaggcacctgggaattaacatggttgatgggaggaccaagctagtagagtacatgctgccaccaaagattgaaaagaaggtggtcaatgaacagatgtatgtccagaccactccggcgaggactccacttggtgtcagtaagaacctgaggatatgtggtgactgccataattccatcaatatcgtgtccaggattgttggcagagagcttattgtgagggacagtgagaggtttcactctttcaagaatggatag

SEQ ID NO: 41063 - DNA, 708 bp, Zea mays
  Peptide Sequence Number=SeqID_84438
atggctgaaaggtaccaacttccacgaagttgcgttcctccaacgacaaggcggaaggattgcgggtgtcccccatctgggggctcggaaggtggaaagacacggtgcataagggagcacgaagacatggtcgcctttcaagggggtcaccctccttttaaaggcgactctccctacttgcgtccccggccgtcgtgggctgagtcttctccaacacgctccaaggtcctccccctatggtgcgggggctgggtcccacgcgtcatgcaagctggcccagggcagaagaagccaaaccgccgcgcgcggtgcatgcaacccccagcggttacaggcattcctccactttcgcccagaccagcgggcggcgcctcaagcgggagaagcgaacgacgcttcgccttcgccataatgaccgcgtcaaaaaagggaccgggaaagggggataccccgaaaaggatccttccccgtgaaggaaacaggccccgagcctcactactgatcagaggttcaaaggctggcccctcggaggggttcaacagccgcctcagagcgcgtgggcaccacacccactactggtcagaggttcgaaggccggcccctcggaagggttcaacggctgcctcaggccactcgggctccgcgcccactactgatcaggggttcgtaggctggccctcgaagggttcacagccgcctcagacatag

SEQ ID NO: 41064 - DNA, 633 bp, Zea mays
  Peptide Sequence Number=SeqID_84439
atggtgcctcctgttgacatggttggtccgtgccctgggttgggcgatgtgaaggctcctccgaggtcgaggtcgaggtcgagtctgtattccgaggccgaggtcgagtccgagcccctgggtcgggcgaggcggagactgtcggctgaggccagggctgagtccgagccctggggtcgggcgaagcggagttcgtcgtcttccgggactgagcctgagtccgagccctgggtcgagcggagcggagttcgtcgtcttccggggctgagcccgagggctgagcccgagtccgagccctgggtcgggcggaacggagttcgtcgtcttcaggggctgagcccgagtccgagccctggggtcaggcggagcggagttcgtcgtcttcaggggctgagcctgagtccaagccctgggtcggagtggagtttcccatggtgcatagggccggacttggccgatgccacctttgcattaaatgctcctgcgatttggtcggttggcgtggcgatttggcctaggttgcttcttggcgaagactgggcctcgggcgagccgaagctttgtgctgatgggggttaccagctgagaattaggagccttgagggtacccctaattatggtccccgacagtag

SEQ ID NO: 41065 - DNA, 183 bp, Zea mays
  Peptide Sequence Number=SeqID_84440
atggcgagagtagcgtgtaccctacgtggcaagaggctggacggtggtgcatctgtgctctcgcatacccttgagagtcttttatttagtcgggttacgagtcacttgattgtgattggtgttaagcgtcagtgggcacaaccttcttataagtctaagtacttcttctatacttcttattga

SEQ ID NO: 41066 - DNA, 585 bp, Zea mays
  Peptide Sequence Number=SeqID_84441
atgggcgtcgacggccgcaactgggtgaggccacgccatggccacgagttcctcgtcgacgacgtcctgcgcctcgccgccggcaagatccagaccggcctcgacgtctccggcggcgccgccaacttcacggcctggatgagggagcgcagggtcaccatcttcaccacagtgctcaacaacgccgggaaacccatgaacgagttcgtggcggccaggggactgttcccgctgctgctctcactggtgcaccggttcctgttctacgacggggtgttcgacctcgtgcacgtcagggccaccgcattggccgaaggtgggtcaccggcgctaggacaggcagggacggaggaggcgctggagttcttcatgtttgacgtcaaccgggtgctgcgcgctggtgggctgctttggattgacagccacatgtgccacgccgatgaacggaggaaggcgcttgccaggctcattggcaggtatggttacaagaagctccagtgggcaacaggagagaaggccgacacagggagcacgaaggcagcgatgtacttgtctgcggtgttgcagaagccgacacgaggttga

SEQ ID NO: 41067 - DNA, 1095 bp, Zea mays
  Peptide Sequence Number=SeqID_84442
atggagtatatcgtctcctccaaccacgtggcggccccggcgctgcccacgtggcggggtcaggcgatgtttgccacgtggctagaggtagccgcatggactccgcgccttcacactgtagaaaggagtacccctgattcaggctccttcactttcacgctttccccagctcggtcgctcgctcgcacaccatcttccttgcccaagcctccactctttttcctcgtcccgaactctcccgactcccgagctagagcaagcaaagccaacgcggacgcacgcacagctagggcacgacgcgcgcacggggctcacccacatgccgcctctgtcgcgcacgcctgcttccactcccctgaccccctccacgctcgcgctcctcgccgcgttagccacctacgagccccacgccgcctgcccgcgcaccgcctcgtctccaaggcctgcgagccactgccacgtcgccgctgcctctcccgcggtccccgcgccgcgttcctggcgtcaaacatgggcgtcgacggccgccgctgggttaggcctcgccacggccacgagttcctcgtcgacgacgtcctgcgcctcgccgccggcaagatccggaccggcctcgacgtctccggcggcgccgccaacttcgtggcccggatgagggagcgcggggtcaccatcttcaccacagtgctcgacaacaccgggaaacccatgaacgagttcgtggcggcccggggactgctcccactgctgctctcaccggcgcaccggttcccgttctacgatggggtgttcgacctcgtgcacgtcagggccaccgcattggccgaaggcgggtcgccggcgctgggacaggcagggacggaggaggcgctggagttcttcatgtttgacgtcgaccgggtgctgcgcgccggtgggctgcattggattgacagccacatgtgccacgccgatgaacggaggcagacgcttgccaagctcattggcaggtatggttacaagaagctccagtgggcaacaggagagaaggtcggcacagggagcacgaaggcagcgatgtacttgtgtgcggtgttgcagaagccggcacgagtttga

SEQ ID NO: 41068 - DNA, 291 bp, Zea mays
  Peptide Sequence Number=SeqID_84443
atgcacccgggctacggccgggccgcacgagcgaacaaccaggccggccgaggcatcatgaaaagcattaagacctcagaggagtcaaaccactcctccgaggcctcgggggctacacccggcaggtgcgctcgtgcgcacccaccagaacaaaatataaccgagaaagggctcaagcacttctccaacgaccatgttatcgcgtacacagggctcaagcacttctccgacagccacgttggcatgtacacagggctcaggcactcctctgccagacacgttagcgcatag

SEQ ID NO: 41069 - DNA, 738 bp, Zea mays
  Peptide Sequence Number=SeqID_84444
atgggttcccaaccgcccagtgtcgggcactgctgctgtgcacgctgcacaacagcatacaactgcgcagacatcccggactccatcaagggcagttccgggggtgttgtctgcggccagggagtttctgcgccaccctccaagcttcacggcctcaccgggtccatgaagcagtggcgtgacgacgtcgtccgactgctcggcatggcgcactccggctcgaccaggtctaggtcgcggtcatcccggtgccaacatgaggcaacggcgtctgtgcgctcaccctcggtgaggggtgcacagaccgacgacctccgggcagagctcaaccgtaggcgtgcgggagaggatgcccgggtctctctagagagggcgcgtgtcggcgtttcagacccgagggtccctcaaccgagccgaccagtgaatttgtcgctgcgtgcccctgcccagatgggttggcgcaagatggaacacaagggggaattcggcttgtattatctcgcaccagggggtaatgatgtatcccctgtggcgcggtcggtccgagcctggggtcgggcgaggcggagacttctcctgaggccgaggccagggtcgggcggggacgcgattcctctcgaggccgaggccgaggctgagccctggggtcgggcgaggcggagacctcccgaggccgaggctgaggccgagccctggggtcgggcgaggcggagacctccttccgaggccgaggcctaa

SEQ ID NO: 41070 - DNA, 336 bp, Zea mays
  Peptide Sequence Number=SeqID_84445
atgcaggaggcatgcaactgcaccaaggaggcgcacccttttgacttcgatgcgtccagcatggaggcccaggcccacacgtcatgtaactggcgcaccggttactacgtggaccgggaaaggggatactccgaaagggatccttctccgcgaaggaagcgggccccgagcccccctactgatcagaggttcgaaggctggccccttggaagggttcaacagccgcctcagagcactcgggctccgcgcccactactggtcagaggttcgaaggctggcccctcggaagggttcaacggccgcctcaggccactcgggctccgcgcccactactga

SEQ ID NO: 41071 - DNA, 330 bp, Zea mays
  Peptide Sequence Number=SeqID_84446
atgggcgcgattaaggtcaaggctcagtccactcaagggacacgatctcgcctcgcccgagcccagcctcgggcaaaggcagccgaccccggaggattcacgtctcgcccgagggccccctcaagcaacggacacacctttggctcgcctgaggcccagtcttcgcagagaagcaaccttggccagatcgccacgccaaccgacccctcgggcgccataggaagctccgcctcgcccgacccgagggctcaggctcaacctcgacgctggacgacggactccgcctcgcccgaccccagggctcaacccgagggctcatatttttcctaa

SEQ ID NO: 41072 - DNA, 141 bp, Zea mays
  Peptide Sequence Number=SeqID_84447
atgtggagtatttacctttctgggaactcagtaccacatggatgtgtatgggtatacagacatgggaatattgagaagtgtaatgtacttgcaacgacgcacctacgctcaggtacactaacctcgaaaacgtatgtgtag

SEQ ID NO: 41073 - DNA, 354 bp, Zea mays
  Peptide Sequence Number=SeqID_84448
atggcagttctggaggttgagctagagaaggttctccactgggcaagccaagtcgtagagtacgtcaaggcccatgatatcccagacaacgggctggaggacatgctagaggtcttcgacaaggcagctagtcgggtcatagctaggttgtcttctgatgacgtcattcgcaaggcttgggttcatcgcagcgcagtggtggctttatgcattgcgcaacttcattttggtggtgagcttcacaatgccattggattacctgagggcgtgatgtcggaggacatagataatttgacggacgactttgatgtcgccacgaacatcgtacttgggaggtatccgtggaggggataa

SEQ ID NO: 41074 - DNA, 105 bp, Zea mays
  Peptide Sequence Number=SeqID_84449
atgaggctggagcggcatgagagagtgtgcttgtttgtattgtggcgagtagaagagcctgtgactgaggatcatggtgcccagcagatagaagttgctgagtag

SEQ ID NO: 41075 - DNA, 294 bp, Zea mays
  Peptide Sequence Number=SeqID_84450
atgcgagcacgaaggcgcttgcacatcgacgcgaagagagaaaatcatagcatgaagggacgctggaattcgggctgggcgcgacgacaaccaaacagtgaagcacgcgcgcgcagccagggacaaggcatggagctgaaggtcgacggcgttggggttcagcgacaaggcaaggtcgagcacacagagcgactagctatggctctggagcaggccgagcacgcgaagcgcgcagacggcggggatagcgtgagctgggaggtgaccatggcgcacagaggcaaggaaacttag

SEQ ID NO: 41076 - DNA, 372 bp, Zea mays
  Peptide Sequence Number=SeqID_84451
atggcccggagcggcccccggtgggcactactcgccggcgcgaccccggcgcggcccccggcaccccggcgcgtccccggcgcggccccggccggctcggccgcccctggccggttcaaccgccctggccccagctcgcccgcccgttcccccgtcccggcccctcgcccgaccgtatcttcgctcgcccgcgctcgcggtggttatgagattgatgattctggttatgactatggtgctggccaagtcggcacctccttattcatctaccagcgcggcgacgacctcatctacctcctgctctacatcgacaatattgtgctcacgacatccactgccaacctcctacagcgcacgatcgtcgccctttag

SEQ ID NO: 41077 - DNA, 282 bp, Zea mays
  Peptide Sequence Number=SeqID_84452
atgcaaaatggggagtgggtggctcaccgccttcgaggggaggcaattcaggggatgtgtggtggtgtgcagggcctctgcccattagctggcagggagagacgcttggaagagaaggcaacgaatcattttggtggtggtgcgaacgatgcattcggcctagccattctgaggagaggtgtaggggaacaagagatgcaaccgaatgccatgggtgaggaaggagcaagaggcgttgctgtagaaatcgtggccattatcatgctagagggcacggattag

SEQ ID NO: 41078 - DNA, 63 bp, Zea mays
  Peptide Sequence Number=SeqID_84453
atggggctactgttgggggtctgcttcgtcgccgaaggtcctagaagatacttgtcttcctag

SEQ ID NO: 41079 - DNA, 588 bp, Zea mays
  Peptide Sequence Number=SeqID_84454
atggttgtcactagtgaagagagtagacgtggatggcaagtgaagagagtagtggtgggggaagtggatggcaaggtggcatatggtgagcccccagggatcgaactccatagaacaatggttgtcactagtgaagtgatgaatcgagagaaggggatgagtcagaccaagagcaacgaggacgttgttgaggtagaaaggtcgaccgacacacctactgaggtgaccgggagggtggaatcgttgcccacaatgatggagggaggatgtgtggggtgtggtggatgggagtggaataatgagctagtgttgggagtagtgtggaaggaggctccagagtcgaccacccaatcgctcgacgcagtctcgaaggacagggctcatggcgtgatcgaaggccacgaaggtgctccggacaagctggccatcgtggaggaggacgcgcacaacgacaacgccgaaactgggcggagccagaggcaccaagggtggtggaataccgtaggaagtgccgggagcggtgacatagggttgaagagcagcgggaaagggggtcagggcaggggtggtgaggctgaacgacaatga

SEQ ID NO: 41080 - DNA, 417 bp, Zea mays
  Peptide Sequence Number=SeqID_84455
atggatacccataggccaccacacttcgacgacactaacttcccatattatagtgctagaatggcttgttacctagaggccgttgatctaggtgtttggagagtcactcgtgacgggatgaaaccacccaagaatcccgagaacccaccacgagataatgagcttgttagagatatgtattctcgtttgaatctaatcataaatgagctcaattctattggcacaagtaagctaggtgatgtgtacattgtgagaaagattatctccctgctaccacaacaaagatatgggagcatcatcactattcttcacaacatggaggacttgagtataatgacctcgaccattgtgattgggaaaatcgcagcctttgagatatcacgaaaaatgtgtcgaggagaggagccaacttcctaa

SEQ ID NO: 41081 - DNA, 1866 bp, Zea mays
  Peptide Sequence Number=SeqID_84456
atggcgccgccgcgtccacccacaggaccgatcctcttcctgcccctcgtcttcctcttcctctttaccaccgccgcggcgtctgcggcggcgcctgaggatgaaaagttcactgaggagctgctcctgcggccgctcccggaccgcaaggcactggcacacttccacttccgctcctctgcgccccccgctgcctccgttggtcggcaccaccacctcttccccaaggccatctcccagctggttaagaaatatcatattagcgagttggagctatctttcacccagggaagatggaactatgagcagtggggtggatttgatcctatgtcaactaataatgcaaagcctcctggtgttgagctgtgggcagtttttgatcttcctttgtctgagatcgatgcaacatggaagaacctgacacatacactctctggcctgttttgtgcatccatcaactttttggagtcctccactgcattttctgctcctcgctggggcttcaaactgaacgaaggcaatttgcgatatggtgcattgcctcgtgaagcagtatgcactgagaatctgacaccttggttgaaacttcttccatgtcgtgacaaagctgggatagcttctttgctgtacaggccttcaatttacaaaggatattaccattcacaaaaactgaaactgagatcctcccagtcacttggtattattcttgatcaaactctgactgttgtgctgcaaccaaataatgtacatggcgaacagctacattccaatcatggtcaacttcagcccaactggtccatgagacatcttttcaacagaaagttgtcagggaaatgccttgtttctaaatccagcagagtattcattgaggttgataaaggcattgctgacgaagttaacatatctggaagtgttcattcttggagtaatgaattctttgtattgtccaatagcccggacaagttgatcaaaggtcaaaatcacttagaaatgcaatcttcttttttatatgtttatgatgctagtaactacagtgaggaacaacctttggatttgggcataacttggaagcttcccctgatatggacttgcaccccatcaccttttcatgcaagcagatttcttatgggcagtggcaatgaaagagggtcaattgctctgtcgtttatgtccactaatcttcataagaagatatctggcagcgcaaatgattgttcaataaaggcagttattttccaggttgttccatggtatgttaaggtctattatcacagcctagaaatatttatagatgggagcaggaagactgtgtcagaagtagttgacaagattcatgtcattccttcagaagacaagcttttgcctggtaccttggagatgctactaagattcccttgcagtatgcagtcgggaactctgacattggattttgacaaggggttcctgcatatagatgaatatcctcctgatgctaatcaaggatttgacattccttcagctttggttagctttcctgagttcagttctgctcgaagttaccctgaaattgatccagtacttggatcacctttactagaaaatttccaggaagatagtgttgtgaagtcgtatacagaagtattgctcgttcccctgacaactccggatttcagcatgccatacaatgtcatcaccttcacatgcactgtcttagctctttactttggttcattattgaatgctttgagacgaaggattggcgaggaagagagggagttgaagaaaagagacatcactcatgtgggagccttcggcactgggtctgcctccctttttttgcccttcattatagttgatgtctatggtaccacacagcttgtgctctag

SEQ ID NO: 41082 - DNA, 384 bp, Zea mays
  Peptide Sequence Number=SeqID_84457
atgaagaagttcatgtattgtattcgcaactgcatcccaatgtacctgcggatcctgtcgggacggaagctggaccttctgggacagcgggagaagccttcgaggcagacaatacccgatttctatgggaaatggcgagtcaacaactacaacaacaaggcgggcgggcatatccgcaaggcccccgtgaaacatgctacctggatttctctgagacgtgccctccattgtttgtcaaagaagaggaccctctggaagcggatgaatggatccgcgtcattgaacagaagttcgggctccttcggtgttcagaggttcaaaagcccctattcgccgcccaacaattacgtggccctgccagcacgtggtggggaaattttgtag

SEQ ID NO: 41083 - DNA, 483 bp, Zea mays
  Peptide Sequence Number=SeqID_84458
atgggcaagaacaagaagggcgggagtttgtcgcaccactccggcgacaagcgaaagcacgagccaagtcccccctcggaggacttcggtgactccgagtactcggatgaggagttttcctccgagtccgaggggtcgccagtctacgcctctcccccggtgtcgtctgatgactcggacgattcccaggggatcgctgccgaggtgtggacgtacatccgagccatcgagcgctccgggctcgagggctcggatgagtcggagatctcctcggacgaggagaactcctccgactcgtccgaggaggggagcggtggtgacggcgatgacgagggcgacggcggcgatggaggcgacgacggcggtggaggcgatggcgacggcaaggggacggcgacggcagcaagggcgacggtggcagcggcaagggtgacagcggcaacaacaaggccagtagcaaagcgccactggcttaaatattag

SEQ ID NO: 41084 - DNA, 246 bp, Zea mays
  Peptide Sequence Number=SeqID_84459
atgaagtggccaataatgcttgaagttgagtatcaacatggcacttgtttaaattattgcgttcttactcaggatgagattgaagctgctcgaatagcagcgatcaacaaggaaattaagcttgtattgactgaagtcctttcaaagaggtgcaaggttatttctgattggttagcttcttaccctttttccatcacatacagaatcagctatcttaaggctgggccaaaggcatacaatccttga

SEQ ID NO: 41085 - DNA, 399 bp, Zea mays
  Peptide Sequence Number=SeqID_84460
atggcccccaagcgagctagtttgaaggcagccccatccatcgacgaagcagcgaaggaagcgctactggtggagaaaaaaggcaaggccctcgcgaacaacaccccccaagaggacttcaaagatgaagctatcagccaaagacagcgccaagaccattccacccccgaaggcaccctacgcacctgcagctttggaggcgtaccgcaagcaccaccaccaggcttcgctccaccagagggcgaagacgtaatagaagtcggagaagtcatcggcatctcagccgaagaccagctgcagctgtgggccctgcgcatcaagaaccacaacctccaaaagcagaaagaaatcctcaaggccaagcgccaacgtgtcaccatgcaagccaaggtgcattag

SEQ ID NO: 41086 - DNA, 675 bp, Zea mays
  Peptide Sequence Number=SeqID_84461
atggcggactaccacttcgtgtataaggacgtggagggggcgagcacagagtgggacgacatccagcgccgcctcgggaacttgcccccgaagccggagcccttcaagccgccgcccttcgccccgaaggttgacgccgacgagcagcccaagtccaaggaatggcttgacgtgcgcgagcccgaagagctcgaggaactagaggacgatctggatgacgaccgcttcctcgagaagtacaggaagatgaggctcgcagagctgagggaagccgcaaaagccgcgcgatttggtactatacttcccatcactggctccgacttcgtgcgggagaattgtttggaagaattggctactaggtatccagcgacgaagtttgttaaaattatctccacagactgcatccccaactacccagataggaatgttcctacaatactggtgtataacaacagtgctgtcaaagggacttatgttggtttgcagaagtttggtggaaagagatgcacacctgaatctgttgcgttagccctttgccagtcagacccggtactgaatgatgggcatggtggcagcgattcatctcggggcaatgtcttcgaaggtgttcgcaggaagttcatagagaaggttgtggcccagcatgaagagcgggaagaagaggacagtgactaa

SEQ ID NO: 41087 - DNA, 1005 bp, Zea mays
  Peptide Sequence Number=SeqID_84462
atggatatttccgtggatgactatcttgtgggcggggtcgccattttcgacgcccatacagggcggggacctgtcggacccatgttttgcgccagcggcgagatagcttcggccgccgccgctaaggacgtggcgggctcagttgcgcagcagctaaagcatgggaggattgagcgcctccagacgcagcacactgaggctgtgcgggacaaatcggtcgcggagaacaagagccacaacctgatggagaagctgtcgactgcggaggccgaaaaagaggacctcggccgccggctggcggcggaaaaggaggacgtggacagggcctgcgcggaggcccaggctgcgcgtgccgaagccaagcttgcgcgcgccgaggctaacctcgctctccaacgtgctgcggaggcggaggcgagccataggagcctgtgtggctatctggacaaagcggaggcctctactcgcacagaggaggaactggagatgcttccgtcgatcgtgacgggtctcatgtccttcgcctcgctcatcacctgtgaaggggccacgaatgccttgtcccatgagggatgcaggcacttcgaagtctttgaccgatccgacaaagacttcgaccgtggaattttccaggtcgaagacacggttctaaagcggtctgctggggtgctttatgataggatgtggggccctcatggtcgtgatactgtcctggaaaggtttgaccgggcgatggagcagatggcaaatgatgaggaggtcgaggacttcggaggcctagagagcacggcgcctctggcggagggcacgagggtggggattgggcagcagccggcgctgccgactggtgctagcgaggaccctgtggcggccgctgtgccgcctggtgaggacacttcggtggtagccgcgctggctctgcctggtgaagactcttcgatggcagctgcgccggctgccgaagaccttgcagcgtcggtcggcccttcacaggtggtgggatag

SEQ ID NO: 41088 - DNA, 147 bp, Zea mays
  Peptide Sequence Number=SeqID_84463
atgcaaatcaaggatcaaggatcgactattcacccccctataggtgctctcaagaggccgaagtgcgatatgaatgaagctatcgaagcatgttacaaagatttcaatactatagcaaaacagattggctctcaggacttgatttag

SEQ ID NO: 41089 - DNA, 798 bp, Zea mays
  Peptide Sequence Number=SeqID_84464
atgccgaagaaaggggacctaccggtcgttaagcttttgctgccttttgttctcctgcgacctgtttccttcgaagataacgttgacctccccttcaatgcgtgggaatgctccaccccctcctccttcctgtcgttgaggctgccttggctcgctaggccctccccgtggtgggggaggtggaagaggctggaatggtcagccattcccaatggaatgcttgaagtctctgcagttccgcaaggtgtggcgcatgtccttgtgatacggacactgggcatcgaggatgtcgtccaatgtccgctcacctccacggggtgcccctcgagcacgagagacgggtggtctggcagcatggacctcttcacggggcctcttctcctaatgcttgtcgggctgctagttcgcgtcgcgccgtggtgttggtggcgcaggttttgcccctctgatgaggtcctgggcccgttcgtcagtggtgatgtagaggtacgcttctcgaaacagttgttcgaaggtggtcgacgctttctgcactatggctcggatgaaggtcgagtcattagatccccggtagaagtcctcaatcactgttgcctgagtgacttcggagatgcggtttctcatggtatgaaacctcttaaggtacgaccgaagtgtttcatcgccccggcgtctgatggatttgagtgtcgcggcaaatgtcgtagccactacaatgcatcctactcaaggacgatgggcaagtatgtggtcatcacgtcttcagtcgccccagcggcccgggcggcggtcgtatag

SEQ ID NO: 41090 - DNA, 267 bp, Zea mays
  Peptide Sequence Number=SeqID_84465
atggaggtgactgaggagccctcagccttggatgtggctactgcagaagaccgagcccccgagggtggtgccggcagttacccaacccccgagggtgttgccggtagtaatccagctctggtgggtagtgcaagatacaacctagcccccgaggatgttcaggcttttgttgatggaatatctgcccagctgagatcctgcggtgccactattcccgaacaagctatgtctctgatgcagtggaacccattgctgctccagaaatag

SEQ ID NO: 41091 - DNA, 654 bp, Zea mays
  Peptide Sequence Number=SeqID_84466
atgtggggtgtgctgcgcaggtcgacgtctcgggcgtcgaaggtcaatggcacatgggaccactttgtctgcacgactggaccagtgacggcaacgtggttgatgctgcgggtgcgcgcagtcttcgccgtggaacaagcagtaaaatatgcgcggctgctgcgcacgtccccggccccgaccacgagttccgtttccgcggccctgggggggatactcttgtcggcgaggggcctcaccagcggggtgctggttggcgatgttatgtacctgttgctgactgcggccgtcccgcccggagtctgcctgcgaaggcctcgtccacgtacggctggactacggagggtctttgggtttcctctgagactcgactttgcgctggtggagctcttcggatctggcgtattttttgaacagctgatacagctcctagaggttcctgggcggatctctgatgcagtggctgtaaaggacgccagcccgaaggccaccgatggtgtaagtgaaagttcagccaaggaggttggtgtctgggcggtacccttggaagttgagcaggaatttgtcccggagacttctccaggagtcgatggacaacgggggcaacctggtgtaccaggtgagggccgggccttcgagggcgatgatgaatga

SEQ ID NO: 41092 - DNA, 384 bp, Zea mays
  Peptide Sequence Number=SeqID_84467
atgggcgacatggagctgcttgacgactggatggtgaagggcacgacgggccagggagacacgccagggcgctgcgacaaggtggagaagggtcgtgctgggagggatccagtggagtctgagtgcggcttggcgagggagaagatgcgctggccatcgataaaccccggcgaggatctcacctgcggggaaaaacacagggcacgcacgcgtcaggcgactagaggaagaagggcgcgagcgagctggaccatggtgttgagggcggccatgggaaggaactcggcatggggcagcagccgagcgctagagttgagaccatggcggcgatggtcgagtgggagagggcgctcgacacagtggagatggggcagtgtgcactag

SEQ ID NO: 41093 - DNA, 84 bp, Zea mays
  Peptide Sequence Number=SeqID_84468
atggatgtgtatgggtatacagatatgggaatactgagaagtgtaatgtatttgcaacaacgtacctacgctcaggtacactaa

SEQ ID NO: 41094 - DNA, 1554 bp, Zea mays
  Peptide Sequence Number=SeqID_84469
atgccgtcctcctcttcttccgctgccgctacgccgccggtcgattcctcaccgtcggccgccgcctcgtcggaggagacgctgagtagtttgatggcggaggagttgcgcgccggcgattctgttgctttcggcgtgtcgcgaatgtcgtcggcccgcatggaggatatgcagcggttgggctactttggcggcggagttgctcgtgtcccggggacggagaaagtccccgagccggagggcgagttggttgttttcgaggcgttcttcgccgccggtctccgcttgcctgcacaccggtttgttggcgaagtcctgtgcaggttcaacgtgcaaattcatcagctgacgccaatgtcgtggtggccctgtcgaaggtcggacgagggccagcttgctacagttgcgcctgccgcggcgatcgcgacggctgccatagtgccgaaggcgaggggcgaggctcttggctccggaggcgaggtgtcggccctcgcagttgtcagggacgaggcgggcgcagcgacccgccggctgaaggaggtgacggaggcgctgagtcaggtggctgacttcgccagccgtactgcgtcgggggccctcacggcagctgtgtctgccgaagtcgagagacttcagacacaacatgctgacgctgtccgtgagaaatcagcctccgacagcaagtgtcgtaaactgacggacaaggtggccatactggagagggagaaagctgacctccggcgccaactggcggcggagaggagggaggccaacgaggccatcgccaaggagcaggctgcgcaggcggaggccaaactggcgcgggcggagggcaatcttgccaaggagctcgccgaacatctgcaggagcggctcaccgccctggagagccgcgcgaagggggccgaggccgcgatgcgtgcggaggccgaacggacgcgcacgcagcttatggatacgtatcgtgagctgggaggagctgcaggaactccccgctgtcgtggggggggggttatgtcgtacgcctccctggttacctgcgagggggcgatgaacgcgctctcccgcgaagggtgccggcacttcgaggtcttcgaccaggcggatgaagattttgatcgagatgtctataaggttgaagacctcgtggtgaaggattctgccggggccctctacgaccggatgtggggtccgcacggtcgcgaggtggtcagggagcgggcggagacgacgatggctcaggcgttgcgtggcgagcgggtggacgacctcggggcattgaacagcgcgctgcctgacccggagccgacccctgcggaggccgtgtccggggtcgcccgggagccaaccccggagaccgcggcgatcgcgacggctgcccccacatccgctgcggccggcgaagacctgcccccaaaggtggccgaaggcgcccctgatgcccccgcagctgctgtgccgagtgctgaagatcccgcggcggaggcggcggaaacaacggcagaagcagcggcggaggctcccgcagcgtcagggcctccgcaggtggcgtag

SEQ ID NO: 41095 - DNA, 2388 bp, Zea mays
  Peptide Sequence Number=SeqID_84470
atggcgccgccgagctcgtggtggggcggcgaggaccaggacggcacgccggtggtggtgaagatggacaacccctactccctggtggagatcgacgggctcggcgtgccgcccgccgacaaggcccggggcaagaacgcaaagcagttcacgtgggtgctgctgctgcgcgcgcaccgcgccgtgggctgcgtggcctggctcgcgggagggttctggggcgtcctgggcgccgtgaaccggcgcgtgcgccgcagccgcgacgcggacgacgagccggacgccgaggcctcgggccgcggccgcgccatgctgcggtttctgcgcgcgttcctgctgctctccctcgccatgctggccttcgagaccgtggcccaccttaagggctggcagttcccgcagcacctgccggggaacctacaggagctggaggagcagctgcagcacctccccgagcacctgcggcacctccccgagaacctgcgccagctgccggaccacctccgcatgccggagcggcaggagatccagggctggctgcaccgggcgtacgtggcctggctggagttccgcgtcgactacatcgcctgggccatccagaagctgtccagcttctgcatcctgctcttcatggtgcagtccgtggaccggatcgtgcagtgcctcgcgtgcttctggatcaagatccgcggcatcaagccgcgtgtccccgcgtccggcggcaagccccgtggaactactggaaggaagagcgcggatgccgagaacggtttcgccgatggcgacgccgacggctacttccccatggtgctcgtccagatgcccatgtgcaacgagaaagaggtgtacgagacgtccatctcgcacgtgtgccagatcgactggccgcgggatcggcttctgatccaggtgctggacgactcggacgacgaggtgtgccggatgctgatcaaggcggaggtgaccaagtggagccagcgcggcgtcaacgtcatctaccgccaccgcctctcgcgcacaggctacaaggccggcaacctcaagtccgccatggcctgcgactacgtcaaggactacgagttcgtcgccatcttcgacgccgacttccagcccaacccggacttcctcaagctcaccgtgccacacttcaaggagaacccggagcttggtctggtccaggctcgttggagcttcgtgaacaaggacgagaacctgctgacgcggctgcagaacatcaacctgtgcttccacttcgaggtcgagcagcaggtgaatggcgtctacctcaacttcttcggcttcaacggcaccgccggcgtgtggcgcatcaaggcgctggaggactcgggcggctggatggagcgcaccaccgtcgaggacatggacatcgccgtccgcgcgcacctcaacggctggaagttcatcttcctcaacgacgtcaaggtcctctgcgagctgccggagtcttatcaggcttacaggaagcagcagcacaggtggcactccggccccatgcagcttttccgcctctgcatcccggccgtcttcaggtccaagatcccgttctggaagaaggcgaacctggtgatgcttttcttcctgctgcggaagctggtgctgcccttctactccttcacgctcttctgcgtgatcctgccgctcaccatgttcgtgccagaggcggagctgcccatctgggtcatctgctacatccccgtgctcatgtccctcctcaacatcctgccggcgcccaagtccttcccgttcgtcatcccctacctcctcttcgagaacaccatgtccgtcaccaagttcaacgccatggtgtccgggctattccagctggggagctcctacgagtggatcgtcaccaagaaggcgggccgcacctcgtccgcgtccgatatcctagcgctcgccgaggccgactcccacgcgccgctgccgccgccggccaagctcgtgcgccgggtctcggagggtggcctccaggagtggagcaggctcagggagcaggagaccgccgagtgggccaacaaggaggaagctgctgcggctctggccgccgctgcgccggccacgcccaagatgaccaggaagaccaagaagcccaaccggatcttcaagaaggagctcgcgcttgcgtgcctcctcctcacggccgccacacggagcctgctctccaagcaggggctgcacttctacttcctgctcttccagggcgtcacgttcctcgccgtcggcctcgaccttatcggcgagcagaacttcgaccaacaatttatccagagggaaccgaaaccccgctttcatgaagcttctgtaaaccaccacttcgtcagcttcgggaagaggaacattattctcccctccggccctcacgattga

SEQ ID NO: 41096 - DNA, 81 bp, Zea mays
  Peptide Sequence Number=SeqID_84471
atgcggcttcatacccttagagatgatgtggttttatactctcagaggtgcttgttgctcatcaaggggagtgggaagtag

SEQ ID NO: 41097 - DNA, 426 bp, Zea mays
  Peptide Sequence Number=SeqID_84472
atggcatggcgaaggggcctcggtcgattatggtcgttggatcacgcgcgggcgacgcatattagaacaggcctatccgccaaccggtttgttacctcaacacgaagtgcccagggcgccgctcacgtcggggcagcgggcacacggcggcagacaacgtcgatgagaaattccgcccagcccgcggcaacactgatgcaccggtgccgcgcacagtcactccgcgcaccaacggaacactccaccaccaccggcgccaaacccaagcctcacacgtcagtcggcggcgctagctctaaatctcggcctatggcggacctgcgtctacacgagcgtttgcaacagaaggcgaagagggtcgcgcatggaggaagaagcggcggccctcccttatctagccgcgaggtgcggggtcttggggcctga

SEQ ID NO: 41098 - DNA, 189 bp, Zea mays
  Peptide Sequence Number=SeqID_84473
atgcagggccgtaccagtgatggaagcgccaacgaggttgtccgcggtgcggtggatccgtggcagaagaggagcgtccggcgagcaatcgccagcgcacgagtggctacccacgtccgaagacaccacgagagctcccacgactcgcggcgaagttctgggtcgccgatccgagggccgttcgccaag

SEQ ID NO: 41099 - DNA, 402 bp, Zea mays
  Peptide Sequence Number=SeqID_84474
atgcagggccgtaccagtgatggaagcgccaacgaggttgtccgcggtgcggtggatccgtggcagaagaggagcgtccggcgagcaatcgccagcgcacgagtggctacccacgtccgaagacaccacgagagctcccacgactcgcggcgaagttctgggtcgaagatccgagggccgttcgccaagagtcgttgtaccggccagctgagccgctgccgcgattcctgcgcgcgatgcgcggcgaggttgttcgcgagaagaacagaggactccctccacggtttctggcgcgtggaccccgcacggcagagggaaggagacagccaggcgtgcccgcgtgcgactgacctactggccccacatgtcggcgccatcaccagagccaggccgcgcgggtga

SEQ ID NO: 41100 - DNA, 375 bp, Zea mays
  Peptide Sequence Number=SeqID_84475
atggcggtcggcaagaaccctgcactggagcttcctataaactgtagcggccttacacttcatgaactcccacctttggtgagttcatgccacattattccccacaacttgttgagcgatgaacggatgaacgtcgacgagcagggagggttcggcgggcagggaacggtgaggtacaagctctggcgaggctcgacggactccggcgacggtgtggcgagcaaggagtgtgagaaagagagagggagcttggggaggaaaagagctcgtttaggaggagcaagggctgggcgagggttttatagaggagagggagggagaggaagggtcggccggggtgggaagaacggctgccaaggtcttcaaggccattga

SEQ ID NO: 41101 - DNA, 474 bp, Zea mays
  Peptide Sequence Number=SeqID_84476
atgggcaagggcaagagaggtcgaggctcgcctcatcgtgccggcgacaagcggaagcgcgatccaagtcctccctcggaggacttcggtgactctgagtactcggaggaggaggtttcctccgagtccgaagggtcgctggccctcgcctctcccccggcgtcgtccgatgactcggacgactcccagggaatagctgtggaggtgtggacgtacatccgctccgtcgagcgtgccgggcttgagagatcggatgagtcgaaggtctcttctgatgaggaggactcctttagctcatccgaggagcggagcggcgacgacagcgacgacgagggcggtggtggaggcggcgacagcgacaacggtgacggcagaggaggggacgacgatggcggcaggggcggtgaaggcgacgacaacggcggcagtggtagcggcggcggtaaggctagtcgcaaggcgccactggtttaa

SEQ ID NO: 41102 - DNA, 1068 bp, Zea mays
  Peptide Sequence Number=SeqID_84477
atgtcccgccggctgagggaggcgtcacagcagctgtcacagcacgaggatgccttccgggagaagtcggctgcagagagcaaaaaccgcaggctggcggagaaggtggccgccttggaggccgagaagacggacctccggtgccagctggtggaggaaaggagggaggcgaaccaggccatcgccgaggcgcaggctgcgcaggcggaggccaatgtggcgcgggcggagggaagtctcgccagccaacgcaccgaggagtgggaggtgaggttcaacgctctgcgcggccgcgtggacaaggccgaggcctctacgcgctcggaggttgagcggacgctcgcacagctcgtggactcgtaccgcgagctgggtgcgcggactgctgacttcgaggtgcccaaccgagaggcgggccttcgcttcctcgaatggttgcaggaggagttgctggtactcccgaccatcgtggagggcttcatgtcctttgcctccctcgtcacctgggagggggccatgaatgcgctatcttgcgagggctgcagacattatgaggtcttcgaccgatcagacgagagctttgaacgcgagatcttcaaggccaaagaccctgttgtgaagcagtcagcgggggcactttttgataggatgtgggggtgcatgatggagcgtgccgaggatgtcgaggacctcggaggtctggtcggcgcgccgctcgaggctgcggaggtcaaaccggtgctgccctcggatgccggtgaaggcccctcggccgcgcccgtgcctgccatggccggcgaagaccctgtgttggcccctgcgccgacagccgaaggtgtcctggaggtggtggcggagccggcggtcgaaggccccatggccgcggccgtgccttcgcaggagtcttcagatgaggacttggattattttgcggccttggatgtggctgcggcggaggcttctccgcgtgtgatggatgctgaagttcttcctggtctgagtgctgggcgtaggcggcgaagggcggtggcaaagcgtagaggagatgggtatcatcccgaaggttga

SEQ ID NO: 41103 - DNA, 174 bp, Zea mays
  Peptide Sequence Number=SeqID_84478
atggggatatcctacacatccaatggggccttggggacgccccccatggccaacacagccacttccatcaccagcggactactcaactactgcttgtacatcttgcgtttgatcaagctcgtagtggacatacttgcaagtctggatattgtacaacatattacagcgtgctaa

SEQ ID NO: 41104 - DNA, 525 bp, Zea mays
  Peptide Sequence Number=SeqID_84479
atgccggagcgaggagttgctcacgaggtagccccggatctagcaccagagcctgccatcgaggatctgcctgccccagctttggaaggcaagccccgggctgaggatactatcgaggcgattgctcttcatggattgaccaccttctgtggtttccatcccttggagctgtccactcaccccattggtttgttccccgtggagaaggaggacgacccaatgtggaaggaccaagtggagcatgccaatgatatatgggctatctacctatgtcagactgctcacttaacggtgcggtgcatgaatgccctatatcgtctgcaagtgatgcgaggagaggcaatgtctcatctaatggcattgttggaggctaccaagatcaccttggataacagagaggaacttgtagtagacttgtccactgatatggtggaaaaagacctacaagtggaacagatgtcaaatgagatccaagagcttgaggagctagtgggaaccagggagaacaccatcgaggagatctag

SEQ ID NO: 41105 - DNA, 246 bp, Zea mays
  Peptide Sequence Number=SeqID_84480
atgcagaaacttgttcagaatactgttcggataatgtatagtgctcagatgggatctcaaatgggaccccagttcacccgtccgtcacaatctggacagaccccaaacactaatgaaacacagggttctgagaccggacaaggaaacccacagatggacatacagtggttgatgcccttagaggacagattcttcctcctccacaaccaggactactcaactactgcttgtacatctggcgtttga

SEQ ID NO: 41106 - DNA, 498 bp, Zea mays
  Peptide Sequence Number=SeqID_84481
atgcggaaccacttcgagcgagggcagcgtctccaccatctagcgacgccttcggcaccagatgacttcgccgatctcaccgaaccaacggaggcaaagcggccggcagtttccacccttcgtccaacacgctgcaagacgaaggcctacgacgagcgtgcacagcgccccatcgtgctccgtgcgccgtcagagcaccccggaaaccgccgcgtcgtgcctgctgccgctcggaccctgctgagctcccttccccatccgcccaaccacccctttgctgccatcgcgtcgcgcgcgcctgcccagcgcggcctagcagccgcgctcctgcgcgcgctccccggccacttcgcccagtcgctcgccccgacgtcgcccatgccctcgtcggagcacctcgccatcccggccgtcgtcgcgagtggtgacaaggatgatgtttatgactatggtaatggtaaagaagaaggtgtcgaggcagatctccaggagttctag

SEQ ID NO: 41107 - DNA, 582 bp, Zea mays
  Peptide Sequence Number=SeqID_84482
atgtgcaactgttctgaaggcggcagcaggctgtgggagttaatttgtggtttcttggatatccagggtacgcaactgaggaggcacattgacgccactctcggcagcggcaacctgcgagaggctgtccgtctacccgtcggggaggacctcaacgagtggctggctgtcaacactgttgacttcttcaaccacataaacgttctgtacagcacgctggcggagttctgcactccacatacctgcccggtacgagtacaggtgggccgacggagagccaaggtcaaggtgcccatcaaggtgtccgcgcccaagtacgtggactacctcatggactggatagagatccagctggacgacgaggccattttccctcaacagcttggggctcctttccctaccaacttccgcgacgtcgtcgtcaagacgatcttcaggcgcctcttcagggtgtacgcgcacatataccactcccacttccagatgatcgtcaagctcaaggaggaggcgcatctcaacacttgcttcaagcactttgcgctcttcacgctgtttttcaagcctgacaagcgccccggatga

SEQ ID NO: 41108 - DNA, 1260 bp, Zea mays
  Peptide Sequence Number=SeqID_84483
atggaggcccaggcccacgcgtcatgcaaccggcacgccgagtgcttcgtgcatgcaactgcaccgccacttgcgccaccaccgcgcctcctcgactgcggaaccaataccgcgactcgaggcgacccagagcacgacccagcagcgccagcctggcgcgacggtcaatgcgaccaaaaatgggccggcagtaatggcggtggcaggcgggcaggagcggcggtcgcgtcgtcagccaagcctacgtcccatccaggggagaagcgggcgacgcttcgccttcgccataatgaccgcgtcagaaaagggaccgggaaaggggataccccgaaaaggatccttccccgtgaaggaaccaggctccgagcctccctactgatcagaggttcgaaggctggcccctcggatgggttcaacagccgcctcagagcgcgtgggctccacacccactactggtcagaggttcgaaggccggcccctcggaagggttcaacggccgcctcaggctactcgggctccgcgcccactactgatcaggggctgcgctcccgaggtaccctaggacatttccgagaccagcgggaacgatcttgtaacggaatcccatcagagggagacatcgagccctcggaccccgtcgccaggggaccgggtccggcagatcacccgcagaggctcgggggctgctctcgcaaacccgactccggccaaaccgttgacagcgtcaacataccagcccgagaacttgggacccgaccgtacacccgggctacggccagctcgcatgagggaacgaccagaccagccgaagcattgcgcgaggcattaagacctcggaggagtcaaaccactcctccgaggcctcgggggctatacccggcgggtgcgctcgcgcgcacccaccggaacaaaacgcaaccgagaaaggctggtccccttgcaaaaaagtgcgacgaaagcctccaagcgagtgctaacactcccttcgaggctcgggggctactgtcgaggaccataactaggggtaccctcaaggctcctaattctcagctggtaacccccatcagcataaagctgcaaaggcctgatgggcaccataggaagctccgctccgcccgacccagggctcggactcgagctaagccccggaagacggtgaactccgctccgcccgacctagggctcggactcgggctcgggctaagccccggaagacggcgaactccgctccgcccgacccagggcttggactcgggctaa

SEQ ID NO: 41109 - DNA, 311 bp, Zea mays
  Peptide Sequence Number=SeqID_84484
atggctgacattctgtctccatcgatatttaatagtaaagcaaggttgtcacgtgattcaagagtattaatgatatacaaaagtttgctttatggcaagtcagctgggaacatgctccatcttattatcgaagcctgtatctcgagaaagttgatcgatacatctgcttatttatggcctggttatgttgtaccatctgggactttaaaagatacagctttgccccaagaatccccttggttaaactttatgaaagggtctcgacattcaggaccccttattgatgctctggtcgcatctcctgcttcaag

SEQ ID NO: 41110 - DNA, 744 bp, Zea mays
  Peptide Sequence Number=SeqID_84485
atgagcttctttggccgcggcagcagaaaccagagaaccttcaggccgaagaagagcgcgccgtccgggaacaaggggatgcagctgaaaaggcacatcgacgccaccctcggcagcggtaacctgcgagaggcggtgcgtctgcccatcggggaggacctcaacgagtggctcgctgtcaacagtaatttagtctcagtccagtgccttttagtttcaagccgtcgacttcttcaaccaagtgaacattctctacggcaccctgatggagttctgcacgccagcgacatgcccgaccatgtcagccggaccaagaaagtatcacgttgcaaactgtctgatgaaaacgaaaccattcccccatcatatagctacgagtacagatgggctgacggagccaagatcaagaggccaatcgaggtgtctgcgcccaagtacgtggagtacctgatggactgggtggaggcccagctcgacgaagagaccatattcccccaaaagctcggggctccgttccctcccaacttccgcgacgtcgtcaagacgatcttcaagcgcctcttcagggtgtacgcgcacatataccactcgcacttccaggtgatcgtcaggctcaaggaagaggcgcatctcaacacctgcttcaagcacttcacgctcttcacactggaattccggctgatcgacagggcagagctggctcccctcaacgagttgatcgagcccataatacttggttattga

SEQ ID NO: 41111 - DNA, 531 bp, Zea mays
  Peptide Sequence Number=SeqID_84486
atggagcccgacgacgaggccgagatggacgaggacgaggacaagctggccctggcagtggccggcgggcgcgcggcgacctcatcgcgtgcgacctcgccctgcagccgcgtcaggtcgtcgtctgagtttaataacagttttggtgaaacaaattataatttgcttactgacatatgtcaacttcctgaccacttagatggccttcaaattcctaccaagattctgcagcgccggtggcggtggggtttcctgcaacatgggaggattttactccacttcgacagcgttttccacaagcgcctgcttggggtcaagcaagtttttatccaggggaaatgtcagcaactcatcagcagaccaggctttgtcggatgggccgatgggctacaggagcaacagactgaagatttgaatgctgggcttcagaggtcttcaccggatgggccgagaagaggtgaacgtgtgcgaaagccaaatgtcagggtccaaggcccaagagtggagggcgtgagcgtcgacatcttgtaa

SEQ ID NO: 41112 - DNA, 699 bp, Zea mays
  Peptide Sequence Number=SeqID_84487
atgcaggaggcgtgcaaccgcaccacggttgtacaccctttcggcttcatcgcatccgggaccgagaaaggggatatttcgaaagggatccttctccgcgaaggaagcaggccccgagccctcctactgatcaggggttcgaaggctggccccttggaagggttcgacagccgcccagagcactcgggcttcaagcccattactgatcaggggttcgaaggctggcccctcggaagggttcgacagccgcctcagagcactcgggctccgcgcccactactgatcaggggttcgaaggctggcccctcgaaagggttcgacagccgccccagagcacgcagagtgagggatgactctgggtacgtccgttacatggctgaggctcgggctacgctcccgagtcacttcaccctttcgctgaccgacctgacaggaaagcagcgccgctcgccccgctccgactgttgtgccacccaccagggtgaggctgacaacaaccaagttcagcctcgggcgcaacacgaagctccgcctcgcccgaccttaggcctatgcctcgcccgaccccagggctcggcctcgggaggaatcgcatcctcgcccgaccccggcctcaacctcaggagaagtctccgcctcgcccaaccttgggctcggaccgaccgcgccacgggggatacatcattaccctacccctag

SEQ ID NO: 41113 - DNA, 393 bp, Zea mays
  Peptide Sequence Number=SeqID_84488
atgagccgggctgaggtcctcgagggacagctggctgaggctacggagcggctagccggggtgtctgctcaggccggaacccttgcggagaacctagtcgtgagggcccaagcgcggtgctggcgtcctcctttgaagtggagatccttccgcccgagtcgtcgtccgaggctgggccaggatctgccgagggtggaaacgtcgccgagggtgctgctgctccccctgctgatgtccgaacctgcaggaacagtttgtctgaagacttgtttggtagcagagtccctcgtccgagcgaccccgctatcgaagcagtcgaaaagcgcgaaagacgttctggcaaaagacttttccgaggaaaattttgacgcagagggggttccccccttctag

SEQ ID NO: 41114 - DNA, 1581 bp, Zea mays
  Peptide Sequence Number=SeqID_84489
atgaagcccatgagctgccacgagcaggagcacccggagctcgccgccaccacgaccaacagcggcttcgactggcttgaggatcccatctccttcctcaccgcagacgtcgacatcgccggcggcggctatgggtggtggtccgatcccgcggcggcgcagcaagatggtattggcagcgtcgtggcgcagaccctttcgcccccggcgccgctgctggcgcacacctcgccgagcattgcgtcaccggtcgtgtcggagccttcgtccaagaaacgcaagtccccggcgcacagggcgtccgccagtactggcagcaaccagcgtcgccgcgccgaccaagacaggccaggtgctggtagcagcagcggcggcagcaagaggagcggctccaagggcggtggagcgggatccgaccgggacacgaggtgggcggagcagctcctgaacccgtgcgcgaccgccgtcgaggccggcaacctgtcgcgcgtgcagcacctgttctacgtgctcggcgagctcgcctccttctccggcgacgccaaccaccggctggccgcgcacgggctgcacgcgctggcccgcatgctccccgccgccgtcggcccggcggccgcggcgaccgtgcgggtgcctccctgcgagtgcccgacgccggggttcgcgggcgcggagccgcggctgttccgcgcgtcgctcatcaagttccacgaggtgagcccgtggttcgcgctccccaacgcgctcgccaacgccgccatcgcgcaggccgccgcgtcgggctcgggcgggcgcgggggctccgagccccggtcgctccacgtcgtcgacctcggcgtctcgcacggcgtgcagtggccgacgctgctggagtcgctgacccggctgcccggcgggcgcgcgccgccctccgtccgcctcaccgtcgcgggcgccccgccggcgcccttctcggcgtcgcctccggggtacgacttctcgccgcacctcctccggtacgccaagtccatcgacctgcggctcgcgatcagccgcgcggcctccctagactccgtgcacgggctcgcctcctccccgtcgggcgaggcgctcgtcgtgtgtctccagttccggctcggccacgccggcgccgacgagcggacagagattctaaggaaggtccggggtctcaacccggagctggtggtggtctcggagctcgacggcgggggcgacggcaccgcggcgggcgagttcacggcgaggctggagctgctgtggcggttcctggagtcgacgtccgcggcgttcaaggggagggatggggaggagaggcgcctgctggaggccgaggctggcacgtccgtcgcgtcggaggcggcaggggcagggagggaggcgtggcgggagcgcatggtggtggccgggttcgaggcggcggcgttcggagacgaggcggtggagtcggccaagtcgctgctgaggaagtacgacggcggctgggagatgtcggcgtcggggacggccggcgcggtggcgctgcggtggaaggggcagccggtgtcgttctgctcgctgtggcggccggcgtgcagcggctaa

SEQ ID NO: 41115 - DNA, 66 bp, Zea mays
  Peptide Sequence Number=SeqID_84490
atgtcggagatatttatgtgctacatttttactatagaggacgaagagtgtcatgacgttgcgtag

SEQ ID NO: 41116 - DNA, 1059 bp, Zea mays
  Peptide Sequence Number=SeqID_84491
atggcgcttcctgttgacgtggcgggtctgtgccctaggcagggtgacgtgggggctcctccgaagccgaggttgagtctgtcctctgttgccgaggccgagcccgagccatggggtcgggcgaggcggaagtcgttcggccgaggccagggcggagtccgagccctggggtcgggcgaggcggagtttcgtcgtcttccgggtcttagcccgagtccgagccctggggtcgggcggagcggagttcgccgtcttccgggtcttagcccgagtccgagccctggggtcgggcggagcggagttcgccgtcttccgggtcttagcccgagtccgagccctggggtcgggcggagcggagttcgccgtcttccgggtcttagcccgagtccgagccctggggtcgggcggagcggagttcgccgtcttctggtctcagtccgagtccgagccctggggtcgggcggagcggagttcgccgtcttccgggtcttagcccgagtccgagccctggggtcgggcggagcggagttcgccgtggcgcctttggcaaggcctgactgccggtcagactcactctgtcgagtggcaccgcagtcggagtggcgcaggcggcgctgtccttctgtcagcccgctttatgctgatgggggttaccagctgagaattaggcgtcttgagggtacccctaattatggtccccgacaaatgtgcatgaactcaccaaagaggtggtaccctttacccacaagtcatgttacccatctgccaagggatcgcgacttcccatacacctctaccgaggaggcgaggcaggggttcttgcctgaccgccatcgcagcaaaatcaaccaaggacctccctacactgaccactcccctactgcccttgcccctttcgggtaccaggatgatcttcaggtgacacgtgtcctcactgctaaacgtagcaatacagacaaacagtgtataggcaaaattaacatcacaccaaacaatagaattaactacgtaataatattctacgcggcgctacgagatcgtggaaacaagaatcactaa

SEQ ID NO: 41117 - DNA, 150 bp, Zea mays
  Peptide Sequence Number=SeqID_84492
atgggccaaagcgccgacaaggtgaccccacagaatagcgagagggagagaggaagagaggcgcgggtcacgccgactggcagggcccgcctgtcagagaccgagggcgcgcgggcgtgggcacgcgcgcgcggttgcttcttcttctga

SEQ ID NO: 41118 - DNA, 291 bp, Zea mays
  Peptide Sequence Number=SeqID_84493
atggaatgcgctaaaaatttaaagaacagcttttctaagggtggacgagaaatcaccgatgaaaccatcaaaagaaatgagaaggaatctcatgatgcttcaaaagaagcaaaaagagctgaaaaagttgtcgagcaagctaggcttatagctgagctctctccacctcccgaaccatacaatcctgaagctgacccatccgtcaaagaggagctggatataattaaaattgctaatgaagctattgacgaagttgtcgacaggcttctgaacgaagctgcaagtccttag

SEQ ID NO: 41119 - DNA, 462 bp, Zea mays
  Peptide Sequence Number=SeqID_84494
atgtggaagcactcgcgagttgggtcgcaaccctcgtcgtcgaggctgtggccatcatcagagcagccggagaggcagtggtcacatgcggacatgaagtcttgcatggcaccgggatcacggagtccggagaaatcccaactgacgtcggggtcgtcctcttcctcggaacccgcgggtccggaggttgagacggccgtcagtcggtcccaggttgaccacatatggtaccccggaaggtcagggtacgcccttacgaaagcgcttaccgaagcggggtcgcttggtgggtcgaagctgaacctaaagggaacaggatggaaaactgaaggtacctcttggttggtgggcggcggcgaagttgcatcggaggtggaatgtgtcgttatctcaggtgcgagactaatgcccgacaagtccctcgcaagggtactgttggggacttgttctcaaatgctatga

SEQ ID NO: 41120 - DNA, 1086 bp, Zea mays
  Peptide Sequence Number=SeqID_84495
atgaacgcgctctctcgcgaagggtgccggcactatgaagtcttcgaccaagctgatgaagatttcgagcgtgatatctacaaggtcgaggactctgtagtgaaggagtccgccggagccctctacgaccggatgtggggcccccatggtcgagaggtggtcagggaacgggccgagacggcgagggcgcgctgcctgacccggagtcgaacccggcggaggccgtgtccgaggccgccctggagccgcccctggagactgcccgaaggcgctcctgatgcccccgcagtcgctgcgaccggcggaggcccgcccccagagaccgccggaggcgctcctgatgcccacgcagccgctgcgccgagggctgaagatcctgcgacggtggcggcggaggcgacagcggaggcaacagcggaggcgacggctgggtcttcgcaggttcaagattttgggcctgcgcacgcaaccgccactagtaattttttggcggcttcgaccgtggatggtggtaataaatatgatgggtctgcatctgagttttctgattttgctgactctgggagctcggttgaatggactgaggagtcgtcggaggaggacttggactattttgcggccttggatgtggcagcggcggaggcttcaccgcgcgctgcggacacagaagatgtgcctggtccgagtactgggcgcaggcggcgaagggcggttgcgaagcgtagagtgagtggggcggacggcggtcgacttcgtgtgagtaggcccgggccgacaggaactgttgtccttgtcggccgccgtgagtacggtccggctgcacccttaggcgacttctgcgcggtgagtcttcgtgttagacttcgatttttcgcacttattgtgctaatccggctgcaccctttaggcgacttctgcacggtcttcgccgcttggcgttgtgagcctgtaagcgctgggggaagctttcgtcttgactatgaaggggccctcccacctgggctccagcttgcccctggactctgtccgagctgttcagacgagtacgagggcaaagactcggtctccatcgatgagatcctttga

SEQ ID NO: 41121 - DNA, 510 bp, Zea mays
  Peptide Sequence Number=SeqID_84496
atggacctcttcgtacctttcgcctccattttcctcttccgggtcaccgaaactataaccttcccctttgaggtgtcttcgtctgaccgggtcttcactctcttccctcggtcatccccagcatcagcagaacccccttccggctccactatcgttgctggatcactgactaactggggtgaggagctctacaacatgctaccatgtattgcaatcgcttctccccacaggaggtattatgtgggtgctttggaagagaagaaacaacaaggtgttcgagaacaaactggtgaaagaccccccatgtggtggtcagtggtcttgagggccaaaggtctattgcaagtggaaagtggcgccaaaggagtcagtggtggaacaagagcaaatgtggcaaatgatcgacgaggagctaatgaagcagtgagacccacactggagttcttgtgtggatggctgtttgtctcaatgcagagaagttcagggtgttcgcagttttgctggagttag

SEQ ID NO: 41122 - DNA, 321 bp, Zea mays
  Peptide Sequence Number=SeqID_84497
atggaaaaggaccatcaggagtccctgcggaagaaatggaaggcctcgcttcggctggtggaccctcaacacgacgcggagcgggcggcggccgcctcctcggctcctcccccgcggccgagctcgctcctcgccccgccgcctcaactcgtctcgcccgcgaccgatttcctccctccgctcgccgcgccgcaacccggagataaggccgcgctcgatcgagaaccacctggggtccagcgtcatcgcgaccagctccggcgaggcgtccgccctttgcagcccggtgtctctgcgaccggcacacagctccagaggtag

SEQ ID NO: 41123 - DNA, 210 bp, Zea mays
  Peptide Sequence Number=SeqID_84498
atgccctcaggtgggagcctctggcactgggtctgggtctgctcctttttagtggcactttttagtttgaaccgtattcctgttagttggtctactttctggtattatgtgggtgctttggaagagaagaaacaacaaggtgttcgagaacaaactgaaaagttcagggtgttcgcagttttgctggagttagcttttgagtttcgttga

SEQ ID NO: 41124 - DNA, 390 bp, Zea mays
  Peptide Sequence Number=SeqID_84499
atggagacggactcactcaaacatcgagctccactccgcaacactagactcctcaggaggcctaggacccgttccctctctcgcgaagcttgtaacccctactgcaagcaccccggctcggggacgccgcaggggcgcaggctcgccgcgcgtagcttggccgctcggggcgcgggggcacaggccgcgcaggcgcagctcggccgctcggggcagcgccgcagcgggctgaagactgggggcggtcctgcgctcctggcggaggcgaacagcggactagcggctgggcggggctggggtctggccacctgggagcctgggagtggcggctgggggcgtgccggcgtggggcgctgggtgggagcctgggtcctggcctcctgggagtga

SEQ ID NO: 41125 - DNA, 1011 bp, Zea mays
  Peptide Sequence Number=SeqID_84500
atgggggctgggacccacacgtcatacgagctgatccgaagcacgaagaagaaaccggtggtcgaaagggtggactgcatgcgacaagcatccaactgcatcgcaactgtgcgccccttcggctccgtccacatccggtggaccagcgcaaaggaagcgggcccgcatgtcatgctggccctcggaagagtttcgacagccgccctagagcactcggacttcaagcccattactgatcaggggttcgaaggctggcccctcggaagggctggcccctcggaagggttcgacagtcgccccagagcacgtagagtgagggatgactctgggtacattcgatacatagccgaggctcaggctacgctcccgaggtaccctaggacatttccgagacaggcgggaacgatttgtattggaatcccactggagggaggcatcgagccctcggaccctgtcgaaggggtctgggtccggcgaatcacccgcaggtacttttggagcgcgcctctaggccaccagccgacccctaacgaatggggcacgggcgtccactcggatcacccgttagcagctcaccggaaacaccatgttcggcgccctccgagggcaacatggcgcttcccccctcctccttgcggaaaggcgacgcaggggcgtataataaaagtcgggaaagaaaatagcaccgctcgctccgctccgactgccgtgttagccaccccggcaacgactaacaacaagtcacgatcaaccaccgagttcagcctcgggcgcaacaggaagctccgcctcgcccgacctcaggctctggcctcgggaggaggtctccgcctcgcccgacccccggactcggcctcgaccccggtctcgggaggaatcgtgtcctcgcccgaccccggcctcggcctcaagagaagtctccgcctcgaccgaccctgggctcggactgaccacgctaataggggatgcatcatttccctattcctagcctgctcaggctacaaggaataa

SEQ ID NO: 41126 - DNA, 513 bp, Zea mays
  Peptide Sequence Number=SeqID_84501
atgacctcagagccgacgctgctgtggcgacgccctcgcccacgtctctgctcgaggggcgaggacaagccattaaagccaaagagccgagggtccggctcagctggcgccgatggtctcgtcggtggagaaaccttctccggctgccaccacctcagcaccgacgacaacggccgcctgcgtgccgacgccacgccaacgaatggtggacgtcccagcctgcaccggcagatccccactcaggtcctcgtggacgggcaggccccgaactccgcgcggaggcgtcgtgccggagtgaggacaagacaatccaagaacatgaacgccacccatgcggcgtatggcgtcttggacggtccaccgccgagctgcacgacgaaaatccttgaagccgagcgatggttgaaaggtgccgatctccacgaggccgcgctcctccaacgacagcaagagcaaggcgacgctggagcaccccattcgggggctcaaaaggcggaagggcgcgatgcatga

SEQ ID NO: 41127 - DNA, 693 bp, Zea mays
  Peptide Sequence Number=SeqID_84502
atggggtcgggcgaggcggaagtcgttcggccgaggccagggcggagtccgagccctgaggcggaagtcgttcggccgaggccagggcggagtccgagccctggggtcgggcgaggcggaagtcgttcggccgaggccagggcggagtccgagccctggggtcgggcgaagcggaagtcgttcggccgaggccagggcggagtccgagccctggggtcgggcgaggcggagcttcgtcgtctttcggcccgagtccgagccctggggtcgggcggagcggagttcgccgtcttccgggtcttagcccgagtccgagccctggggtcgggcggagcggagttcgccgtcttccgggtcttagcccgagtccgagccctggggtcgggcggagcggagttcgccgtcttccgggtctttgcccgagtccgagccctggggtcgggcggagcggagttcgccgtcttccgggtcttagcccgagtccgagccctggggtcgggcggagcggagttcgccgtcttccgggtcttagcccgagtccgagccctggggtcgggcggagcggagttcgccgtggcgcctttggcaaggcctgactgcctgtcagactcactctgtcgagtggcactgcagtcggagtggcgcaggcggcgttgtccttctgtcagactggccagtggagcggtggagtga

SEQ ID NO: 41128 - DNA, 675 bp, Zea mays
  Peptide Sequence Number=SeqID_84503
atggccaccggcgacctgcgcagcctcgccaccgtcgcggccgcggtgatcgcgtgcatgggctacgcccgcttcgccgcgcggcgactccgcccggtcctgtcccgccttgcagcgttcctcccggtgctcgccgtcttgcctttcctcccgctcgccttccgtgcgctccacccgcgcggcatctccggcttcttcctcgcctgggccgccgaattcaaactcctgctcctcgcatgcggccagcgcccgctcgatccgagcctcccgctgccctccttcaccgccatcgccaccttccccgtcacactacgggatcccaagagctccgcctcgaggccgggcctggggctcgtggagtccgcctccatggccgcgctgctcgcggccatcgtgtcgctgtaccggtacgaggagcggatgaacggttacgtcctgctcacgctctactccgtgcacgtgtacctcgcgctcgagctcgtcctggcggcggccgcggcggcgtcgcgcgcgctgatgggcctggaactggagccccagttcgaccggccctacctctcgtcctcgctgcgggacttctggggccggagtggaacctctccgttccggcgctgctccgccagtgcgtgttccgccccgtgcgcgcgcgcctcggcgccgccgcgggtgtgctag

SEQ ID NO: 41129 - DNA, 234 bp, Zea mays
  Peptide Sequence Number=SeqID_84504
atggcctcgcactccgcgatggcctgcttgtccgcgccgggccttgtgagcggaggaaagaagagccagaaggccgtcacgcccacgaacgccagtgtcagcggcgtggccatggcgcgcggcggccgcggccacccctcgtgcgcggcccaccacccctccgccaccgcgcacgccccgtgcagcgtgaagaacgcggccgcctcccccgtcggccgcagcagcgtgaggtag

SEQ ID NO: 41130 - DNA, 309 bp, Zea mays
  Peptide Sequence Number=SeqID_84505
atgcgtggcgccttccttcatcgccagcgcgcacgggctccgacaccgtcgacaacgcgcggcctcggcattgcctcaaatcgctcgcccatcaccgaggatggtggtccttcctaccttccctgctatcctcacccacatgccctcgtccgcgacgccacagcagctcgtcctcctctcaagcgtcgaaggaaggcggtgttcatgtctcatccagttcaaatgaagtggcaggaaccattccagatacgaatggaggcgatcatcatatacctggaagctcttttcatgtttagtgaaggtctatga

SEQ ID NO: 41131 - DNA, 507 bp, Zea mays
  Peptide Sequence Number=SeqID_84506
atggtaaaagctctaagaaagtcgatggttcattggttccaggagccaactacatttgactgtgttgcttgctactgttatgttatcatattgcctgaaaagacaagatatctgaatgctagcaatcgggagcttggtgatcattttcagacaaaacgtgatggtaaaaatggtgttgatgcatcaattgaaaagagaacactcaagctacttcagtttacctttcaagagttgaaatccgccacgcttaacttcaggccagacaatattcttggggagggtgggttcgattatgtattcaaggggtggactgagccaaacagcactgctcctgcaaaacctggcacgggggttactgtggcagtcaaaagtttgaagccagatgcacttcaaggtcatagagaatgggtgttgcatcataaacaccttgttaagatgattgaatattgtattgaggatgatcagaggttacttgtatatgaatttcatggcacggggaagtcttga

SEQ ID NO: 41132 - DNA, 330 bp, Zea mays
  Peptide Sequence Number=SeqID_84507
atggagagagggcgaggatgcacgtcggtatttatacacagcggggagggtccgagtggtcgcaacgaccccgagattccctcaagccctgcgattccggcgccggagtccgcgcgttttgttcacagcggtgaatccgacccgaggagggagacgactgacgaagtgggcccattcgtcagttggcgacgtgagtacgagtgtgcacggggaggcgctggccaatgggccccaggtgtcggcgccgcggctaggatatgggctgcgcgcgagtacaccagaaagtgggccaaaatggtcaagttgttgggtatggccgagttgatctag

SEQ ID NO: 41133 - DNA, 240 bp, Zea mays
  Peptide Sequence Number=SeqID_84508
atgaccgccttggaagaatttggggatgaggagcccacgtcgcaacgttccacagtgcccctacccccacgcgatgtccgcgggcgtcgcgctcgggcaccacaagatgattttttcgccaccgtcatcgatgagcactttgacgaggaagagggctctgagccggaggaggaagctaaggcgtcatgcccatactcatcacgacgaagccgcctaccgcatagcgacgacccatgctag

SEQ ID NO: 41134 - DNA, 342 bp, Zea mays
  Peptide Sequence Number=SeqID_84509
atgcatgtatcttactcattgcattcattagattgcaatctcgctgacggagagtacgtgctcatacccgagcaaggacctgtccacgaggaagaccaggagcaagctcccgagactgccatcgaggatctccccgcagtcccagctattgaaggcaagccccgctatggtgggtacaagtgcggtcactgcacggcggtagctggggtcagtggagcattgtatgccaaggcggtttaccttgcaaggtttaaaaactcgattcgaatcgtctgcttctcgcagctaatgagactgcttgaccccttgtactacattgagtacgcttcaggatatggttga

SEQ ID NO: 41135 - DNA, 159 bp, Zea mays
  Peptide Sequence Number=SeqID_84510
atggcgagagtagcgtgtaccctccgtggcaagaggctggacggtggatccacttttagtaagcatttctgcaaaacagagtctttgatcattgagaaaccttaccttgactcccttataaccagcatacccttgagagtcttttctttagtcgggtaa

SEQ ID NO: 41136 - DNA, 252 bp, Zea mays
  Peptide Sequence Number=SeqID_84511
atggttaaaaattttggcagcaaaacagtacaaatagcaatgaatgctgtggtaacttcacacctactcgtctgtttatatagtgctgcagaaaacgaggaagaagttgaagtagaagagaagacttcaccaccaccacctgcggaacatcaggcaggaaattggttttactttgacatctgcggatccgagtctgactcacctataaacgaaggcaagcaccggtgcatttgccaacaccttgtgttctaa

SEQ ID NO: 41137 - DNA, 216 bp, Zea mays
  Peptide Sequence Number=SeqID_84512
atggcgtcccagccacgacggtgcagcagaaccccgagaactgacgcacgcgcgctcttttgccccgataacacgagaggaattttatatatcaataatgatagatttgttatagctgaaggaggaaagatcgattggctcaagagcatgatgatacgaaataaaatcaggctaagggagtatttggatggctacaagctccagtgtgagctatag

SEQ ID NO: 41138 - DNA, 489 bp, Zea mays
  Peptide Sequence Number=SeqID_84513
atgaagtttgttcatcatgcaagtatgtccaaagcaggacatcaaaaggcacttgatacattagacgacctggtccgagttttgtcaagaatagaacctgatattggtgtgatgacagtgacgacggagggggatgtatttactgggggtatgggatcaggcagtcaaactgaacaagctgatcaaaatattaagtctgtgttgcaggtggttggtgatgaaaacgtgggtgataaagctgggtgtgagcctggtgcatcaaatgctttagtaagagttgaacatgatggcgttcgcaaaagtaaaatgctgggaggtgaaccccttttgcgtggaggaattggaatagaagattggggtggttgcgaaacagacaaacaatctaggaagaagctagattttaacattggaggagtgagtatggataaaccaataaatgagaaaccaaaaggaagaatgataagaagtgatgagttgaatgaagattga

SEQ ID NO: 41139 - DNA, 528 bp, Zea mays
  Peptide Sequence Number=SeqID_84514
atggacaacatgtctgaagacatctctatcaaaatcgatcaaactcatctacctccgccacccgactcacctataaaacccaaggaatacccaatgaaacccgatggtgacctagtatcgaccatcaataagatagttgatctgcttggccaagacaaatttcaagagacatacaaagatggtagcccacaatttgatgcaactccaaaatcaatgttgtcatgtctcatggcaagggtttcaaccacgaaagtctcggtagaagtctcaccaaaggaccacccggtttttgacaagacacctatcaacgagggtttgaatgactgcgttcggacagagcatgcctcgtacagtcctgatcctatcacggacattgtaattcttgatgtcaacgttggggacctatcccttgagaaccgtgctactcttctacactatctgacattccacagtctgaacaagatcaaaccatttccaactgatattctgaggttcagatatgaacgccataatgaagcatctgtgtag

SEQ ID NO: 41140 - DNA, 678 bp, Zea mays
  Peptide Sequence Number=SeqID_84515
atgagggttgagaacttgcctacaccagtagaggctaccgcctctcaatctgaatccggcgtcgtgaatccatctgaggatatcgatgatatttacattgaggaagacaacactacgattcatcctatgaagccaagtcacgtgaacttcgacaaatcaaaaatcaaaggaggacacattgagggagccggttatacgacgcctccccagtatgcggtgcatttgttcgaggagcacggggtaccccgctgtagggtgaggatgaccttggagcctcatcccttgcagtcgggctggcgttcgttggactccgagtctttcggattcagggctgaagatactattgagtccattgctctccatggactgacgaccttttgtggctttcaccccttggagctgtccactcataccattggcttgttccccgctgaaaaggaggacgacccaatgtgtaaggaccgagtggagcatgctaaggatgtgtgggctctttacccggggcatactgctcacctgacggtgcggtgcatgaatgccctgtatcgtctgcaagcagtgcgagcggaggcaatgtcccaactgatgggcttggtggagtctaccaagatcaccctggataatagggaggaccttgtggtagacctgtccactgagctggtggaaaaggacctctag

SEQ ID NO: 41141 - DNA, 342 bp, Zea mays
  Peptide Sequence Number=SeqID_84516
atgaagggttgggtgaggtccgggagtctctggcgatcacgtcgaggtgcggatcgccggcgatggtggtcggaggaggtcgatccacgtgcgcaggcgggggagctcgtcagcggcgaggagtccggcctaaccagggacgatagatcaattaaatgggtctgggagcttcacctgaggtcatggaagatgccactggcgaagctaaccgagaggccggcgcaacttggacacggttggagcaagctggccgcggtggccgaggcttgggcagtgatggcgggcggtggcatggcgtgctcgaggcgaagtccggtgaactatggcttaggcaaggcttga

SEQ ID NO: 41142 - DNA, 1941 bp, Zea mays
  Peptide Sequence Number=SeqID_84517
atggcatcctctgcacacgccttgctgctaacattgctcattgccaccgccgtcctctctacagcacctgcgctctgctacgtcagtccgggctcaaacctccaccatgacaagcattctgcaccagggtatcggacccatatcgtgctcgtccggccaccgtcggatgcagaagccgccgacgaatccgcccacaggctgtggcacgagtccttcctgcccagctccctgaccgactccgtcgagccgcgcctcgtccactcctacactgaagcgttcagcggcttcgcggcaaggctgacggacgccgagctcgacgcggtgaccaagaagccggggttcgtgcgcgcgttcccggaccgcacgctgcagcccatgaccacgcacacgccggagttcctcggcctgcggcagggctccgggttttggagagacgttgccgggtacgggaagggcgtcatcgtcgggctgctcgacgtcggcatctacggagcgcacccatctttctctgaccacggcgtcgcgccgcccccggcgaagtggaagggctcgtgcgcgggctctgcctcccggtgcaacaacaagctcgtcggcgtcaggtcccttgtcggggacgacgccagggacgactttgggcacgggacgcacacctcgtccacggccgcggggaacttcgtggccggtgcctcgagaaatggcttggccgccggcaccgccgccgggatcgctcccggcgcgcacgtcgccatgtacaaggtgtgcactggcgccgggtgcaccgactcggccgtgctggccggaatggacgccgcgatcagggatggggtggacgtgatctccatctccattggtggcaacgcgacgctcccgttcgatcatgaccccgtcgccatcggcgccttcagcgcggtggccaagggcatcacggtggtgtgcgcggccggcaataacggccccaagctagcgtccgtcgtcaacgacgctccgtggctggtcactgtcgctgccagctcggttgacaggagcttcgtggcggaggtggagctgggcaacggcgtcaccgtcgccggcgaggcgattaaccaggtgaccaacgcgagcgtgaagccttcgtgtcatcctattcctatcctttactccgaggagcggcgcaactgcacctaccatggcgaggacgaacacagagtggccggcaagatcgtggtctgcgaggccgtcgacaaccttctcccctacaacacgtccgagaagtccatcctccgtgacatcaaggacgctggcgcggccggcgttgtggtgatcaacaccaaggccgacggctacaccaccgtcctctacgactacggctccgacgtggtccaggtgaccgccgccgccggggccaaaatcaccaagtacgtgacgtcgtcgtcgagcgccgcgtccgcggtcaggttcagccacaggacgttgctcggcgtccgtccatctcccaccgtggcctcgttctcgtcccgtggcccgagcaccgtcacccccggcgtgctcaagccggacgtccttgctccggggctcaacatcctcgcagcgtacccgccaaagaccccgctcggcaccggtcctttcgacgtcatgtctggcacgtccatgtcgacgccgcacgtaagcggcgtcgccgcgctcatcaagagcgtccaccccaactggtcgccggcggccatcaagtcggcaatgatgacgacgtccgacaacgtcgacaggagcggcggccccggtcttggacgagcagcgcagggaaggccaacgcgtacgccaccggcgcccggcccatgtgaacccccgcgagggccaccgacccccggcctggtgtacgacctcggcgccgcggagtacgcccagctacatctgcgcgctcctggggcgacgccgcgctggccgtcgtcgctcgcaactcgagcctga

SEQ ID NO: 41143 - DNA, 573 bp, Zea mays
  Peptide Sequence Number=SeqID_84518
atgtccctggcggtgcgcgtctcgcccgggacgctggtgttcaccaaggccggggagaagaagacgttcagcgtgacgcttcacgggaatacagatgtcctgcacggaacctctccatgcgcggtgatcgacctgagtgctccgccgcgccgccactacgccggctgcactctgctatcgcgcgctctcggccacgcgcatacactaacagaagggtctccatggctggctcgggagctccaccttgagtcctggagggtgtccgaggtctcgcccagcgtgtatggtgcgcggggcaactggcgatttctcgccggagttggggatccgcaccgcgtcgtggccggttgtccctgctttgccgtcgtcggtaagtttctcctctgtgtgatcaccatcatcccctccctgcgttgcaccggttggataggaaaactacgctctggtgcatttgggtgcggctccgacgaacccgccaccaccgtcgctcgggcgccgccgccttgggcgctcggtgtagaagacagggcttcggccgttgatcccctggtggatggctctggtaggctctag

SEQ ID NO: 41144 - DNA, 222 bp, Zea mays
  Peptide Sequence Number=SeqID_84519
atgggtttgttaatgggttcaaataaaaacccagcggtgggtatgggaaacccgttgggtacccgaaacccgcatgggtatgggtttgggcaaaattttatacccgtcatgggtatgagttttttagcgggcgtattttttcttcgcgggtatgggtttgggcagataatactgaaaggaaaatgtgcccttgggccatttctaagtattttggtgatttag

SEQ ID NO: 41145 - DNA, 1038 bp, Zea mays
  Peptide Sequence Number=SeqID_84520
atggcgtacatgacagctgtcgcgcccgtcccctggtggccgcctcccccggagctggcgcatgcgggcctcctcgtcgcgtcctctcccgccggctatccagagccccaaaccctacccttcttgttcgcgccgctccctccgccgccgcctgcggggtgcccacttcttcctcccccagccccgatcgtcatacagctccagccccaccccagcttgctcgcggaggtggatcatcgccgcagcagttctctcgtgcagttcttgaaggatgagggggccgttttgtcgccggaggatgaaaataagagggagaaggtgatccgagagctcaagaagatagtgatgcattgggccaacgcggtggcttatgagcagagtgtgccccaggggctggccacagctaccgtcctgacatacggttcttacacattaggggctcatggacctgaatctgacattgatttactttgtcttggaccttgtattgcaacactgcagtaccatttctttgttgttttgagacaaattcttcagggcagaccagaagtatcagaagtacacactgttgagaaggctaaggatccattgaggcatgatttccagtggagctggctttttgaacccttcccatatgatcagaaatatcagcagtttctccgcattgctttacgtgcgccaactattgctgaactaggagactgggctggatgggtgaaatctcgattccgtttcctgattctgaagctggaaagggctgggattgagtgtgatccatgcccctcggaggaagttgatcatacagacaatgaccccaacgtggtcttctactggggccttatccctaaagaatcattcagctgcctaagagcatgtgcagccgggtctatccaccggcagtacatgcagcactgtatgatgggctacgagggcacagatgaaggccagatcgagcgcagggattcaaggtactggaccgggtattcttttgagctgggaggagtgcttgtgtgcgcaagaatatgggaggactactga

SEQ ID NO: 41146 - DNA, 543 bp, Zea mays
  Peptide Sequence Number=SeqID_84521
atgtcggaagctcgtattcaagtttcttggtccatacaaagtgctagagcgtattggagctgtggtccattgcttggagttgccaccttcggctcatggctcgggctcaacctcgacgctggacgacggactccgcctcgcccgaccccagggctcgggctcgacctcgacgctggacgacggactccgcctcgcccgacccagggctcggactcagcctcggcctcggaagacggtctccacctcgcccgattcagggctcggactcaacctcgacctcggaagatggactccgcctcatccgaccccagggctcggacacagcctcggcctcggaagacggtctccgcctcgcccgacctagggctcggactcaacctcgacctcggaagacggactccgcctcgcccgaccccaggggtcggactcagcctcgacctcggaagacggactcgacctcatcctcggaggagcctccgcctcgcccgacctagggctcggaccgaccacgtcacaggggggccatcattaccctacccctag

SEQ ID NO: 41147 - DNA, 159 bp, Zea mays
  Peptide Sequence Number=SeqID_84522
atgggcgggacgacgatgctgaccgacgggcccgggttgccagagggagagcggtgcgagagggagagagtggagtcgctgaccggtggggccgcgttgctttgcctccgcaaggtgcaagaatctgagctgttgacgaaggaacttattagtgcgtaa

SEQ ID NO: 41148 - DNA, 1650 bp, Zea mays
  Peptide Sequence Number=SeqID_84523
atgccgcgcgccccacgccggcagtccgacgaggcgcgccgtggcgcctacaagccgcgcgtcgacttcagccgctcgcgccgccgccgcgaggacggcctcctcgccctccgccgcctcaaccgcgacacgggactcttcaagcgccgccgcgacgagcccgctcccgccgtccctgcctccgatctgactcctacacgcgccgaagcagccccattcgcaggaatcacccgtccggcattcactccctcctcaccgcccgacgtagcggctccccgggatgctgctgagtcagagcttgaaggcctgtcagagctggtcgacaaactatgttcagatgacaccaccagtcagctcgaagccacaatccagttcaggaaacttctttcagatgagaagaactcaactgtgataaaaatcatccgagcggatgtcctgcccagatttgccgagtttctttcaagacatgggcttccccagctccaaatggaggcagcctgggttcttaccaacatagctgcatctgattatacactgctggttgcagaatgcggtgctgttccaaggttggtggaactattaggatcactaaatgcaaacatcaggcatcaggctatctggtgtcttgggaatatagctgcagacttacctagctgcagaggcattctcttcgatcatggtgctcttacacctttactttctcaatttagagaaggcatgaagattccagttctgagaactgctatgtgggcactgtcaaatctttgttttggaaaattgccagccgaagtgcaagtgaaaccaatactagaaattatcagccagcttattcactctgctgacgagaagatactggcagatgcatgctggactgtttactacatatgtggcgataaaggtgatgctgtccaagatgtattagatgctggggtctgccctcaacttgtaaatcttttgatgcatgcatcagctaatgttcttctccctgtcattatggcactcgcaagaatttctgcgggagatgataagcaagttgaggctgtaatcgatgcagacattataacctctctcattgtcttgctaagaacgtcagagccggatgttaaaaaggaggctgcttgggctatatcaactgctgcgtccggtggttcaagtgatcaaattcagtatttggtcagccggggatgtttagagcccctctgcagcgtcctcacccacaacgatcctgaccttgtatacacgtgtcttgaaggtcttgagaacatactccacgcaggtgaggcggggaagaagggcgaggaatcagggacgaacccatacgccgagtttattctagagtgcggaggtctggagaaactggaggatctgcaggacgtggacagcgacaggatctacgagctagccatgaagctgctacagagctactgggaggaggaagtaagcgagagtgatgatccgaacatcccaggttcgaatgactcgtcagatactgtggaagcaacgtccgaagatgctgctgctgctgtgcagccaccaccagtgacggtacgtcgaagatccgtcgccatcgccgggacagaagcagctgcagtgaatgcgtgtgagtgtcatgcatcatcagcacctctgatggagacggggtatggctga

SEQ ID NO: 41149 - DNA, 738 bp, Zea mays
  Peptide Sequence Number=SeqID_84524
atgtccggtgcgccaacggctctctggctgccaacggtcgactgtgccatttatggaaagaaatcgggcaccggacatgtccggttcaacagccgcctcagagcactcgagctccgcgcccactactggtcagaggttcgaaggctggcccctcggaagggttcaacggccgcctcaggccactcgggctccgcgcccactactgatcaggggaacgattttgtaacggaatcccaccaaagggaggcatcgagccctcggaccctgtcaaaaggggaccaggtccggcgaatcacccgcagcctcgggcgccataggaagctccacctcgcccgaccccagggctcgagctcaacctcgacgctggacgacggactctgcctcgcccgaccccagggctcgggctcgacctcgacgctggacgatggactccgcctcgccgacccagagctcggactcagcctcggcctcggaagacggtctccgcctcgcccgacccagggctcggactcaacctcgacctcggaagacggactccgcctcgcccgaccccagggctcggacacagcctcggcctcggaagacggtctccgcctcgcccgacccagggctcggactcaacctcgacctcggaagacggactccgcctcgcccgaccccaggggtcggactcagcctcgacctcggaagacggactcgacctcgacctcggaggagcctctgcctcgcccgacctag

SEQ ID NO: 41150 - DNA, 906 bp, Zea mays
  Peptide Sequence Number=SeqID_84525
atgtcttcgcactccatgcatcgcgtccttccaccttccgagcccccggatggggagcactcgcgttgctttcgtcttgctatcgttggaggaacgcaacttcgcggaagttggtacctttcagccatcgcttggcttcaaggattttcatcaggcagcccggctgcatcccctcgccggtggtcacccaagacggtgaccaccagtttgatggtggggagaagcaagccgggctacgacctctgccccgctctcagcttcaaggatcttcatcatcctggctggggcggaggccggactgagccggagctttacctcccgcgcggcgcgttgggcttgctggctcagctggctctagctcggctcccggtgccccctcccgccgcgagagcggttgtcgcgccgcgctcaccggaggaccacccaagacgtcgcgcgctgctagggcagcgttcgtgttctttagctgtcctgcctttgcttcggtacggcgcctctgcgtggaggtcggtgctcgcccgtccgagaggatccgagtggggatctgccggtgggcagatggcttccgtcgtcggcgctgaggtggtggcggctgaagaagtcctcgtcgccgacgggatcaccgccaccatccgcgctccgggcttccggctctttggctttgatagcttgtcctcgcccctcgagtggggacgtgggaaccctcggccgctctgtggtgagccggggccgaaggcagcggtgtcagcatggagagaggcagagttggctcgaaaagaagacttcgtcagccggagcctggtcaggccgtccactggcgggaccagcgccggagtcgagttgcggaggccacgagccgggctggtgtcctcggaggacagctggctgaggcttcggggcggctga

SEQ ID NO: 41151 - DNA, 492 bp, Zea mays
  Peptide Sequence Number=SeqID_84526
atggagtcacggggctacgacggtggagcagggacacgacgtacgacggtgggggagctccggctgcgcgagaatcactcaggtgaacgcgggtcggctgaaccagggagggaaggggcacaccgaaggatgtcccgagcaactaacagtgaggcggagctcaccgtggcactggacggggcacgaatgcgacagtggccgcagaataggcggtggtcggcggcgggcggtggcggtgctctctacacgcgtgggcagagcaagagagagggcgagcgagtctggctgagggcgcaaatgggcgaggggaggtgggcgagtagggcgcggggctcaaaaggggcgcgggggctcggacgtggccggacaacgcgcggtcgtgggcgcgtccatggcgggagatcgtgggcgagagggtttttaattcaaattcaattcaagtttcaaattcaaaccaaatcaaatatgtgcaacaattcaaagaatatttag

SEQ ID NO: 41152 - DNA, 669 bp, Zea mays
  Peptide Sequence Number=SeqID_84527
atggtggtggcgcagggacgcgacggacgacggtggcggagctccggctgcgcgagaatcactccagtgaacgcgggccggctgaaccagggagggaaagggcacactgaacggtgttccaagaagctgacggtgaggtggaggtcaccgtggcactggacggggcgcaaatgcaacagtggccgcagaacaggcaaagtttttttgttggctcccattcaccccatatggttgcctgattcgatcattcaattggtgttggagtgggttaatgatcatttcaccttaactggttctttattcaagaaggtgacaaagggacatggtgttagcaaaccaccattctttgaagagactaatcacccgtactggaagatccaatcgcatgaatcagcggcgtggcaggccaaggatggctgcttcaactatggagactctggccacttcaatgacaattgtgccaagatgatgggcaaggcagaggccagtaagcttgaccatcactccagttggccaagggcaagcgcgagtacacctccggcaagcacaagtcgaagcggaggttcaacaaggaggtacttacataaggacaagatcaaggaacatgcctccctcagtgacctcgaccacaactccgatgacacctctgcttcttcaagcgacgactag

SEQ ID NO: 41153 - DNA, 378 bp, Zea mays
  Peptide Sequence Number=SeqID_84528
atgacacttggcgatgacgtggtgggcagtgacgacaatgacatcggcgatgactccaccttcaagttatcactttctatcgatgatcttgtcactgaggtagacgagctgacggttgctttggctagtcaggataagcttcttacactaccggaatccgtgcctttgccgagtgccgaaggctttgccgagtgttttttatcgggcactcggcaaagcagaatttgccgagtaccgccctcggcaaagttctgcgctcggttactcgaaacttggaaaaccgtgcatgcaaaaatgatattcatgctacttagcacaagttacgaccgatttcaggagcggaccggaaacttcgagcaccatgctcactcaacatga

SEQ ID NO: 41154 - DNA, 291 bp, Zea mays
  Peptide Sequence Number=SeqID_84529
atggaagagctcaatgttcagggtgatttgacttacacggagtatcccgtcgagattcttgatactttgactcgagttacaagaaataaggtgataaagaagcgcgcagcccagcaatcaggtgccgacaccctgaccccacggggcagtcacctttgctcccgcgcgcacgcacccgacaagcggggcctgctgggggtcagattcgtcttcaacaacatcgcggggatcttgttggggcctgcggtgccacgattgctctgtgcctggcgcaaatccgagccatcctag

SEQ ID NO: 41155 - DNA, 639 bp, Zea mays
  Peptide Sequence Number=SeqID_84530
atgggcaagggtaacaagcgcaagcgcgagccgactcctccgtcggaggatttcggtgactcggaatactcggaggaggagttctcctccgagtccgagggatctccggctcccgtctctcccccggcgtcgtctgatgattcagacgactcccaggggattgtcgcggaggtctggacgtatatccgggccgtcgagcgctccgggctcgagggctcggatgagtctgagttctcctcggacgaggaggactcgaacggcggcgaggacgaagatgacgacgacgacgacggcgacgacgacgacggtagcgacggcgacggtgacggcagcaacggcagcggggcagcggcggcaagagcagcactagaggcggcagcagtacgggcagcaccaaaggcggcagcagcaagggcagcaccaggggcggcggcggcaagggcagcagcagcaaggccagtggctaaacaccactggtctttagatattagtataataagcaacgccgagcgattgaaggttgacatcagcgttttagaagtaacactgagcaatcgaacacgaggccagcgttttagaggcgacgccgagtcagtgaaggtcgacatcggcattttagaagcgacgccgagcgattga

SEQ ID NO: 41156 - DNA, 378 bp, Zea mays
  Peptide Sequence Number=SeqID_84531
atgggcaagaacaacaaacgcaagcgtgagccaactcctccatcggaggagtttggtgacttggagtactcagaggaggagttctcctctgagtctgaggggtcttcggctcccgtccccctgcgtgagttgtctgacgactcagacgactcccaggggctcgcggcggagggctcggatgaggaggactcggacggcggcggcgaggacgaggacgacgacgacgacggtgacggtgacggtgacggcagcggcagggggggcggcgacggcagcaaggacggtgatggcagctgcgggggcagcaaccggggcggcagcagcaggggcagcaccagaggcggcagcggcagcggcagcaacagggccagtggctag

SEQ ID NO: 41157 - DNA, 2313 bp, Zea mays
  Peptide Sequence Number=SeqID_84532
atgccgtcctcttcttcttctgctgtcgctacgccgccggccgattcctcgccgccggccgccgcctcgtctgaggagacgctgagtagtttgatggcggaggagttgcgcgtcggcgattctgttgactttggcgtgtcgcagatgacgtcagcccgctttcaagatatgcagcggttgggttactttggcggcggagttgctcgtgctccggggacggaggaagtccccgagccggaggaggatggggtggtgcggctcgtgggacgttacgtgccgaggacggaaggccagcgcagctttgatatccgtgggtcaaatgaccgtttgaacagggttttcgaattaaatcaattgtcgtacgacggctatcctggtcaagacgacgtggaccgccgtggaaagaagccggtggtggagactggagacgaccctgcgccggcggccgccccttcctccaaaaagagaaaattaggtacttctatgggaggacttggggtgtctgatagttttgctagagagttgatgaggacgtgcgcggccccggggggaaggatgtcttcgcccgagctccgggagtcttcggctcggatgctgagggttaccgggggttgctggcctaggaatgttcctatcccccgcgcggctggcgaggactgttttacatctcgcatggttcgtgaatggagagtttttccttacgggcggaacattactgctgttgtgtcggcagtgatggacaaggatcaccaaggggcagcgcaaaaacgccaggcggctgtcaggcttcatgaagctaggccgaagaggcagcgggggtctgcaaaggctgcgggctccggcggaggcaagccgccgctggcggcgaagtcaggcgcctctgcatctagcaaggcgccggaggcaacggcgggcgtcggaggctccaaatcgatgaaggtggtgccgccggtcagcggagtggcggaggtcgcgaaggcggcccgagcgttgccgttgtcgggcaaacgtgttgccgacttcggcacctatattaatgtggacgactatcttggtgggtcggacgaaggccaacttgctatagttgcgcctgccgcggcgatcgcgacggctgccacagtgccgaaggcgaggtgcgaggctcttggcgccggaggcgaggtgtcggccctcgcggttgtcagggacgaggcgggcgcagcgacccgccggctgaaggaggtgacggaggcgctgagtcaggtggctaacttcgccagccgtactgcgtcgggggccctcacggcagctgtgtctgccgaagttgagagacttcggacgcaacatgctgacgctgtccgtgaaaaatcggcctccgacagcaagtgccgtaaactgacggacaaggtggccgcactggagagggagaaggctgaactacggcgccaactggcgggggagaggagggagaccaacgaggccgtcgccaaggagcaggctgcgcaggcggaggccaaactagcgcgggcggaaggcaatctcgccagggagcgcgccgaacagctgcaggagcggctcaccgccctggagagccgcgtgaagggggccgaggccgcgatgcgtgcggaggccgaacggacgcgcacgcagcatatggatacatatcgtgagctgggtgcgcggaccggtgacttcgaggtgccggaccgagatctcgggcttcgctgtctggaatgggtgcaggaggagctgcaggaactccccactgtcgtgggggggtttatgtcgtacgcctccctggtcacctgcgagggggcgatgaacgcactctcccgcgaagggtgccggcacttcgaggtcttcgaccaggcagatgatgattttgagcgagatgtctataaggtcgaagaccccgtagtgaaggaatccgccggggccctctatgaccggatgtggggtccgcacggtcgtgaggtggtcagggagcgggctgaggctgcaagggctcaggcggcacgtggcgagcgggtggacgacttcggggcgttgaacagcgcgctgcctgacccggagccgacccccgcggaggccgtgtctggggtcgccctggagccaaccccggagaccgcggaagatgcaccggatgcccccacatccgctgcggctggcgaagacctgcccccaaaggtggccgaaggcgcacctgatgcccccgcagctgctgcgccgagtgctgaagatgccgcggtggtggcggcgaaaacaacagcggaagcagcggcggagccaacggcggaggctcccgcagcgtcagggccttcgcaggtggcgtag

SEQ ID NO: 41158 - DNA, 180 bp, Zea mays
  Peptide Sequence Number=SeqID_84533
atggaggcgaggatgatggcggagcgggaggctcgtctagcagatcatcagaggatagcggagatgttccagtacatggccaatctggggcggcatccaacaaccctcatggttcgcccagcccaacgcagcaccagtccaaccgcccacctcaatgagagttatgtttttagtgtttag

SEQ ID NO: 41159 - DNA, 267 bp, Zea mays
  Peptide Sequence Number=SeqID_84534
atgggtgctactggtattttatgtgattctacccatgatgcagtcacaaaagaatgcgttgctccagtatcaaataagacatttgcagaatggtactcgactgaaaacgaagacgggctgcctggttgctctgacgctggtattgatttcctccttgctggttgttctgacggtactgctgctgctgaggaaactgcctctggtactactgcggctggttctgacgctgatgctggtgctggtgctggtgttggtgaccttgcttga

SEQ ID NO: 41160 - DNA, 453 bp, Zea mays
  Peptide Sequence Number=SeqID_84535
atgcagtctctccaggtgactggactgacctggcaccgtgcgacgcaggggacgctccgccaggcaagaaggcaaaaaggggatcacagaattacgtgcagtgcacctaatatgagccatctacagaagacatcatgttgtacactttacccacaagtcgtgatccctttccagcctgggttgtacagacccgatcttcactaccaaggtgaatggccagggatacactatgtagcctttacaaagacccccctagtgcatagctgctcgttaggtttcgccagtcgtacaaacgcagtacacctccccaagctccttacggagaggtactcaggaaaaaggcctgagccccctaaggacataataggtcagaggacacttgccttcaccaggttgttgctcagggaggtctccaacaacacactcaggaacctcggactgctcgttgtctaa

SEQ ID NO: 41161 - DNA, 339 bp, Zea mays
  Peptide Sequence Number=SeqID_84536
atggctcactggagttgctccgacccgcccgaagctttctcaccgtcgttcccccctctctgcccgtggattcatggccccttccccgccattgagttcgccgtggcgccctcttcctctctgcccaactccggcgaccctagagccaccctagctcgcgccagcctcaactccggcgacctcaccgccacggagaggagcagcgccgcccgcaatcgttcacccctccccgacaacgagcagtccgaggttcctgagtgtgttgttggagacctctatgagcaacaacctggtgaaggcaagtgtcctctgacctattatgtcctacatactttatga

SEQ ID NO: 41162 - DNA, 177 bp, Zea mays
  Peptide Sequence Number=SeqID_84537
atgttgccctcggagggcgccgaacatggtgtttccggtgagctgctggcgggtgatctgccggacccggtcccctgtcgacggggtccgagggctcgatgcctccctctgatgggattccattacaagatcgttcccgctggtctcggaaatgtcctagggtacccgggagcatag

SEQ ID NO: 41163 - DNA, 651 bp, Zea mays
  Peptide Sequence Number=SeqID_84538
atggcgatgccgcacggcagcagtggcatgaagatactccaagttagtgacacatataatgcatgctgtcttgatatgcctaacaaaaccaggcttccaatatttaaacgaagaccaggccgactacccctgcaacctggttcaacccagcgcgccgactcgaccagactgttggggagccgcctccgccggcctgagaaccgccgcctctactccggatcaaggaactgccgccaccgcacgtcgaggtcggggagccgcggccaccacagccactggccggggagccatgggctctttttaactacaggaagccctgaccagcttcaggaggcgccggtcgggcgcggcggagtgggcggcggtggtgctgttcatggtgcttgcggtcgtggtgctgctgggcgccgtggctgtccttgtggtggtggtgctgctgcagccccgcgtgtcgtacgtggcggtgcgggcgggctggcggtgctctgcgcctacccgttccgcgtgcccgctaggggcgtcctcccgctggcgtacgtggcgcgcgcgcagggcgccccgctgggcgatgccggcagcgccgccatggaggccgcgctccacgacggcgtggtgccgttctgggtggatggggaggcccggacgcgatga

SEQ ID NO: 41164 - DNA, 537 bp, Zea mays
  Peptide Sequence Number=SeqID_84539
atggttcagatcatcgagcatcgcggcttgtctcccgaggacttcctgatggaggaagaggtagcatcttccatgccacgaggctccaaccgccctgcgcctggtgctgctgctgtgcgcgctgtgcagcagcatatgcccacacagacatccagggctccgtcaagggctgctcctggggcgttgtctgcagccagggagttgctacaccaccctccaagttccacggcctcgctgggggtcatgaagcagtggcatgaagatgtcgaccgtctcctcggcatggcgcattctagctcggccaggcccaggcctcggtcattccggcatcaacacgaggcgtcagcgtctatgcgctcaccctcagtgaaggccgcacggactaacgacctgcggtcagaactcaaccgtaggcatgcgggtgaggatgctcgagtctctctggagagggcgcgggagcgccggcaaaacttcgagggtcacaacctcaaccaagacttcgcttcgcttgcgccacaaactccaaggggcacttga

SEQ ID NO: 41165 - DNA, 825 bp, Zea mays
  Peptide Sequence Number=SeqID_84540
atgtcttcgcgctcccttatgcatcgtgtctttccaccttccgagcccccggatgggggacacccgcagtcctttcgccttgtcgttggaggaacgcaactccatgggagttggtacctttcagccatcgttcggcttcaaggattttcatcagtcagcccggctgcatcccctcgccggtggtcacccaagacggtgaccaccagcccctgggtggggagaagcaagccgggctgcgatcttggtcccgccctcaacttcaaggatgttcatcatcctcgctggggcaggggtggggctaagccggagctctacctcccacgtaggttcgtgggtcagcctctccttcagcattcaagggagagggcgctcactggccctgtgagcggggcggacttcgataacgcggggctggccgacggcgggtgtcgtcagcttcagcgcgttgggctcgccggcttggcgcccggtgccccctcctgccgcgagggcggttgtcgcgccgtgcgcacgggaggaccgcccaagacgtcgcgcgctgctagggcggcgttcgtgttctggggtggtcctgcctttgcaccggtacggcgcccctgcgcggagggcggtgctccactcgtccgggaggatctgagtggggacctaccggagggccggacggctcctgtcgttggtgccgaggtgggggcggctcgagaagtccccgtcggcgatgggatcaccgccaccatccgcgcttcgggcctccgggctctttgtactgtcctcgcccctcgagcgtcggcgtgggcgagggcaaggttgcagcagcgtccgccctga

SEQ ID NO: 41166 - DNA, 552 bp, Zea mays
  Peptide Sequence Number=SeqID_84541
atgggggcccacgcccacgcatcacgcaaccggcacgccggtcgctacgtgcaagcaactgcaccgccactcgcaccactaccacgcatcctcgactgcggaaccagtaccgcgactcgaggcgaccctgcgtacgacccagcagtgccagccaggcgcgacggtcaatacggccaaaaatgggccggcagtaatggcggtggcaggcgggcgggagcagcggtcacgtcgtccgccaagcttacgtcccatcctggggcaggaccgggaaagggggataccccgaaaaggatccttctccgtgaaggaaacaggctccgagcctccctactgatcagaggttcgaaggctggcccctcgaaggggttcaacagccgcctcagagcgcgtgggttctacgcccactactggtcagaggttcaaaggccggcccctcgaaagggttcaacggccgcctcaggctactcgggctccgcgcccactactgatcaggggttcgtaggctggccctcgaacggttcacagccgcctcagacacagagcgagggatga

SEQ ID NO: 41167 - DNA, 426 bp, Zea mays
  Peptide Sequence Number=SeqID_84542
atgcacgacgtggagactgtcaccacactcttcgctctggctgacaagtacgacagggccgccgagggccgtgcatggcactcggcgccacagaccggggctgcccagacggctgcgactaggggccggaacgagcacaacaagcgcccacgaccgcagaggggtaacagcgactcatgccctgtacaccccaacagtcaccatagcgccacagagtgtcgcgagatcatcgaactcgtgaagcgcgtcagcgagtggcgcgagcagacttccagggatggctcctcacctcgtcgccggcctaacaaggaaagggtcgacagtggcgaggtggctgcgggagagcgggacctcgggtatcggtcacccgagggggtcctaaaggatgtcttcaccggaggctccgactccggtgacaacaactag

SEQ ID NO: 41168 - DNA, 516 bp, Zea mays
  Peptide Sequence Number=SeqID_84543
atggcccacgtatcgtggactgagcacgccgcctgtcagtggaatggacaggcgcacgtcttatccgtaatgaatgcgaaggcatgcgtagcccagaggcgtcatgctaggttccgcccgttggcttatgccgcacgcaatatgccacgtggcagcatcggatctccgcctgagcggggagcaggagtgtatgcgggtaggttcggatcccaccagaccaggactggacacagctcaagggctctatggaagggagcattcgttgatgctttcctggctagaataaagaagaacaaagaaaacatgaatgggaagaagatttggcctcgtagatcttctattttgccagaatttgttggttccactgtgctcatttacaatgggaaaagtcatgtccggtgcaagatcactgaagggaaggttggccataaatttggagagtttgcttttacacggagacgaaggccccatcgaacaataataggaaagggaaatcaaggaaaggacagaaagtaa

SEQ ID NO: 41169 - DNA, 687 bp, Zea mays
  Peptide Sequence Number=SeqID_84544
atggagactggtagagtggactcattattgacaatgttgaaagaaggaaaggtgggattacagggatggggtaaggagcggtgtgaggaggcaccctatagtaacatcgggaggggtgctggggcgtccaatgacaagcatgttgatggcgagcatgggtggtggagatggcagggcctcaagcctcatggagacaatctcaacacttcagaacataaataccacagtagcgtggcggccctttcgagggtcaatggaggctggagggtggtagagcacgaagcagtcacaaagatcagggttcatgacctgatcaaaggctacgaacatgtccgggagaagctgaatggcgtgaagggagacacatacatggtagggagtcaggtggagcatgccatggcaaaggacatgcatcaagggagcagacgttggagcaacatgttgctgccatggaggtgccatgcgcccgtgtcgtgggtgggatcgctagcacgagggtgggtgatgaggccggcaccaaggagtggagacatgctggtgaacttctggcgacaccaagagaagggagggcctagccaacattggagaggacacgagcagggaggagcgctggaggagacacataggaagcttgtgccattgtgctgctgggttaggaggggatgctggggagagcgtctacattag

SEQ ID NO: 41170 - DNA, 240 bp, Zea mays
  Peptide Sequence Number=SeqID_84545
atgagggtggtatgggacgcccttggccaagtaataagggaagtcttatgttgggtgctggttttggccattgggacagaggcatatgttatggctcttatattctcgctcagggatctagatgatgatggttctattaatgatgtttctcactatggatcttggtatttcctctatgaggaggttacctttggtgcaatctatgctcaggtaaagaagaagaagaaggcatcgacgtag

SEQ ID NO: 41171 - DNA, 456 bp, Zea mays
  Peptide Sequence Number=SeqID_84546
atggagtattttggatcggctgttttgatggtagccgtatcttcttttttggttgtattggccgattcaccaaaaatcatcggcccttcatgtgacggaacctcccaagtaattaggcccacctacagttgtccttgtctaacagacatcagacaccctgtagatgttcctaagtcacttgataagttcggtatctttccttacctttccaggaacgtttcacccgtcttgcagacattacagaacatcgaaggtagagaaatgcggaagcgattacataacttacatttatttaaaagagccactgacaacttgcaaaagagacccccggtttctgtttcttcgcagtgggaggtccccgacggcgtcgcgcggaggatgaactccggcgagcacgcagaccggccagaggggaccaagaccggcgctagtcttcggtctaaaccaaatccgtga

SEQ ID NO: 41172 - DNA, 123 bp, Zea mays
  Peptide Sequence Number=SeqID_84547
atgtcgaagcagctgggcgtcgctggcctcactagtggcgtgcatggtgaagagacgctggtctggtctagcaagaacaaggccaacgtggcggtagcgtcccaattgaacgtgtcccgctag

SEQ ID NO: 41173 - DNA, 468 bp, Zea mays
  Peptide Sequence Number=SeqID_84548
atggctcatgtccccttgaagttgaagaagcgcggcatgccggcactggggtggtggctcatggctgtcggcagcttgcgctcggccttcacctggtcgtgcttcttcggctccgcgtcgctctgctcagccacctactccgagatacaggtgaccggcgtgcatgggcgcacggttgcggtgtggacgctgctgtcgtgcacgctctgcttcctgtgcgccttcaacctcagcagcaagccgctgtacgcggccaccttcctgtccatcgtctacgccatcgggcacctgagcgtcgagtgcgtggtttatcacacaatcagtgcagctagtctcgccccattcaccttcatcacagatgtgttgagcaagtctccaggttttctccctcattcacttgtcatcgttgcatactcaggccttggagtcgaagcttccttgcttcgccttggtatgtacattgtttaa

SEQ ID NO: 41174 - DNA, 357 bp, Zea mays
  Peptide Sequence Number=SeqID_84549
atgggcactaagaatattgctctcctaaaatggaggcaggggcactcacatttttggtatggtcgcatgaaggtgaagcgagactttctccgattcagctccttcaaggctatgaagtacgtgggcagcagcgcaccattttccatcccgccgtgcgtcgacatcaagtactctgtggcctcgctcgccttctattgccatgaacaggttatctttgcagctatccattgggttcggtcatgggctatccttcaacgggcggatttacaggagcttgctatggaggcctcgcttcacttgacgtcatattcactatttgggtctcacttaagtcgtaatcggttgaaacggacctga

SEQ ID NO: 41175 - DNA, 987 bp, Zea mays
  Peptide Sequence Number=SeqID_84550
atgcattgcgcccttccaccttccgagcccccggatggggagcgcccgcgttgctttcgtcttgctgttgttggaggagcgcaacttcgcggaagttggtacctttcagccatcgctcggcttcaaggattttcatcaggcagcccagctgcatcccctcaccaatggtcacccgagaaggtgaccactagttcgatggtggggagaagcaagccgggctgcggcctccgccccgccctcagcttcaaggatcttcatcatccttgctggggaggagggcgaggcgagccggggcctgccttcacgtgggctggcgtcccgcttcttcctccggcttctaggggtggaaaccatcctccaactctgcggaggaggcgccctccagccatgccggggaaggcgaactgctgctgcccagccagggtgcagcattccgtcctttgtccgggcgacggtggccagccgcaccggggggcctcacaacacgtcgtacgccgcgagggaggtactcgtgttctaggacggtcccattctcgttttcgtggcgaggacgggagtgaggacctgccggtgcgctttggggcggccggcgcccgctggtgcgatgttggtgggcaggtggacgccgccgccggtgctgaggtggtggcaactggagaaagcttctccaccgacgagaccatcagcgccacccgcggaccgacctcctgctctttggctttaatgtctggttctcgtccctcgagtggggacgcgaacgagagccttccagcggtagcgtccgccctgggaccatcgctgctgctgcagaggtcgccggcgagtcacccggagtttgtcgtcccacaggctccccgatgtggaggttgttcatacccgcgggagtggaaccggagttccgtttgtaatggcaccttgagtgtcggtgaaaacctcgactgctctgcgatgagccggagccggaggcagcggtgtgagcgtggatag

SEQ ID NO: 41176 - DNA, 954 bp, Zea mays
  Peptide Sequence Number=SeqID_84551
atgggggcggggtcccacacgccatgcaagctgaccgggacaaaagaagccaaaccgccacgcgcggagcgtgtaaccgcccagcggttacaagcactcctccatcttcgcctaaaccagtgggtgaaagggcagaccgccatgcaggcggcatgcaactgcaccacagagatgcacccttttgacttcgacgcatccagcatgggaggcccaggcccacacgtcatggaccgggaaaggagatactccgaaagggatccttctccgcgaaggaagcgggccccgagcccccctactgatcagaggttcgaaggctggcccctcggaagggttcgacagccgcctcagagcactcgggctccgagccctcctactgatcagaggttcgaaggctggcccctcggaagggttcgacagccacctcaggccactcgggttccgcgcccactactgatcaggggttcgaaggctggccccccgaagggttcgacagctgcctcagaacacgcagagcgagggatgactctgggtacgttcgatacatggccgaggctcgggctacgctcccgaggtaccctaggacatttccgagaccagcaggagcgattctgtaacggaatcccatcagagggaggcatcgagccctcggaccctatcaaacgggaccgggtccagcaaatcacctgcaggtcaaagctccgcccactcaagggacacgatctcgcctcgcccgagcccagcctcgggcaagaacaacagacccaggtggattcacgtctcgcccgaggcccagctcgggcaggcttcgcggagaagcaaccttggccagatcgcctcgccaaccgatcgtatcgcaggagcattcaatgcaaggatcgtctgacaccttatcctgacgcgcgctcctcagtcgacaaggccgaagtgaccgcagtcactttgcccctccactga

SEQ ID NO: 41177 - DNA, 453 bp, Zea mays
  Peptide Sequence Number=SeqID_84552
atgagccgggctgatgtcctcgggggtcagctggctgaggctacggagcggctgaccaagcggtctgctcgggccgggttcctggaggagaccctggcggcgatggccaaggcgcgaatcgcttatccaagcgagagttgcttatcacgggaggtgatgagtgaggtatccgtatcccggaggcgtaggagtccctcggctcagtcggcctcgccgcttacatgtactcttactcgtccgcaggattctgttatcgatatagtcttgaaggcacgaaaaatcgtttcggcagaaaagttttcgagcgttaagacttgttcggtcagcggaatcgcttatccgagcgtgagttacttatcgcagaaggtgatgagtgaggatcccactatcgaagtagtcgaaaagcgcgaaagacgttctgacagaaagactttttccgaggaaaaattttga

SEQ ID NO: 41178 - DNA, 315 bp, Zea mays
  Peptide Sequence Number=SeqID_84553
atgaccgttcatcagggatctacgtccacagagccatcccctcagcacacggcagaccgcacggaggcgccgcccctgatcgcggcgggggtctcgccggagggtggcattgccacacttgacgtgctccgaacactaattcaaagcacacaagatgaagaacaggccatggtgaacatagggaagggattcttaccgactatcgtgctgcgaggtgttctgactacggaggagcccgcaccttggccgaaacctcgctccggcgaacgattgcccgagcgcaaagacttcaatggaggatttgacggttgctga

SEQ ID NO: 41179 - DNA, 192 bp, Zea mays
  Peptide Sequence Number=SeqID_84554
atgaaagggtatgttgccatatgcccatatggaccactcgatcacagatggacgctccagattagatctattttacaatcaatcgacaacgagcagtccaaggttcctgagtgtgttgttggagaccttcctgagcaacaacctggtgaaggcaagtgtcctctgaccgactatgtcctacatactctataa

SEQ ID NO: 41180 - DNA, 183 bp, Zea mays
  Peptide Sequence Number=SeqID_84555
atgaactggtatcacaccgcacaggagaaacccaaacagttcactcctgaagaggagagaatgttcgacggtgccgataacctgtttcgaggcatcgtgattgccgctcttggcaacaatagcgagttgtacatcatggagcagttgtttgactacaagatggtggaaaaccgtcctatataa

SEQ ID NO: 41181 - DNA, 1362 bp, Zea mays
  Peptide Sequence Number=SeqID_84556
atggcgcggtcagttcgagccaaagccttgcccgggtggctggcacagcagtcggagcggggttccgagtttttaggctggtttgttgatgctgtcaacggtttggccatagccaggttgcgagagcagcccccgagcctctgcgcggagcaagaggacgatcaaggactgtcccgacttttattatacgccccttcgtcgcctttccgcaaggaggaaggggggaaagcgccatgttgccctcggagggcaccgaacatggtgtctccaggctgcctcgagtcgcggcaccggttccgcagtggagaaggcgtggcattggcgcaagtggcagtgcagtttcttgcacgtggtaaccggcgcgccagttacatgagcccggctgcattccctcaccaatggtcatccaggatgatgaccaccagttcggtggtggggagaagcaagccgggctgcagcctcagccccgccctcagcttcaaggatcttcatcatccttgctatggcggagggcgagctgagccggggttctacctcccgcatgggccggcaggccgcctcttccttcatcattcaggggagagggcactcaccggccttgcggagggggtgaacttttacaacgcaggaccggtcggccgcaagcgtcgtcagttccagcgtgcctggctcgctggctcagctggctttgtcgcgaccttcgatgctgcctcctgccgcttgatccgggcgtggccgtccatccaccgcacgggcgactgttgcgccgtgcgcaccgggggatcgtccaagacgtcgtatccagccggccgcatgggcggcattcgtgttcttggattgtcttgtcctcactccgacacgatgcctccgcgcggaggttggtgcctatccatccgtgaggacttgagtagggatctgccggtgcaggctggggtggccaccattcgttggcgtagtgctggcgcgcaggtggccgatgtcgtcggtgctatggtggtgatcgccagaggaggtttctccgccgacgagaccgtcggcgccacccgcggtcagacctccggctctttggctttgatggcttctcctcgcccctcgagcggggacgtgggcgagggccttcttacagcagtgtttgccctgaggtcatcgctgctgctatttagccgcccgaggcagaggtcgttgtcactgctattgcggtggtcgccggcgagccacctggagtttgttgtcccgcaggccctctggtgtggaggttgttcatacccgcgggagtggaaacagagtcccgtttgtaatggtaccctgagtatgggtgtttgttcattgtggctgtcgaggcctgaacatctgggtatttga

SEQ ID NO: 41182 - DNA, 258 bp, Zea mays
  Peptide Sequence Number=SeqID_84557
atgacacaaacagaaatcaccgatgctcttcttcacagccacaacgagatccttgcaaaacttcaccaacgactgctccaagcccagcagctctccaagaactgccggcgaatgctcgactacatgacgtcttccatgtgggggctgttgaagcgccaaagggcgaccccctgtcgagctggtgaccctacctctagtactctatggccagctcctgtccactctagcgatggccttgcaggctcaacaacgtcgtag

SEQ ID NO: 41183 - DNA, 570 bp, Zea mays
  Peptide Sequence Number=SeqID_84558
atgttcgacacgcaagtcgatgtcgtgcgcgccgagctggacggcaaggggtacaaggacgtggacatcgtagtggtcaagactggctggccgcacaagggtgaccccgacgaggccgacgccacggtggagaacgcacgcgccttcgtgtcgggcctcgtgtcccacctccgttccctgtctggcatgctgcgcgcacccggcaagtcggtggagacgtacatcttcaccatgtacgacgaggacctcaagctcgacaaggcgtcggagcgatactttgggctgttccagaccagcctcgcagagacgtacccgacggggttgctgaggaacggcacggccagactgacaccagccacggcgccggcgccaacgacatccgctgcggcgctgaagccaacgctagggcagcagccacaagtggggttacagtacgatacagggtgttgtagctgcttctcactaccggaatttggctctttgccgagtgccatattctttgccgagtgttttttcgggcactcggcaaagaagctctttgccgagtgccacacaaaaaactctcggtaa

SEQ ID NO: 41184 - DNA, 912 bp, Zea mays
  Peptide Sequence Number=SeqID_84559
atggccgccccgccaaccactcgccccatcgcattaactccgcggcgggacaggcggcgcctctggcaggagaagcgggcgacgcttcgccttcgccataatgaccgcgtcaaaaaagggaccgggaaagggggataccccgaaaggatccttccccctgaaggaaccaggctccgagcctccctactgatcagaggttcgaaggctggccccccggaagggttcgacagccgcctcagatcgcgtgggccctacacccactactggtcagaggttcgaaggccggcccctcgaaagggttccacggccgcctcaggctactcgggctccgcgcccattactgatcaggggttcgaaggctggcccccgaagggacatttccgagaccagcgggaacgatcttgtaacggaatcccatcagagggaggcatcgagtcctcggaccccgtcgccaggggaccggatccggcagatcacccgcagaggctcgggggctgctctcgcaaacccggctccggccgaaccgttgacagcgtcaacataccagcccgagaacttgggacccgaccgtacacccgggctacggccagctcgcatgagggaacgaccagaccagccgaagcattatgcgaggcattaagacctcgaaggagtgaaaccactcctccgaggccacgggggctacacccggcgggtgcgctcgcgcgcacccaccggaacaaaacgcaaccgagaaaggctggtccccttgcaaaaaagtgcgacaaaagcctccaagcgagtgctaacactcccttcgaggctcgggggctactgtcggggaccataattaggggtaccctcaaggctcctaattctcagctggtaacccccatcagcataaagctgcaaaggcctgatgggagcgattaa

SEQ ID NO: 41185 - DNA, 309 bp, Zea mays
  Peptide Sequence Number=SeqID_84560
atgggcttcgctccgataccagctgtgacggaacctcccaagtcattaggcccacctacagttgtccttgtccaacggacctcagacaaccctgtaggtgcccctgaatcacttgacaagttcggtatctacttttcttacctttcccaagagcgtttcacccgtcacgcagacattacaagcatcagagttacaaaaatgcggaagcaattacatgaacttaccttatttaaaactttactcctggtgttcttccttcagtaccaccttagaacagaagcaacaaaagttggttgcttccttagctaa

SEQ ID NO: 41186 - DNA, 1398 bp, Zea mays
  Peptide Sequence Number=SeqID_84561
atgcatgaggggagcgcgaagacatggttgcctttcaagggggtcaccctccttggcaactctccccacttgcgtcctcagccattgcaggctgagtcttctccaacgcgctccaaggtcctccccctacgacatgggggctgggccccacgcgtcatgcaaattggcccgggacagaaggagccaaaaccgccgcgcgcggtgcgcgcaactgcccagcggttacgagcattcctccgctttcgcccaggacagcgggtgaaagggcggaccgccatgcaggcggcatgcaaccgcaccaagggggcgcacccttttgacttcgacgcgtccagcatggaggcccaggcccgcactggttactacgtgcgagaaactgcaccaccacttgcgccagtaccgcgccttctcgactgcggaaccggtaccgcgactcgaggcgaccctgcgcgtgacccaacagtgccaaccggcacatcggtcacaggtcagtcagccgcgggagaaggcgcgacggtcgatacagccagaaatgggccggcagtaatggcggtggcaggcgggcggaagcagcgggaccaggaaaggggataccctgaaagggatccttctccacgaaggaagcgggccccgagcccccctactgatcagaggtccgaaggctggcccctcggaagggttcaacagccgcctcagagcactcgggctccgcgcccactactggtcaaaggttcgaaggccggcccctcgaaagggttcaacagccgcctcaggccactcgggctccgcgcccactactggtcagaggttcgaaggccggcccctcgaaagggttcaacggccgcctcaggccactcgggctccgcgcccactactgatcaggggtttgtaggctggccctcgaagggttcgacagccgccaaagacgcagagcgagggatgaccctgggctcggaggctgctctcgcaaacccggctccggccaaaccgttgacaacgtcaacataccagcccgacaacttgggactcgactgctcggccctggaagacgacgaactctgcctcgcccgaccccagtgctcggactcggccttggccccggaagacgacgaactccgcctcgcccgaccccagggctcagactcgggctcggccccggaacgaactccgcctcgcccgacccagggctcggactcggccttggccccggcagacgacgaactccgcctcgcccgaccccagggctcggactcggcctcggccccggaagacgacgaactccgcctcgcccgaccccagggctcggactcgacctcgacctcagaggacagactcgacctcgacctcggaggagccaccgtctcgcccgacccagggctcggaccgaccacgtcatag

SEQ ID NO: 41187 - DNA, 957 bp, Zea mays
  Peptide Sequence Number=SeqID_84562
atggggggcgcccgcggttcttccgccttgtcgtcgttggaggaacgcaacttcgcggaagttggcaactttcagccatcgttcgacttcaaaggattttcatcaggtagcccggctgcatcccctcgctggtggtcacccaagacggtgaccaccagttcgatggtggggagaagcgagccgggctgcgatcttggtcccgccctcagcttcaaggatcttcatcatcctggctggggcggaggccggactgagccggagctctacctcccgcgtgggttcgtgggtcaccttctccctcagcattcaagggagagggcgctcaccgtcctagcgggagggtcggacttcgacaatgcggggttggtcggcgccggaggcagcggtgtcagtgtgaacagaggcagagttggcttgaaaagaagacttcatcggtcggagcctggccgggccgtccactggcgggaccagcgccggagtcgagttgccgaggccatgagccgggctgatgtcctcaggggacagctggctgaggcttcggggtggccggccaagtcgtctgcccgggccgggttcctggaggagaccctgacggcgatggcccgggcgcggtgctggtgtcgtccttcggagcagagatcctccgaccgcgttgtcgtccgaggctcggttggacttcgccgaagaattgtttgtccgagcgagagttacttttcatggaaggtgatgagtgaggattctgctaacgatgtagtcgagaaggcccgaaaaatcatttcggcagaaaggtttccgagcattaagacttgttcggtcagcggaatcgcctatccgagtgtgagttacttatcgcagaaggtgacgagtgaggaaaattttgacgcagagggggttcccccccttctagcccccgagggagcgtcgggctttgccgaggcaaggctgacccttccttga

SEQ ID NO: 41188 - DNA, 178 bp, Zea mays
  Peptide Sequence Number=SeqID_84563
atgacatttgaggttgaggaagatgatgcacatcctaaatggcgttcaaatgcaagtgtgacagatgaacaaggcgattgccatcgtaaaggaaagtgtgccattggaggagcatcaagcggtgttgctggtatgagcacaatgcctgaaaataccgttgaggtggtcacacaaaatg

SEQ ID NO: 41189 - DNA, 762 bp, Zea mays
  Peptide Sequence Number=SeqID_84564
atggctcgtcttagacacacaacacgtaagtcggtgattcctttcctgccgtctcgacttgcggagcgtcctctgcaccgcaccgtgtccgggcagtcgagtcacctggagaggctgcaccaccgcctgcgtgaggagcaggaacgccggcgccagcacagagagcagcagggctcttcctccccaccccagcgagaggtggagtccgtgaggccccgttcctctgttgcccagctggaggcgccccctgcaccaccgcgggacgccccggctgttggaagagctactggaggaggtcctggaggagaccccgacgacgacgactcagaccacagcacggagtcctctgagccgcaggaggcggaaggatgggttgcccgacccatcacccgtgacgccgctcgcggttgtcacttccacgacgcacttgacaccttgctgcgccaggctttcgaccggcacacctggtcgatcgacacagagagtgtggttgtctcacctgttggcgaggctaaccctaggttgagcagcacagtcaacctagtcgcagtgcttaacactgagctggatcactctctagacgagctaagcagggctcgaacggagattgcggagttgcgtgctgagctggcagagcgccatcaccaggagggtggttcccccgctcctgtcgggactcagcacccttaccgctcgccgccgcgtggtcaccacacttatggttcccctgtctgtaagaccaggatagatctggatccttag

SEQ ID NO: 41190 - DNA, 315 bp, Zea mays
  Peptide Sequence Number=SeqID_84565
atggagagtcatgatctccgggcagaaagggaatcacggcttgtgggtggcaatgagattgatggttttggttatgactatggtactggtaagtggtattcttttcgtttggaaagggttgtcagcattgcaacccctgctcaggagaagatgaagctgtggaaggagaccactaggagttccaagattatgatgagttctaggcgtgggttagcggcaacccctagtcggctgcctgtgaaggccgcgtttatctacgtttcgttttcgcactttgattattgtaaagactatgtggatgtctcggacgtatga

SEQ ID NO: 41191 - DNA, 219 bp, Zea mays
  Peptide Sequence Number=SeqID_84566
atggagggctccggttttatacccatggggagagcgaagtccgtgcaggcgaggatcacgcagccgaggaaccagggcacggcctgcaagctcgccgcggatctcgctgcagtccgatgcggcagggaagattctgagccacaggtcccacacgcagtgacacgtgcgattcaccccggggaaaatggctctgaccggctgggcccgcttcgcagttag

SEQ ID NO: 41192 - DNA, 435 bp, Zea mays
  Peptide Sequence Number=SeqID_84567
atggagggagctcgttgtggcgcgtccagcaggctcgacggggacggcactcaggcgcggcttgggaaacggcgaaggggaggagacgaccagggagttcaggcttggggagctatggccgacgatggaggctggcccctatgccagatggacggcggggacctcagcaccccagagactgttcttcggacggcgcaccaagaaggtcacctcccaacggtccgggtagacccggcaactgtgctggaagaccacacaacgatactcgatggaccaagtacgtcggtcaagtgcccgacgaagcagggtgtcgagcgcatcgtggaagtgacacccgcgggcagcgtcgcgagtgatgggtcgagcaacccatccttcctctcctggtcagcagaaaagtcggtgtcgtggctcaagctgaacgaatcaagctga

SEQ ID NO: 41193 - DNA, 492 bp, Zea mays
  Peptide Sequence Number=SeqID_84568
atgcaggaatcccttgcaggaccgccatcgcagcaaaatcctcccgagggcctccctacactgaccactcccctactgcccttgcccctttcggaacatgagtgggtaaaagaagtgatcaagggcacaacttgcctgggacttgagattccagatctgttctgcaccactggatctcgcatccacggtcgtagttcgatcagacgaaggggtatgcttgatctaatcgggaccgtccgtcaacaatccgacggcgaacgatcagcgccccaactaggcaggcacgcgcggcggcgccgccccgcgcccacggtggctgatcgccggagtaacgcaatccctcgcccaactactccatttcgacccccgatcggtgcaaggcgaagaggagacaaaagcggacagagagaaaaggttctttaccggggtcgcttggtgacgaaaccagtctgcggcttaaagcggctccgcggcgataacgtgctccgatga

SEQ ID NO: 41194 - DNA, 180 bp, Zea mays
  Peptide Sequence Number=SeqID_84569
atggggaagcctgtcccatcacttctcatgctcctcctctgccgagtgaccgcacttgtacccaccataaccggaatgggagaccacgtctcaggtcgcgtgaggggtaaagtctgcgagcaggttcactcaggtctctgtgttaaaaatcacagaaaaaatgacctactgtatatttag

SEQ ID NO: 41195 - DNA, 339 bp, Zea mays
  Peptide Sequence Number=SeqID_84570
atggaggctgaagcggtaaagattgttggtaaatactgtagaaagactaagatgtcgaggagctgggatatacacggttcgaatgttaggttgaattgtgtgtttgagctaaatggcctccgctatggcttgtatcctaaagagggctccactgatgttggggatgctggggagcgcaagaagaagggtggacttaggcatgatggggtggatgaggggtgctccaagggtaaggttgtggtgccgccaacgaggaagatgaggaaggtggatgctaaggcaaaggggccagcgagggcaactagagtggcggaggcctcagacatatttgccgagtag

SEQ ID NO: 41196 - DNA, 1032 bp, Zea mays
  Peptide Sequence Number=SeqID_84571
atggctcgtcttagacacactgcacgtaagtcggtgattcctttcctgccgtctcgacttgcggagcgtcctctgcaccgcaccgtgtccggacagtcgagtcacctggagaggctgcaccaccgcctgcgtgaggagcaggaacgccggcgccagcacggagagcagcagggctcttcctcctcaccccagcaggaggtggagaccgtgaggccccgttcctctgtggcccagctggaggcgccccttgttccaccgcgggacgtcccggctgttggaggggctgttggaggagctgttggaggagctactggaggagaccccgacgacgacgactcagcccacagcacggagtcctctgagccgcaggaggcggaaggatgggtcgcccgacccatcacccgtgacgccgctcgtggttgtcacttccacgacgcactcgacaccttgctgcgccaggctttcgaccggcacacctggtcgatcgagtatcgttgtgtggtctaccagcacagtcgcgggaggtacccggaccgctgggaggctacctgcctagttcgccgtccggaggatgacctccggggtgcggaggccgtttcggagcactattccatctccgagagggacactgcagaggcggctatgcaggatgcagcacgacgtgcactctctcagtactgttctttgttcggtggcgtggccgacggtcttaaccttcggtactacccccgccgccctactggcagcacagagagtgtggttgtttcacctgttggtgaggctaaccctaggttgagcagcacagtcaacctagtcgcagtgcttaacactgagctggatcactctctggacgagctaagcagggctcgaacggagattgcggagttgcgtgctgagttggcagagcgccatcaccaggagggtggttcccccgctcctgtcgggactcagcacccttaccgctcaccgccacgtggtcatcacacttatggttcccctgtctgtaagaccaggatagatttggatccttag

SEQ ID NO: 41197 - DNA, 513 bp, Zea mays
  Peptide Sequence Number=SeqID_84572
atggctgacctcgatttctacattggagtatatcaaggatatcatgttctcaagacgtttaatgtgcccaacctctatattactgtccaacctgtccttgcgctcgctgctgggtacactaccaccaagtgtaaaatgatagatgttgtagttgatgtgggtgatggggctacccacatcgttccagtcactgatggttatgtaattgggagcagtatcagatctattccaattaaaggaaagaagcatggacatcaaggacatagagtaaattaccaaatcctgttcagtagacagtacaacgctgctagcttgtccactcagatgagtacccaatctgttagaaatgggataaagactgacatgctattatactcatttccacatgagtcccctatccgagcgctcgaccactactgccctcacggtcaacagctcctgccggtggaagatcatgtcctcggagcacgtcaggaatctcaagaagcttgcggcccagagccaaacggatga

SEQ ID NO: 41198 - DNA, 219 bp, Zea mays
  Peptide Sequence Number=SeqID_84573
atggattccgcccggagctggctccagaagctgcagccgcgggacaaggatagagagcagggcgccaagacgccggcggctccacgagaatggcctcgctaccttcactggaaaaaggaagctacgttggttatatccctccaggtctggaatcatcactttttatgggaatcgatgcaaccagaaggtggtggcttacctgagggaggtgtgctatag

SEQ ID NO: 41199 - DNA, 624 bp, Zea mays
  Peptide Sequence Number=SeqID_84574
atgaagtttgtggatcgcgcacgtgaagagggggcacggagggccgtctttccccaccatcgttgtgaacgcgtcgtctctcccgacgtcaggaacacgcgtgtaaagaggaagaggaggctgctgcagcagctaccacttctgatttcgcgcccgcccgccattgtcctccacgcgacgcttgatgcggacgcactggccctcggcggtggtggtccatccaccggcagcctgatggcggaccatcctcaagcgcgccaggtgggccgtcttactccacgcgaggagccgccgacttttgctgctggtgtgtacagggcgtgcagccgagacgccaccgctgcggttatctacctgtgcggggcggcggagaggacgaagacgacgaaacgatggagagagaggacgaagaggacttgcagcgcagggagaaaaggaggcaaggaaggagaaagtaccggcaagaaggttcgaggggcgtccagaactaaagaggttcgtgatgcccctaaagaatatcgtgtcgtagtgttgtggccgttgataggaaatccaacgcctgagaaattttcagccgacgtggacacgcaagagcagccgttttggaccggctttcatatatag

SEQ ID NO: 41200 - DNA, 486 bp, Zea mays
  Peptide Sequence Number=SeqID_84575
atgcaggtggcgtgcaaccgcaccacgagggcgcaccccctcggattcgtcgcatccagcatggaggcccaggcccacacatcatggaccgggaaaggggatatttcgaaagggatccttctccacgaaggaagcgggccccgagccctcctactgatcagggattcgaaggctggcccttcggaaggtttcgacagccgccccaaagcactcaggggttcaaaggctggcccctcggaagggttcgacagccgccccagagcacgcagagcgagggatgactctgggtacgtccgttacatggccgaggctcaggctacgctcccgaggagcgattttgtaacggaatcccaccagagggaggcatcgagccctcaggccctatcgaacgggtccgggtccggcaaatcacctgcagaggctcgggtgctgctcttgcaacccggctacggccaaaccgttgacagcgtcaacaaaccagcctga

SEQ ID NO: 41201 - DNA, 849 bp, Zea mays
  Peptide Sequence Number=SeqID_84576
atgcctccacgcggaggtctgtgcctgcccgtccacgaggacttgagtggggatctgtcggtgcaggctggggcgaccaccattcattggcgtagcgccggcgcgcaggtagccgctgtcgtcagtgctgaggtggtggtcgccagaggaggtttctccgccgacgagaccgttggcgccacccgcagacagacctccggctctttgactttgacggcttgtcctcgtccctcgtgtggggacgtgggcgagggccttcctacaacagcatttgccctgaggagtccctcggctcggtcggccttgccgcttaaggcttcccttgctcagtttgagaaccttcggccgctctgcgatgagctggagccggaggctgcggtgtcggcgtggacagaggcggagtcggctcaaaaagaggcttcgtcggcccgggagcacgtggcttcccaggccgaggaagtgcagaagcggcggctggagcttggccaggtcatccgtgagcgggaccaacctcggagtcacgctgccgaggccgtgagccaggctgatgtcctcgggggacagctggctgaggctacggagcggccagccgaggtggagatccttctgcccgtgtcgccgtccgaggccgggccagatcccgccgaaggcggaaacgacgccgagggtgctgctgctccctctgtcgatgacttgttcgtcggtagcagaatcgcttatctgagcgagagttactttttgcggaaggtgatgagtgaggagtccctcggcttggtcggccttgccgcttacgtgtactctcgtcgttttcaggatcccgctatcgaagctgtcgaaaagcgcgaatga

SEQ ID NO: 41202 - DNA, 114 bp, Zea mays
  Peptide Sequence Number=SeqID_84577
atggggatccggtgtcttcatctataccatcagagaaagaaggcttgccaagaatggacgaagagtcaaaatgggaaaacaattttgaagaggcaccagtgcatatcggaataa

SEQ ID NO: 41203 - DNA, 2487 bp, Zea mays
  Peptide Sequence Number=SeqID_84578
atgtcgctcgatttcaagctcatcctcgacgagctcaaccggcgattcgacgagctggaggttcgctgggaccggcgcttctcgccttctgcgtacctcgaccttccgcccacactgctcagcgtccaccaatcctccgacacatccgccagcatgccgcccaccccgactgcggctgttggggccgtcgtcatcgccgacaactggggcgggtgcttcgatgacggcaaggagtactatgcagcgccatctgtcgtcgccgacaactggggcgggctcttcgagggttgtgatgctgacggcgatatctcttcgaacctgcgcgactccgaccccgacgaggcgttcgtcacctcccactcggacaaggcgttgctcgacaaccaccacgccggtgagctcatcgccaccggcatcgaatatggctcatacaactccgtccatggtagcggcggcgctgcgctgtctcaactcgcgcacagcaacaccaacttcgccatgcccacaacctgttcgacttgggggctcaccgagcatgctatggccgaggccgtgcaccgtcgcgcgctatggctgccccgacgcgagccacttccgcgcctacttcgtgcgttcctaacgctcgagcggctcgacctctccgcatgcgcctcgctcgacgacgcctccctcgctgcgtccgtcggcgatggaccagcagccgcgacaacctggtggtggtgcgcttcggcttcggccacgggcgacatggagagcacgctcaaggggattcgcggcagcgacgcgccgttcgtgatggacctaaacgacgcagccaccgtggcgggcggcatcgaggacacttacggcgaggaccgcgccatcgaggagcagctcgccacgcccttggacacgctcctgtgcgcccgcctcgaccctgtcaagtcgcacatcgggtgcctgctgctgcagtacctcaagctttcgcctaccttgattggtgccaaggtcgcctttggcaggttcgacggacacttcttccacgacttcaccatcatcaagctgaagacggacagcagcagctcgcccctcgagtgttcgaccaaatgtctcagccacgatattggacatgattcacgaaattatgcacacaaattacagaatgcagtcactcatggaatcactgctgctggacatgatatcctacaggtgggattggcttcaacacctgcaatgttcaacattatacttatagaagatgagagaagtcatttacctgttgacgccatttgctctcctgatgaattgataaagacatcacgtctttgtgctttagaaatggttcattgccgtaaaccttggatgagatctcttggcaacacagataggcttggactattctctgaagctcgtgctgtgttaaatgcagcaagacagcaagcaatgaagattgcactaaacatgccacagcaccagacctgcatagatgtgatgggagaaggcatattatatggaggtcgacctggtgttttgaaggaagccattgtttgctcgattccgggtgtcatggtgtttacttggactgttaggaatttttctggagttactcatttatacagtcagcatgacagaggtgtggtgtggctaatcgttgctcctgattgctacttcattcaacacaatgagaggatgcacatgatattctatggcttcgatctactgagtttgcaacacttccatggacatttcattgaagctgatatgtttgctccttgggatggtcaggaattaacccagtttctattttctgaactaccaatatattggcagcagtcacatggtgaatttttctcagctagcataattagacaatttcagttcatatcacagctgattttattggcaattacaggcatgaacagtctattatttttcagaaagctcaagtattcatcatcagttgagatattttgtggtgcacagttttcatttcctaatattctattgcccaagtcttggtcacaggagttagccaccaacatagaaagacatttactatcagaaatgctagaagtggctaatggctataattttcatgagcttcatctgatgcttgcctctattggagtgacacaaatgatcagttgtggtaaatatttgatatggatcattggcttgctaactccatgggatccgggcagaatggtcttcgacctcaattcctgcttcctacctccaattcctgtctcggatctatctccactatctgccgctaacatcctgcctgatcagctcgtcggggaacagaggggagaggtcgctgggattcagaggctggtgtgtctgcgggtgcagcggtggcggtggcttcaccggcaggtcggcgatgaggttataccattgcttagggatgctcacactggcgcccgcattcgagctggccctagtggtgaatctcaagcttctcctgctggcagcaactcggtgcttcggtgtgcacagcagtga

SEQ ID NO: 41204 - DNA, 1068 bp, Zea mays
  Peptide Sequence Number=SeqID_84579
atggcgcctcctgttgacgtggctggcccgcgccctaggttgggcgatgtggaggctcctccgaagccgaggtcgagtctgtcttccatggccgaggccgagtccgagcccctgggtcgggcgaggcggaggtcgtcggcagaggccagggcggagtccgagccctggggtcgggcgaagcggatcggagtggcgcaggcggcgctgtccttctgtcaggccggtcagtggagcggcgaagtgacggcggtcacttcggctctgccggagggcgcgcgtcaggataaagggcctcgggcgagccggaaatatgtccgccgttggaggggggcctcgggcgagacggaaatcctccggcctttgcagctttatgctgatgggggttaccagctgagaattagaagtcttgagggagatggggatttcactaaccatgctgatgtgctcctcgtgcagtgctccaagaccaagaccctgctcctcctcaactgccttgacaccaatctattgcagggcagaccaaatcatggcaccaaatcaatgataggctcatgctcacggaaacgcggggagggctcgaatcccttgcgtcttttaactaaagcattagaggagcctatcctgcgcttgaccgacccacaagcgggctgccaccggttgctggcgtcgtgggccggcgagggcacgggcgtcgatgtgcagtcaatgacagtgacctcccaccccttgtgcttcctcccgaagctcaggaacctcttgagccccctcaccttcgcctgtctcggggacctcgccgcgccagaggacctgttgcccggcggcgtcctcggcgccgacgcgctcttctcggcgcacttcttccgcacgagggctgtgtcctcctctagcagccgctcggtggactggtcccgcgagctgcacaacgcccgcgcgctcggcaccgacaacctggctaacagagaggactcatcggagctctccctcgccggcgcttcttcagtgttcgtcgtcgcgacctctgctgaggccgcggtagtagcttcggctagtggagggtttagggtttag

SEQ ID NO: 41205 - DNA, 312 bp, Zea mays
  Peptide Sequence Number=SeqID_84580
atggcgccccgcatactctatgacgacggcggctctcagtccccttacggaagcaagaggacgtcagcaaggactcaaccgcaccgacagctgtccctccgccaagctccatcgctcctccgacggccacgacatcacaccagctgggcgccaagatctctccggctgccacatcggcataggaggagcaagatcaaggagaagatgaaggctttgcagagcttgataccgaactcaaataagattgacaaggcatccatgcttcatgaggccatcgagtatccgaagacattgcagtatatttctttttaa

SEQ ID NO: 41206 - DNA, 576 bp, Zea mays
  Peptide Sequence Number=SeqID_84581
atgttcgaacacaaacataagtatccaacactcaagaacataagtctcaagtatctcacaaagcattaccaacatctaacaagtttagaccgggttatctcacaaagtatgaacaacaccgtcggtaccctgaatcaggggtaccccttactacagtatgaaggcgcggtgtccatgcggctatctctagtcgcgtggcaaacggcacccgaccccaccacgcggacggctccggggccgtcgcgtggccggagaaggcgatatcctccaaggtgtcagcagtgggtccggacccccatgggaaagtgtcggacccctgtatatgcggaccagacctccgggcgatgtgccgcctcgacatttaatgtgccctgtccactccgatggcaggcggcgaccaggctgtctcacaggtggcgtgcctgtccattccgttggcaggcaggaagcttccgctgcacgccaatgctacgcagaccactgatatcagggcgcaagaagattgcactggcaactagcattagttgccccaagcattgcatccgttatgttcctgggcccgcatgttggggctaa

SEQ ID NO: 41207 - DNA, 186 bp, Zea mays
  Peptide Sequence Number=SeqID_84582
atggccagttgcatatcctttcaaacaattgatgacaatcgtaaaggattttgctatgttgaatttgtttcagctgaagctgctgcaaaggcatataaagagaagcaatcaaaggagctgcaaggtcgtgaagtaagacttgacttcgctaagggaagaagtacacaaactcctcgtagcgggtaa

SEQ ID NO: 41208 - DNA, 453 bp, Zea mays
  Peptide Sequence Number=SeqID_84583
atggatcaatttcttcatgaattctggcatcgatcaagggacctaactccacaaggatatgatacccttcttagaaagagtgcaggaaatggattgcctgatttcatttcctggttcaaacagaagatatcatcgcacggtaaattacctgttccaaacgatgaactttataacttagacccggacatatatgacagagagttctttctagaagatgggctaaaagggcgatttgagatagacttaaccaaagcgttcagaatggaagtatatattgaaatggttgatgatgaggacgatgatgaggagcaaaatgagaatgacttagagatgcttgaaggcaatgacaatggcgaacttgcgccttcagatggtgttaactatgaaatggtttatagtgatgatgggacttatggtccagctaatccggacacatataaagattatttttaa

SEQ ID NO: 41209 - DNA, 472 bp, Zea mays
  Peptide Sequence Number=SeqID_84584
gcttgattcgttcaagaggttcgcggctccgaactcggcagcctcgggaattcttctcggctgctccgctataattcaccggacatgtccggtgtacaccggactgtccggtgtaactacgggccaacggctacttcggcgccaacggctgcctgcaggcgcaattaatgcgcgccagagcgcgcagaaggcaggcacgcgcgttgtggcgcaccggacactctacagtacatgtccggtgtgccaccggacatccaggcgggcccaggagacagagctccaacggtcggaacccaacggcctggtgacgtggctgtcgcaccggacatgtccggtgtgcatcggactgtccggtgcaccatgcgacagacaaccttcttcaacggctagtttttggatggtggctataaataccaccccaaccggccacttcaaggtgaggggagcccaagcaacattccaagtcatctag

SEQ ID NO: 41210 - DNA, 411 bp, Zea mays
  Peptide Sequence Number=SeqID_84585
atgccgcgcacgaagaatgcgtcggcatcagggggtggcgatgatgaggaccctcgtcgccccttcaggcaggtgaagggcaagactgtctatttggagcagcaggaaggccgcaagaagcggcgtacggacagagaggcccgtgcagcggcagcagctgccgcagccgctgcgcaggccgcacttggagatcagccgcatgttccatccgatcagattgcattccatgctcgtcgtcttacctccgcttccactccgccacccactctgcctgctcccgtcactcctattgctccatccacctccacagccatacccactacctccactacgccagcttccactgcttcccctgctcccgctcccgcttcagctcctcctgtccctccctcctcgctttcgggagcgtga

SEQ ID NO: 41211 - DNA, 561 bp, Zea mays
  Peptide Sequence Number=SeqID_84586
atgttggcctacaaaaagatgacatgtttaacacctactttttggaaagaaatgcttccgaaaaaggttatcaaattgaccatctgtgaaggagaagatggcactgaatcatcaaatggagatgtgttgatctttccagatatgatcagatataaagggctgacccattttgacgtggacaactttgttgaagaagtgcttgtgaaggatattgactggcttcctagatctcctgagcctatgagtggttcctatatttttgtttgctcccatggaagcagggacaaaaggtgtggtgtttgtggacctgctttgattaaaaggttcaaggaagagataaatgaactgggacttgatgatcaggtggctgtcagtgcatgctcacacgtgggaggtcataagtatgcaggaaacgtcatcattttcagttctgatgccaagggagaagtgactggtcattggtatggttatgttgttcctgatgatgtgcctgttttgctgcataaacatattggacaaggagaagttgtggaccatctatggaggtatcccccttgttga

SEQ ID NO: 41212 - DNA, 99 bp, Zea mays
  Peptide Sequence Number=SeqID_84587
atggcggacccaccagcagcatcccaaggcgagccaaggaaagtgcgcatggctggtgcgcctggtcagcggggccctcatgtcagcgagaaattttaa

SEQ ID NO: 41213 - DNA, 941 bp, Zea mays
  Peptide Sequence Number=SeqID_84588
atgggcatgagcagcacacaagcagcagcgcagacacagcagcagcagcagcagctggttcctccaggctttcggttccatcccacagacgaagagctggtggactactacctcaggaagaaggtggcctcaagaaggatcgacctcaatgtcatcaaagatgtcgatctttacaagatagagccatgggatctccaagacaagtgcagactgggaggccctggtgaggaggagcagaacgagtggtacttcttcagccacaaggacaagaagtacccgacgggcacccggaccaaccgcgccactgccgccgggttctggaaggcaaccggcagagacaagcccatctacgccaacaagcagcggcagctggtgggcatgaggaagacgctggtgtactacaagggcagagctcccaatggccacaagtccgactggatcatgcacgaggtgttcaaaaagcgactaccaacaacaagaagagaatctgaccatgatgcaccatgctggtatgtcgatgaagatggaaccttcatgcatgaccttaactcccccatgggtggactgccaccacaccacagcatcgcacagctgcacgaacaacacctccagatgctcaacaacagctacaagaggcgggaactcaagctgcaattccagatgccaagccatcatatcctcaatgccgccgccgccattcctcacgagctagagcccccatccttccattctcttttggtctcaccagaccatcatcaagctgctaaagcgcaccaccgtgctgttcagctcatggacgagcatgcagccgaccaggtcactgattggagagttctggacaagtttgttgcatctcagcttagtcacgacgatgcggccaagggtgtcgattatactgatgaaggagatatccttcagatcaatgagaagcaagctaccga

SEQ ID NO: 41214 - DNA, 186 bp, Zea mays
  Peptide Sequence Number=SeqID_84589
atggcagaatcgccgtggtgtctacacgattctctcttcctggcgagcagcagcaccgtcggcaagctctgcttcaatggatcaaagatgcaagccccgggttcgcggcgagaagatgcaccggaacgtgagcctatcatcgaggtcccacgcgatggtgaacaatctcctgtgaacggtgactga

SEQ ID NO: 41215 - DNA, 216 bp, Zea mays
  Peptide Sequence Number=SeqID_84590
atggcgaagctaactactcctctggttcctctaattaatcagctgagggcgtcccattccaccctcatggttgcactgttatcccgggatgtcactccccaaataggtccttatggagaggacataataggtcagaggacatatgccttcaccaggttgttgctcaggaagatcttcggcaacacactcaggaaccacgggctgctcgttgtctaa

SEQ ID NO: 41216 - DNA, 435 bp, Zea mays
  Peptide Sequence Number=SeqID_84591
atgggcaagggcaagagaggtcgaggctcgcctcatcgtgcaggcgacaagcggaagcgcgatccaagtcctccctcgaaggacttcggcgactctaagtactcggaggaggaggtttcctccgagtccgaagggtcgctggctctcgcctctcccccgacgtcgtccgatgatttggacgactcccaggggctagccgctgaggtgtggatgtacatccgctccgtcgagcacgccgggctcgaggatcggatgattcggatgtctcctcggatgaggagggctcctttggctcatccgaggagcagagcgatgacgacagcgacgacgacggcgaagacgacaacaatggcagcaagggtggcaaaggcaacgacggcggtagtggcagcggcgacggcaaggccagtggcaaggcgccactggtttaagtag

SEQ ID NO: 41217 - DNA, 201 bp, Zea mays
  Peptide Sequence Number=SeqID_84592
atggcgggcggaaatgagctcgccggagctaaggaggggtggctggccggtgctggattcgagttagggatcaaggtgaacatgcttgatctttggctcaagggttatcacccttatcaccatttgagtgggatgatcagggactccctggtttgggagggccttaaggtgattgaaagttgcctagaggggggtggatag

SEQ ID NO: 41218 - DNA, 813 bp, Zea mays
  Peptide Sequence Number=SeqID_84593
atgaacgtatgtgagctcactcttgctgtctcacaccccccacaggtcaagaacaggtaccacaggatgaggcgcatggaggatgctgcgatgtgtcgtgagagcacacctggtgattatgttcgcgcccgggtcttggtgcccctaaaacccgggtgtgacaatcgggtacctcgttgtcgggtctggctgactttggaggctcatccccttcagccgggttggcgttctcttgattctgagacaattggactcaggacggacgacaccgttgaagcagcagccatgaagactctgacgactttctgtggctaccatcccctggagatggtgatgcaccccttgggactcttccctgctgagaagaaggatgatcccatgtggtgtaaccgcgtgagccatgtgaaggatgtgtgggcgatgtatcctgacttagttgggagggtcactgttcagtgcatgagtgcgttgtaccgccttcaggcccttcagagcgatgctatggcactccttgctaacaccgctcaaactgccaagctcactctcgacagtcgagaagattttgtggtcgatctatccaccgagttggtagagaaggatctacaggtggagaggctgagccagtgcatcaccaccttggagcagcaggtggagatccgagacaacactattgatgtcttggagaatcagcttcacgatgtgcagagggaactcgaagaagcgaacactagtacaatttggctctatacaagcggaccgcctgtggtgctctatccttttcacaaacggaccctaagaaaaaaccgcctgtga

SEQ ID NO: 41219 - DNA, 372 bp, Zea mays
  Peptide Sequence Number=SeqID_84594
atggctgaggagcttcagcgcgccgaggaaggagggggcacggtggagagagcctgcagagctgcgaccgagcagaggcgttggggcctgggcgagctcggccatggagctcctgcgcgcggggaagaaaaagctccctgctgccgacggagccgagggggaagaatggcgctgttgctgggtggccatggttggagcagagagacccgcgcccatggagcagggagggcgtcgctggtggctgttgctgccgtgaagaagaagaggcagggaagaaagaaggtggcggctgggaaaaatggaggggtgggagtgctttattgccaagggcaagggaaggggtccatatttatagagaacgaatcaagctga

SEQ ID NO: 41220 - DNA, 630 bp, Zea mays
  Peptide Sequence Number=SeqID_84595
atgacttcaccaacccccatcagcggaggagacattcgttttagttccgactacctttcccatgagggtttcccttccatcttgtgggaggtgctcacctccgtcggttaccctacaccccctatgtacacggtgcagatgtacgaggggcatcggccaggttggagttcccttgacttcgagactattgtattcaaggcagatgacaccaccgaggctgcagctatgaagaccctgacgaccttctatggctaccatcccttggagatgaccactaagctcaccctcgacagtcgagaggacttcgtggttgacttgtctttagaattaatggagaaagacctacaggtggaacagttgagccagcgcatcgcaaccttagaacaacaagtggagatccaggataacactatcgatatcctagaaatccagctccatgatgtgcaagaggagcttgaggaagccaacgatcacctagagatgcaccaccaggatatggaggcaaacgatgccggaagcgagggagaggaggctcccgagaagttagagccaacccctggtcccaatgcaactcccaccgggatgccgccttcacccgcatctagtgttgcctctaccactcagggttga

SEQ ID NO: 41221 - DNA, 333 bp, Zea mays
  Peptide Sequence Number=SeqID_84596
atggcacctaagagagctagctcgaaggcagccccatccattgacgaagctgcgaaggcagcgctgctagccgagaaaaagggcaaagccctcgtcgacaccacccaccaagaagcctgcgaagacgacacactcagcaagaggcagcgcaatgaacaacccacacccgaaggcagtctccgcacttgcagctccggaggacaaccgcaacctcccctaggcttcgctccatgggagggcgcagacgccaccgaggacggcgaagtcattggcgtttcagcagaggaacagctacagctgcgtgccttgcgcatcaagaaccgcaacctctag

SEQ ID NO: 41222 - DNA, 372 bp, Zea mays
  Peptide Sequence Number=SeqID_84597
atgctgacgaacggtctcctgcagcaggaaatggagcagcaaaggatgacgaagactagaataatgccatcacaggctcgcgcgcacgacagtgcggggacttcccgtggtcgggaagatactcccaacctaccgcctgtaccaccgacactggccgaggctatcgctgccttggtcaatgctactgcagataatacccgcttcttgcgtgagatggcgggctcgccggagccactgctccgccgccgtggtcggggatctcaacttgcgaagaaacagaaagggtggggcctcgatgcaaatatttgggaaattcataagaaattacagaaaaatgataaaaatatgaaaccaattttactggacttctaa

SEQ ID NO: 41223 - DNA, 672 bp, Zea mays
  Peptide Sequence Number=SeqID_84598
gttttggagacggtgattgccggatttggaccccgaggtgagctccctctccctctctcttccccttcccctccccttccttctcccctgcgcgcgttccctgcgcgtcccctgtggccccacggcccccgcatcccgtgcccccgcggccccggggccccacgcccgcgcccctgccccggcggcagctcgccccgtggccccgcggcctcgcgcccgcgccctggcgtccccggcggccctgcgccccgcgtcgcgccccggcggcggctcggccccgcggcctcgcgcccgcgcctctgcgcgccccacgccccaacggctgcctcggccccgcggtgcccgcgccccggcggcccggcgatcctgcgcccccgtgcccctgccccgacagcccccgcgaccccgtgccccggcgtggcctcacataacgatcagctggcggagttcgaaggagttgcaggtgaagaccttgagcagcagctggttggtgaaggcaaaaactggggtgtagttcgcttcgccgtcatgccgttaatggggctcggtgtatgcgactcgctctgccaaggtggtgatgaggatgatgattttggttatgactatggtaacggtgaagatgaagtcgtggaggaggacttccaggagttccaagagtatgatgagttctag

SEQ ID NO: 41224 - DNA, 612 bp, Zea mays
  Peptide Sequence Number=SeqID_84599
atggaggccatgtccgccatgggagcagggaaatgggccccgacctgcttgagctcgcaggggggagccggctggagaccgacacagggagcatggggccaagcgccatgggagaaggtccgagtgggggaagcgctggcgagctcctggcaggggttagctcggccacggcaagagcagggaagagggggcgcgcatccgggtgtaggagagttggagagggagtcgacggtcatggccaggcccctagagagcacgcaggataagggccttgctggaggggaggtgagtccggccaccactccgactgctgcgtccaagaagtctgaggttgaagatgccagggcgggggagaaaatggtagggtgggaattctgggcacacacgcccgccctagataggaaggtgctggggaagagggagcttgatggtagagtggctagggagagaaaaccaggcatcgatgctgctcggagcgcctgctccaggggagctcgacaatggagggagttggagatggagctaccgtggggaacaagagaggaggatggcgtgggggagaagtggaggtggctgggagaaaaagaaagagtggcggctaggggtagatag

SEQ ID NO: 41225 - DNA, 867 bp, Zea mays
  Peptide Sequence Number=SeqID_84600
atgggcaggggtaggaggggcagaggcttgcctcaccatgctggcagcaagcgtaagcgtgctccgagtcctcccttggatgagttcagcgattcagagtattcggaggaggcttcctccgagtctaagcgattatcggctcctgcttctcccccagcgacatccgatgactcggatgactccatgaggttgtccaccgcggtccaggcgtactggcgcgccatcgagcgcgccgggctcggtgggtcggatgagtcgggggtctcctcggatgaggtggattcctccaactcctccgaggagtggagcagcagcgacggtgacagcaagggtgacgacagtagtggctacgacgacagaggtgacggcagtggcggtgacgatgaccgaggtgacgacagcagtggcgacgatgacggtggaggcgacagaggcaagggcgacgacagcaagggcggcgacggcgacaagggcgacagcggcgacggtgacggcaggagcggcgacggtaggggcggcagcggtagcgtaacccactcgaccatctatcccagtggcaaggatgaaggcaaagtcacaccatcaaccaaatcaaggagtataatggatcaagcagtctcattagctgcgagaaggagacgattcgaatcgagttttaaccttgcaaggactcaccgccttggcgtacaatgctccactgaccccggctaccgccgtgcagtgaccgcacttgtacccaccatatccagaatgggagactacgtctcaggacaaaccatcatcatcccgttatcaaaacggatacaaccaattcctgacctcgcgcgagtgctagaaaaatcgctcgacttctaccgagatccctaa

SEQ ID NO: 41226 - DNA, 546 bp, Zea mays
  Peptide Sequence Number=SeqID_84601
atggaggctgtgtccgccatgggagcagggaaatgggccccgacctgcttgagcttgcaccagagaaggtccctcaccatggctgagggcgcgtggagcagggagctcgcagggggaagccggctggagaccgacgcagagagtgcggggccaagcgccatgggagaaggtccgagtggggaaagcgccggcgagctcttggcaggggttagctctgccatgaaaagagcagggaagaggggtgagcgtctgggtgtggagagttggagagggagtcgacggtcacgactaggccaccagagagcacgcaggagaagggccttgctggaggggaggaaggtgctggggaagagggagcttgatggcagagtggctagggagagaaaaccaggcatcactgctgctgggagcgcctgctctaggggagctcgaccatggagggagctggagatggacctgccgtggggaaccagagaggaggatggcgtgggggagaagaagtggagcttgctgggagaaaaagaaagagtggcagctagggggtag

SEQ ID NO: 41227 - DNA, 366 bp, Zea mays
  Peptide Sequence Number=SeqID_84602
atggctcaccggagttactccagcccgcccgagaccttctcaccgctgttctcccttctctgcccgtggattcatggcctcttccccgccatcgagttcgtcgtggcgttctatcccaccctgcccatctccggcgaccccgaagccaccctagaccgcgccagcctcaactccggtgaccccaccgccgtagagaggaacagcaccgcccgtagccgtctgtcctccctggtctggtcccctccgtctgattcagatcgcacggctcagaccacgggataccacttcgtgcacgcgcgccctgacgtcgtggcccgcctgtcagcgcccaagccccgtggcgctaggcccgctcgatcacaataa

SEQ ID NO: 41228 - DNA, 780 bp, Zea mays
  Peptide Sequence Number=SeqID_84603
atgccccctacacctccacagggcatcccggctgctggaggagaccataacggagacggagacgacaatgacaccggtggcagttcgagccacggcacggagctctcggaggagttggagctggagggatggatcgccagacccatcactcgtgatgccgctcgtgggtgtcacttccacgacgctctcgataccctgttgcgtcgggccttcgaccgaaacacatggtctatcgagtaccgttttgtagtctaccatcatcgtcgcgggctatacccggaccagtgggaggctactttcttggtgcgccgtccggacgatgatctccggggtgcagaggccttctcagagcactattctattactgagagggatactgccgaggcagccatgcaagatgcagcacgatgggcactttctcagtattgctcgttgtttagcggggtagctgatggccttgacctgaagtactaccctcgtcgttcggccggcagtgttggaggtgtgattgcctcgccagttggtgagggcaatcccaggctgaacagcatggtcaatttggctgccgtgctcaacacagagttggaccacgcccttgatgagttgggcaaggttcgggctgaggttgcagaattgcgtgttgagtgcgcaacacgccactatctggatggtggttctcttgccccggtcgggattcagcacccttaccgttcaccgccccgtggtcgcttcgactatggtaccccagactgcaggacccggatagatttagatccctag

SEQ ID NO: 41229 - DNA, 594 bp, Zea mays
  Peptide Sequence Number=SeqID_84604
atggatcttggcacacatatgatggttcgtactctccaaactacccgtgtcaacaccagctacgcccctccgccccggcaaatcccggtctacccagtggtagtcgaggaagttccggtggatctccctcacatccaagtggagaatgtagtcatcctagaggacagctcggaggaacacctgccgacgcccaccctgttggcagagtccctggccttcgcagctaggtcatcgacatcggccccgcctacaccagctgtccaagcacctgcacccggaggcgatgaccccgacgactctggggacaacgatgacgaggatgacgacgacgacgaaggaggagatgaaaacatcaacgaggaagctgactacgccagcaggactacttcatgggttgatcctttagatgccaatgactggctcaaggttatcggaaagaagttggacatcacccagtgcaacgaccgagagaaggagttccaagagaacttccgcactcaccatattccctcggaaattattaagctgaagaagaaggagttcctttcccttactcaagggaacatgacgagtcataccttccccaatttctag

SEQ ID NO: 41230 - DNA, 447 bp, Zea mays
  Peptide Sequence Number=SeqID_84605
atggtgaaggggtttacccggtccacgtgcgccggcgggttcttgaactccggtgagcgcgatttggcttctccggtgacgcgggccctcggttcaagcttgagcaaggctcacggtctcactaggaagctatctgggggcttgaatcgaacggagggggactggagaggggttggccacggcggtggctcttggtcggcactggcgggctgcggggaggtcgccggaggcaacggctggctcgggcgagtccgacgagggcccacgcgatctgaggcggctgtcgaacccttccgggggccagccttcgaacctctgatcagtagggaggctcggagcctggttccttcacggggaaggatccttttcggggcggttattatggcgaaggcgaagcgttgcctgcttctcctgccagaggcgctgcctgtcccgccgcggagttaa

SEQ ID NO: 41231 - DNA, 162 bp, Zea mays
  Peptide Sequence Number=SeqID_84606
atggtggctctcagccccctaacggaagcaagaggacgtcagcagggactcaacagctccgacggctgtccctccgccaggctccagcactcctccgacagccacgacatcacaccggctgggtgccaaaatctctccggctgccacaacggcatgttttag

SEQ ID NO: 41232 - DNA, 171 bp, Zea mays
  Peptide Sequence Number=SeqID_84607
atggagcctggcggagggacagctgtcggagcggttgagtccttgctgatgtcctcttgcttccgtaagggggctgagagccgccgccgtcacaggctttatgctgatgggggttaccagctgagaattaggagccttgagggtacccctaattatggtccccgacagtag

SEQ ID NO: 41233 - DNA, 693 bp, Zea mays
  Peptide Sequence Number=SeqID_84608
atgggctttctacaagaaagttctcagctgctctgttactcagcatcttggcctaatctggctaaatcgcacattgctgctgcagataaacagaatcaaaacatgaaaaaagtgctcagatgggatctcaaatgggaccccagttcacccgtccgtcacaatccggacagaccccaaacaccaacgaaacacagggttctgagaccggacaaggaaacccacagatggacatacagcggtcgatgccccctagaggacagattcttcctcctccacaaccagtgtgtatccgcatccacgcgtcgtctttctgttcttctccgcttgatctgggttaagaacgtgggtacccatgttcttaaggttaagaacgtgggtaccgtcgaacttattgtgcagtcctcgcaaacccacgcaggttcgacggggctccctaagttcgtccaaaaatcgtcgtcggctatattcgtcggtaaacccacgtttcttacagaagaagccttagaggctaaattccaagcatttctagaaaatgtgaagtacgagggtgatgacatcaatgtggaaccaagtactccatccacccctccaactatgtccaataactatgatgaaaacggttactactgccctgatgttagcgattacttctacctcaccaactcagataggtccacacgaactagctattag

SEQ ID NO: 41234 - DNA, 132 bp, Zea mays
  Peptide Sequence Number=SeqID_84609
atggcgcttcacgtctggcacctccttggagaggttctccaggtcggcgatgagggcctcggactcggcgagggcctcggcgtaggtgtagttggggacgaccatgaacttcgcgtagcatggcctccctag

SEQ ID NO: 41235 - DNA, 273 bp, Zea mays
  Peptide Sequence Number=SeqID_84610
atggcccacgaaataataaagaagagcgaaaaagatacttatgatgctagggaagcaacgaaagcagctgaaaaagctgcggaacttgaaaggcggatagctgaactatctcctcccccagagcccttcgagtcactggccggcccagaggcaaaggaacgtcttttgaacttcttcgccttctatttcggcaatattcgcgttgacttttcgcgcttcgccttatatttcggcggtatttggctctgcattcccctttggaacgacttttga

SEQ ID NO: 41236 - DNA, 165 bp, Zea mays
  Peptide Sequence Number=SeqID_84611
atgagggtcgcaactttatttatttggaggtatcttcggactcgtatcagagagggagaagctcaaaagatacgaaggttgacacagcgccgaagctgtgaagcaggaaagcttcggcatgttcgcagaaaagggaaccgacttgaagatgaaaaggccatttag

SEQ ID NO: 41237 - DNA, 2047 bp, Zea mays
  Peptide Sequence Number=SeqID_84612
atgcaggtggtcgagttggttccttgcgcccgcaacaagtggggcaactggaatgaattttggttttacgttgctgagggtaccgtcgaaggccatgagggacttcccatgtccgagatgtgctctcatttttactcggcgtacccgccctttgaagtggcggaggatgatgtggatgaaggggcccttcggtgtgccgccggccagagcagtgggcgcgacttggttgaagagtttgtggcgtacggggtgtggcccttggcgcatggttgggcgttgggcgaagtatgccctcgccagatgcctttccgcggtggagaggtggtgcggagtcccgccttcgcgctaaatctgcgaaatcgtgatccggccgcttttgtgcgtgaggcggaggatggggcggtgcggcttgttggacgttatgtgccgaggacagagggccagcgcagctgggagatccgcgggtcgaatgaccgtttgaacagggtcttcgaattgaaccaactgccgtatgacggctatcctggtcaagacgatgcggaccgccgagggaagaagccggtggtggagactaaagacgaccctgcgccggtggccgccccatcctctaagaagaggaagctaggtactgccatgggaggacttggggtttccgatggctttgctagagagttgatgaggacatgcgcggccccgggggaaaggatgtcttcgcccgagctccgggagtcttcggctcggatgttgaaggttaccgggggttgctggcctaggaatgttcctatcccccgcgcggccagcggggacgtttttacatctcgcatggttcgcaaatggagagtttttccttacgggcggaatattgctgctgttgtgtcggcagtgatggacaaggatcgccagggggctgcacaaaagcgccaggcggctgtcaggcttgttgaagccaggccgaagaggcagcgggggtcggcgaaggctgcggcccccggcggaggcaagccgccgctggcggcgaagtcgggcgtccctgcatctagcaaggcgccagagacagcggcaggcgccgggggctccaaaccggcgaaggttgtgccgccgcccagcagggtggcggaggccgcgaaggcggcccgagcgttgccgtcggctggcaagcgtgtcgccgacttcgccaccgacatttgtgtggaggactatcttggtgggtcggacgaaggccaacttgttatagttgcgcctgccgcgccgaaggcgaagggcggggctcttagcgccggaggcgaggtggcggccctcgcggctgtgagggatgaggcgggcgctgcgtcctgccggctgaaggaggtggtggagtcgctaagtcaggtggctgacttcgccaaccgcacggcgtcgggggcctttacggcagttgtgtctgccgaagtcgagagacttcggacgcaacatgctgacgccgttcgagagaaatcggccgccgacagcaagtgccgcaagctggcggacaaggtggccgcgctggagggagagaaggctgacctccggcgccagttggcgggggagagaagggagaccaacgaggccctcgtcaaggcgcaagcttcgcaggcggaggccaagctggcccgagcggagggaaatattgccagggagcgcgccgagcagctgcaggagcggctcatcgccctggagagccgcgtggagcgggccgaggccgcgatgcgcgcggaggccgaacggacgcgcacacagcttgtgaacacatatcgtgagctgggaagaactgcaggaactccccactgtcgtggggggttcatgtcgtacgcctccctggtcacctgcgagggggcgatgaacgcgctctcccgcgaagggtgccggcacttcgaggtcttcgaccaggcggatgaagattttgatcgagatgtttataaggttgaagacctcgtggtgaaggaatctgccggggccctctacgaccggatgtggggtccgcacggtcgcgaggtggtcagggagcgggcggtttctttttatggctcag

SEQ ID NO: 41238 - DNA, 1302 bp, Zea mays
  Peptide Sequence Number=SeqID_84613
atgtcttcgcgctcccttatgcatcgtgtctttccaccttccgagcccccggatgggggacacccgcaatccttccgcgttgtcgttggaggaacgcaacttcgtggaagttggtacctttcagccatcgttcggcttcaaggattttcatcagtcagcccggctgcatcccctcgccggtggtcacccaagacggtgaccaccagcccctgggtggggagaagcaagccgggctgtgatcttggtcccaccctcagcttcaaggatgttcatcatcctcgctggggcggaggccgggctgagctggagctctacctcccgcgcgggttcgtgggtcagcctctccttcagcgttcgagggagagggcgctcactggccctgcgagaggggcggacttcgacaacgtggggctggtcgacggcgggcgtcgtcagcttcagcgtgttgggctcgccggcttggctcccggtgccccctcctgccgcgagggcggttgtcgcgccgcgcgcatgggaggaccgcccaagacgtcgcgcgctgctagggtggcgttcgtgttctggggtggcctgcctttgcaccggcggaggcggctcgagaaatcctcgtcgccgacgggatcaccgccaccatccgcgctccgggcctccggctctttgtacttgtcctcgcccctcgagcgccggcgtgggcgagggcaaggttgcagcggcgtccgccctgaggccatcgctgctgcagttcggccacccggagcgggggtcgttgtcgttgctgccggagcgagcgacgacgagccacccgtcggtcttctgttgctccgcaggccccccaatcactcgcctgttggttatctgaaccgcttcaccaagcgtgagtcgccccgtgcaaaggcgacgagtgaggtatccgtattccggaggggtagcggtgtcagcacggacagagttggctcgaaagaaggcttggtcggccagagcctggccgggtcgtccactggtgggactgacgtcggaattgagttgccgaggcctcgggccgggctaatgtcttcgggggacagctggccgaggcctcggggtgaccggccgagccgtctactcgagccggattcctggagaagaccctggcggcgaaggcctgggcgtggtgatggtgtcgtccttcagagtggagatcctcggaccgcgtcgccgtccgaggctaggtcggacctcgccgaaggtgtagttgacgccgagggtgctgctgctcccttcagctgtcaagatccgagcctgcaggatcggattatcttgtag

SEQ ID NO: 41239 - DNA, 1344 bp, Zea mays
  Peptide Sequence Number=SeqID_84614
atggtgtctcctgtgagctgcaagcgggtaatccgagtggacgtccgtgccccgtttgttgggggtcggctaggggcccagaggcacgcccaaaagtacctgcggcatctggcgcgccggttgcgtgacgcgtgggcctgggcctccatgctggcgcgttgtgagtcggagaagcgcgtccgcctggcgcggttgcatgccgcctgcatgactgcccgccccttccgcctgttggtctgggcaaaaggagagttgcctttaaaaggagggcgacccctttcggaaggcgaccatgtcttcttcctcccttatgcgtcgcgcctttccgccttccaagcccccggatggggggaacctgccgtcttttcgcctcatcgttggaggaacgcaactccgtgggagttggtacctttcagccatcgttcggcttcaaggattttcatcatgcagcccggctgcacccctccaccggcggtcacccaagatggtgacctccagcttgacggtgggggaaagcgagctgggctgtggcctctgcccctccctcggcctcgaggattttcgtcatccaggccaagatggaggatgaggcgagtcggggggctgcccccgcgtgggtcggctgcccttttcttcccctggcgtctggggaagaatggcatcctccagtttcgcggagacttcctccagccatgccggggaaggcgaactgttgctgcccagctaggatgcaacattccgccccctccctcgcattcgcggcgaggacggcagcgaggacctgccggtgcgcttaggagcggcctgctctttggctttaatagctggttcgcgtcccttgagcgggaacgcgaacgagagccctccggtggccacgtccaccccggaccatggctgctgctgcagaggtcgctggcaggtctcccgacgctcgtcgccccgcaggctcgaggttgctcatacccgcggggacggaaccagagttccgtttgtaatggcactttgaatgccaactcgcctgttgattatctgaaccgcttcaccaagcatgagtcgccccgtgtcaaggtgacgagtgagccgggttgtccgtcagcgggaccgatgccggagttgatcagccgaggcctcggaccgggctggcgcccttggaagatggttggccgaggcccctggggtaaccggccgagccgcctgctcgggccggattcccggagaagtccctggaccgcatcgccgtccgaggctgggtcggaccttgctgaaggtatcgtcgatgccgagggtgctacagcttccttccagcgtgaagacccgagcctgcaggatcagattgtcttgtag

SEQ ID NO: 41240 - DNA, 78 bp, Zea mays
  Peptide Sequence Number=SeqID_84615
atggcagtcggggtcagtgaggcattgtacaccaaggcgatagctattaagggttatggtataatagtcagggaataa

SEQ ID NO: 41241 - DNA, 240 bp, Zea mays
  Peptide Sequence Number=SeqID_84616
atggaggaggctcaccgaggaagaagaccttcaccggagccgataggaaatctgtcgattgccgaagattcaggggtccaatcgacaaaccgaatgcgccccgacgaagccctcgacaagacgaacgcaggggtaccctcggattccgtagacgatgcacggattgggagtaattgcttgccggagttgtcgctcgagttggaaccgctccgaacttcggcgagcaataccgggagctag

SEQ ID NO: 41242 - DNA, 624 bp, Zea mays
  Peptide Sequence Number=SeqID_84617
atggcgcccgccgcgaactgcagcgtcatcgtcctcgctaaactgatattccgcgccaagggtgatggccaggcaacggtgccggtggtgaacatgagccggagcaggatggctaggtgcaggcaggcggcttggctcctgtatcacgtcggggtcgacgcctcagcgctgctcttcgccgacgaggttgacacggatgggctaataatggaccagcgagttaacttgcttgtagtggggcaagatattttgaaatcaaaagctgaggttggctcagtttgcacaaccctgacccatacctattgtgaggatgcttatagcctgcttcaaaacttggacataaagaaacttctgcttgcaggtatcctgttagatacgaacaacctttccaagaagtgctcaaatagagattcagatgcagtgcagttgcttttgtttggaacctctgagcatatgaggcatgaattgtttcagcaattgatgcttgatcacaatgatcactcctttgttgagtatctgaagaacacctacagatattcaaccataaatggtatgaggacagtcctccaagcaaaaacatttcaacttcatcaatcaaggtctcccaagatgttaaaaatctaa

SEQ ID NO: 41243 - DNA, 189 bp, Zea mays
  Peptide Sequence Number=SeqID_84618
atggccgccaccgcgttcgctggggcgcctcgtctgtgcgtcggccatggcgccagggcgtctacgccgccgctccctccgcgatttgcacataggcccctgaagtatttaggtattaacctgcagtcctggttactggagtctgagtcattggataatttacgcagtagcccctggagtttctgttaa

SEQ ID NO: 41244 - DNA, 291 bp, Zea mays
  Peptide Sequence Number=SeqID_84619
atgcagagctcaaatgaaacacctagtaaaggtggaaaatctccaaagtcgtttctaagggaatgcagagctcgaatgaaacacctagcaaagatctctttcaacaatgtcgttaagtgcctcttcaacaacatcatctatcgtcctatgaactactttaagttcaaccaaaaaatccttcaactcggggtgtcattctccgaaatgtatggttccagcaacgttgggagggaaactgtgaagaaacgttcatgtcataaaagcacaaatgactacccgaagcatcgataa

SEQ ID NO: 41245 - DNA, 960 bp, Zea mays
  Peptide Sequence Number=SeqID_84620
atggcggcagcatccgccgccaaagctaacagcgtcaaggcgaaccagttgccggcgggcaacgggatcgggtacctagaagcgaagaaccacatgcttcttggctactgccaggacatcgtctactacctgctccgcaagaccaaggggctctcggtggatggccaccccgttgtacggagccttgtcgagattaggctgtttctggagaagattcgtccgattgacaagaaggcagagtaccaaatccagaagctcaccaatgccgctgacaatgcaactgctcgagagaaggcaggaaatgcagaggtgaaggggaaggacgggcattcggatgaggaagacctcctgatgtataggccaaacccagagatgatggacacaaagcctggtcctgatgggcagaattttgcatattctgtacaagtgctaaatgcaaaaattctcattaatacctgtcattcaaactcaccatttcctgaagtagacactgatggtgtttaccgtcctccaaaatttatgcctactagcatggatgatgaagagaaacgtcataaaaaagattcaaggagagataaagcgatagcccgagtggcaacagaaaatccttatattaaagagataattgatgatgctgcagatagacctgaagagtggaaggaaacagtgggcgatgaaagcagggaatttgggaggtacatgagacagagagaggagcaagagaagcaggaagaggagttgttcactcgggctcctgttactaaacgtgataagcagatggagaagcgcataaggagacaacttcatgggctaggaggcttaactgacggtttcgaccttgggatgaacatgctgttgggaggagacaaggaagatgatggcggttcaagcaaaccgcacggcaagagcggaaaccgaaagaagcatctgaagagcagcaagaagaggaagaggcattag

SEQ ID NO: 41246 - DNA, 339 bp, Zea mays
  Peptide Sequence Number=SeqID_84621
atggggatccccgttggggatttatccctgcggggaacggagatggggaagaaatgctctccgcaagcgttcgtggggatccccgtggggaaaaaatttcgtcgcggggacggggatggggagctattctccggcggggaattccccgttgccatccctacctgcaggctgcagctgcctccatccatgaccgtgtgcatccacgagctccacaaggctagcaagagatccttctacgcgggcagtaaggggaaaaagagggagagtgcttcgaagtcacccaggggtaccctgaagcaaacgagagtaaaactttgggaaaagcggccaaagtcttag

SEQ ID NO: 41247 - DNA, 258 bp, Zea mays
  Peptide Sequence Number=SeqID_84622
atggccgcagggttcatccgggcagtccgatgtctaagagctataccaatcaccgaggacaaagagaggaggctagaagatgagaacgaggctgaggatgccctccagttcctcgtcggtggtgctggtgccactgatgcgaggaccgccactggatccacgccgacgagccccacggtcgaggcgagcagtggctctggatcttgccccagcccagccacccgttcgaggaggaggggaccaaactccaaagtctag

SEQ ID NO: 41248 - DNA, 673 bp, Zea mays
  Peptide Sequence Number=SeqID_84623
atggcggattctccttgccagcagcaccccgaggtggtcttcgcagcccctacgccgacgtcccgacagcgacgcccacgagtttcaatcgtcgcggcgaaacctccccatacgctcaccacgatctccccaatattcgactctggatatggaatgctgtgctgggatataagcctgcggctggagaagtcccgccaaggtggcccactggtcaacggcttgcggcaagcacagctgagggcgtcaacacgagtgcgggtgaggctgagcgccagggatactatggctgggcgacagggttggagacgtagccaggaacgaggcagcgagtccgcggccgcccactccctctgccaccgtagaccggccagtggagccattcccaactccgtccagccctcggagaagattgtgcacacctccgtgaggctccccgagcgaggaatcggagtttacttcgccggagaggccagtccacgctcgccggagctctcaaccccgccggagtacgtggaccgggtaaaccactccaccatccttcgattccttgtgcacacggtcgctatgttaccccgtgaagctcatcatgccctcggaattgaaccagttcgccgtggtttggccgagtctccccgagccaaccccacccttcgccggacctccctcgccgccg

SEQ ID NO: 41249 - DNA, 189 bp, Zea mays
  Peptide Sequence Number=SeqID_84624
atggccgccaccgcgttcgctggggcgcctcgtctgtgcgtcggccatggcgccagggcgtctacgccgccgctccctccacgatttgcacataggcccctgaagtatttaggtattaacccgcagtcctggttactggagtctgagtcattggataatttacgcagtagcccctggagtttctgttaa

SEQ ID NO: 41250 - DNA, 982 bp, Zea mays
  Peptide Sequence Number=SeqID_84625
atggcgaacgggccaaaaacggattttcggccacggccgcgaaaacgggcacgtggaagggcacgggaccctcccgtggtccccccgcgtgagacgtggaagttcgggtgcacccgtgagggaaaacggaactccccgaagtcctgggagggggtctcctcggccgagccccgcaccccctcgcggcctagccgtggccggtcggcaccctaccgcgcccagctccggctggcgctgttggctgcctggccggccgtgcggctacgctggcgcatgagttgtcttggacccgtgactgcttggaggacccccgctgccgtgcggccgactcccggcgcccgtgtcccatcgctcgtgcgggcatcctgtgcctgctgcgttgagaagtgcttgcgtgctgctacccgtcccacgggaagccgtgctcgatacacgttgccttcgtcgagctcaccccccggggtgcggctcgtcggctcgagagcgcccgcggcgtttgcctcgtgccgccgtcggcctatggccggcggcaccgaggacacctcgctggcgcttttggtctcggatgtggctcacgctgaaggccggagacgcgttggcgtcacgcgcccaagaatcggtccgcccgaacgaacgacgtccagcccggcacgacgcctccgcgcggaggtcggcgctggcccgtctgcgaggacgtgctacctggttgatcctgccagtagtcatatgcttgtctcaaagattaagccatgcatgtgcaacgtcacggcgcgcggccggacattcggccctaaggacccatcgagcgaccgagcttgccctcggaccgcgaccccagaggcgtcctcagcgacggaccgggcccaagttctctggaaagggacgcctgggagggtgagagccccgtccggcccggaccctgtcgcaccacgaggcgccgtcaacgagtcgggttgtttgggaatgcagcccaaatcgggcg

SEQ ID NO: 41251 - DNA, 591 bp, Zea mays
  Peptide Sequence Number=SeqID_84626
atgaagaacgtagcaaaatgcgatacctggtgtgaattgcagaatcccgcgaaccatcgagtttttgaacgcaagttgcgcccgaagccttctggcggagggcacgtctgcctgggcgtcacgccaaaagacactcccaacacccccccgcggggcgagggacgtggcgtctggccccccgcgccgcacgacgaggtgggccgaagcaggggctgccggcgaaccgcgccgggcgcagcacgtgaggcgtcctcagcgacggaccgggcccaagttctctggaaagggacgcctgggagggtgagagccccgtccggcccggaccctgtcgcaccacgaggcgccgtcaacgagtcgggttgtttgggaatgcagcccaaatcgggcgggttcgagttggagcacgcctgtcgggacccgaaagatggtgaactatgcctgagcggggcgaagccagaggaaactctggtggaggctcgaagcgatactgacgatagctggagcccacacgagttctatcgggtaaagccaatgattagaggcatcgggggcgcaacgccctcgacctattctcaaactttaaataggtag

SEQ ID NO: 41252 - DNA, 492 bp, Zea mays
  Peptide Sequence Number=SeqID_84627
atggaggtggacgaggcgccggacctgaccgacttcatgaacgactggtttttcggcacggtcggggcgcggcacagcggcggcggcggtggtggtggcggcggcggcggctacgacctgactggtgagagcagcaagaggcctgcagcatcgccagccgcggggaacaagaagcagggaaaggggaaggggggcggcggcagcagcagcgcgagcaagcaaacgcaagattggctggaggaggcgaggaggatggtggggcccggatcgccggggcggaagggcgtcgggtcgccgtccaggcagctgcccaggttcgccggcggatctgggacggagcccacgccgacgctcgaccgccgggacccgatgtcgcggtccgctagaagattctctacacagtcagattctccccacagccagattctcagaaaagttagtcagaaaaaagctgaaccaaacaagccctatgaagccttgccaaatggttaa

SEQ ID NO: 41253 - DNA, 171 bp, Zea mays
  Peptide Sequence Number=SeqID_84628
atggcaagggtacgttccactgccagggttacatgtgacagagaagaagctgaagctgctgaaactgctccaatttccaaagtgatgaaacggtcggggctggtagcaccggaggatgtttccgacgaaggtgcacctgccgctgaagctgagcaggttggtgctgaggag

SEQ ID NO: 41254 - DNA, 504 bp, Zea mays
  Peptide Sequence Number=SeqID_84629
atggtccacatcgtcaagcaccatgatttcatgtccgaggacttcccggtggaggaagaggctgtgtcttccacaccacgggccaccaaccgccctgtgtctggtgctgctgctctccacggcctcgctgggagccatgaagcagtgcgtgacgatgtcgaccgtctgctcgacatggcgcattctggctcagccaggcccaggcctcggtcatcccggcatcaacatgaggcgtcagcgtcagtgcactcaccctcggtgagggccgcaccgactaaggacctgcgggcggagctcaaccacaggcgtgcgggagaggacgctccagtctctctggagaggtctagtgacctgcgggcagaactcaactgtaggcatgcaggcgaggatgctcgtgtctctctagagaggacgcgtgagcactggctaaacgtcgagggtcgcaaccgcgactacgacttcattgcggttgcaccgcaaactccaacgggcgcccagatttag

SEQ ID NO: 41255 - DNA, 1275 bp, Zea mays
  Peptide Sequence Number=SeqID_84630
atgtgctcccactgttatgtggcgttcccaccatttgaggtggctgaggatgatgaggacgaaggggccctccggtgcgctgcccgcatgagtagcgagcgtgatttggttgaggagtttattggttatggagtgtggcccctggcgcatggctgggtgcttggcgaagtatgccctcgccagatgcctactttaggccagcagctggtgcgaaatccggccttcgctttggatctacgtggccgagacccagccacgtttgtccgtgaagtggaggatggagctgtgaggattgtagggcggtatgcgtcgaggatagagagtctgcggagttgggatattcatggatgcaatgttctcttgaatcgggtcttcgagttaaatcgcttgccatacgatggttaccctggagacgacactgctgcggctgttgaccgccgcgggaaaaaggcagtggctgtggctgaggaaggcccttcgcgggaggctgccccggccgttaagaagagaaaaataggtactacagttggggggttgggggtctctgatcgttttgctgtggagttgatggggacatgtgtggccctcgggggaaggatgtcttcgcccgagctccgggagtcttcggtgcgaatgctgaaggttaccggaggtcgttggccaagaaacattccgattcccagggcggccggcgaggacatatttacgtctcgtttggcccgtgagatgaagatttttccttatggacggaatattgttgttgttgtatcggcagtgatggacaaggaccgtcaagatgcggcacggaagcgccgggcgtttgctagggttggggaccctagccgcgaggtgaagagggcgcggggaggcgcgaagtccaccgcccctagcagcggcaaaccaccaccggctgcgaagccgaccgttctcgggcccagcaagtattcggcgggtgcgagggctattgcctacggcgcaggcaagccgcccttggctaagcctacgaaggagcgaaggctgccgtcgccggtgcgcaccgacgaagcggcggcaggtggtgccgactttgacatggacatctgcgtggatgattacctcgttgggtcggatgcggggcagctggctgttgtcccgggttcggtggtggccacttcgcttatggtggcggttggagcgaagggtacttcgcaggacccatggtccaaattctgcgccagcggcgagatttcgtcggccgccgccgctaaagacgtggcgggctctgtgtcccagtag

SEQ ID NO: 41256 - DNA, 459 bp, Zea mays
  Peptide Sequence Number=SeqID_84631
atggctcccagcgaggccgtggagctaggagggtggcacaacaattccctagctgcagacagcgccctaggcgcagcccttgacgccctggacgtttgcgtaggagtgtgctaccgcgtagagtgcacagcagcagcaccagacacagggcggttggtggcccgtgctcaagggggcacgtacaagggtgttgagccccgacatgtgggcccaggggcaaaacggaaggaaataactaatgcctgcaacacctgggcgatctccgagcaccataatgtccgtagtgcatatagtattgatatcccacgctacttccttgttaacgcgcgagtcatgatgagtgtagtacacgcgacaacatgggcgtactgcctgccaatggaatggacaggcacgccgcctgcaggatggcctggtcgccgcccgtcagcggagtggacagggctcattaaatgttga

SEQ ID NO: 41257 - DNA, 381 bp, Zea mays
  Peptide Sequence Number=SeqID_84632
atggcccttcccatagtgatgacaacttgtgtcatccttcccccgttagaattgggtgaaggaccaagtctcccactgcaaagcaccggtgccgcacggcttgatcatgataatgcctcaagcacatcaatattctctagcctggtaacttctacttcggctatgctttcgaaggtcaacctcggcaccccgaatattaggtcgaagtcgaagaattcagaactggtgaagttggaccccaggtcagttatgatgctatttggtatcccaaacctgaatattatgtcttgtatgaactctattgtcttggctgaggttaaagaggcaatgggcttatactctatccattttgtgaacttgtcaatggcaaccaacacgtga

SEQ ID NO: 41258 - DNA, 1749 bp, Zea mays
  Peptide Sequence Number=SeqID_84633
atgaggatcaggctcaagacaattaagatgaagatcaagaggatgagccacctcaagaggaggacaatgatcaagggggagatgaagttgatcaagacaaggaagatgatcaagagatacagggtcaaagaccaccacacccaagagtccaccaagcaattcaaagagatcaccccggtggaggatgcactaagagatttggattgggtgttggcaatgcaagaggagctcaacaacttcacgaggaatgagaggccttacgtcaggctccgcgcgttggcttacgtcacgggcagtaggtcccgtggtagcatcgggtctccgcctgagcggggagcagaagcgtacacggtatggcccgaacacgtgtcggccccggacccccgactggccttgatgaaggcctgggtattctttgtcctagaatcccgggaccctgctgtgagtggctcggaccccacgcagagggaccccactgttgataccttggagtatagcatcttctctggccacgtggcggcctcggagccatccacatgggtaccgacagtggcccccgagcccacctcaggggaggatacgagcctgcaggtggggccaaagcttgactggcgattggcgcgctgctttcgtgtgcttgctgacgtaatctctgccaacccgtcttcggtcacgtcgtctgccatgtctgtccccgtggctgacagacccgcggcccccacgcctgatggtttcgccgggccacgcgcgaggcgcctcgataccgctgcattggttttgaaattcaccttctctgtcttctgcggcggccctgaggaggcgcagtactggcgcgagcggcggttcactctttctgcactcaggaatcgacgctcaaggatcgccatggcctcgctagctcatcccgagcgcttccagtctgagggggcactcaacttggtgcgcaacctgctcagatggggtgcgccggcgttcgccggaaggatccacgccggtgcctctcccctcggcgatctcgctgccggggagttcgtgctctttgtctcctacctctcctgcgggctggcgctgccgatcttgccttccttcttgctgttgttggaggagctcggcccccagcttcagcacctcacgccccactccatcctccaggcggccatcttcgcccacctctgcgagatgttcctgggagtggcgctcttccgccagtgcccagatgaaagcgagttgagctatgactccacccttcgcatgaactccatcgcctcctgcagcggccttgtcagctcctccctgaacttcaccagcatctcgtggtacgccaccatgaactggtccagctccggctccgtcgcagcggccaggccgccaagcatcgcgtgctgtcgcgcctccacctcctgcgctatctctattagcctcgccgacacctcaggtggtgcccccaccttgttgcattcgaggctcgacgtgtcgaggctgggtaccagtatacctaagaaagagttggcaacggcccccaggagatcacagctccaaatactagggcacccgttgcaaagtggtgaaggtgcaagcttagggataggggtcccgaacaacaagcctggcttactcaattcggatgtcatcataccagcaagggtgggatctgtatgggtggaccaacaggccgggcttatgagggtggacctcactgggctggcgtacacggattgggaagaggcactcctccacctgctgccgtaa

SEQ ID NO: 41259 - DNA, 279 bp, Zea mays
  Peptide Sequence Number=SeqID_84634
atgtggttcgcaatcaataggttaatccaagtggaggacgaagaacaacaagaatctttggaaccaggcctccagagtgagatacctataactctagttcgaagagatgatcaacatattaaccagcaatgcatgtcgtcccgttatcggagcgttcgtgccgtctcgtggaggccagatccgcaagtctacgctaggcggtggagccagaagccagttccgcgagctccccttcccccttcgccgaataagcacggcaagctcactggatccctttga

SEQ ID NO: 41260 - DNA, 855 bp, Zea mays
  Peptide Sequence Number=SeqID_84635
atggaggttcgttgccaaaccagcttttgccagaatgaagatggtttcctcaagttactgagagcatgcacagtttgcctcggaatcaggagccaaccagagtgtgatggtcgtgaattcgtcaagcatggcacagagaagtgtgtcgtgactgtatacattggatccagtccacaccatgtggaatggagtgtcactactactgggcacagattcagagacacctaccaagtcgtcgctcgcaaggcattgagggccctgtgtcagatctatgaagaagaagtggccgacacaccgctcagattctttccgccctttcagagaaaccgtccagtttggatggccaggatgcgtgcattggaagagcagcagctgcttgaggatgaccccacaatcgttatgatttctttggctcggcaccaccgtcagatgattgcccgagtagaagatgcagagaagctcaaccgtaagctgcatgtggatctcacctcagcccaagcccgtgtagctgccttggaaagtcgtgaagccattgctgttgaagccctgaagcaagccaaggatgagcacgtccagaatttgatggaggcctacttggtaacccataaccaacgtagagccctgcagatccaagagcctgcttcatccaacccagttcaatctgtcagagctgaagatccccagattcttgaaggtcacccggtctctatcagaggagagaagaaggcttgggaactcccggaaggaaccatagtcttggaaggaatttcagtcttccctcaggctatgaataagcaagagcacccgagtcctcccaagattccccgccagagttgtttgggcccctcaccatga

SEQ ID NO: 41261 - DNA, 2184 bp, Zea mays
  Peptide Sequence Number=SeqID_84636
atgccgcccaagcgcgcgtgccgcctggcgctgctggccgcggcggcggcgtacctcctcttcctcctcctcttcgagctgccctccttctccgtctccaccgcgtctccccgcctcgcccaggccgccacgcgccgcgagctcctccgcgcctcctccgcgcgctccccgctccgcccccgcaccagcgccccgctcgccgtctcctccgtccgcgtccaccgccgcgccaccagctcctcctcctccgcctccgccgccgccgccatatcatccatcgacgcctcggccgccgccgccttcgccgccgcggcgccgcacctcgcgcgcctcctctccgcccccgctcccccgtcctccgccccttcgccgtccccgaccgcggccgcctcggcctcctgccccgcgacggtctcggcgccgagggaccagctcgcgagcggcgcgggagtcgcggtggacctgccgtgcgggatggcggtggggtcgcgcctcacagtggtggcgcggccgcgcgccgcgcgcccggaggtcgcgggagcgggggacggggccgcgccgccggtcatggtgtcgcagttcatgctcgagctccttggcaccaaggcggtgcagggggaggagccgcccaggatactccacttcaaccccaggatccgcggggacttcagcgcccgccccgtcatcgagctcaacacttgctaccggatgcagtgggcgcagccgcagcggtgcgaggggtggcagtcacgcccggacgacgacactgttgatggggaactgaagtgtgacgaatggattcgtgatggtaacaacgagacacaagaatcacggatgaaacggtggctgaaccgtttgattggtaggccgaaagtcaatcggccatacccatttgcggagggcaagcgatttgttttggtcataacagctggtttggagggctaccatgtcaatgttgatggccggcatgtcacgtcattcccttaccgcaccggctacaatcttgaggatgcgacacaattgtctttgaaaggagacattgatgtcgagtccgttttggctggttcattgcccacttcacctcctacttctgcaacaagaagttaccttgagatgtctaaacagtggaaggcctcacccttgccaactgaacctgttgaactttttattgggatcctgtcatctgctaaccatttcgccgagcgtatggcagttcggaaatcatggatgatttctaccaggagatcatctgattttgatagcaattttgtgctcaaatctaatggtaaagaaaacaattcacagaatggaagaaacgaggtcaatgaagagctgaagaaggaagcagattactttggggacattgttatagttccattcatggataactatgaccttgttattctaaaaactatcgccatcgttgagtatggggtgatggttgttcctgcaaagcacataatgaaatgtgacgatgatacgtttgtcagaattgaatctgtattggatcaagtaaacaaggtcccacgtggaaagagcatttatatgggaaatataaactactaccacagacccttaagatctgggaaatggtctgtcacatatgaggaatggccagacgaagtgtatcctccttatgctaatgggcctggctatgtcatttcatcggatattgctcaatatattttatccgagtttgataataagacattaagattattcaagatggaagatgttagtatgggcacgtgggttgagaagttccatacgactcgtcagcctgtagagtatttgcatgatgtcaggttctaccaacctggttgctttgatgaattgaatgctagagcttcttgtagtagttgggaagtggaaaacttggatgcaatgaatggtggggtggaggcaaatcagatcgccctgtttggtgatgaccagcgggttgatttcgatcaacgccaggtcgcgctccatgataatggtcgccaggcccatgaagattttggtgaactgctgaaccagtttaccttccagacccagtttgaacgccatctcgcgtccctgatacggcatcgggccagtcagcggatcaagcgcaactttatggatcaggtgcggagtttcttccgccactttttcgatttccacgccgccttcggtggaggccataaagaccacacgacttga

SEQ ID NO: 41262 - DNA, 243 bp, Zea mays
  Peptide Sequence Number=SeqID_84637
atgcatgatgactgcggccttgagcccttggcaacgacgcggccccagctcgcgtcttcgggagtctggctggcgggtgacggcgatagtacagtgaacccatacatcgacgcctcgtcgggttcaagacctactacttcagcggcgctagcgctgcttccgattgtggtgtgcatccttggcggcgagcgccgacaagctaatttgagtgtaggggtggaaatttggctcggcctcgtctaa

SEQ ID NO: 41263 - DNA, 1971 bp, Zea mays
  Peptide Sequence Number=SeqID_84638
atgcgaaggccgtcgggggccggcgcgccgtgccgcagccgcgcgatccaggtgctcgtggcggtctccttcgcctacgcgctcgccgtgctgctcctcgagtcgccgttcgtgtccacgtccctgctcggggcgggggcgtccgccgcggcttcgcggaagctccacctcgccggcgcgtgggagggcgtgaggcgcgccgtgccggcgcgccccgccaaacacccgcacagggagaccctctcgtcggacgcggggcgaggacgggcgcgccggttggcagggatcgtctctggcctcgagctctgccacctcaactccacccgctccggctcgctacgcaaggtcgccgccgaggctgccgagtcaggggcccgcgtgttctccgacctggaggctctagcgacggccctggcgtcctcgcgtgattcgtcaggggaggaagagaagagcaagtgccctcactcgatcgtcctcagcggcgacgagttccgggagagggggcgggcggtggagctgccgtgcggcctgacgctgggttcgtatatcacggtcgtcgcgacaccgcacgaggcgcaccctgagcgggatcctaagatcacgctgctcagggagggtgaagagccgatcatggtgtcgcagttcatgatggagctgcaggggctcaagacggtggacggcgaggatccgcccaggattctccacttcaacccgcgcctccgcggcgactggagcggcaagccggtgatcgagcagaacacctgctatcgcatgcagtggggcactccgctccgctgcgaaggctggaggtcacgtgccgacgaggagactgtggatgggttggtgaagtgtgagaagtggattcgggatgatgaagggcggtcggaggagtcaaaaacgtcatggtggctgaaccggcttattggccgcacaaagacagtctccgttgattggtcatacccattcgtcgaggaccgcctgtttgttctcactctcactgctgggttcgagggttaccatgtgaatgttgatggacggcatgtgacatcatttccataccgcactggatttgttcttgaggatgctactggcttatcattggatggggaccttgatgtgcaatcagtgtttgcggggactctgcccaccacacatcctagcttttctccacagaaacacctagagatgttacccagttggcaggctcctccccttccagacgaaccagttgagattttcatcggtatcctgtcagcaggcaaccattttgctgagcgaatggctgtgagaaagacatggatgtctgctgctcagaagttgccgaatgttgtggcccggttttttgttgccctgcatggcaggaacgagattaatgcagagctgaaaaaggaggctgagtttttcggggacattgttattgtgccattcatggatagctatgatttggttgttctcaagacaattgccatatgcgagtatggggtccatgttgtatatgctagatacataatgaagtgtgatgatgatacttttgttagacttgattcagtaattgctgaagtgaagaaaatccagaacggtgaaagtctctatatagggaacatgaattatcgtcataagccattgcgtgatggtaaatgggctgttacttatgaggaatggccagaagaggattatcccatctatgcaaatggtcctggatatgttatatcctctgatattgcagactccattctatcagaatttttaaaccttaaattaaggcttttcaaaatggaggatgtcagcatgggcatgtgggtcgagcggttcaacagcaccagacttgttaaatacgtccacagcgtcaaattttgtcaatttggatgcatagatgattattacactgcacactaccaatcaccgaggcagatgttgtgtttgtgggacaagctgcaggctggaaaagctcaatgttgcaatatgagatag

SEQ ID NO: 41264 - DNA, 552 bp, Zea mays
  Peptide Sequence Number=SeqID_84639
atggaggggcacgctacgccgcattcctcccccgcagccgcttccttcgcccacacgctcgcgggttcggaatactccgaggatggtcttggaggcgaaccaagtgcgacggtcggcccgccggagaagcaaaggagaaactgcttgaggataggattcaagatgagcagccatgatgccaaagtactgcaacacttggtcctcaatcttgcagactcagtcgaaactggtgcattgaatattagaagctttctagaagaggctttcaggcatttgggtgacaagcattaccttctgaatgcactacttgcaattcgaaaggaggtagacctgatggagcaggatgccctagagagcaaagcaaggccagacccagagaaggtgaggatggaggaagaaattaaagttgtggagcatgtggacccagtgggtagacaatttcctttcaccccccttcctcaccagaattgtatgaggccagtgacaatgactcttatgactcggacatgtccactaggtatagcatttagaacctgtaaatgtggtacctag

SEQ ID NO: 41265 - DNA, 603 bp, Zea mays
  Peptide Sequence Number=SeqID_84640
atgcctatcctaactcgttggaaagattacaaggacgaccagaaatactacaacagctttgtgtcacagctaaatgggcgcttgtccgttaacactgaggacaaggcaacaaaggaagcttgcaccgatatgctacgctctgcggaaataagtgcaaagaacaagcagaaccgcagtcaagtcaagtttcatcaggctacgggttctcgctgctatgtggcacacttacatgcatataagcagaagagaaaccgagaagaacccagcttagaccagactgaagaactagatgcggtggacgccttcaagacctgtcataccagctccaaacgtggcctgagtgaaccggcaagagaagcactttctcatatggaggctttgagggctgaacctgttgctgaagctgaagcgacggctgctgttcaaggtgaactcgaccagctcaggaagaaatgtgaagaagttgaggaacagcaggcgaggacacaaagggagttggaggagtacaagaagataacagagaagaacagcaaggagatggaggagaccaatgtgctcatcaagaagctcttgtccttgcatggtaactcttcttcgacatga

SEQ ID NO: 41266 - DNA, 870 bp, Zea mays
  Peptide Sequence Number=SeqID_84641
atgtcttcttcctcccttatgcgtcgtgtctttccatcttccaagcccccggatggggggtatccgccgcctttctgcctcctcgttggaggaacgcaactccatgggagttggtacccctcagccatcgttcggcttcaaggattttcatcagccggcccggccgcacccctacgccggcgatcacccaggatggtgaccaccagtttctgggtggggaagagcaagccgggctgcgatcttggtcccaccctcagcttcaaggatgttcatcatcctcgctggggtgggggccacgctgagccggcgctctacctcccgcgcgggtccgcgggtcacccttttccgcggcgttcgggggtggaggcgctcgctggccctgcgggcggcgcggacttagacaacgtggggctgatcgacggcgggcgtcgtcacctccagcgtgtcggagtcgtcggccgggctcccggcggcccctcctgccggagggcagccgccgcgccaggccggtgccccactcgtctgggaggatttgagtggggatctgccggggggctggcgtcccctgccatcggcgccgaggcggaggcggctcgagaagtcctcgtcgccgacgggatcactgccaccatccgcgccccgggccactgcgccggcgtacttgtcctcgcccctcgagcgtcggcgtgggcgagggcaagattgcagcagcgcccgcccactgtcgccgtagtcagaacgggcggcggcgagccgctcaaatccctcggctcgatcggccttgttgtctggggctcctctagcttagttaaagagacccctcggctgctcttcgatgagccgaggccaggggtagcgatatcagtatga

SEQ ID NO: 41267 - DNA, 558 bp, Zea mays
  Peptide Sequence Number=SeqID_84642
atggcggtgttacagcagggggtgagcgatggagcgccagagcgctggcgcctgacgggtggggccccagcaaggccgggcccgctggtcagcggcgcagggcaagcacgaatgcacgctgacggacggggcctgccagttagtgacatagagcggagggggaggggcccgacgctgcgcgtggtactgacgcgagggaccagcggtccacaagtcagtggccgcgcgagggagaagaaggtggagggagggattgcggctgcctggtgggccacgatcatcaaggtcatcttcaaccccgagacggacgcacagccgtccatgcccgacgatgagggggccttctccagggcatgcgggctgcggccacagcggtggagtcaccaggcaacacagccgcgacgaagggaggaagaaagaaggtcaaagaagggtggagtgggctcaccgctaatgacaccggcgagcttgatggcgcgctgcttcggcagcgcgaacgttgatggtcggcgggcgacagcaatgaccaaggcaaggacgacgacgtggggtggttag

SEQ ID NO: 41268 - DNA, 624 bp, Zea mays
  Peptide Sequence Number=SeqID_84643
atgacccaagagcctcatcccctacagccaggctggcgttcgctggattctgagtcttttggatatagggctgaggatactatcgaggcgattgctcttcacggactgaccaccttctgtggtttccaccccttggagctgtccactcaccccattggtttgttccccgcggagaaggaggacgacccaatgtggaaggaccgagtggagcatgccaaggatatatgggctatctacccatgtcagactgctcacttgacggtgcggtgcatgaatgccctgtatcatctgcaagtgatgcgaggagaggtcatgtctcatctgatggcactgttggaggctaccaagatcaccttggataacagggaggaacttatgcttgaggagctagtgggcaccagggagaacaccatcgaggttctcgaggatcagctaatcaacactcagcagcagcttgcggaggctaaccagcatctggatatgcaccaccaggagatccaggacatggaggccaatgaggatgtcgacatcgagggaggagaggagcctgcctccagcttggacactgctggctcagggagaccaccttcccccgagtcgagtgttgcctcgtttgctcactag

SEQ ID NO: 41269 - DNA, 381 bp, Zea mays
  Peptide Sequence Number=SeqID_84644
atgaggcggcgagcggtaagggtgctgagccccaataggggtgggggaaccatcctcctaatggcggcgctccacgcgctcaacacacagttccgcaatcttcgcccgagccttgcccaactcgtcaagggcgtggtccagctcggtgttgagcagagcgaccagaaggcacctctagctgaggcgcaggggagggctacctcccaaactccacctcttgctgaggcgagggtgaagagtgctcctactcttgctcatggcgtcggcgctaatgtcctcgtgcaggcgacagtgcaatccctccaggtggctcgactgtcctatcaccatgcggcacagtggaggttctgcatggcgagagggaaagaaagggatcactga

SEQ ID NO: 41270 - DNA, 342 bp, Zea mays
  Peptide Sequence Number=SeqID_84645
atggcggcgctaggttttcctagaggggccatggagggctccggttttatacccatggggagaatggagtccgtgcaggcgagaatcatgcggccgaggaaccagggtggtcatgaccggggatctcgcgtcgagcgccagccaccccgcgcgacgcggacgattctgttgaggaaggggcatcagaccgcatgggcccgcacgacaatatggtgttcacatgaaatgataaacatgagtaacacatacagatatcgagccataaactttctcattttagactctgcttacaagatctcggttgttactagtgtgggggtaaatatgcttattaggatgtaa

SEQ ID NO: 41271 - DNA, 435 bp, Zea mays
  Peptide Sequence Number=SeqID_84646
atggtcttccttgcttcatctagcgacgatgatgtcgtccacatacgtaaatatgtttctgccgacttggctctcgagcaccattttggtgagctgagagaatgtggacccagcgttcttaagtccctccggcattctgatgaagcaatacgtgccaaagggtgttatgaaactggtgcttgccttgtcttcctccttcatatatatttggtggtcatggaattaccactagacgcgcagagcagcggaagacgtctcgatgtagacgaacgtgtcgagcagtgccgtgcagtcgccggcgtccttcacgtcctcgcacggttcgtccaagtgctccagatgcagcacctccgaggtatccacacgtacagggaggaagcgccgcgtaccgaactgctaggttcgcgacggcggcttggcgagggcgagaggtga

SEQ ID NO: 41272 - DNA, 540 bp, Zea mays
  Peptide Sequence Number=SeqID_84647
atggccaatcccatagacctctaccgaggaggcgaggcaggtgcaggaatccctcgcctgaccgccatcgcagcaaaatcaacccaaggacctccctacattgaccactcccctactgcccttgcccctttcagattcgaggccacgtcggtgacgcaacctcgggtcgacgacagcgacttccatggcccgcgacggcaatccggccgcggcatcgaagcccggccacacttccgctgcgagaacacggcgaggatcgctgcaccccgctgtgcccgctctcccgcgacgcgagccaagctcaacggtggtggcaacaagaattccgcggcggcacccttcctcacactgctggaatggcgttcggggaagagggatctgggcaaattgcgttggcacggtattgcgaggaaggggataaggagaagaggtcgcggcctgggttttagcgaggacgagcctagccactccgtttccgaggtcagcgcggatcctggagaaccggtgaaggagttcgcgcccgctcggaagttccgttga

SEQ ID NO: 41273 - DNA, 453 bp, Zea mays
  Peptide Sequence Number=SeqID_84648
atggcgggaaaaaccaagcagtccctccctgaagcgcccccgcccagattcgaggccacgtcggtgacgcaacctcgggtcgacggcagtggcttccatggcccgcgacggcaatccggccgcggcatcgaagcccggccacacttccgctgtgagaacaaggcgaggatcgctgcaccccgatgtgccagctctcccgcgacgcgagccaagctcaacggtggtggcaacaagaataccacggcggcacccttcctcacattgctggaatggtgttcggggaagagggatctgggcaaattgcgttggcacggtattgcgaggaaggggataaggcgaagaggtcgcggcctgggttttagcgaggacgagcctagccactccgtttccgaggtcagcgcggatcctggagaaccggtgaaggagttcgcgcctgctcggaagttccgttga

SEQ ID NO: 41274 - DNA, 654 bp, Zea mays
  Peptide Sequence Number=SeqID_84649
atgcggagttcgtcgtcttccggggctgagcccgagtccgagccctggggtcgggcgatgcggagttcgtcgtcttccagggctgagcccaagtccgagctctggggttgggcgatgcggagttcgtcgtcttccagggctgagcccgagtccgagcccttgggtcgggcgatgcggagttcgtcgtgttccggggctgagcccgagtccgagacctggggtcgggcgaagcggagttcttcgtcttccggggccgagcctgagtccgagccctggggtcgggcgaagcggattttcctatggcgcctgaggccggacttggctgttttcagccttactctgtcgagtggcacagcagtcggagcggcgcaggcggcgctgtcctcttgtcaggccacctttgcattaaatgctcctgcgatacggtcggttggcgtggtgacttggccaaggttgcttcttggcgaagactgggcctcgggcgagctaaagcatcagacgcagcgatttctctgcggcccgtttcgtcgggatcttccgcagcgttcggatctcgccaactctctcgtcttcctcgcgtggtcaacgttcccgtcgggctcgcaacgcgacccgcgccgcactgttcctcttccccttctcaatcggagctag

SEQ ID NO: 41275 - DNA, 446 bp, Zea mays
  Peptide Sequence Number=SeqID_84650
gaagaccaggggaaaccctccgggaagttcatctcccgcttcaccaaggtacgagcagcgaccggaggccagggcgaccacaacaaatgcccgcgaccgcagaagggtagcagcggttcatgccctgtgcacccgcatggtcgccacagcgccgcggagtgtcacgagatcattgacctcgcaaaacgcgtcagcgagcggcgcaagcagtcctccaaagatggctccccgcatcgccgccggcccagcaaagagaaggtggacgacggtgaggtagctgcggctgagcgggacctcgggtatcagtcgcccgagggggacctgaaggatatcttcaccagaggctcctactccgatgggaaccctaggttgggcttagccccacgtcaagtaccattccaagaggggctctgcaactctcccccagctgggaaggacccttcaag

SEQ ID NO: 41276 - DNA, 414 bp, Zea mays
  Peptide Sequence Number=SeqID_84651
atgggcggcgggcggtggcggggctctctgcacgtgtgggcagagcgagagagagggcgagcgagtctggcagagggcgcaaatgggcgaggggaggtgggcgagcggggcgcggggctcaaaaggggcgagggggctcggacgtggctagagaacgtgcggtcgtgggcgcatccacggcggggagatcgtgggcgggaggttggggacgagatgacaggtggggacggtgggacagagagagggagagcgggtgcacgcgagggaaaccgcaccgacagctcggacccacggtgcagcgagagagagagggggggaagagagtgcgagcgctcagggttgcgccgacaggcgggacccgcctgtcaagcagagggggtgcgcgggcgcgggtgcgcgcacgggctgggctaa

SEQ ID NO: 41277 - DNA, 690 bp, Zea mays
  Peptide Sequence Number=SeqID_84652
atgaatggaataccgggaggtatgagattcatcaaacatttgaacaagggcagaaacaaacctccacgtgttcgacgcgccctggcatcaccaaagcaggccccggcgcccgaccccgcgcgcaccgcgccgcgccaagcccaacctgtgcccgcgcccgcgcccgcgcctataaagatagccaaggcttcaatcgtacgcccccgctcgctctcaacctcaccgaagcgccaaatcactggcgtttgctctgcgcacggcgtgccagcggccacccgagacccgaccaccgtataccggccaatcgagccattccccgccccgtccgacgtccgaccctcgatagagtctccatgtgtctcggtgaagctcccaaagccgggaatcgaactctacctcgccggagacaccgattcaacgtcgccggacttcaccagatcaccggcgtacgtagaccgagctccacggccggagcacacgccgccgacgagcccgaccgcctacgcacgtggcccgactgattccggccatcaccgacgacgagccgtacctcgacgtgactgcaaggacttcccggagctaaccctgtccctcgccggacctccctcgccgccggagccagcaccagagtctggcatcgaggatctgtctgccccagctttggaaggcaagcctcggttttatgcgtaa

SEQ ID NO: 41278 - DNA, 432 bp, Zea mays
  Peptide Sequence Number=SeqID_84653
atgtcggtcgacttgtggtgtccaggacacacacttgtgcgaggacatggtggagtggaccgtgttgctggcgtggtcgaggattggcgggacacgtgtctgatcgtggaggatgtgcacgaggtgcggtgctcacggcaggtttggtggtttgggcctcaaaaccacccagcgctacggatggcgggttttgctgagtttgggcctcaaaactttgtggtggcggttccagagggaactggtggcggcacgcgacatgatcgcagagggtgcgtcaaggcgaagcaactccgtgtgaaggacgtggccatcggatcaaaaacctatgagttggcccatttcgcccccggtggagtggataggctctatgtaaataggggtagtttaagaagtgagaataaccctgtacaaatagaggggagggctggttag

SEQ ID NO: 41279 - DNA, 168 bp, Zea mays
  Peptide Sequence Number=SeqID_84654
atggatcctaagggcaaggggatcgtgatcaatgacaaagatgagaccctcaacattgatgacccaaaaggtgataagatcatcgactcaggctcgaacaacaagagaaaggcggaggggtacagagagtttgaggctgttggatctacatccagtggtctggattag

SEQ ID NO: 41280 - DNA, 114 bp, Zea mays
  Peptide Sequence Number=SeqID_84655
atggcgacagtagcgtataccctccgtggcaagaggctggacggtggtgaatctgtgctctcggttggcgtgaactcgccttaccttgactccctcaagccagcatatccttga

SEQ ID NO: 41281 - DNA, 471 bp, Zea mays
  Peptide Sequence Number=SeqID_84656
atggacgcgatgaagacgctgcatgcgctggtgttcgaactcgccctggccatggcgcttggcttctccagccgcgcgtggcacgcgctccctgccagtgtcgttttctgctctgccgttggcacaacatcgtctgttgttgctagttggtgcaacgttgccgtccttcgacgccatgccttcgagccgattataattttggaaggagatttggtgctgaagccgaagcctacagcccccttattcttcatcgtcgatccaagccgcttccccgacgtgcctgtcgatcccgacgatctatcttccaattgcgcgccacttgcgttgagctctgaagccctctgtcgtgctcgaccttggaggcctccaactcgtcgacatcccttgcgtcgtcgaaaaatcccgagagtttggataaagcaacaaatcccatgtggtgtttgccgggtgctcggcaaaaggcatgaataa

SEQ ID NO: 41282 - DNA, 201 bp, Zea mays
  Peptide Sequence Number=SeqID_84657
atgcaagatgttgtcttcccagttgagattatggggaagcgcatcaggtaccgcctggatggtgccaaggtcatcgagatcttcgtggacctaaaggagaggaacaacaccgaatacaagctaatgacctacactacggtctaccgcaggctgtgtgggaaagatgtggtctttgagtacccaatgaccgatatttcataa

SEQ ID NO: 41283 - DNA, 306 bp, Zea mays
  Peptide Sequence Number=SeqID_84658
atgccccgactggctggcccggcacagtcagcaggccgtcgtgccgtgcctgggcgggagatgcggcccacggactttgggcctagcgggtccatgacaggccgcccgtttgaccatctatatgcggaggggtgtggtttgggacgtggaggatgtttacagtttctcgggcagtcattatgggcacagcatttgccattgttcgtcctaagtcaattagccaaaccattttctcttgatcggcaggctaaggattgcatacttcaaagagtatacaaggaaccatatttgtcttccatgaaatga

SEQ ID NO: 41284 - DNA, 1578 bp, Zea mays
  Peptide Sequence Number=SeqID_84659
atggactccatggtgtttgaggttgctgaattggatggagcagcaatgtcggtgtttcgaccccggggggtccctggaccgacgagtaaattgtcgctgcgtgtcccagcccaaatgggtcggcacgagacggaacacaagagggaaacagtaaggggaaaccacggcctcgtgttgtcctgcgcccagggcggatgcgcttgcagtagggggttacaagcgttcgcgtgggagagagagagagcgagagccttgtgcaccagcccgttctcccgcgcggccaccttctcgtacgagagccctggaccttccttttatagatgtaaggagaggacccaggtgtacaatggggggtgtagcaatgtgctaacgtgtctagcaaaggggagccagagccctatgtacatgccgtcgtggctgtcggagaggttttggcgccctgttcatgtgatgtcgtggccgtcggaggagcgcttgagccccgtggaacctgagctagctaggggtagggtaatgatgcccccctgtgatgtggtcggtccgagcccgaggtcgggcgaggcgaaggctcctccgaggtcgaggctgagtccaggcccagagagaccgtctttcgaggtagaggctgagtccgagctcaggggttgggcgaggcggtgtccgtcttccgaggtcgaggtgcagtccgagttctggggtcgggcgaggcggagaccgtcgtccgaggtcgaggttgagtccgagccccgaggcctcaccctgatgggtggcacaacagtcggagcagcgcaggcggcgctgttttcctgtcaggcgatcctcgcattgaatgctcctgcaatacggtcggttggtgtagcgatccggccaaggttgcttctgcgcgaaacctgcccgagctgggcctcgggcgagtcgaagctttgtgctgatgggggttaccagctgagattaggagtcttggggttaggttccaagttctcgggctggtatgttgacgctgtcaacggtttggccggagctgggtttgcgagagcagcccccgagcctccgcacagaggcgccgaacatggggtctcccagcacgtcgtacgccgtgagagcggcactcgtgttctaggacggtcccattctcgttttcgtgacgaggacgggagtgaggacctaccggtgcgctttggggcggccggcgcccgctggtgcggtgttggtgggcaggtggacgccgccgccggtgctgaggtggtggcagctggagaaagcttctccgccgacgagaccgtccgcgccacccgcggaccgacctccggctctttggctttaatatctggttctcatcccccacgaggggacgcgaacgagagccttccggcggtagcgtccgtcctgggaccgtcgctgctgctgcagaggtcgccggcgagtcgcccggagttcgtcgtcccacaggctctccgatgtggaggttgttcatacccgtgggagtggaaccggagttccgtttgtaatggcaccttgagtgcccctgtctgttcattgtggctgtcggggcctgaacatcattgtatttgggcgtaa

SEQ ID NO: 41285 - DNA, 741 bp, Zea mays
  Peptide Sequence Number=SeqID_84660
atgactaccagccttgtggtggagagaagcgagccgggctgcagcctccccctgccctcagcttcaaggatgttcatcatccgtgctggggaggagggggagaagggcgttcgccagccttgcgaaggaggcaaacttcggctacgcggggtcgaccgtctgagtcgccgtcagctgccacgtgtctggctcctcggcctggggggctttggtgccgcctccggcgctgcctcctgccgcttggacggggcgtgcctgtccgtccatcgcacgggcgacggtcgcgccgtgcgcaggtcggccacacccacggcttctcccgcgtcgccggccacctcgggggggtcgtacaagacgtcgtacgccgtggggggcggtggcagcgttcttggatggtcttgtcctcactcccgtagtgaggacgggagcgaggacctctttgcgcgcgcgttggagtggccgccgttcgccggtacagcactggtgcgcaggtggtcgttgtcgtcggtgctgaggtggtcgccgccgctggtgaggctccccactacagaggtggttgcctccgctggcgagaccgtcagtgccacctgccgccggacctccggctctttggctttaatggcctcgttgttgccccctataggaagacggggcgaggacctattcgcagtagcgctcaccctgagaggtggtcgctgtccgaagccagcttccagcgcgactcctgctggtgcagcgtag

SEQ ID NO: 41286 - DNA, 459 bp, Zea mays
  Peptide Sequence Number=SeqID_84661
atgatgataaagggagtcagcagcaaaggccacagaactcctcacaggcttcggggcaacagcaaagctccttccgaccaaaacaagggccatacaactaggatgtgtcatgttaccatccaaaagcaaaaggagatagccaaagctgcagcacaacaggcctccgcccccaacaccaccactgcaacaaggccagcagcccagaagggggccaatatgagcaacgtcaaagggacttcagagaacaatccgaagctcagcttacagcgaaaagtcaacgctgattccgccgaaagtaaaaggcgaagaagctccaaagacgttcctaagggaatgcagagcttacagcgaaaagtcaacgctgattccgctgaagtaaaaggcgaagaagctccaaagacgttcctaagggaatgcagagcttacagcgaaaagtcaacgctgattccgctgaagtaa

SEQ ID NO: 41287 - DNA, 126 bp, Zea mays
  Peptide Sequence Number=SeqID_84662
atgaaggatgagaagcccatcaaaacaccaatgggaacaaacggacacttgaaccttgatgcgggagaacggcttgatagggtgaagatagcaaggaaagggcttcgagggactaagcgaaggtga

SEQ ID NO: 41288 - DNA, 162 bp, Zea mays
  Peptide Sequence Number=SeqID_84663
atgtcgaaaacccccgcggaaccacttcgagcgagggcagcgtctccgccatctagcgacgtcttcggcaccagtcgctggtttgacgaagacaaaacgggcagggacacccttcgcttcattcagcaccagacgaaggcctgcggtgacgtctccccgtag

SEQ ID NO: 41289 - DNA, 390 bp, Zea mays
  Peptide Sequence Number=SeqID_84664
atggcctattgtgcactagagatgaaagaattcatggtagagatgttaacatggagggtgacacatggggtagatgaagccaaaccgaaagcagaggatgtgatggtgatgctccagaatttcaagtgtaggatcgagttgccacttcatccctttgttcagaggatgatttgggtgcgcatgaggcgcacagagttcattcaaggcacctccaacccaatgcagatgatcatagacgagctattaggcaaggaggtctggctgcatgtggcagtggtcatcaatggcaacaagcaaggcatcatggtgtcgcctccttcgcccctcacgaaggagacacctgccaacatggcatatagtgatggatggatgaagccggccttcagttga

SEQ ID NO: 41290 - DNA, 174 bp, Zea mays
  Peptide Sequence Number=SeqID_84665
atggagagtcatgatctccgggcagaatgggaatcacggcttgtgggtggttatgagactgttgaatctggttatgattatggtgctggttgtcagcattgcaaccactgctcaggcgaagatgaagctgtggaaggagacttccaggagttccaagattacgacgagttctag

SEQ ID NO: 41291 - DNA, 339 bp, Zea mays
  Peptide Sequence Number=SeqID_84666
atgacggcgaacgcgacagagctccggcgagcgcatagaccggccgaacatggcaacgactggcgctgtcgagcggctgtcacccaattgaaccctccctggtcattttccccaaccaaatttcatggttggcgatctgccaagctctacccgcgagggcagcgatggccatggtcctttgttcgtgttcccggtgattggtaccttcggactcagaattacgaacatgaagtgcggtcaggacgaagcctgaaccagacgaaggacgggctgattaccaagctccacgaaggatggtgcacagccgaagctgtgcgcagggaagcttcgtcgcgatag

SEQ ID NO: 41292 - DNA, 453 bp, Zea mays
  Peptide Sequence Number=SeqID_84667
atggacaacataggattttcgaagcttgaacttggcatatctgcaacgtcgaaagatcaacttgcagacagtcttgcttacaacagcctgaagccaaagtctgcgcagtctgggtgcaccgaactgtccggtggtgcaccggacagtgtccggtgtgccaggctggctctagcgaacaggctgctctcggaacttcgacgacgtgtccggtgcgccaacggctctcaatcagcaacggtcgacttcgccaaacaaggaaacaaatccgcaccggtgcgccagtcgacagaaggcaagatctgccttccaggaatgttctcaacggctcctagctgcctttgggctataaaagggacccctaggcgcatggaggagaacaccaagcatactcaaagcattcctaagcaccaagacttcgattccacgcatttgtttcttcgtgatagcatctag

SEQ ID NO: 41293 - DNA, 501 bp, Zea mays
  Peptide Sequence Number=SeqID_84668
atgcagcctggctgcagtcccccaccagtggtcatccagaaggatgaccaccagcctcgtggtggggagaagcaagccgggctgtggcctcccaccctcaacttcaaggatgttcatcatcctcgctggggtggagggcgagcagagtcggggccctgccctccgcatgggctggtgacccgcttcttcctccagcattcggaggagaaggatgttcaccagccttgcggaggaggagaacctcggctacgcggggccggcttgctgcaggccgtcagctgcagagggctagggcgaggacctcttcgcaatggcacacaccctgaggtggtcgccgccgctggtaagccgctcggagcggaggtggttgtcgctgctggtgcagaggtggtcgctatcgccggcgaaccgtcggtgcagagatggtcatcgccgccgggtttagtctgggggagccaagttgtgcgtccggaccccctggatggtggttctaggtactag

SEQ ID NO: 41294 - DNA, 477 bp, Zea mays
  Peptide Sequence Number=SeqID_84669
atggacgagagggagctcgggtatcagtcccctgagcaggtcttgaaggaccttctcattggagactccgacttcggcgacaacgaccgtctcaagaagctgtaccaaatgtacgacgggagttgggatatcgcctctcagagggacattaagtcccttcgcctggaggttctctcatcgaccctagggaccccaaatttggtgccccatcaaaggctggccctgtataggttcatggccattgcccactacgggtacttggtcttgaagatgctgtcccccgctagttttctcatagtgcgatgcgaccagaccgatgtgcttgtagccatcgaaaatctacatgctctgatgatagaagtcacaggcccagatggcaagggacaggacccctcgaccgcgcgtaccaaggcacgtaccaaggtgcccaaggtgcagccatccagggcgaacgatgtcctcgtgaagaccatctag

SEQ ID NO: 41295 - DNA, 222 bp, Zea mays
  Peptide Sequence Number=SeqID_84670
atggggttgtctaaggttcgatggacaaggacaactataggtgggcctaataacttgggaggttctgtctcagtgcccaggggcgctgttcctgcaggtgctactctgggtggcggggctgaggcgcccctccccgttagtggtctttctctgatgcagtggatgggcatgaagctggatacctttgatggcagtggtactccggtcgaggcggcggattga

SEQ ID NO: 41296 - DNA, 303 bp, Zea mays
  Peptide Sequence Number=SeqID_84671
atggaattactcagcaagtcttacccgactaaagaaaagactctcaagggtatgctggttataagggagtcaaggatatcaaggaagataattaagttcaaggaaggatttttctacaattttctacggatttccaaagttctactgaaaaggaaaaaggaaagacttcaacagtactgggccgaatctagcacagacggcccaacaacacagggaataggggggcgcccgtgctggcggctttacagaaagaccctcggagttctggctaactggaaacaggttcggttactattcttctga

SEQ ID NO: 41297 - DNA, 468 bp, Zea mays
  Peptide Sequence Number=SeqID_84672
atggggctggacgcgagcacacggccgacgagatccaagcggggaatcaggggcgcgctggcagagaaaaggagacgagggagaaagaagcagggaggagcgccatggaggggcagctgggcgcggcgctatgagcagggaggcgggcgctgccatggctgggaagaacgttcggccaggggaaacaaggaacatcgatctggagcaaggagaaggggggcaccgcgagctggggcaatccaggagcgggggcgccatggggagctcgttagggagggggctccggccatggatggagccgagcaggagcaaggagaaggaggcgccatgtctaggcacagggaagatggacaagcagaggaacgccgagcagggagttccggtcggcagagggagctggagtctgccgtgtggaagaagacaatgtgcggccagaagataagaagctgctgcgtagaaatatcctag

SEQ ID NO: 41298 - DNA, 159 bp, Zea mays
  Peptide Sequence Number=SeqID_84673
atggcgagagtagcatgtaccctccatggcaagaggctggacggtggtgtatctgtgctctcggtgaggaagcagcaaatttttgttgcttttgttccaaggtggtgccaaaggaagaaaatcaggactgaagcctctggaggaagtgtcctcctttaa

SEQ ID NO: 41299 - DNA, 486 bp, Zea mays
  Peptide Sequence Number=SeqID_84674
atggagagtcatgatctccgggcagaaagggaatcacggcttgtgggtggcaatgagactgatggttctggttatgaatatggtgctggtaagcggtattctttccgtttgaaaagggttgtcagcattgcaaccactgctcaggagaagatgaagatgtggaaggagacttccaggagttccaagactacgacgagttctaggcgtgggttagtggcaacccccagtcggctgcctgtgaaggccgcggttatctatgtttcgttttcgcactttgatttactatggctcgacttagaaacactgcacgaaagtccgtcatccccttcttaccctcccgccttgctgagcgtctgcttcgccgtcccatggccggacagtccagccacttggagagactgcaccaccgcctgcatgaggagcaggaacgtcgacgacaggagcaggagtagcagggttcttctttctcgctccaacaggagatag

SEQ ID NO: 41300 - DNA, 420 bp, Zea mays
  Peptide Sequence Number=SeqID_84675
atggtcaaggatggctgcttcaactacaaacacccgcacttcatcaccaactactctaagatgaaaggaatgttgaaggttagcaagtgctaccatcactctagttggtgtaagggaaagcaagagtacacctccaacaagcacaagtctaggtggaggttccataaagagccactcaagcaaaactacctccatgagtccaagatcaaggaacatgccttcctcgcctctcatagcgacctcaccatgactctaatgagacttcttctttcgagcgacgacgagctcgagagatgggttgaggacaagctcaacggactttgctccttcaccgacaccatgggagctctctccaccatggcacttggtgaggacacggtgggatgcaacaacaaggacactagagatgactccacctaa

SEQ ID NO: 41301 - DNA, 492 bp, Zea mays
  Peptide Sequence Number=SeqID_84676
atgaactccggcgagcacggtttcgctattccggtgacgcgggtcctcggttcaagcttgagtaagcttcacggcctcacaaggaagctatctgaaggcttggatcgaacggaggaggacgggaaaggggctggctacggtggttgctctcgggcggctctagcgggtcgcggggaggtcgccggagctaagggcgggctcggggaagtcaggcgtggtacggaggaggcaacggggaaggcagccgagcactgggacgggctttatagccgtggcgtgggcgtggtcacgggcgaccgcgggcgcgtgggggttatgaagtatactacaacttttatatttggcccaagccatgatcataaggggtttgctttagggctttgggaaaacctccccttagatgtgcatgacaagccagggcatgatatccaagatgggtggcacttgcttaggaccttgaatcccaagtttgagatgctttactcaaactaa

SEQ ID NO: 41302 - DNA, 510 bp, Zea mays
  Peptide Sequence Number=SeqID_84677
atgggcaagagtaacgagcgcaagcgcgagccgactcctccgtcggaggacttcggcgactcggaatactcggaggaggagttctcctccgagtccgagggctctccggctcccgtctctcccccggcgtcgtctgatgattcagacgactcccagggggttgccgcggaagtctggacgtacatccggaccgtcgagcgctccgggctcgagggctcggatgagtcggagttctcctctgaagaggaggactcggacggcggcgagggcgaggacgacgacgatgacgacgacgacgacgacgacgacgacggtggcgacggcgatggcgacggcaggggcggcggcggcggcgacgggagcaagggcagcaccagaggcggcagcagcacgggcagcaccagaggcggcagcagcaagggcagcaccaggggcggcggcggcggcagcagcagcaagggcagcaccaggggcggcggcggcggcagcagcagcaaggccagtggctaa

SEQ ID NO: 41303 - DNA, 432 bp, Zea mays
  Peptide Sequence Number=SeqID_84678
atgtttggcggtgacgacatgctacgaaaagctaaaagaatggaagctacgagtggccaaaagcctagtgacattgaggtctaccaggagggccacaaaggaccagaccctaacaaccctaaccagctctgcagccagacaaccatggatcggctgaggacgggttcgtcttcccgtagctcatgctctcgtcgaccgaacgagcaggagttggagattatgaggatgcgtgaagagatgagacaacaacgcgaatttatggaggcctgcaatgcacatacccaagcaatgtatcaagttacgcccgaagccggtggtagtgggtctgatcccgcagcagggactagatttgttgactccctcttcgcgttccctcctcctggtggcggcagcggtcaaagctctaaccacccaagtggtggttatctctaa

SEQ ID NO: 41304 - DNA, 183 bp, Zea mays
  Peptide Sequence Number=SeqID_84679
atggcagttggggtcagtggggcattgtacgccaaggcggtgggcctctttctgttgccagggaatcgatggggacggttgatgttctctagaggatatggttgctggagtgacttggccaaccaccttgccaccaggttggacagtcaagtgggaccctacctcagcaggagaggagcatga

SEQ ID NO: 41305 - DNA, 354 bp, Zea mays
  Peptide Sequence Number=SeqID_84680
atggcccaggccgaagttgccttctccgtagatgatacgaaggatccttcagccgaagcaaccttaatggacgggaaattttacaatgatgtctgggtgaatggtggccgagagatggcccatgaggttataaaaagagtgaaaaagacacccatgacgcctgagcagaagcaaaacgagctgaagaggctgcagaatgcgaaaggcgttgcagtggtggcggcggtgggagctgaggccaagaagcttgtgaatggcttgccgaagcaacagaagctgcaggttgactgcccacatattctgaatagtgatttggcacgttcttgtagtgtggcccttgtcctcaccatataa

SEQ ID NO: 41306 - DNA, 2445 bp, Zea mays
  Peptide Sequence Number=SeqID_84681
atgcctttccatggcggtagggtggtgcggagtcccgccttcgccctgaatctgcaaaaccgtgatccggccgcctttgtgcgtgaggcggaggatggggcggtgcggctcgttggacgttacgtgccgaggacagagggccagcgcagctgggatatctgcgggtcgaatgaccgtttgaacagggtttttgaattaaatcaattgccatatgacgattaccctggtcaagacgatgtggatcaccgtgggaagaaaccggcggtggagactggagacgaccctgcgtcggcggccgccccatcctctaaaaagagaaaattaggtactgctatgggaggacttggggtttctgatggttttgctagagagttgatgaggacgtgcgcggccccgggggaaaggatgtcttcgcccgagctccgggagtcttcggctcggatgctgagggttaccgggggttgttggcctaggaatgttcctatcccccgcgcggctggcagggacttttttacatctcgcatggttcgtgaatggagggtttttccttacgggcggaatattgctgctgttgtgtcagcagtgatggacaaggatcgccagggggctgcacagaagcgccgggcggctgtcaggctcgttgaagccaggccgaagaggcagcggggggctgcgaaggctgcggccctcggcggaggccggccgctggcggcgaagtcgggcgtccctgcatctagcaaggcgccggaggcaacagaaggcgccggaggctcgaaatcggcgaaggcggtgccgccgtccggcggagtggcggaggtcgcgaaggcggcccgagcgttgccgttgtcgggcaaacgtgtcgccgacttcgccaccgatattagtgtggaggactatcttggtgcgccgaaggcgaagggcggggctcttagcgccggaggcgaggtgtcgtccctcgcgattgtcatggatgaggcgggcgctgcgtcccgccggctgagggaggtgacggaggcgctaagtcaggtggctaacttcgccagccgccactgcgtcggggcgccctcacgggcagctgtggctgccgaagttgagagacttcagacacaacatgctgaagccgtccgtgagaaatcggccgccgacagcaagtgtcgcaagctggcggacaaggtggccatgctggagggagagaaggctgacctccggcgccagttggcgggggagaggagggagaccaacgaggctcttgtcaaggcgcaggctgcgcaggcggaggctaacctggcacgggcggagggcaatcttgccagggagcgcgccgagcagctgcaggagcggctcaccgccctggagagccacgtggagggggccgaggccatttcgcgcgcggaggcggagcggacgcgccagctgcttgtagatacataccgtgggctgggcgcggggaccggtgatttcgaagtgccggaccgagagcccggacttcgctgcctggagtgggtgcaggaggagttgcaagcgctccccactgtcgtggaggggtttatggcgtatgcctccctggtcacctgcgaaggggcgatgaacgcgctctcccgcgaagggtgccggcacttcgaggtcttcgaccaagccgatgaatattttgagcgagatatctttaaggttgaggaccccgtagtgaaggaatccgccggagccctctacgaccggatgtggggtctgcacggtcgcgaggtggtcagggagcgggccgaaacggcgagggcacaggcggcgcgtggcgagagggtggacgacttcggggcgttgaacagcatgctgtctgacccggagccgaccccggcggaggccgtttctggggtcgccctagagccgaccccagagactacgaaagacgcgccgggtgccctcgcagctgctgcggccggcgaagacctgcccccggaggtcgccgaaggcgcgcctgatgccctcgcagctgctgcgccgagtgctgaagatcccgcagcggttcaagattttgggcctgcgcacacaaccgctactactaaatttttggcggcttcgaccgcggaagatggtaatgaatgtggtggatctgcatctgagatttttgattgtgctgactctgggagctcagttgagtggactgaggagtcttcggaggaggacttggactattttgcggcctcggatgtggctgcggcggaggcttcgccgcacgtcgcgggcgcaggagatgtggcaggtcctagcaccgggcgacgacgacgaagggcgattgcgaaacgtagagttagtggggtggagggggctcggcttcgtgcgacttctgtgtggatagtcttcgcgatagactttgattttttcgcacttgttgtgctagtctggctgcacccttgggcgacttctgcgcggatagtcttcgcgatagactga

SEQ ID NO: 41307 - DNA, 339 bp, Zea mays
  Peptide Sequence Number=SeqID_84682
atggagattgttgaacatgccaaagccaccctcttggcttcagagacaattcctgttgtgacggttgaagctagtgctagtccggtagaagagacggaagcaaagagcttgaaggcagaagagcatccaaaactgctgagtcccccaaccacgacggggttgccgaagctaacaactgctacaacaatgactcctagaaaaatgagaatggccaatgttttggatgttgttttgaaatcttcaaaggttccaactcttgcttctactgaagcttcaaagggtcctatccttagcaaagctttgaaagcccagaaggatgccgaagatgaaagcacttag

SEQ ID NO: 41308 - DNA, 465 bp, Zea mays
  Peptide Sequence Number=SeqID_84683
atggcgtcgcagtggggggcgctgcgcaggtcgacgtcccgtgcgtcgaaggttaacagtatgtgggaccactttgtctgcacgactggggcccgtgacggcgacatggttgatgctgcggtagtggtcccgcttctaccgcttggtgtcgaagtcagtgctggaccccccagttatcatgtggatgactccgcgatatggttgatcggcgaagtcttcctgctttggggcatgggggatgttttgatgttgctggtgtggtggtgggggtggaggaggtaccgatttgtacttcctgatggtgttgtcttcgccatggaagaggcagtagaatcgggcgcggcggctgcgcacgccctcggcccctaccacgagtgccatttccgcggccctggggggatattcctggcggcgagggggtcagcagcgggatgctggttggcgatgttgtgcacttgctgctga

SEQ ID NO: 41309 - DNA, 369 bp, Zea mays
  Peptide Sequence Number=SeqID_84684
atgaactccgggcgagcacggtttcgctattccggtgatgcgggtccctcgggttcaagcttgagtaagcttcacggcctcacaaggaagctatctgaaggcttggatcgaacggaggaggacgggaaaggggctggccacggtggttgctctcggatggctctggcgggtcgcggggaggtcgccggagctaagggcgggctcggggaagtcaggcgtgggttcctattgtccaaaaaggggtttgctttagggctttgggaaaacctccccttagatgtgcatgacaagccagggcatgatatccaagatgggtggcacttgcttaggaccttgaatcccaagtttgagatgctttactcaaactaa

SEQ ID NO: 41310 - DNA, 658 bp, Zea mays
  Peptide Sequence Number=SeqID_84685
atgtcaaaagtgacttgttcacttcgtgcattgggtgctacgccgaaggagaggggtagcttttttgccgacaggaaaggtgcccttgccgccgaagccatacagtgggttgtccgaaggtttgagcaagctgtggctgatgcccatgcggtcgaaggcgtggaggaaaatgatatccgcctggctgtcgttgtcgacgtatcgggcgtcgaaggtcaatggcacatgggaccactttgtctgcacgactggaccagtgacgacgacgtggttgatgctgcggtagtggtccttcttctgtcgctttgtgtcgaagtcgacgctggaccccccagtgatcatgtgaatgactccgcgatacggctgatcggcgaagtcttcttgttttggggcttgggggtggtgtcgacaagggccttgccctttttctcggccaacagcgctgccttcgctgcttcgtcaacggatggggctgccttcgagctagctctcttgggtgccatcacggcagcaataagcaatgattcaagtacaactgatgctaactcttcattcatatgcatcattctagcaattgagtctgaatgtagtcctcatagagtttcgactgttgtcgtcattgccgcaatggagcccctttccatctacaccagcttag

SEQ ID NO: 41311 - DNA, 642 bp, Zea mays
  Peptide Sequence Number=SeqID_84686
atgccagcacgcgagcgccccctcccgtccctgctcctctccatcgacgcccaggccgatgccgagctcccagcccctcccgatggcgtggtcaagcatctagaattgaaatccccatgtttgagcaaggaagtaattaaaggagtgaggtcatgtgatgctcgccaggtatcagaattcctggattccaaatctgagacggatgttgatgttgactataacagcttgtactcaaagctggactttctacagggtgagaaaactggtagagatgagaatgaagtccttaaagctattgattatgtgcatgaattgagtatgaggtgccctggccaaagcgagtgttctactctacccaaaaactttagaaacccctcgtatgaaaaagcttcatactgtcaaggctgctacaatggtcttagtgatgagggtgttcattgggcagtgcaaaatggtctccatctatcaagaagcactgttgtgtacttcaagcacaatgatgtggcttcacttgcaagcactttggaaaaacttgctcgtggaaataaacgtgctaaaaagattagacgctacattgttgtagaatccatttacaagattatcccagtgttttggtttgatttagagtacacttatgtatga

SEQ ID NO: 41312 - DNA, 174 bp, Zea mays
  Peptide Sequence Number=SeqID_84687
atgggcaagagggggagcggcagtggtgtcacctcacgttatcatggggacgtattcttggctaagagggtgatgaagaagaccttgatggagatttcgatgaatactgagtctaacgatgcgccggtcatcttcctgtgggagattacccatgttatttccactttactttga

SEQ ID NO: 41313 - DNA, 324 bp, Zea mays
  Peptide Sequence Number=SeqID_84688
atggcgctgccgtttctcggcatcaatggagagaggaatgggggaggggagagagaaaccggcttcggtttccggtttggcgtcgagggcgcgggcagccgggtcagcgcagtcgggcacggcgtggccgtggcggtcgggcgtggggcagcagtggcgagcggcgccgagcgcgtggcgcggcggtggctccacgcgtgggcgtacgcctacggtgcctggcggcggcgcgtctcggaaggaaggggagggaaggagaggagggcgtgggtggggcccgcctggcggcgtctggggagggaggggcgcggcggctgggcctaa

SEQ ID NO: 41314 - DNA, 567 bp, Zea mays
  Peptide Sequence Number=SeqID_84689
atgacttccaacggatcctcagacgacggaaatgcactgtcccacactgacgggcttgcacgagagggctttccccgcattttgtgggaggtacttcagggggccggatacacgacacctcctcagtatgtggtgcagcagttcgagaagcaccgagacacgatcgaggcaattgctctgcatgggttgaccactttctgcggattccatcccttggagctgtctacccaccccattggcttgttccccgcggaaagggaagacgacccaatgtggaaggatcgggtggagcatgccaaggatatctgggctatctacccatgtcagactgctcacttgaccgtacggtgcatgaatgccctgtaccgtttgcaagtgatgcgtggtgaggcaatgtctcatttgatggcactattggaggcaacaaagatcaccttggacaacagagaagagcttgtggttgacttgtccactgagatggcggaaaaggatttacaggtggagcagctgtcaaatgagatccaagagctggaggaattagtggggaccagggagaacaccatcgag

SEQ ID NO: 41315 - DNA, 579 bp, Zea mays
  Peptide Sequence Number=SeqID_84690
atggcagggaccgggaaaggggatatttcgaaaaggatccttctcagcgaaggaaacaggccccgagccatcctactgatcaggggttcgaaggttgcgccctccggggttcagcaaccgccccagagcactcgggctccgagcccattactgatcaggggttcgaaggctggcccctcggaagggttcgacagccgccccagagcacgcagagtcagggatgaccctgggtacgtccgttacatggccgaggctcgggctacgctcctgaggtaccctaggacatttccgagaccagcgggaacgatttgtaatggaatcccaccggagggaggcgccgagccctcggaccctatcgaatgggtccgggtccagcaaatcacccgcagggtaaatctgagtcacgccctcccccgagttcagcctcgggcgcaacagggagccccgcctcgctcgaccctgggcctcggcctcagcctcggcctcgggaggagtcacgtcctcgcccgaccccaggcctcggcctcaggagaagtctccgcctcgcccaacctcggcctcggaccgactacgctatag

SEQ ID NO: 41316 - DNA, 813 bp, Zea mays
  Peptide Sequence Number=SeqID_84691
atgtcttctcgctcccttatgcgtcgcgtctttccgccttccaagcccccggatggggggtacccgccgtcttttctcctcatcgttggaggaacgcaactccgtgggagttggtacctttcagccatcgttcggcttcaaggattttcatcatgcagcccggctgtatccccccgccggtggtcacctaagacggtgaccaccagtttctgggtggggagaagcaagccgggctgcgatcttggtcccaccctcagcttcaaggatgttcatcatcctcgctggggtgggggccaggctgagccggcgctctacctcccgcgcgggttcgtgggtcaccctctcccgcggcgttcgggggagagggcgctcactggccctacgggcggcccggacttcgacaacgcggggccagtcgacggcgggcgtcgtcacctccagcgtgtcgggctcgtcggcttggctcccggcggcccctcccgccggagggcggctgccgcgccgtactcgcctgtcgattatctgaaccgcttcaccaagcatgagtcgccccgtgtcaaggtgacgagtgagcacgaacagaggcggagttggctcgaaaatgaaaacctggttggccggagcctagccgggttgtccgttagcgggaccgacgccggagttgatcagccgaggcctcggaccgggctggcgccctcggaggatggttggccgaggcccctggggtatcctgtcgagccgcctgcttgggccggattcccagagaagtccctagaccgcgtcaccgtccgaggctgggtcggacctcgctga

SEQ ID NO: 41317 - DNA, 75 bp, Zea mays
  Peptide Sequence Number=SeqID_84692
atggggacctctggcaatggcgccgccgtggtcctgcggggagcgcctccgctcggtggggttgaggaccggtga

SEQ ID NO: 41318 - DNA, 114 bp, Zea mays
  Peptide Sequence Number=SeqID_84693
atggtgttaggtcagtggtcaaggcggttggcaatggcgaaagtgagcgcgggggtgcgcaccgttggcatgtatagcctgaggactcggactccaggcgagtgtgactcttaa

SEQ ID NO: 41319 - DNA, 180 bp, Zea mays
  Peptide Sequence Number=SeqID_84694
atggcgctcgggttggctggatttgctattccggcggcctcgccgtcgcacggaagcagcgccgccgtgcccaatgtcggctggttggggaagggtgatccgctctccgtcgtcgatctggggatcgaaggtctcagtgtaagcgcggcggtcgtcgtgtcgagtcaatcgaagccttag

SEQ ID NO: 41320 - DNA, 680 bp, Zea mays
  Peptide Sequence Number=SeqID_84695
atgccgccacgaaccaggctaacggcacgcaagtctacgggaccaattggggtgcctcggcatcaattggctccccgacatgaaagcagcagcagtggaagtaatgaccccatcggagaccttgaagcttgtgtgagtcgactgcaaacaacgctgcaacataggaccgatgcttgggtcgccgacggagatagaatcaatgaactgagaagggacatccgacatctgcaggatcagctcgctgatcgagacttagcacttgactgggccgtacagtctcgtttgctaatgtgtgctaaggaagcatgggctcaggcccaaattaaagaacttagctcgactgtcgataacctgcaggtttactgcaatacgttgcatgaggaagtccatgtactatactcacaattacaccctagtgagcctacacaccctgctgaggcggaagccggaccatctcacgttgcgggacgcgcgctgggtggggagttagacctttttgagccccctccttctttgaggttggttgatgtctggactcccacacctgacgatgaggccgccaagagtaatggaaaggctgtcagcacagccttatctgttgaagccaaatacacaaattctgggaagaataagggattcggtggtgagaggcctaatcagggccaggcgaataagcaacg

SEQ ID NO: 41321 - DNA, 297 bp, Zea mays
  Peptide Sequence Number=SeqID_84696
atgcaggcggcatgcaaccgcgccaagtgggcgcatctctccggcttccaacacgcccagcatgggggcccacgcccacgcgtcacgcaaccggcgtgccgatcgctacgtgcaagcaactgcaccgccactcgcaccactgccacgcctcctcgattgcggaaccagtaccgcgactcgaggcaaccctgcgtacgacccagcagtgccagccaggcgcgacgggaccgggaaagggggataccccgaaaaggatccttctccgtgaaggaaacaggctccgagcctccctactga

SEQ ID NO: 41322 - DNA, 564 bp, Zea mays
  Peptide Sequence Number=SeqID_84697
atgagaaatcatatccccgaggttgtggaagcagcagtgatcgaggacttctaccggggatctaatgactcggccttcgtccgagccatactgcaaaatgcgctgactacctccgagcagctattcagggaagcggacctctacattaccaccgacgaacgagctcaggacctcatcggaggagcaaagcctgcaccgccggcaccacgacgcgacgtgaccaacaacccaacaagcgttgggagaagaagcctcgcgaagaagtccacgccaccagaccacccgcctctcgtgcccgaggagcacccctcggaggcgaactggctcaacttcgatcacccgggcaaatacccgctcctcgtcgatccggtgatccgagagagcaggatgccgggaccacaagggatcatcaccgtgcgcgctgacttcaaggcgccgcagaatgcttccgagtggccattcaggcggccctcaccaccaaaccatcgacgacttctttcgcgcaggcgatctcaaagcctgaggaggacctcgcagtacctgcaaatgaagctcatgccgtga

SEQ ID NO: 41323 - DNA, 468 bp, Zea mays
  Peptide Sequence Number=SeqID_84698
atgatacaagtacctccacaaaccgaagtgaggaagaattccgaggtgagtcagattcagattataaaagtcaaggagactgcgaaagaaaggagaaatgggaagagcaaggccgcggatgagaaaagggatgtaaacaacggactcgtgggtatcctctattgggacagtaaccccacggcaaatccgccaggaacaaagttctttcggaggaagaattccaacatcgacaaggtggaaaagatccggctccaaaacaacagacacatggttacctgcgaaaggcaactggctgttggggtcgataggcgggatgaccacaacagcagaattttggttcttccgcttgggcgccatcgaaatctcgtcggtggactgaacagaggcgaaatcaaagggaaacagaggatgtttggaggcaaaaaagtgaggctagggctcagagcacagaggcgtgcgacgacgtga

SEQ ID NO: 41324 - DNA, 492 bp, Zea mays
  Peptide Sequence Number=SeqID_84699
atgggtggggttgactgcattggtgggcaggtcctagggcgtgggcaacctcggatgaggggtggggtgtttgggagcggaattcatcgccaggggcttgttgtaccgcggtcgcagccggcagccgcacacgtcgtcctcacctcacctcacctcaccttggccaaatatattgacccagaaaccatcaacgccgctgcgcgctccactgtgtgtttggcgaccaatcgccgcaagaaacttctcatgcagtgcatgctcaaagcccatccaatcgccgacttcgtctccccggcggcagacagagacagtggcatctctggatcatcgctagctctaggcttatccgtcgaggtcgaggtcgaggtcgaggtcgagacctatgaggtcatattcgatgaatgtcttgtacaacccttgtctttgagtgtgcatgtgacaaggatatgggtaagagcatttttatggaggaggagcaaaaagatggggtga

SEQ ID NO: 41325 - DNA, 375 bp, Zea mays
  Peptide Sequence Number=SeqID_84700
atgtatcgggagacgttaaggcagaagagaggtcattctcgggagttatatccggatgtatctagtaaggatgctcttgttcctcctgatcttcctgtgcctaattgtgattgtggtagaccagtttgggaaagtcggaacgaagcaggaaatagcgcaacccctggcgctccgagcaaaggctacctcctgcaagtcaggagagaaaagttcattcactcgaagaaccccgttgtccacctcatccacagaagagtggacatgagttacgagaaaaagagaagcaaagatccgtcagactgcccttctggtgcctctgccttcaaaggagaacagaaagaagcttgtcgtcacgacaactccgttctaccctga

SEQ ID NO: 41326 - DNA, 741 bp, Zea mays
  Peptide Sequence Number=SeqID_84701
atggtgcttcctgttgacgtggctggcctgcgccctaggttgggcgacgtggaggctcctgcgaagccgaggtcgaaggccagggcggagtccgagccctggggtcgggcgaggcggagttcgtcgtcttctggagctgagcccgagttcgagccctgggtcgggcagagcggagttcgccgtcttccgggacttagcccgagtccgagccctgggtcgggcggagcggagttcgccgtcttccgggacctagccccgagtccgagccctgggtcgggcggagcggagttcgccgtcttcccgggacttagcccgagtccgagccctgggtcgggcggagcggagttcgccgtcttccgggacctagcccgagtccgagccctaggtcgggcggagcggatcggagtggcgcaggcggcgctgtccttctgtcaggccggtcagtggagcggcgaagtgacggcggtcgcttcggctctgccggggggcgcgcgtcaggataaaggtctttatgctgatgggggttaccagctgagaattaggcgtcttaagggtaaaccagcccacgagtaccctagtcctgtgtttttctcggagacatttggaaacccaatatctggccaccgagcacccgagcctccactctccatctcgcctcctctagatccagacgtcggtgcccctcactcatggggttgctgccgtcaccactcaccacctatctcgccccaccgcctctga

SEQ ID NO: 41327 - DNA, 558 bp, Zea mays
  Peptide Sequence Number=SeqID_84702
atgaccgttcatcccaagatctacgtcgcagatttaatgaagctcgatttcttatggatcgcccgttcaccatcccatggctcagatctatccttcgaggaggtatctccacttcttatcacaactgtcaatcccaagaaggacggcgcagggggcttctttttcctccggcgcccggattcaacagccgccgcaaacccacagcggatgtcaccggagcccgccccgccatcgatctatggtcgcaagctgatgggatctagaagacgaagggttctggagacctgctctcctgatcgcagatgcacgtctgcggtcgggatgaagagaactggaaggtggctcagctatgaagagagtgtttcagcagagactgttaagttgaacttccgcctagaactccaagctacaccaacccacaacttggacaatggattataccttgaattgcaagttttgcgtgaatgggtttcacttgaagtcatgaccagtacttggctaccagtagtccccttctcgggtggagcatatacgtcgtactccaaggtctcttcatga

SEQ ID NO: 41328 - DNA, 1521 bp, Zea mays
  Peptide Sequence Number=SeqID_84703
atggctcctcgcagcaggcgaagaaatggctcctcgcagcaggcgccggcgccgccgtcggcgcgctctctgccgccgctgtcatggatcttctctcgagatccaagcggagagagagggaacactcggtccagcaagcacctgggctctgttggtagctcagctcttctctctgatgaagtggtctctgaacagcttagtccagcaagcacctgggctctgttggtagctcagctcttctctctgatgaagtggtctctgaacagcttacaagttagttgtcatttcatacttacactctgcaaccagataattccacattttgttggaaactatcctgatgctatcacatgttacactgaagtacaccgtatagatcctacagcagctgatgcactagttaatagagggaacacattcaaagagattgacagagttaatgaagcaattcaggattatgttcaggcagcaacaatcaggccaaacatgccagaagcccatgccaacttggcttcagcatacaaggacagtgggcatgtagaaacggctataattagctacaagcaggctctccggctgagtcctgattttcctgaggcaacctcctgcatactctacagggagcaaagctacgaattcattgtccaagcttaccttgggggaccagagaatgttagtcttcaggagactggaccgttttggaaccaattcctggagtcattaacacaacatcaagatccaaagaattatctgatacgtcttccaactttggttactgaagattccgatggtaatgttcaaagtgcagctcaccttcttgacaggcttgtcaaggatatcgtaaccgagagtgaccagttcagcatagaagaattcatatcgcttttgagagagcgcatgaatgtgctgaatctttatgtaagacaatttttggtggggtggataacagtgttagacagtgttcctgatattgacatgcttggtttccttcctgattttctcgatgcatataatcagcatccaatcgctcacttgctaatgcttctgaacattccctgggttcagttaccttatattttaccacacatgctgccatctaaaaaggcattttcagctgctgtatctgctcttggcatctacaacaaagacatgatagtagtttatgatggaaaggggctgttcagtgctgctcgtgtttggaaggttaagaacgtgggtacccacgttcttaaggttaagaacgtgggtaccgtcaaacttattgtgcagtccgcgcagacctccgcaggacacataagttcgacggccacgttgccccgtcgaacttacttctctaagttcgtccaaaaattgtcgtcggctatattcgtcggtaaacccacgttcttacgaccaataccagaaaggccaacacgcaatggaagtggagagatgtcgagagtagagtgtacccaccgtggcaagaggatggatggtggtgtatctgtgctctcggttggtgtgaacccggtctggccttga

SEQ ID NO: 41329 - DNA, 177 bp, Zea mays
  Peptide Sequence Number=SeqID_84704
atggccgtgatgggttcaacaccggaaaagatgtacctctgccagaccaataccagaaaggccaacacacaatgggagtggagagatgtcgagagtatagcatgtacccaccgtggcaagaggctggacggtggtgtatttatgctctcggttggcgtgaacctggtctattcttga

SEQ ID NO: 41330 - DNA, 1029 bp, Zea mays
  Peptide Sequence Number=SeqID_84705
atgggtcggcgcgagacagagcgcgaaggggggaggcagccggagggagacgtgcgtgagaggtggaaatcccgcggccttcgtgtttgtcccacgcccaggcgcaaggagaggatccagcctgagtcagcttggggtagggtaatggttgcacctcctgttgacgtggtcggtctgtgccctgggttgggcgatgtggaggctcctctgaggtcgaggtcgagtctgtcttccgaggccgaggtcaagtccgagcccctgggtcgggcgaggcggagaccgtcggctgtggccagggctgagtccgagccctgggtcgggcaaagcgggagttcgtcgtcttccggggctgagcccgagtccgagccctggggtcgggcggagcggagttcatcgtcttccggggctgagcccgagtccgagccctggggtcgggcggagcggagttcgtcgtcttccggggctgagcccgagtccgagccctggggtcgggcgcagcggagttcgtcgtcttccgaagctgagcccgagtccgagccctggggtcgggcggagcagagttcgtcgtcttccggggctgagcccgagtccgagccctggggtcgggcgaagcggagtttcccatggcgcctagggccggacttggctgctgtcagcctcactctgtcgagtggctcagcagtcggtgcggcgcaggcggccacctttgcattaaatgcccctgcgatttggtcggttggcgtggcgatttggccaaggttgcttcttggtgaagactgggccttgggcgagccgaagggcgagaggacggtcaaggacagactcgacttttttacatacacccctgcgtcgcctttccgcaaggaggaggggggggaagcgccatgttgccctcggagggcgccgaacatggtgtctccggtgagctgctggcggagcccgattggcctgaggcggcagttgaacccttccgaggggccggccttcgaacctttgaccagtagtgggtgcggagcccacgcgctctga

SEQ ID NO: 41331 - DNA, 681 bp, Zea mays
  Peptide Sequence Number=SeqID_84706
atgaccccgaccattgtgattaggaaaattgcgacatttgagatgttgggaaaaatgggtcgacaagaggagccaacttcttcaagaccatatgcttttgcatgtgatgaaagaaaaggcaaaaagaaggctcccactccaagttcctcaagtgaagaagaggacaaagaagaaagtgatgatgatgaagataatcaaccatcaacatcatcctccgaggacgaagaaacaatccgacgcgtcgaaaaggtcgagaatcttctctttaacattgacaggaaaaagcaaagaaagagaggatgctttgcatgcggggagaagggccacttcagggataactatccaaatatggccgaactcacaaaagggaggagcaaaggcaaggcgcttacaagtgtcaaaacttgggatgactcttcaagcgaagatgaacctccaagaacgcgcagccaccgatcctcatcacactcatcacggtcatcacacaagtgccttagggaaagagttcttgttaagaatgttgttatagaaacatgttcggatgagattgcaatggagaatgagcaattaaagcaagaggtggctcaccttggcaaggctttatatgacaagaaagacaaatccaaacaaatccaacctcctcaagataacatcactgtgggaatgaacaagcctgtgtag

SEQ ID NO: 41332 - DNA, 1440 bp, Zea mays
  Peptide Sequence Number=SeqID_84707
atgaggcggcacatcgcctgtcaacgggacggacaggcggcgcgccttatccgcaatgaatgcaggggccacgtaacccggaggccttacgtctggccccgcccgccgacttatgtcacgcacagtaggccacgtggtagcatcgggtctccgcccgggcgggggcagtggcgcaagcgaacaggtctgcaccagactgggttcggacatgtgtcgtcaccggagccccgcctaggtcctgtccaaggctcgtgcatgttctgtcctaggaccttgcagtgcgtggcctggaccctgcacagggggggtccgggcacgcccgtgtcggttctggaccttactcggaggtccggtctgtacgtacaggggtccggcacttcccgatgggggtccggacccactgttgataccttggagtatatcatcttcccgggccacgtggcgacccgggagttgaccacgtgggtaccaacagtggcccccgggcccacctcaggggaggatgtgagcctgcagactgaggaggcgctcgacgtggtgcgccgcctgctcggatggagcacgctggcgttcgccgggaggatctgggccggcaccactcccctcggtgacctcgtcgtcggggagttcatgctcttcgtctcctacctctcctgcgggtctgggaagggcaaggaccacctcggagcctattatttccagacgagattagatccaactgtggcctacatcgccacccttggcggcgcgaggtgggagaactggcgtaacgactgggtgatcgtcagtgctgaggccaacgaccgccttgccctgccgaacgatggaccaagactcgaccggaagcaatggagggccaaaccgtccctcacgccggagttcgagctcgtactggacatgatcaaggaactggcgaccggtggtctgacctcgatgcacgtagtcggagatttcctgatgcgccgggtcatgccattgcagggaggccacgtttgtgttgctggttcaccggcctcagtgacattggtaggatccagcgcgggccggggaacgacctgtcctgggaggagctggagggctgcggtgctggcctggttgccgacccttgatgagagcggtgtggcgatccgccaaaccggcggccaggacccccactggggatccatattcctggtgtaccggccggaggttcctagcccgccaatgcgggctccagagctccccccacagcccccagctcctcggacaagggcaaaggggctacgggcggctcttcctctccgggtggcacagggaggtcggaaggagagaggcgacaccgactgcatcgtgccgacgggtctttcgtcacggacccgccccttgattcagaccccccagaagcgtcaaaggacagctggcggggccgaggaggccggctaccaaacccagggcgcgtag

SEQ ID NO: 41333 - DNA, 609 bp, Zea mays
  Peptide Sequence Number=SeqID_84708
atgaacaaaacatcggcattcaaggtgccattacaaacggaaccccggttccacctccgcaggtacgaacaaccccacacaattggggggcctgcggagcaacagaagaccgacgaacggctcgccgtcgcccgctccagcagcggcgacgacgacgacttctgctccggggggccgaacagcagcagcgatgacctcatggcggatgctgctgccatgaggccctcgcccatgccctcactcgagaggcaaggacgggcagaaggccgtagagttcgaggtcagtccgtgggcggcaccggctatctcgtcggcggaagaacctcttccagctgccgtggcggaaggcggcgccgggagcggctccgaagccactcgggtcagagagccaggcacgcggcagctgtcagcgccacgaacggcgaacgcccttccccccgatcactgagggcaggagtgggccgccacccgcgctggggccgaccccaactcggcacactcccctccccagcaccgatgatgaaaatccttgaagctgagggaggggcagaggccgcagcccggcttgcttttccccgccatcgaactggaggtcaccgtcttgggtga

SEQ ID NO: 41334 - DNA, 441 bp, Zea mays
  Peptide Sequence Number=SeqID_84709
atggaggttctagaccttactcggaggtctggtctgtacgtacaggggtccggcacttcccgatgggggtccggacccactgttgataccttggagtatatcgtcttcccgggccgcgtggcgacctgggagtcgaccacgtggtggggtcgggcgctgtttaccacggagctcaacgggggagagagggtaacgagcgcggaggggccgggcaaacgacgaggcgcggctgggacggggcagcgacgacggcgaggttcggcggtgttcgacgcggccggggcactatgcgggcgtggctatggcagacggtcccagcacgacgcgacggtgggcgagcggctcggctggcatgaatgccaacgcggcggcagcgcgggtgcaggcgcgccccatgcgaggagggagaagggggccagtgtgggccccgcctacaagtga

SEQ ID NO: 41335 - DNA, 528 bp, Zea mays
  Peptide Sequence Number=SeqID_84710
atgcggttgatttccgcacgcaggtcctcagtcggcgcggccctcaccaagggagagcgcaatgatgccgatgcctcattttggcgccgggacgaccgatgccttggcctagttgaggtagagtgcgccatgccatgcaggcggtcgacgtcgtcgcgccactacttcatggcccccggggaggccctggagctaggagggtggcgcaacaactctctggttgctgatagtgccccaggcgcagccctagatgtcctggaagtttgcgcggaaatgtgctgccgcgcagagtgcacagcagtggccgcaccaggcgtcgggaggttgatggcccgcggtgtggaagaggcagccgcctcttccaccacgaagtcctcgggcaagaaatcatggtgctcgacaatgtggaccatggcgttgagcagaagaacaagcaaaaacctaaagcctatcccctacctggggcgccaaatgtcggagaggaaattcttcaaccgggtggcggaacgcacccgccctaaatcctaa

SEQ ID NO: 41336 - DNA, 591 bp, Zea mays
  Peptide Sequence Number=SeqID_84711
atggcgcctcctgttgacgtggtcggtccgtgccctgggttgggcgatgtggaggctcctcagaggtcaaggtcgagtctgtctttcgaggccgaggtggagtccgatcccctgggtcgggcgaggtggagaccgtcgactgaggctagggctgagtccgagccctggggtcgggcgaagcggagttcgtcgtcttccggggctgagcccgagtccgagccctggggtcaggcgaagcggagttcgtcgtcttccgaggctgagcccgagtccgagccctggggtcgggcggagcgcagttcgtcgtcttccggggctgagcccgagtccgagccctggggtcgggcgaagcggagttcgtcgtcttccggggctgagcccgagtccgagccatggggtcgggcgaagcggagttcgtcgtcttccggggctgagcccgagtcgggtataataatacccgacccgaaattgtacccgagacttctacaaatatccatacccaccaagccaatcgggcgagaaactatacccgtacccatgcccatcgggtatccaccgggtatcgggtatccagtggatatgttattgtag

SEQ ID NO: 41337 - DNA, 363 bp, Zea mays
  Peptide Sequence Number=SeqID_84712
atggagaatggtggaatcgaggagaccgacgatgtactaccggatctcgcgctgctcaatgggcagcggtactggctagtagggtcaaacgaccgtgccatgatccagatgacttccatggagccgggatcctcgcctgtcaccattgatgtcgtcatgacttctagccgccaaggtgatgctaaattcattcacatttgcaaattacatgagcaatttgttgtgtcgatccagtgccagcagatctcgtacgtgttgaattcagaggttactgctgtgtggatcgccacctcccccaagtgcgtcgcaatagtgaagcctagatctaccgacaacacgcctctggaagtcgtgccatcataa

SEQ ID NO: 41338 - DNA, 264 bp, Zea mays
  Peptide Sequence Number=SeqID_84713
atggcggccgacaacccgcccgccggcggcggaatcgacgacgtcttccccacgtggtggaagaacaacattcgggcttgtcccgtcccctcccccgccgatggaggaggaggcggggcaaccaaggccaagcaggaggcggcacctcgtcggctgtcgagcgagtcgacggtgtcggcgcctgtcggtgttttgggtccgaccgcacacccggggttgcccctcaaggtgcttttaggagtaggacggtgtcgacgactgtag

SEQ ID NO: 41339 - DNA, 103 bp, Zea mays
  Peptide Sequence Number=SeqID_84714
ggccgacgaacagcaggacgtcaatgtcggtcgtccgaccgacgacaatccacgagcacagagtaaaaaggcaagctatagctgcgcgagaggctcgacctag

SEQ ID NO: 41340 - DNA, 1332 bp, Zea mays
  Peptide Sequence Number=SeqID_84715
atggcgtccgccgccgcagacccgctcctccccggcgagggcagcggccgccgcctcgggttcctcccctcaagcatccgcctgaagacgtccgtctggtccgagctgggcggcgccgtgggcgacctgggcacctacatcccgatcgtgctcgcgctgtcgctcgcgtcccacctggacctcggcaccacgctcatcttcacggccctctacaacttcgccacgggcctactcttcggcatccccatgccggtgcagcccatgaaatcatgtccgcggggctcgcgggtcgccgccgtcctgctcttcctcggcgccacgggcctcatgacgtgcatctaccgcctcctcccgctccccgtcgtgcgcggcgtccagctctcgcaggggctctccttcgccttcaccgccgtcaagtacgtccgctacgtccaggacttctcgcgctcctcctctgcctccaccgccgtggcgcgcccgctcctcggcctcgacggcctggtcctcgctctcgccgcgctgctcttcatcatcctcgccaccggctccggcgacgacgaggacgtctccagcgacggcatggcccgtcgccgccgctcctgcagccgcgtcccggcggcgctcatcgtgttcgcgctcgggctggtgctctgcttcgtgcgcgacccatcgattctgcagggccttcgcttcgggccgtcgcctctacggctcgtcgggatcacctgggacgatttcaagatcgggttctgggaaggtgccgtgccgcagctcccgctgtccgtgctcaactcggtgatcgcggtgtgcaagctctcgtcggatctgttccccgaacgggccgagctctccccggcgcgggtgtcggtgagcgtcgacatcataaaattagtcggctgctggttcggcgccatgccgaaaaaacacggcgcgggcggattggcggggcagtaccggttcggcggccggagcggcgcgtccgtggtgttcctggccatcggcaagctggcgctggggcttgtgttcggaaactcgttcgtgacgatcctcggccagttcccgatcgggatactgggcgtcatgctgctcttctccgggatcgagcttgccatggcgtcgcgcgacatgggtactaaggaggagtccttcgtcatgcttatctgcgccggagtctcgctcacgggctcgagcgccgcgctggggttcatctcggggattgttttgtacctgctgctgcgcctcagggacgtggactaccaagcactagccggccgctggggctctgaccgccggcgaaccggcaacaaagttggagatgacgaagatgcttga

SEQ ID NO: 41341 - DNA, 426 bp, Zea mays
  Peptide Sequence Number=SeqID_84716
atgatcgtgtctgcgcccttcctcccctctgtcttcaccttccgccacctcaccaagggtctcgtcactgctggccgcatcggcgacgcctgggacagggccttcgagctcttcaacgagctcgcagagaggctccgcttccaacgggcccccatccccatccctcctccatgcccaaccaccatcctccacctgctcttcacgcaccccaccgacccactgagatgggaggatattatgtgcccactcgtgctcttccacgactaccccgtgctcctcgcaaccgtgacccgcttccgcggcccttgccactacctgcttctatatcgcctagcacgctgtcgtgccgggaccgttgggtcgctcctctgctgcctcttcgtgctccatgacatgctgccgctgctctactacgacgacgactag

SEQ ID NO: 41342 - DNA, 1197 bp, Zea mays
  Peptide Sequence Number=SeqID_84717
atggccatgggcggcgcgttccccttccagtggcccgagggccccgcggatcctgttctcgacgacgtgaccttgcctccgctgcccacggcggcgcccgacgccggggtcgccgcgtactacgcggacgcggcggacgtgcacgcgatgcacatggcgctgccccgatttcgcggcggcgctggcggcgatgcggcgggaggaggaggaggccgcgggcatccgcctgccttcctctaccaccgcttctacgaggcgggtccctacctcaagttcgcgcacttcacggacaaacaggccatcctggaggccgtccagggctgcaagcacgtgcacatcatcgacttcagcatcatgcagggcctccagtggccagcgctgatccaggccctcgcgctccgccccggcgggccgccgtcgctccgcctcacgggcattgggccgccgtccccgccagggcgcgacgacctccgcgacgtcggggtccgcctcgccgacctggcgcgctccgtgcgcgtccacttctccttccgcggcgtggccgccaaccgcctcgacgaggtgcggccctggatgctgcaggtctcgcagggcgaggccgtggccgtgaactccgtgctccagctgcaccgcctcctcgccgacgctccctcgtcgggcgacgcccgggcgcccatcgacgccgtgctggagtgcgtcgcgtccgtgcgccccagggtgttcacggtggtggagcaggaggcggaccacaacaagccggggttcctggaccggttcacggaggcgctcttctactactcggcggtgttcgactccctggacgcggcgagcggcggcgcgggcgacgcggcggcggaggcctacctggagcgcgagatctgcgacatcgtgtgcggcgagggcgcggggcgcagggagcggcacgagccgctgtggcggtggcgtgacaggctgggtcgcacggggctggccgccgtgccgctgggggccaacgcgctgcggcaggcgaggatgctggttgggctcttctccggggaaggacactgcgtggaggaggccgaggggtgcctgacactgggctggcacgggcggccgctcttctcggcgtccgcgtggcgcgcggaagagaacaatcagagtgacagcaggagcaggagcagcggcagtgaggagagcaatatcagctgcagcagctag

SEQ ID NO: 41343 - DNA, 517 bp, Zea mays
  Peptide Sequence Number=SeqID_84718
gacggtggtgacggtggttcttggcctgacgttggtgctgggtgggctttttggcgaaagccttcacgggtgtcgcttccctgttgggggtgtcgcattcatgtgtcgcattaaagtttgtcttggccacggcttcgccttcggtggttgctttcgcttatcggggtctggtatgcgggtgaaggtgggactttgcaacgtgaagtcgaagctattacatcaggggatgtggctcgggaataatgacagatgtcgagacccccttcttcgactagattgtttcggagattttggcatttgccgagggcaggacagaggttcaagcttgttggtgaagaatcggagctgcctcgtgtgggtcatcggcatcgtcggcgtcggacgcggcggggccggtcagccggtgcggatccatcaggcgcaaacggacatcgaactcctgacgcggatgggcgcgagagcccgggtccgctacttcaagggctccggcggcgtcggtgggggtgagggggctgag

SEQ ID NO: 41344 - DNA, 963 bp, Zea mays
  Peptide Sequence Number=SeqID_84719
atgtcgactgggaaacgccacctagatcagatcgaactcctcagtgttaggcggctcctcctgaaccacctgatcatctcctgtggggggggggagaagacaggggctaatctacaaaaattccagagactcagagctaaccccgcagaggacggcgggttaattcatttatttctcagggtctcctacgcaaaatgcgcaggccgaagagatcctcggatcatagatcaatggctcacattctattgcgcacagctagccggcggcgcgatacgagcacggcagcactcccaccggagtagctcaatacgggtgatcccgcccctactcactgctatacttggtgctatgcaatccctacgacacgacaatagctttggcagagagcttaccaggaatgacgccgcgatgaagcctgtccacacggcatggaggatccgcggcggagccctatcgccggtgagtaattctgggactcagcgccgccatacactttcgaaggcagcacgattcgcccaagcatggcctgacgaagctccacggcctgatccccatgtacagatgaccgcgaagaggatgttccatggcgagggcgatccgcccgcactggtgagcgcggccagcagcaccgggggtgttttcttccccccgacaacacgctgggagccccgcacggcacagtacctcacgcaagcacgaaacacgagcgtagatcgaaacgcgatggtgccaatctcccacgaatcaacagagttttcccccgccatttcctcaaccgaatcgatggcgcctggtagaatcgcccccacggccacgcactggattaccttctaccccgtggtctctctctcaccgacgacggcacagttgaagcaccaaggtgatggcggtgagttcgcttggttttctcggtggcagccacacacaatggggaagcgaggtatggcggatagggcggcttag

SEQ ID NO: 41345 - DNA, 951 bp, Zea mays
  Peptide Sequence Number=SeqID_84720
atgaaggcggcagagagaggcgatgttgtggggacgggcgccgacgctggagagaaggacacgggaatggagggccgtgtcatagacggtggctgcgtggggaatacagtggctggggatggcactacgtgtatgaggctcgctagtaaccaggttcccaaattgatggaatcgaggaataggaacgtggtcctgggtgtaggcccgagcaggggcgcgaacggggatgatgaggagttgctgccgctgtcgatccaggggtggggggcggcgccgcgcccggctggggatgagtcgccgacgggtgaggaagctccatgtgaaggtgaggggggggggggagggctccggcgggcagggaggctaccaagggattgtcaaggtgagcgtcgcctaggcggtaaggcgccctggcgacgtaaggcgtcctgttcgccttactccgcacctaaggcgagtgccagctgtgcgacagctcctgtgcgtctgctccaggggcgagacggcgcggcggcgcgatggctccggtgtgactgctctagcggcgcggcggcgccggcacaggagggagaagtggagaagcaagcagagggagagagcggagagagagacactgataatgatgactttgtgatcccaagttttagtgttgaagaatctgatatcggtgactgggaagcttcacgggctaccgatcctcaaccacctccaaagcccagcaaagatacagagaacatatatcttggaccacacggagcaccgccatctcgagcgaagaaggcagaggatacttgggctacggctgggtaccgtgagaagaacaacaaagcgagggaagctgagcagaaggcctttggaactgggcggaacagcaaagggggcaacacaggagaattccatcgccacaatggtggcagccatggcaaggacccctacaagagatctgcttaa

SEQ ID NO: 41346 - DNA, 1041 bp, Zea mays
  Peptide Sequence Number=SeqID_84721
atggatgagatattagctgcggcctgcgggctgggggaggtgggggccatgttgactaggccattaattaacaatgcataccaccgcttcacaactgactggctacgtcgccggccatggccgagcgcgggcactactagggccgcggcggcggcgctcctcttatccctctccgccgtccttctcttcctcctcctccagacaccgccgcggggcctcgccgaccatgtggccgccgcgctcgacagcttactcgactggcgcggcctgctggagctggcgacgcgcaggaacatgatcctcctctgccacgccatcctcctcgtcatcctcagggacgccggagtcctcggcacgcctgccggccgtcgcagccagagccacagccgcagcccgccagcggccgtcgcacaacaaaccgcgagctccgtcgctccggctcggtcccacgccaccgggagcgccgtcgtcgtctggcgccggcggccgcggaacagggccgccggcgccgccgcgcccaggcacgacgctgtggctgcccgtcgtcgtctcgtcgagtgccagtgccagccggcggtggagacatgggcggcgccactgctgacgacaggcccacaagcacgggcgacggaagaggccgccgccgtggccaccgaacagcagatcgtcctcgcgcaaccgcccaggaacgaagccggaccgctcgagcatcaccgtggccgcgacgctgtcgttggaccaccagctgagcatcccacggccatcgcggtgggcggcgatgatcgccgcatcgccaccgacgacgagaagcgcatggacgacgggaatggagatggagatggaatggagatgatcgccgcgtcgccgcatgcgcgacggcgagagcagcagacggcgggaatggagacgggaatggaaatggagctggccgacgacaggacgttcgaggagttcatcaagagccagaggcggcagatgcggcaggagagcctgaagctgctcatcagctcaggctaccactaccacgcgatagcagcatag

SEQ ID NO: 41347 - DNA, 378 bp, Zea mays
  Peptide Sequence Number=SeqID_84722
atggctgctcgccgggcggtgaggttgcgggccgccgctggagatccataccggcgcttcataggaattgctagatctcgggccttggcgagtcttttgggtgtgctgtccgatgaccaggaaccgttccgggtggattgttcgcacaatcgcggcttcctcgccgttgaattgctcgccggcgcatcaattttaccgtcgggccgcactacatcgtgggcgggcctcttcaccactcgaccgccgcaccgctcggggtggctttcggggtactgggccgtcaacgggtgctcgccggtgagcacgccgtggagctctgctcctggccgttcggatgaccgtggggagaatacggtgttcgggccattagatccatag

SEQ ID NO: 41348 - DNA, 324 bp, Zea mays
  Peptide Sequence Number=SeqID_84723
atggaggttgcttaccttgtgctggctgctgtggacgcctggccaaagctagctctctctgtgcctgccacctttgttgctggtgcacgaggagaagagataagaagtgctagcacccttacccgggaactaagcaaaatgcggtgcagtggagctagctttggctggtgccgacgtgatacgtccttgggtttaatgtgctggtgtgccttcgctctcaactcaactgcactcggaaaaggaaatgctgggcctacgtcaccgacgccttccataccccagtcccagaaaacgctctcaacaagcaacactccccttccctga

SEQ ID NO: 41349 - DNA, 237 bp, Zea mays
  Peptide Sequence Number=SeqID_84724
atgggagaccgggcatggcagcggacgcgacgcgcaaacgacacaaggcggctgatgcaccggccccacatttcagcgccattggccaagccgggctggcgtgaggttagtgtaactagtggtggtggtggaggtgtatatgcagatacaattgtggacaacactccacaacccatcatactcaatcaaagatccaaatcagacaagtatcataagaacaaacattcaagtgcatag

SEQ ID NO: 41350 - DNA, 339 bp, Zea mays
  Peptide Sequence Number=SeqID_84725
atggctgctcgccgggcggtgaggttgggggccgccgctggagatccataccggcgcttcataggaattgcgagatctcgggccttggcgagtcttttgggtgtgctgtccgatgaccaggaaccgtttcgggtggattgttcgcacaatcgcggcttcctcgccgttgaattgctcgccgacgcatcaattttaccgtcgggccgcactacatcgtgggcgggcctcttcaccactcgaccgccgcaccgctcggggtggctttcggggtactgggccgtcaacggggtgctcgccggtgagcacgccgtggagctctgctcatggccgttcggatga

SEQ ID NO: 41351 - DNA, 843 bp, Zea mays
  Peptide Sequence Number=SeqID_84726
atgtggaggctcatccgaggtcgaggacgagtctgtcttccgaggccgaggtcgagtccgagcccccaggtcgggcgaggcggagaccgtcggctgaggccagggctgagtccgagccctagggtcgggcgaagcggagttcgtcgtcttccggggctgagcccgagtccgagccctggggtcgggcggagcggagttcgtcgtcttccggggctgagcttgagtccgagcccctggggtcgggcggagcggagttcgtcgtcttccggggctgagcccgagtccgagccctggggtcgggcggagcggagttcgtcgtcttcagggactgagcccgagtccgagccctggggtcgggcgaagcggagttcgtcgtcttccggggctgagcccgagtccgagccctggggtcgggcgaagcggagtttcccatggcacctagggccggacttggctgctgtcagcctcactctgtcgagtggctcagcagtcggtgcggcgcaggcagtgctgtcctcttgtcagaccggacagtggagcggcgaagccacctttgcattaaatgcccctgcgatttggtcggttggcatggcgatttggccaaggttgcttcttggcgaagactgggcttcgggcgagccgaagctttgtgctgatgggggttaccagctgagatttaggagccttgagggtacccctaattatggtccccgacaggacacaggagccatctctcacatgaccaacaattctgccttgcttccccgacggctcttctggcacacactgcatccgttgatgtttggcatcatcgtctcggacataccaataaacattccttag

SEQ ID NO: 41352 - DNA, 600 bp, Zea mays
  Peptide Sequence Number=SeqID_84727
atggccggcccctcgaagggttcaacggccgcctcaggccactcgggctccgcgcccattgctgatcagggcgccgcctgcgccgctccgactgctgagccacccgacagagtgaggctgacagcagccaaggccggcctcgggcgtcataggaaactccgcctcgcccgacccagggctcagactagggctcagccccggaagacggcgaactccgctccgcccgacctagggctcggactcgggcttagccccggaagacgacgaactccgctccgcccgacccagggctcggactcgggctcaacccggaagacggcgaactccgctccgcccgacccagggctcggactcgggctcagcaccggaagacggcaaactccgcctcgtccgaccccagggctcggacatgggctcagccccggaagacgacgaactccgcctcgcccgacccaggggctcgacctcgacctagacctcggaggagcctccacctcgcccagcctagggcatggaccgaccacgtcaacaggaagcgccatcattaccctaccccgagctgactcgggctacggggaaccagaccggcgtcccatctag

SEQ ID NO: 41353 - DNA, 219 bp, Zea mays
  Peptide Sequence Number=SeqID_84728
atggcgttcctcaccaacgtccccgttcacacacaaagtctggtcgataaggaagggtcagccttgcctcagcaaagcccgaccctccctcaggggctaaaaggggggaaccccctctgcgtcaaaattttcaaccaaaaaggcttctgtgctcccccggctatgtcggtagcgggaccccaagaagcgaacatgggtgcatgtaagtggcaaggctga

SEQ ID NO: 41354 - DNA, 705 bp, Zea mays
  Peptide Sequence Number=SeqID_84729
atgtccattcgaccattcctgacaacccatatcccaatcaatctaccacctctccggccgttccacactgatcggatggcggccttgaccttccacccggccgcctgcttcttcccacgaccacgagaggcagcagcgacaacgaagcagccgctccaccattactgctcgcctctccggaccctcgtccctagaactacaagaccgtgccttctcagggccaggtcctccaacgggctcccgcagaccggcggcgcctcgttcggcagcagcaacgaggtgctggatgggacgccgacgggagatggggcaccggggcaggggcagcggggagggagcaccgtcagcatcacggtcgtcggcgcctccggcgacctcgccaagaagaagatcttcccggctctcttcgccttgttctacgagggctggctcccggagcattttacagtgttcggctatgcccgtagcgagatgaacgaccaagagctcaggaacatgattagcatgaccctgacgtgccgaatcgacaaaagtgagaactgcggcgacaagatggaacagttcctgaagaggtgcttctaccagtctgggcagtacaactcggaggaggggtttgcggagttagacagaaagctcaaagaaaaagagatcctcattaccccatttgtttgcatcatatttggcgtcatgccacaagatttttag

SEQ ID NO: 41355 - DNA, 312 bp, Zea mays
  Peptide Sequence Number=SeqID_84730
atgaggatcagtgaagctctttattcactcagtgtcatgaagaattctgttttcccttttcttatgctgaaaggttgtaagatcaatgctgatgcgccgatgcaacaggcgtgctcagcaggagcagcacgaccaacaggaggaacatcagaggcagcctcccccacctcccccgatgtcagtggagcagatgttcttgatgcagactcaggcagtgcaggccattgggcagactctggcagccatgcagcaggctcaacagcaaccccaaccccaattgcaagtgcagatgccctagatgccacgggataa

SEQ ID NO: 41356 - DNA, 1083 bp, Zea mays
  Peptide Sequence Number=SeqID_84731
atgggggatggtgaggtagaggtcgtagcgggtgtgcgggggagggggtggagggagcagaggcagtggacgcggcgccaattccgcgtgggcgagcggacatgggattctgcggcgagcttgttggcggggttggtgggggcgcgtccgcagatcccgccatctactgtcgaggtcgatgaagagcgcgagtaccgcgccgatgagagcgaattggtgaagagggagcagcagggctcttcctccccaccccagcaggaggtggagtccgtgaggccccgttcctctgtggcccagctggaggcgccccctgcaccaccgcgggacgttccggctgttggaggagctattggaggagctactggaggagaccccgacgacgacgactcagaccacagcacggagtcctctgagccgcaggaggcggaaggatgggtcgcccgacccatcacccgtgacgccgctcgcggttgtcacttccacgacgcactcgacaccttgctgcgccaggctttcgaccggcacacctggtcgatcgagtatcgttgtgtagtctaccagcacagtcgcgggaggtacccggaccgctgggaggctacctgcctagttcgccgtccggaggatgatctccggggtgcggaggccgtttcggagcactactccatctccgagagggacactgcagaggcggctatgcaggatgcagcacggcgtgcactctcccagtactgttctttgttcggaggggtggccgacggtcttaaccttcggtactaccctcgccgtcctactggcagcaccgagagtgtggttgtctcacctgttggtgagggtaaccctaggttgagcagcacagtcaacctagtcgcagtgcttaacactgagctggatcactctctggacgagctaagcagggctcgaacggaaattgcggagttgcgtgctgagctggcagagcgccatcaccaggagggtggttctcccgctcctgttgggactcagcacccataccgctcgccgccacgtggtcaccacacttatggttcccctgcctgtaagaccaggatagatctggatccttag

SEQ ID NO: 41357 - DNA, 438 bp, Zea mays
  Peptide Sequence Number=SeqID_84732
atggagaaggatgacagactacaacaccaagctatggagctcaagtcacgcgtcggcacagataagtcctgctcctctccccattctgccctcaacaactttgtcctgctcatcttccccttttgccctcaacaacgttccaggcaagaggagaagaaagaggctcaaagattatttgaactcatcaagtctctgttcaatcaggctaaaagagagtgggtgggatttctgggcccaatccatatatggcaggaaacttggcgcacacatgtaggggacataactcctccaacaaggattaggcaggctatggagatgcaggctgaagtagaaaggagaaaatgcgctcaagtccttgaatcagaagggaagaaacaagcccaaatccttgaatcagaagctcaatcaggagcttcacagtgccaggtcttcatttga

SEQ ID NO: 41358 - DNA, 783 bp, Zea mays
  Peptide Sequence Number=SeqID_84733
atgggtcagaggacacttgccttcaccaaactgctgatcagggacttcctctgcaacttcctcgggaaacacagactgctcattgtctacgtaaagggcggcggcgctcgttcccgcggcggagaactcgccggagacgaggggcgcgggggctttgtggtccctggggcgaccggagtggcctgggaggttggggaaggcgcggggagtcttctggtgggggctaggtcggggcaggggcaccggagggggcggtccacggcgaagcggctcggcggcggcgcaaaagggctccggcgagcaatcaaacgcgacaggaggcaatacaaaggtcgggagggggcgggagaggttccttacctcaaggcaggctccggggactcctcggtggcggcaatggcgcgacggcggcccgggtcgacggtggcggacccccgcggctgcacggaggacggcggcggagctccaacggcgacggggaaacgggctcgggacggcggcggttcaatggcggcggtgctctggcgtgtgtgcggtgtgggggaggtgagagaggggtctgctggtgcgcaaatgagggagggggtgagggcgagcggggttctgggttcaagtggccgggggcggggcggttgcgagctccatgcgcgacgtgggcgcggagtccgcggcagcgcgcagctcgggcggcggttacgcggggatgacggggctgacagccgggacccacgggcagagagagcggggaagcgagcgcgggtgcggggaaagcggccgcgctga

SEQ ID NO: 41359 - DNA, 168 bp, Zea mays
  Peptide Sequence Number=SeqID_84734
atggcgttgtgtggaagttggagaggatttgatctatttggtggcaatgagaatgatggttttggtattgattatggtaatggttgtccgcattgcaaccactgctcaggagaagatgaagccgtggaaggagacttccaagagttccaagactacaatgagttctag

SEQ ID NO: 41360 - DNA, 1698 bp, Zea mays
  Peptide Sequence Number=SeqID_84735
atgaagcctgtccacacggcatggaggatccgcggcggagccctatcgccggtgagtaattctgggactcaacgccgccatacactttcgaaggcagcacgattcgcccaagcatggcctgacgaagctccacggcctgatccccatgtacagatgaccgcgaagaggatgttccatggcgagggcgatccgcccgcactggtgagcgcggccagcagcaccgggggtgttttcttccccccgacaacacgctgggagccccgcacggcacagtacctcacgcaagcacgaaacacgagcgtagatcgaaacgcgatggtgccaatctcccacgaatcaacagagttttcccccgccatttcctcaaccgaatcgatggcgcctggtagaatcgcccccacggccacgcactggattaccttctacccagtggtctctctctcaccgacgacggcacagttgaagcaccaaggtgatggcgtgaggggcacgagcactattgaggggtgtgagcgactgacggaatggggcccgctagtcagacccatgacgcggcctggcaggctaccgaacaggctattttacctgtcgatcccgccaaacatattcgtggatgtggttagatccgctagccgcaccgcgtcgtcttcaagcgggtggacaagatttatagtggagaagccattcggccgtgactcggagtcctccggcgagctcactcggtccttgaagaagatcgaccattacctgggcaaggaactggttgagaatctctccgtcctccgcttctccaacctcgtcttcgagccgctgtggtcgaggaactacatccggaacgtgcagctcatattctctgaagatttcggcaccgagggtcgaggcggctacttcgacaactacggcatcatccgggacatcatgcagaaccacctgctgcagatcctggccctgttcgccatggagaccccggtgagcctggacgccgaggacatccgcaacgagaaggtgaaggtgctgaggtccatgaggcagctgaagctcgaggacgtggtggtgggccagtacaagggccactccaagggcggcaagtcgtacccgggctacgccgacgaccccaccgtgcccaagggcagcgtcacgcccaccttcgccgccgccgcgctcttcatcgacaacgcgcgctgggacggtgtgccgttcctgatgaaggcaggcaaggcgctgcacacacgacgcgcggagatccgggtgcagttccggcgcgtgccgggaaacctgtaccggcggaacatcggcgcggacctggacaaggcgaccaacgagctggtgctccgggtgcagcccgacgaggccatctacctcaaggtcaacaacaaggtgcccgggctgggcatgcgcctcgaccgcagcaacctcaacctgctctactccgagcgctaccgccgcgagatccccgacgcgtacgagcgccttctgctggacgccatggagggcgagcgccgcctcttcatccggagcgacgagctcgacgccgcctgggccatcttcacgcccgcgctcagggagctggaggacaggaaagtggcgccggagctctacccgtacggcagcaggggccccgtcggcgcgcactacctcgccgccaactacaacgtcaggtggggagacatcaccagcgatgacgacggcgccttctag

SEQ ID NO: 41361 - DNA, 834 bp, Zea mays
  Peptide Sequence Number=SeqID_84736
atgtcgactgggaaacgccacctagatcagatcgaactcctcagtgttaggcggctcctcctgaaccacctgatcatctcctgtggggggggggagaagacaggggctaatctacaaaaattccagagactcagagctaaccccgcagaggacggcgggttaattcatttatttctcagggtctcctacgcaaaatgcgcaggccgaagagatcctcggatcatagatcaatggctcacattctattgcgcacagctagccggcggcgcgatacgagcacggcagcactcccaccggagtagctcaatacgggtgatcccgcccctactcactgctatacttggtgctatgcaatccctacgacacgacaatagctttggcagagagcttaccaggaatgacgccgcgatgaagcctgtccacacggcatggaggatccgcggcggagccctatcgccggtgagtaattctgggactcagcgccgccatacactttcgaaggcagcacgattcgcccaagcatggcctgacgaagctccacggcctgatccccatgtacagatgaccgcgaagaggatgttccatggcgagggcgatccgcccgcactggtgagcgcggccagcagcaccgggggtgttttcttccccccgacaacacgctgggagccccgcacggcacagtacctcacgcaagcacgaaacacgagcgtagatcgaaacgcgatggtgccaatctcccacgaatcaacagagttttcccccgccatttcctcctccgaatcgatggcgcctggtagaatcgcccccacggccacgcactggacgaatctctag

SEQ ID NO: 41362 - DNA, 231 bp, Zea mays
  Peptide Sequence Number=SeqID_84737
atggaggagcagggaagacaccacacgcttggaggagagagggagtggaaccttgagcgctggattagagatggagagctcgggcgttcctggcgtgcgtgcgtcgtctgctgcctagatgaagggggcgcgcccacggggaagaagaacagggagcgccggtggtctgctgctgtggggaggaaagcgcgagaagagtatgagaacgatcatattgagatattagactga

SEQ ID NO: 41363 - DNA, 540 bp, Zea mays
  Peptide Sequence Number=SeqID_84738
atggaggagcagggaagacaccacacgcttggaggagagagggagtggaaccttgagcgctggattagagatggagagctcgggcgttcctggcgtgcgtgcgtcgtctgctgcctggatgaagggggcgcgcccacggggaagaagaacagggagcgccggtggaagctgctggcactcgattggccaccgcgggcggcatcacctactggccggctgcagctattggcgagcaggcgcaacgcgtggctgagccaacggctagaagggggcaccggactgtccggtgtgcaccggacagtgtccggtgcgccaacggctccaaggagccaacggtcggcttcgccaaataaggaaagagatccgcaccggacagtgtccggtggtgcaccggactgtccggtgcgccagtcgacagaaggcaagaaatgccttcctggaatgcactcaacggctcctagctgccttggggctataaaagggacccctaggcgcatggaggagtacaccaagcattctcaaagcattcctaagcactaa

SEQ ID NO: 41364 - DNA, 1842 bp, Zea mays
  Peptide Sequence Number=SeqID_84739
atggaccaatacagatacaagaattatctggacagcattattttgcagctccgtgaacagtttgcagattcttcattgatggtactcaactttagagatgaaggaaaaagtcttatttcaggcattttctccaagtacaatattacagtcaaagactacccttgcaagtatctaggatgcccattacttcctttggatatcattctccacttcctggggctgagtgaaaggtggcttatgcttgaagggcagcaaaatattctgctaatgcactgtgagaaagatggatggccagtgttggcttttatgcttgcaggtcttcttctgtacaggaaacaatataatggggagcaaagaactctagatatggtgtataagcaagcccctaaggagcttcttcagatgctaaccacattgaatccacaaccgtcacatcttcgatatcttgggtacatatgcagaatggatgatgacatagggtggcctacacaacctattcctttcaccttggattgtgtaattcttagagaaattccaaatgttgatggagtcggtggctgtcggccaattgttcgagtatatgggcaggatattccaacaactgacagaaatcatggtgttgtttcaccaccatcaaaggccaagaaaaatattaggcgttacagacaggcagataatgcgccactgaagttaaatgttggatccttcgtccaaggtgatgttgtccttgaatgtctgcatgtagatgatggccgaggaaatgaaaggttaatgtttagggtgatgttcaatacctttttcatccagtctcacattttactgttgaactttgaggacatcgatgtcccttgggatgccgatcaccagttcacaaagaacttcaaagcagaggtactcttttcagagttggatgctgagtctgatgcatccactgaagtagcacctgattatgattatgatgatgatgatgatatggatgttgcctctgctgatgagttctttgaagcagaagaactcttcagtaatgctgattcccaagaaggaaataaggatgctgatactctttctatagcatctacagattatacttcaactccaagcgccgaacgttggagaaactcaccgttttccaactttgagccgaatattggcattgatggatcacgagacaataaagtcgataacttgggcttgttagaaacagtaaacgatggaaagacatgcacatccactgaagccaatactatgctcaacaatgaaactgcagttgttaagtcaactttggcagctacaatagatggagacgcagatagtggtatttcaaagtctacttataaagtggatgattacatgtttgaaaagggtagttccaagcaggatacaaggatgggttccaatcaagatttgggtcagattgataatgtgttggttaaggaggtgattatattagaaactaatagtcctaaggacatacagatgatcaaagaggtcatcatatctgaagttacaactctcaaacaggtagtagacgggagtatgatggaaactgaattagatgagacagtccatgattcagaaagcattgcattggcagaaactgaggatacaaaacaacttaatattttttgcaaacaggatgagggacacagtgtgcaagatgaatatgctgcttatgacaatggcatagtgattgaacaagaagaaagcagcaacgaagaaaaccttaccatcagagacacaaattcagaagtgactgagcccacagatgagaataatggatacaacagattcatctcgattggtgctaaagaaaaaaccttttcaaccattgttgacatctag

SEQ ID NO: 41365 - DNA, 1138 bp, Zea mays
  Peptide Sequence Number=SeqID_84740
atgataaatgttcacaggaagattcgatactattcacaaggaactcatgcaactgatgtggagcaggcattcctcttccacctggaggaggaggagggccaccaggcattccaggaggcattggaggagatggaggaggaggtggcggacctccatgacctccaggaggaggaggaggtgctggagctccacctcgaaaccctgctggaggtggaggcggtggagttcctcctagtcctccaaagggtggtggaggaggaggaacacctccaattcctccatatggaagcggtggtggagctcctatgtatcctccaggaggtggcggtggcgatggagctcctacatatcctccgggaggtggcggtggtggtggagcccctacacttgctttgggatgtggcagagctaatgcacattcccctggaggtggcggtggcggtggagctcctacatatcctccgggaggtggcggtggtggtggagcccctacacttgctttgggatgtggcagagctaatgcacattcccctggaggtggaggtggcggtggagactctacatgtcctccaggaggaggcggtggtggtggagcccctacacttgctttgggatgtggcagagctaatgcacattcccctggaggtggcggtggcggtggagactctacatgtcctccaggaggaggcggtggtggtggagcccctacacttgctctgggatgtggcagagctaatgcacattcccctggaggtggcggtggtggtggagactctacatgtcctccaggaggaggcggtggtggtggagcccctacacttgctttgggatgtggcagagctaatgcacattcccctggaggtggcggtggtggtggagactctacatgtcctccaggaggaggcggtggtggtggagcccctacacttgctttgggatgtggcagagctaatgcacattcccctggaggtggcggtggaaactctacatgtcctccaggagatggtggcggtggtggtggagcctctctgcatcctgtttgagggtggtggaggtgggatggccccagatcctttaggagttgatagtggaacttctccatgtcctccaggaagtggaggtggaggtggaggtggag

SEQ ID NO: 41366 - DNA, 303 bp, Zea mays
  Peptide Sequence Number=SeqID_84741
atggcgttcatgactcacattctccagcacaccggtgttctgatccctccagtgcagtctgctcctcctctagctcttcagagcaaattgggcaccggactgtccagtgcaccctatgacagtggggccagccaaccccgggggcagcgcctcttccccaagaaacccgagagcgacgagttcgcgaagttgaattttaacggtcacaccggactatccggtgtgcaccggacagtcattgttcactgttcactgttcactgtccggtgcactggcagaccaacgactatctgtcagaactag

SEQ ID NO: 41367 - DNA, 243 bp, Zea mays
  Peptide Sequence Number=SeqID_84742
atgacgatggcgaacccaacacagcagcgggagcttggccacggggccttaccgccgcaacgggctcaaccaaggccggccatggcgagcaccgaggagggcacggaagagagaggggtaggcgatgggcttctcctcacagtgatgaaccacagagggagtgcaaacttcggcggcgtgtctgcgcagcggctcaacggcggcctgggctggttcgaccggacttcggccacggcgagctag

SEQ ID NO: 41368 - DNA, 567 bp, Zea mays
  Peptide Sequence Number=SeqID_84743
atgcgcactgccgaggtagacagcggtcttgacaaggaggacccgcccgtcagcctccccctatctttccccactcttggtcactgcctggagggcctcgctctcgccgtttcccccctgttggtccgagtcgccgacccgtgggccccgcccaccagggagcgcccgcactcgcgtcccgcaccgaggatacccgggccgctgacgcgtgggacccgtcggcgagagcaggctcggatgagcgaccacacgcgccagagcttgggcagaacgcacgggcacacgtgttcgaccctggtcggcacgccagagctcgcccaacccgcgcgcgcgctcgccccggcgtccggtcaagtccgccgcgcgcccacgccctcggccgtgcccgcccgcgcctataaagcttccccgggcgcacctctcttcgccccgcactcaccctcatcgggccagccaccgttccttagctccggcgagcgtatttccgcccgccattgccgccagagctacggccgccgtggccagcccactccagccgccctccagcccaacctgtgcttcggctag

SEQ ID NO: 41369 - DNA, 423 bp, Zea mays
  Peptide Sequence Number=SeqID_84744
atggcacgcccggcacgccacgacaagcatcaaatatgtcgggaaagaagggagacggggaggctcaccgcggggaacgacgacgacgtggacggacgacacggcgtggacgaacgacggccgtggacgaacggcgtggacggcgggcacggcgtggacgagtatgctcctatgaacggcgtggacgaacggcgagccacgcgcggcggcgcggagcggcgagggcgcgcgcgcgggccacgagcggcgacgcgtggagagcgggcgggcgcgggcggcagtgcagtgagggagggcggccgggcgggcgggtgcggacgccggcgcgacgatggtggacgggggcgcgactatggtgggcggcgcgggagggcgggtgtgcggtcgggcgtcgacggcggcgcggcgctgcgcgtggagtga

SEQ ID NO: 41370 - DNA, 432 bp, Zea mays
  Peptide Sequence Number=SeqID_84745
atggcctttattgatcatatacccctgctcctctgctgtcaacaaggagctccgcctcgcccgacctcaggcctcggcctcagcctcggcctcgggagaaggtctccgcctcgcccgacctcaggcctcgacctcagcctcggcctcgggagaaggtctccgcctcgcccgacccgggcctcggaccgactacgctacatgggatacatcattaccctactcctagctagctgcctcaggctacgaaggaacaagaccagtgtcccatctaaggttactcagattgctctcaaccccctacggaagcaagacaatgtcagcaggatccatgccgcaccgacagctgtgcttctacagggctcgaggcacttcttcaacggccacgttagctcgtgtacagggctcaaggcacttctccgccagccacgttag

SEQ ID NO: 41371 - DNA, 531 bp, Zea mays
  Peptide Sequence Number=SeqID_84746
atggcccaagggcacatttccctttcaggaagcgacacccgttgttgtctcaggtgcgaggacaacacccgacatgtcccccgcaggggtgccggcgtcgtcgactcgctctggcccgacagccgacgaggtgccgcctcctgcactgccacggttgccccgtctcctcctcctccggcgaggagggtggcggggcaaacccgggtgttcctcttctgccacggtgggaagtcgctgtcgagttcgtcgccgtcgggcgagccgacgaccgttgttgctgtcgcgctgcggggggaggagtatcatgtcgtagctgccatcaagggacatgaactcgagactcccgaagcggagcaccgtccccggctgaagaggctgctggaggctacccatctggaactcaatgggaaagtgttcgttaacacgcagcaagcccctacctggcacgccaactgtcggcgtttcggacccgcgaggaccgtcaaccgaccagtaaatttgttgctgcgtgtccctgcccagatgggttga

SEQ ID NO: 41372 - DNA, 264 bp, Zea mays
  Peptide Sequence Number=SeqID_84747
atgacgagaatgatcaagggggagatgcaaatgatcaagacaaggaggatgaagaacaaagaccgccacacccaagagttcaccaagcaatccaacgagatcaccccgtcgacaccatcctcggtgacattcataaggggggtagaggaagcactccaagattcggatagggtggtggcgatgcaagaggagctcaacaacttcactaggaatgaggaaccaaatgggtcttccgcaacaagcaagatgagcatggtgtggtga

SEQ ID NO: 41373 - DNA, 228 bp, Zea mays
  Peptide Sequence Number=SeqID_84748
atgtctggagatcacgccaagctggagattatgaccggcgacaagtcctcaagttcggggaggactctctcgagggagtccggcaacaaacacaaggaggaatcctcttcctccatcaagtcgcatcggaaaggtgacaagaagaagaagatgaaaaaaggtcgactactacgagaccgattcttcgtcaccatccacatcgagctccgagtcatccgtcgcttctaa

SEQ ID NO: 41374 - DNA, 1278 bp, Zea mays
  Peptide Sequence Number=SeqID_84749
atggcgcagccgaccgttgcagatgtgggagccgttggcgcaccggacatgtccggtgcacaccggacagtccggtgcccccttccgaccgttggctcggccacgtgtcccgcgcagatcgcgcggccgaccgttggcccggccgaccgttggctcaccggacagtccggtgcacaccggacagtccgattcacatttaatcacttgtgttggcactcaatcaccaaaatacttagaaatggcccaagggcacatttccctttcagtaacaaaagcattccatcctctagtgatgaaagtagtagtgatgatgaaggtgagggaaagccctctctagatgagcttgcggaagccgtagaatttttccaggatgtttgcactaagcaaaaagctcaacttaaaactttgaaaaataagttggttagctctcaaaatgattacaaaggtttgctagaaaaatttgaaacttttgcaaacttaaatagtgagctatcaactaaaattgagctattagaatctagtgctccatccactgctaccgatgacaaccttattaaaaagaatgaaaaacttaagcctaagttagctagctcccaagaagctattgaaaatttgctagagaaaatggaaattcttagcatacacaataatgagctaactactaagctagaaaacattggtagcaccccagcagcatctttagttgaaatacctgaaataattaagaaagatgcttctacttcctgctttgatttaattgatgattctaacccctgcaaccaagtcgttgttgagaatattgttgtagagacatgttcggatgaggttgcaaaggaaaatgaacaattaaagcaagaagtggctcgccttggcaaggctttgtatgacaagaaaggcaaagccaaacaaatccgacctccacaggataacaccactgcgggagtgaacaagcctgtagagggagaaactgtgatttgtaggctatgccacatggaaggccacaagtctttccaatgcaaggcgatgaccggggataaacaaaggcaaaagctcaagcaaaatccatcaagcaaaatctccaacacctacatcaaaaaggtgaacaaaaaggatgctacaccatatttgatcaagaagaaaaagaacggaaaggtgatagcaatcaaggccaacaagcaagccaacaaaggaaagggggccaaacgcatctgggtgccaaaggagataatttcaaccatgaaaagcaccaagaaggtttggatcccgaaagggaagtga

SEQ ID NO: 41375 - DNA, 888 bp, Zea mays
  Peptide Sequence Number=SeqID_84750
atggcgttggtgagggagcacggtgggtactacggaggcttcgacagcgtcgaggcggcggccttcgacacgctcggctacggccacggcgcgtcgctgggctttgacgcgtcgtcggcgctgttcggggaaggcggttatgcggcgggcggcggggacgcctgggcgggcgcgggggcgtcgaccgtcctggcgttcaaccgcacaacggcagcggcggccgtgggtgtggaagaggaggaggaggagtgcgacgcgtggatcgacgctatggacgaggacgaccagagctccggccccgccgcggcggcgccagaggcgcgccacgcgctgacggcctccgtgggtttcgacgcctccacggggtgcttcaccctgacggagagggcgtcgtcgtcgtcaggcggagcggggcgcccgttcggcctgctgttcccgagcacgtcgtcgtcgggcggcacgcccgagcgcacggcgccggtgcgcgtcccgcagaaacggacctacctgagtgccgagccgcaggctgtgagccccaacaagaagcactgcggcgcgggcaggaaggcgagcaaggccaagctcgcgtccacagccccaaccaaagatccccagagcctcgcggccaagaaccggcgcgagcggatcagcgagcggctgcgggcgctgcaggagctggtgcccaacggcaccaaggtcgacctggtcaccatgctcgagaaggccatcagctacgttaagttcctccagttgcaagtcaaggttctggcaacagacgaattctggccggcacagggagggaaggcgccggagatctcccaggtgagggaggcgctcgacgccatcttgtcgtcggcgtcgcagtctcagagggggcagctgaattag

SEQ ID NO: 41376 - DNA, 2379 bp, Zea mays
  Peptide Sequence Number=SeqID_84751
atgggtgacgaagccaaatgctccgtcgatgtcgccgagggcgcctacatcatggccagcatcatggccgtctccggcatcatggtcactgtcctcgtgctctcggccctcttccattttgtgcttcgacgtctcggacagcccagcgttatctcccacatcctggcaggcatcgtggttggcccgacggtgcttggccgtgccatggacctccgccagctggggatgcgcgacgcgggcgacgcgcttgggggcacaatttacttcgtccgcatggtgttcatgttcttcatcggcctggagctggacctgcgctacctgcgccgcaacctacgtcgctcgctagttgtggcctgcggcggctccgggttctgcttcgtcctcgccgtgctgaccgggcccttcacctacggcttcctgcacccgggccagggccacttccagcccagcaacatctacgcctccaccgcgctcttcgcgatcgtgatcaccagcaccgcctcacccgtcctcatccgcatcgtcaccgagctcaagctcagcggttccgagaccggccagatcgccatcggcgccgccttcgccaacgacatggctagcctcaccgctctgagcgtcatcgtcgtcacccacaccctgtatggcacgatgcccaatgagaaggagtcctcgccgccggccaaggtcgcggtggtggcgtggatggcgctgacggtgtggatggccgttaaccttgcggcgtgggtggctcgcatgctcaaccggctcaagcgcgggaggcagtacatcagcaagtacgagctgtgcggtatgctgctcctcatcgtgggcctctcgcttctagagcagatcatgggctacagcgcctccatgacggccttcctcatcgggctcgccatgccacgcgagggcccaaccgcgaggacgctaatggaccgcctcgcctaccctgtgcaccagctcttcatgccactctgcttcgcggccatcggtgctcgcctcgactttgccaagatcggcaagttcacggtggtccagctcgtcgtggccgtcaccttcactacgttgctgagcacggcggggaaggtggccggcaccttgctggcggggcgggcgctgggaatcgcgacccgagaggccgtcgtgctgggtgcgctgctcaacgtcaagggctactctgatatcctcgccatcaactttgggaacaagatcaacgtatggggcgagaccatgcaggtggtgcttctcgtatcatccatcatcaacacgttcatggccgggccggcgtccgccgccatcgtccgccagcagcgtcgtgcctaccactatcgctcacgctgcctcgaggaccttagcctggcccacgagcttcgtatgctcctcgcgacatcgcgcaagtacgccatcacgcagcagctataccacgcccgggatggtggcgaggatgaggacgagtggggctacgcacgtgagatcgagcatgtggcctccgccgtggccaccttcacctatgacaatgccatcctcgtgcggcagatgacggccatatccagcttgggctctatggacacagacgtgcgcaactgtgtggaggatgcgcgtgcgtcgctggtgatcatgcccttccacaaggagcagcgctacgatgggcgcatggtgtgccggcatgaggggcggcggcaactgaaccagcggatcctgcataggcctccttgcacggtggggatccttgtggagcgttgctttgctcatgaggtcacgggagagcatcatcaggtggtggcgttgttcctgggcggggctgatgacagggaggcagtgtcattcgcgatacggctggcagtggaaccgttagtgattgtgactgtgtgccggctccttcttccaagcggaaggggcttggtgggcaatccggagatgatggaggagaacatggaagacgaggaattcatggcagacctatgcgcaaggtttgtggcaccaggtcaagtatcatacatggagaagtacgtgagcaatggcgcggagaccgtaaacacgcttaggtccatggtgggtacatgctcactcttcgtcgtgggaaagggtgatagggcccatggcaacagaggtgtgatgacaagtgacatggggggctgggatgaagaatgcgaggagctaggccccattggtgagctcctgtcctcggacgacttggtaggttgtggttccgttctagtgctacagcagcataacaagtacaaaatgaagacatgggacaaggacaaccaacaacaatgtcatcacgctagtgtagtcgatggcgatgctgttgttgacatcattggatcctcctccgtcacaagcagcagtactagtcattcacggcgaccaaattga

SEQ ID NO: 41377 - DNA, 363 bp, Zea mays
  Peptide Sequence Number=SeqID_84752
atggaagagtcagaaccaagctccgatggtgacgcccgtcaagaggagtggacaccgaagcaacgacgcacagggagggtgaggggaataggtaacagacctatcgagccagcaccaagaggctacaggaaagtgaggaaggggatgaacctccccaggggtggagagggacggaagggggatgaatctccaagcgctggctacggatggatgatgcctccggcatgggggttcctggccagggatggcaccccagcggagggagtgaatcctggtggcagggggagggaatcctggtggccgtttgagccagcatcgcgacgctacgtggagcgggagggggtagcgggcggcgacgtttag

SEQ ID NO: 41378 - DNA, 384 bp, Zea mays
  Peptide Sequence Number=SeqID_84753
atggagctgctcatggagttggtcctcggctacagtaaggtactaagagtgaagcggctccgaactggccagcttcgggaaaatccagggccggcgcgctataatccaccggactgtccggtgtacaccggacagtgtccggtgctccaacggaacgcggcctcaggaactcggcagcctcgggatttcacggagactgctccgctatatttcaccggacatgtccggtgtgcaccggactgtccggtgcaacctcggagcaacggctacttcgcgccaacggtcgactctgacagtgaacagtacacgcggcagaagtcagagcagaggatcagagaggcaccggactgtccggtgtgcaccggactgtccggtgccacatga

SEQ ID NO: 41379 - DNA, 381 bp, Zea mays
  Peptide Sequence Number=SeqID_84754
atggcacagcgcgtgtggccggcagcgcgcgggtggcagtgcgcaggggcggtggcacgtgggccggcggcgtgggggcggcgcgcggggctagcgaagcgcgggggcggcacgcgtggccggagggcgcaggggcggcggcgcgcggggcggcggcgtgggggcagcacgtgggccggcggcggggccgtgctgcgatttgaacttggagacgggattttgcggactagcgtcagagagacacctgagatgttgatctctggctgtagactcggtagtttgatacctggtaactctcgtgagcacaaggacattggagttggcgctattcagcccccatctaggcgactatcatttggaatcaagatcgttgcttcttga

SEQ ID NO: 41380 - DNA, 258 bp, Zea mays
  Peptide Sequence Number=SeqID_84755
atgaagcttcccaagccctcggaccaggtcgtacttcacccggaggcccgagatcgacctcaccggacttcggtctttcaccgccgcgcgtggacagggctaaccggccggactcctcgccgccgacgggcatccccgcctgcgcacgtggaccgaccgactccggccatccccgacggcgacccgcacatcgttgtgatccccgagacctcctctacgtcctcgaccacttcaccggagccatctcgccgccggtaa

SEQ ID NO: 41381 - DNA, 1221 bp, Zea mays
  Peptide Sequence Number=SeqID_84756
atggaggtcgttgagttggttccttgcgcccgcaataaatggggcaactggtatgagttttggttctacgttgcagagggcacagtcgaagaccatccggggctccccgtggccgagatgtgctcgcattattactcagcatacccgcagtttgaagtggcggaggaggatgcagacgaaggggccctgcggtgcgcggccggcctgagtagcaggcgcgatttggttgaggagtttgtggcgtatggggtgtggcctttggcgcatggctgggcgctgagcgaagtatgccctcgccagatgccttcccgtggtgggatgctggtgcgaagtcccgccttcgcactggatttgcatagccgcgatcccgccgcattcgtgcgtgaggcggatgatggggcggtgcggattgttggccggtacgtgccgaagacggagggccagcgtagctgggatatacgcgggtccaacgatcgcttgaacagggtcttcgagttgaaccgtctgccgtatggcggttatcccgggcaagacgatgtggatcgtcgcgggaagaagccggcggcagaggctggagacgaccccgcgccggcggccgccccatcctctaagaagaggaagctaggtactgctacgggaggactggggttttccgatggttttgctagggaactgatgaggacatgcgcggcccccgggggaaggatgtcttcgcccgagctccgggagtcttcggcgcggatgctgaaggttcaagattttgggcctgcgcacgcaaccgctactgctaattttttggcggcttcgaccgtggatgatgggaatgaatcggatgaatctgtgtctaagttttctgattttggtgactctgggagttcggttgagtggactgaagagtcgtcggatgaggacttggattactttgcggccttggatgtggcagcggcagaagcttctccgcgtgctgtggacgctgaagtttttcctggtccaagtgcggggcgtaggcggcgaagggcggttgtgaagcgtagagtgagtgaggcggacggcagtcggcttcgtgtgggcagggctggcaggcaggaactattgtccttgccggccgttgagagtgtaggtgagggggagctgcgaagtctttttgcgggtgaggagctgaggataatgctatttaactatagggagatgggaattattccgaaggttgagccgatgtaa

SEQ ID NO: 41382 - DNA, 2052 bp, Zea mays
  Peptide Sequence Number=SeqID_84757
atgaagagagcatcatatactgcctttgctgagtacatcccattagcagctaaacggaagaaatgtgtcttctacttagtccttaaccgaagcaaccaagtcccacaaacaaagaaattcagagataattccaaaagggcaaggtccaatattctgtgtccctgcaaccatcaatcagaccagaataaggattatgttggaaacaagagatttgagttgtctggccaactaatatcccttctttttgaggacctattcaaaacaatgaattcccaagctgttgagcgcatgaataaaaatagtgacaagactcactctagtcctttggattttagccagttgataatgcaagattccattacctttggtctggaaagggctatttccacaggaaattgggatattaaacgttttaggatgcataggaaaggtgtatctcaggttctttcgaggctatcctacatggcatctttaggctatatgacgcggataacaccccaatttgagaagactcgtaaaacaagtggtccacgtgctttgcagcctagtcagtggggtatgctctgcccatgtgatactcctgaaggagaagcttgtggattgacaaaaaatttagctttgctttctcatgtcacaacagaccaagaggaaggcccactgatatatctgtgttatagtctaggcgtggaggatttattgtctctctcatctgaagaaattcatacgccgggttcatttctggtcatgttcaatggattaatactggggaaacacaaagatcctcagaggcttgttattgatttgaggaatttacgtcgatctaatgtaattggagagtttgtaagcatttttattaatgagaaacaggttgtgttttggcaagccaagccattacatctgcaatgcccatccaaaggatttaagatcatgaaataccaagtatttaagatcatgaaatatcaagaggcaccaatgcgtagtgccatcctaagatatcatagcaatgagaagagagatcggggaaggccaaagttgacatggaaagagatagtaaaaggagacttgcattgcgttcacattgcctctgatggtggccgtgtttgtcgcccacttataattgctgatatggggatatcaaggatcgatgagactcacatggaaaaactgaggttggtttgccatcagcatggaacttgtggttttgatgatttcctgcgtgatgggttgattgaatatcttgatgttaatgaagaaaacaatgcactgtgtgcaatgggtaagcaagcgatgggaaatattgcatataatcagaacttgtttaatttcacaaggcagcagatccgacaacaacacaacaagttcttagcagtggtagaggagggtaacatgtggtgcttggctggtgcttcagccctgcaggacctcctcttgcgtcggctcccggtggggtatgataaacttggcgctgggcagaacgccactgttgctgtcatgggatatagtggttatgatattgaagatgcaattgtgatgaacaagtcatcccttgatcgaggatttggccgttgcatagcattgaaaaagtacacagttttaaaggataactatggagatggtgtatccgatatgattgttgaaccccaaagagataatggtgttttgattaaacagaatatgagagcgttggatgaagatggaattgccggacctggtcaaattattcgcaatcatgatatctatgtaaacaagcgaactcccaaaaacacttcaaaaggtattggtagggcattgagagaaagtgactacaaggactcacctgccttgtacaaaggtgttgatggtgagactactgtggtagatcgtgtaatgctgtgctcagatacaaatgataagttatccattaagtgtattattcgtcacactagaaggccagaggttggtgacaaattcagtagcagacatgggcagaaaggtgtctgtgttcattctacctggcacgaaactatgggggtattaaaagatgttccaagtagtggatatgacattatataa

SEQ ID NO: 41383 - DNA, 1104 bp, Zea mays
  Peptide Sequence Number=SeqID_84758
atggatggcaacgaccacccccacagcggtaagccccccgtctcacagctcctgcaaggcctccagaaggggctggagattcttctgtttctcgtgcgtagccccatagcgccagttgctgccggcggcagtcaccactcgttgagaaaacgacgggagcctcccattgtcatttcggaggtaaaaccaccggcgctgccaccccttgttcgaagacacaaggatggcggggatgtactattgcacgtgcgcctgcctcaactggaggatgcagccaccagtccgcaccgccatgcggaccctcctttcccccgtcgtcaaggcaaaaggctccgtggagaagagatgggtccacagatcccagtgggggtcaatccccaaaaatccttagcaaaccgccgcgaagatggccgcttgcgcgatggagttggggttgagattgtgcagctccaccccatagtaatgcaggagcgcccgcatgaaacggcttgctcgcactccgaacccctgctcatggaaggagatgaaactcagcacataccccgccggcggggtcggggcggccccgctcggagggaccatccactctggctgcgggtcaccagagaggggacggagcaagccatcggcaacaagggcctcaagatcgtccaccgtgacggtggagaaaggccacgggtcgcgcggcggaacgacggttacccggtctaccatcgccaagcgaagggggtggcagcggagcggacaaggcccgggcaagacccgttcaacacttcgcccgaacccgccatggaattcaaactcgaaggcgaaacgcccgttcctcgaacggctcgtgcaacggctgccccgcaaaccacccgtcccgtcgcattaactctgcggcagggcatgcgacacctttggcaggcgaagcgggcgacgcttcacctccgccatgatgaccgcgtcaaaaaagggactgggaaaggggatactccgaaagggatccttctccgcgaaggaagcgggccccgagccctcctactgatcaggggttcgaaggctggcccctcggaagggttcgacagccaccccagagcacctgggctccgcgcccactag

SEQ ID NO: 41384 - DNA, 309 bp, Zea mays
  Peptide Sequence Number=SeqID_84759
atggtagaggtccagcgaacggtcgggcgagattcgggggtccctggcggtcacgtcgaggtgcggatcgccgacggtggtgaccggaggagggctggccgcgtgcgcaggcgatcgagctcgtcggtggtgcgtgctccggcctgctcacggcgctcggtccacgtgcggcggcggtcggctggagtccggcgatggcaatctggtgtctccggcgaagtagtgtttggtctgagggctcaggaagctttacagggctctagggaagctagccaaggagctagattggatggaggtgggccagagtag

SEQ ID NO: 41385 - DNA, 609 bp, Zea mays
  Peptide Sequence Number=SeqID_84760
atggcgagagtagcttgcaccctctatggcaagaggctggacggtggtgtatctgtgccctcggttggtgtgaacccggtgccccctgcatcacaactgggtgccctgactgctagagtagctgctggaggagaccttgacgatggagacggtgacgacagcagctcgagccacagcactgacctcacagagaagcagaagctggaaggatgggtcgcccgacccatcactcgtgacaccgctcgtgggtgtgacttccacgatgcgctcgacaccttgttgcaccgggcctttgacatgcacacttggccaatcgagtatcgctgtgtggtctaccaacacagtcgcagggtatacccgaaccattgggaggctacatgcttggtgcgccatttggaggatggtcttcggggtgcggagtactgctcgctgttcagtggggtggccgacgttcttaacatgaggaattacccccgccgtccaactggcactattggaggtgtggttgtctcacctattagtgagggcaatcctaggttgagcagcacagtaggccgtccaactgggtgccatcgtgctcaacacagagctggaccacgccttgaatga

SEQ ID NO: 41386 - DNA, 1074 bp, Zea mays
  Peptide Sequence Number=SeqID_84761
atggtgtggatgaagaacgtctcatcgtcaaggggaggagacgatgaggaccctcctcaccccttcaggcaggacaaggggaagacggtttatcttgagcagcaggagggcaggaagaagcgtcgtatggatagagcggctcatgcagcacttgcagcggcagcagcagcagagcaggtagagcggggaggacagttgcagatctcttctgatcagatagcctacagagttcatcgcctcgcatctcggccttgctccactgctccctccacaccttccgccactgtgtctactccaccttccagttcaccagcttctgtcgctctagagccatccaccacttcctctatacccaccatctccacgactccagcttccactattccccctcccactcccatttccgcttcgcccattcctccacctcgcttcagggagcgtgacaagactgagatgcgaccactagctgctgatccccatctgctcaaccttcagtgtgccactcctgcccggatgagacagacactactacccaggatggaagacatagcggctaccactcatattcagttatggctacttggtgccttggtctcacattcagagtttgacgtggttgacttccttatttgtgagatcgaggatacaatattggatggtctccatgctcgccgtcagctgttgtatgctcattatctctatcacatctttgcatggctgatcaggcctcctcaattccagggcaccctcgaggcctcttgcctccagttcggtttctatcgtctagcccttaaggacccagtcctagtgccagatccagtgtcagatgtttgggctgaggatgagaccttcagacagttcgagacccaaggtgttgttgctgacacttcttcagatgatgatgagggccttgggattccgccaccgcctcctatgccatattgctcacatgatcatgaggcgggtagttccagtgctgcttctgctgccctactagctattgatcctgctctggtcgcgattcttcagtcacttacgcagcagcaggctcatctggcagcagagcaggcttga

SEQ ID NO: 41387 - DNA, 183 bp, Zea mays
  Peptide Sequence Number=SeqID_84762
atggcggaggatgcgaacacggaggggaggaccacagaggatgcgtctactcggagcagagatcaaggagcgttgatggcgggccgcgttgatggcgaggctcgtagatggcggatcgaggcccatgaatttgagataggcttatatgataactttggaaagtggtggaatgttacattctaa

SEQ ID NO: 41388 - DNA, 927 bp, Zea mays
  Peptide Sequence Number=SeqID_84763
atggcgaggccgacgaggaggagtgcgcactcatgctacagagggaatctcaaatgttcctcatgtggagaacctccagaggctcacatgtattcctacactcaccgcaacgggaatctgattgttcttgtgaggcacttgctgcctaaatatcgtttacctggtgaatcagaaggaaagatttggatgtggactagatgcttaaggttgggctccaaagttgcaatgttccagtattcctcagtcgaaatttacaatggctgcaaaccacagcctactcttgagattcacaatcctgatatgcacgagtggtacgggcaagagatacgaaatgtatgtatcgttcattcccggcggtcgtggacgtccatgctggggaccttggcgtggtcgactttcacggcggtcgtggacgtccatgctgtacacaacagggttgcgcgtgagtttcatcctaattttgcagcgaaaagaggaggggaaggacagtcctcaaaaacactagagaattctgaacacaacataaagcctcaaatctttgatgtggccaaggttgatgaaattctcaaaccacttgctggaaagacattatcttacaagatgtttgcacatgatacacatgcttcacgaagtgtgatcacaaaggaggcatggtggtcatgtgtggtgacctaccattgttttaggcaagaggtcaatagtaacaagtatatgcagcatgcaatggattttggaaatgtcgagggtcaatgtatttctattgtcaacaacaaccttctgctttacagtggtgtacaaggatgtttttgctctatctcgatgtactatgtgaaccaagaacttacagttgaggattttctttatgattatgattacaagatagacctttctaggtctaatctgaatgccctgtttcgagttcactga

SEQ ID NO: 41389 - DNA, 675 bp, Zea mays
  Peptide Sequence Number=SeqID_84764
atgccgcccaaattggaggcctctcaggtggtggaggtcttcgtccgcgtgacgggaggcgaggagaccgccaaggactggaagggcctccgcgtcaccgtcaagctcaccgtgcagaaccggcaggccaaggtctccgtcatcccctccgccgcggcgctcgtcatcaaggcgctcaaggaacccgagagggacaggaagaaggtcaagaacatcaagcacagcggcaacatcagcctcgacgacgtcatcgagatcgccaagaccatgcgacacaggtccatggccaaggagttggccgggaccgtcaaggagatcctggggacctgcgtcagcgtcgggtgcaccgtcgatgggaaggaccccaaggacttgcagcaggagatcgatgatggtgaggcgaagggccgtcttcacaggtgggacttcgagactgaagaggagtgggccaagtacaacgatcagaaagaagccatgctgaaggctgccttccagttcggggtgaagatgcaggatggcaggaaaaccaggaagcagaacaaggaccagaagctgacgaatgacctccacaagatcaacaagattctggctaggaagaagggcgagaaagatggggtggaagatggcggtcactacgatgatgatttacctagctcaaagaaacagcgtggctga

SEQ ID NO: 41390 - DNA, 274 bp, Zea mays
  Peptide Sequence Number=SeqID_84765
gaatcgacagtcaagcttcgacgaccaagagatcgaagtcttcgagttctacgaggctgaagaccctgagcatatgtctggtgaaggcaagtcggatgcggacgcgaaatattcattggattgggttcaatacaaaacgggggacaaggccgagcccaccaccgtcgacgaggcattcatggaacgcagcaagagcttcatcaaggccctccaggagctcaagaacctgcgcccacagctctacaccgccttcgagtactgcgacaagttctaa

SEQ ID NO: 41391 - DNA, 414 bp, Zea mays
  Peptide Sequence Number=SeqID_84766
atgcaggcggcatacaaccgctccaagtggacgcacttctccgactcccgacacgcccgcatggaagcccaggcccacgcgtcgcgcaaccggcgcgccggatgctgcatgcaagcaactacatcgcctgcgccaccaccgagcaacgggcgacgcttcgccttcaccgaaacaaccgcaccaaaaaagggaccggaaaagggggataccccgaaagggatccttcctcgtgaaggaaccaggctccgagcctccttactgatcaggggttcgaaggctggccccccgaagggttcaacaaccgcctcagatcgcgtgggccctacacccactactggtcagaggttcgaaggccggccccccgaagggttccacggccgcctcaggctactcaggcttcgtgcccattactga

SEQ ID NO: 41392 - DNA, 141 bp, Zea mays
  Peptide Sequence Number=SeqID_84767
atgcctccttaccctggagatctcgcgctgctcgggggcgccgctgggctcaaacgacgtgaggtacgggaccagcttgcgccgttggatcctgagtgggcgcatgagatgaagtgtgattacacagttttggttcattaa

SEQ ID NO: 41393 - DNA, 192 bp, Zea mays
  Peptide Sequence Number=SeqID_84768
atgagggggagcatcagacaagacgatcccacccgtcagcgagataaggatgaggagctcggatgggtgaggcagacagttcgggcctacatgtcagtaccagcgcgagcgcacaactgggctggttgggctgcgcgcacacgccggatgggccgagcagggagaagctggcccaacgagtcttttatttag

SEQ ID NO: 41394 - DNA, 471 bp, Zea mays
  Peptide Sequence Number=SeqID_84769
atggcgcttcctgtcgacgtggctggcctgtgccctaggttgggcgacgtggaggctccttcgaagccggggtcgagtctgtcttccatggccgaggccgagtccgagcccctgggtcgggcgaggcggaggtcgtcagcagaggccgagtccgagcccctgggtcgggcgaggcggaggtcgttcgcagaggccgagtccgagcccctggggtcgggcaaagcggaggtcgtcagcagaggccgagtccgagccccttggtcgggcgaggcgaaggtcgtcagcagaggccgagtccgagcccctgggtcgggcgaggcggaggtcgtccgcagaggccgagtccgagcccctgggtcgggcgaggcggaggtcgtccgcagaggccgagtccgagccctggggtcgggcgaagcggagttcgtcgtcttccgggggttagcccgagttcgccgtcttccgggggcttag

SEQ ID NO: 41395 - DNA, 651 bp, Zea mays
  Peptide Sequence Number=SeqID_84770
atgttgttcacgcctattgaagaactggatcctagaagtacaaatgttgcaataagagtgtgtatcattagaaagtgggaattccgaggcgcaataaatgatgggcctttgtgccatgtcaacctcatcttagctgataaacagggcacaaccatccacactgagattcaagtcgccctagtagctgacaaaggctcactaatccaacttgacaaagtctatgagctcaaacattttcgtgttgcttcatccagaaactattacaaacctgttgacaacagtatgatgatacaattcactctttacactcaagcaaaagtactcaaggatccaccacccacctttccaagatatgcctacaaactcacatctttcgaaaatataggcaacaatgttgacaataaaacgtacttgattgatgttctaggaatcttgacagaaattggctctttacatcatgttggttacaacaactcaaacatcatcagagacatatttctcaaggatataaattacactatctacatttacaaatacaataacaagtgtgttactcccaatgtaggagaagcatatctaagtgccacggtagcatgtacatggtacttcaacccagatattcctgaagtctatatgtactacaacaagtaa

SEQ ID NO: 41396 - DNA, 195 bp, Zea mays
  Peptide Sequence Number=SeqID_84771
atgacgtggcagggggcaccggactgtccgaagagttaccatgaatgcctccagacagagaaggggaagttctacattgaccttcttccgggaacatcgattgcaaagagactataccatatggcacctacaaaattggcagaactgaagacacaaatcacagagcttcaaatagaaaggcttcatttgtcctag

SEQ ID NO: 41397 - DNA, 555 bp, Zea mays
  Peptide Sequence Number=SeqID_84772
atggcgaggcaccgacggaggccctcggcagcggtggcggaccgacgcgttggggcacttatggacggcggagtggtggggccggcgcggtgggcaccgacgagcgcagtaggtcggcttggtggggcaccgatggacggcgtgtatgaggccgacgagaataaggtaatccccatcggccaaagtacggggccgacgggaataaggtttctagtgaggacttcaatgagtcgggtctggttggctagcacttgggctctagtggcatttctgaagctccaggctttctacctgggtgttttggtgggtgtagtgggagaaaaggttgtcgaagtgggtgtcaaaggtgtggaggtatccgaccatgtaaactatggcagggtcatcctcatcatggtctcccccgtacaaagcttggagtcttttcctccaagtggtgctatttttgtttgtgggtgggaagtagcgaaggggcgtttcgacaacttattttgtcatagttttggcaaagttgtgtggagggcttttagggcggtcttttggcaagtgccttga

SEQ ID NO: 41398 - DNA, 426 bp, Zea mays
  Peptide Sequence Number=SeqID_84773
atgaccaagtctcacaatcaaaagaacaaaggcaacaaaggtagggatcagagggaaaacaaggatgtggcttatagggcaaaaagaaggagctcggggaagaagaaatggaacctgaacttcgaccttatcgagaggaaaaagacagagctcgtggacggcggcgcttcgggctcggggaccgtgacggcggcgcttaggctcggggacggcgggcactcgggctcggtgaaggggacggcggcgctcgggctcggtctcggggacggcgttgctcgggcgctcgggggcggtggcgctcgggctcggggacgaggacagcagggctcaagctcgatgaaggggacggcggcgctcgggctcgcccaaaggggaggcgttgctcgggcgctcgggaacggcggaatttgtttccttacggggacg

SEQ ID NO: 41399 - DNA, 520 bp, Zea mays
  Peptide Sequence Number=SeqID_84774
atggattcaccaagcgggctctggtggcggccggcgccgtcgtcgtgtcctccattcccgtcaaccccctcgatgtcgccaagggatgctgatgcgtgcggtagagcgcgccaggacctctccctcacagatgcacctccgcgtagtcgccggcgaggacgacgtgacacctactgtcgtggttcccccggggacgctgatgcgtgtggtggagcatggttggacctctccctcaccgatgaacgcctgcgcccgacacaccgcgtccccgttgttcacctcggcctgctgctgggcgccacctcgcctccctcgccgcgttgctgcacgtgcctctaccgtggcgacatgcccaagcacgtgaccgaggccaacctgctcgtcttgttctgtgaggtcgccactgtcgaggaggtcaccatcatcaaggacaaggccaccaaggtctcccgaggtgtagatctgcctggccccagatctgggctcgccgccctcccttccccacgcctgctcccgctcg

SEQ ID NO: 41400 - DNA, 303 bp, Zea mays
  Peptide Sequence Number=SeqID_84775
atgacaaaggaagctggccaaggatctggatcatcagagcgcataggagggctaccgcatgagcatcagcgtcactatatattactcctgtaccacagagaaggtttgaatatgtccgaagctcctaaggattccatggaagttgacctgttgcagaaaacagaaaaagtaaaagttacaggagaactgtcatctgaagaagttgagactgcaaggcaaacatctcaagtggaagctgcagacagtacatttgtcagtgaagttgacaggcttgagaaagcaggaaatattgatgctgagtga

SEQ ID NO: 41401 - DNA, 1039 bp, Zea mays
  Peptide Sequence Number=SeqID_84776
atgcaggccgcatgcaactgcaccacggggacacaccctttcgacttcgacgcatccagcgtggcggcccaggcccacacgtcatgtaaccggcgcgtcggttactacatgcgaaaaactgcaccgtcacttgcgccagtaccgcgccttctcgactacggaactggtgtcgcgactcgaggcaaccctgcgcatagcccaacagtgccaaccgagcgcaacggtcacgggtcagtcagccgcgggagaaggcgcgacggtcgatatggccaaaagtgggccgacagtaatggcggcggcaagcgggcggaagcagcagtcaaatcggcaggcgacacctttggcaggcgaagcgggcgacgcttcacctccgccatgatgaccgcgtcaaaaaagggaccgggaaaggggatactccgaaagggatccttctccgcgaaggaagcgggcctcgagcccccactactgatcagaggttcgaaggatggcccctcggaagggttcgacagccgcctcagagcactcgggctccgcgcccactactggtcagaggttcgaaggctggcccctcggaagggttcgacagccgcctcaggccactcgggctccgcgcccactactgatcaggggttcgaaggctggccccccgaagggttcgacagccgcctcagaacatgcagagcgagggatgactctaggtacgtccgatacatggccgaggctcgggctacgctcccgaggaccgggttcggcaaatcacctgcaggcgccataggaagctccgcctcgcccgaccccagggctcggcccccgcctggacctcggaagacgatctccgcctcgcccgacccagggctcggcccccgcctcgacctcggaagacgatctccgcctcgcccgaccccagggctcggactccgcctcgacctcggaagacggtctccgcctcgccagaccccagggctcggactcagcctcgacctcggaggaatcaccgccttgcccgaccttgggctcggaccgaccacgttacaggggg

SEQ ID NO: 41402 - DNA, 921 bp, Zea mays
  Peptide Sequence Number=SeqID_84777
atgaagaagacatggttgccttccgaaaggggtcgccccccttttaaaggcaactctccctacgtgcgcccccaaacgccacgggctgagtcttctccaacacactccaaggccctcccctgcggcgcggggggctgggtcccgcatgtcatgcaagccggctcagagcagaagaagccaaaccgccgcgcgtggcgcgcacaaccgcccagcggttacaagcgaccccccattttggcccagaccaacgggcggaaggagtgggcagctatgcaggcggcatgcaaccgcgccaagtggacacgcttctctgactcccaacgcgccagcatggaggcccaggcccacgcgtcacgcaaccggcgcgccggatgctgcatgcaggcaactgcaccgccacttgcgccaccgtcgcgcctcttcggttgcggaaccaatgccgcgactcgaggcgacccagcgcacgacccagcggcgccagcttggcgcgacgacggcgcgcccgtgatccgtccctcgaacggctcgcgcacgcacaacggccgccccgccaaccactcgccccgtcgcattaactccgcggcgggacaggcggcgcttctggcaggagaagcgggcgacgcttcgccttcgccggaccgggaaagggggataccccgaaaaggatccttccctgtgaaggaaccgggctccgagccccccctactgatcagaggttcgaaggctggccctccgaggggttcaacagtcgcctcagatcgcgtgggccctacacccactactggtcagaggctggcccccgaagcgttcacagtcgcctcagacgccgagcgagggatgaccagggggctcggactcgggctaagccccggaagacggcgaactccgctccgcccgacccagggctcggactcgggctaa

SEQ ID NO: 41403 - DNA, 420 bp, Zea mays
  Peptide Sequence Number=SeqID_84778
atgtggacagaagaggtggtatactccaggataccatcagtaggttcggacctcctcaagaaagcgccggacccctgtacacatagctcggacctccgggtacggtccgggactcccaatgctatactgtcccaatttacacaacagcagatgaaccgttatgagtcattccgaagatctggatttcagaaatctaacatgaaaaggctgttggcaagcatcactggaagtcagaagatttctatccctacttcaattgtggtatcgggaatcgccaaaatatttgttggtgagctaattgaaacaggcaagttcagaatagtcgtgttgtttactttgtttctatggaatcgaatctgctacagcgttgctgaattcaagagtggtcatgagcgagaggaaggattcaggacccattag

SEQ ID NO: 41404 - DNA, 546 bp, Zea mays
  Peptide Sequence Number=SeqID_84779
atgctacgccgccggctgcctcattggaactcctgtgcaccgcttgcctttcttctcccattcaacccgcaggcgttccctggctcaatagcgcaactaggggatgtccgccgctacctccatataggaaacgacagatttagattttcaggtgatgcgtggtcgggatcccggatcaatcaaaataagtgtgaaataagtgtgaaatttgagaggctgttgaacttccagatcagacccttgccccaacattttttgggcttcagagaaggcaactgtatatttgctcaaatatttgttgtctcaaatgttcacatttgctctgtttgtagttgtgagatccttaatgaaaccaaagagctgcagcagataaccaacgacaagcagaaaaatcaggttgtacgcatccaacattttactttcatatttgctgaagatgtcaacaaacaaaatagacaagcagtacgatacgaattaacggagcgatacgatcccccggcccggccggcagcgagatacggtaggtgtctcatagtctatgattga

SEQ ID NO: 41405 - DNA, 2046 bp, Zea mays
  Peptide Sequence Number=SeqID_84780
atggcgccccgcatgctctgtgacgacggcggctctcagcccccttacggaagcaagaggacggcgggcagcgcggggaggacgggcggctcgggcgtggcggcgctagagcggcgcggcgagggagagctcaggcgtggcggcgctacggcggctcggccgtgccggcagaggggcagcgagggagcggccggcgtggaggcgagggagcagccggcctgggagccgcctcggcgtgggagcggctccggcagacgggcggcgagcgagcagccggcgagggagcggcgagggagccgcctcggcgtggcggcgagggagcagccggcgagggagtgctccggcagaggggcggcgaggcagcggcggcgtggctcgggcggcgataacggcggcggagagaaaacagagacagtgggcagaaaaccgcggtgccacgcggtctgccacatcggcttcgccacgtcattgctcggcgccacactctatggcgccggcatgtgttacctcggcgccataagttatgacgccgagctaaggctacaatcgtgcacctgctggccacagtgtctctccctcctttccggcgcgcctcagtttccgtcccggatcgacgtccttgctcctgacgcggccttggcacaaaaaccgcgccagctgctcggcgtcggcgagctcgtgtcagctgatcgtgtcgtttccgtccgcgccacgcgcgctagcggcctccaaactgggacgacgagtcccctgaccctcgcctcggctgcctcctgggtcctggcgctgctcctcgccctccttttgccgcgaccctccctccgatccggcctcctccccaccgcactctcctcacctcacctgaccgcgcactctcctcacctcacctcgccaatgctctccactacctccccggtcccactcctcgacacgccggcgccctcgacggacgccgacgccaaaaatggcacggcgagtcggcggcgcgcgcggctgctgctgctgtgcgccaactacgctgcgctcctcggtggctccgtggcgtccagcctgctgtcccggtactacttcgcgcacggcgggtgcgaccggtgggtggccacgctggtgcagtcggtcgggttcccagtcctgctggtgcccgtctacgccggccggcccgcctcccactcccagtcccagtcccagccccggccgttcgcgtggctcacgcggcggccgctgctggtggccgcgtgcgtcgtcatcggcgtgctcatgggcgtgaacaacctgctcttctcctacagctcctcgtatctgcccgtgtccacctcgtcgctgctgctgtccacgcagctggccttcacgctcgtgctggccgccgccatcgtgcgccacccgctcaccttctccagcctcaacgccgtcgtgctcctcacgctcagctccgtgctgctcgcgctccggtcgtcgtcggccgagcgccccgacggcgggagccgggccagctacctcgcgggcctcgccgtcacgctcggcgccgcggggctcttcgccgcctacctgccggtgatggagctggtgtaccgcagggccgtgtccggcgggttccgcatggcggtggaggtgcaggtggtcatgcaggccgccgcgacggccctggcggtcgccgggctggccgcggctggcggcgggtggcgcggggagctggcgcgctgggacctctcgccggccgcgtactgggcggtggtggccgcgctggtggtcacgtggcaggcctgcttcatgggcaccgccgggatggtgtacctgacgtcgtcgctgcacagcggcgtgtgcatgaccgccgtgctcaccgccaacgtgatcggcggcgtggccgtgttccgcgacccgttcggctgggagaaggccgtggccacggtgctctgcgtctggggcttctcctcctacctgtacggtgagtacagcaccacgcagcaggcgcaggaagaaggcgaccgcaaggtggcggccgcgtccgacggaggtggcgcggggcacaagagtgttgctagtgatgtg

SEQ ID NO: 41406 - DNA, 1788 bp, Zea mays
  Peptide Sequence Number=SeqID_84781
atggtgagggctgagccaactcccatttatttgacagctattgaagaagcaatcgacagcttgaagactgatgctagcatgaaggcaaacaatgtcaacttgcctgctaagaaagacgcaagttcttctgatgcagtatcttgcatttcctccggcgatgcagctagtactgtgaaggatagagaaatgaaccaagaaacttcttttggcgaccaagggatgcattactatggatattattatcctggtgcatacggaggatgggatgagaatggctactttgttggatataatggcctagaggtgcacccagcagtggttcaagctgacaatggttcatatctgtgttatcctctggggtatgaaaatggatatgcttcttatattccggttgttcctggaggcattgccagtgtggatggtcagtatgtcagcaaagaaccatattactccagtgcacttccaattcaggatcctagcacacctggcatttttgctcagccaattgcatatggaactgaactagtacctgcctactcatgggacccttttgttcttctggatggggttcagggacatccagttggtgtgcatcatacaaattatgctccaagaccaaaatattcttctaataagcatgttgttccttctttgaaagcttcccacagtgcaaaatccacagcagatactgtcaaaggatcatcatcagctctagaaactgcacctggtgcttccataacaaaaggatatcttccatctagcaagtttgtgatgcacagtaataaccaagcaaaaagcagtgtttatcaaagcaaaggcatcaatctgaaagaaagtggtagaagctggcacagcagtgagaagcttaaagcgagaagtaagctaaatggacatggcgattctgaatctaatgagaacaaccacactgataactcgaaatatagtttgagctctcaatctgatgttgttggattgtcaagtgtaggggatgctaacgccagcataccttcacctgtcgtaataagaaaaactgcatacaatctttcagattttgttacaaagtatgagcaagctctattctttgtaattaagtcctacagtgaagatgatattcacaagagtattaagtacaatgtttgggcaagtactcctaatggaaataaaaggcttgacaatgcctataggcttgcacaggaaaggatggcagaaaaaggaaccaaatgtcctgttttccttttcttctcagttaatgcaagtggtcagttctgtggcgtggctgagatggttggcccagtagatttcaacaggaacatgaacttctggcaacaggacaagtggaatggtttcttctctgtaaaatggcacattattaaggatgttcccaatccacaatttcgccatataattttggagaataatgagaataaacctgtgacaaacagcagggacacgcaagaggtcaaattttcacaaggtacagagatgttgaacattttcaagaacttcacgtgtaaagcatcaatactggatgactttgacttctacgaaaatcggcagaaagtaatgcaggatagaagaggcaagccacttacatcgtttggtcacccattgccaaaagctgaaaaaactgcagaagttaaaaggcaaacacaattgataagtgccacggaagttggtagagccgatacaaccaaggaaaatgaggagaagagcagcagtgttccagaaatactcaacgcagcatgtagtaacaaggagaaacccaacaaaatcgcaacagacggatga

SEQ ID NO: 41407 - DNA, 552 bp, Zea mays
  Peptide Sequence Number=SeqID_84782
atggcgctccctgttgacgtggcgggcctgtgccctaggtcgggcgacgtggaggctcctccgaagccgaggtcgagtctgtcttccatggccgaggccgagcccgagcccctgggtcgggcgaggcggaggttgttcggcagaggccagggcggagtccgagccctggggtcgggcgaagcggagttcgtcgtcttctggggcttagcccgagtccgagccctggggcctgactgcgtgtcagtctcactctgtcaagtggcactgcagtcggagtggcgcaggcggcggtgtccttctgtcagaccgctttatgctgatgggggttaccagctgagaattaggcgtcttgagggtacccctaattatggtccccgacacctagggtcgggcgaggcggagaccgtcttccgaggtcaaggcggagtccgagacctggggtcgggcgaggcagagatcgtcttccgaggtcgaggcgggggccgagccctggggtcgggcgaggcggagatcgtcttccgaggtcgaggcggagcttcctatggcgcctga

SEQ ID NO: 41408 - DNA, 858 bp, Zea mays
  Peptide Sequence Number=SeqID_84783
atggctgaaaggtaccaactcccgcggagttgcgttcctccaacgaagaggcggaaagacggcgggtatcccccatccgggggcttggaaggtggaaagacacgatgcataagggagcgcgaagacatggtcgccttccaagggggtcaccctccttttaaaggcgacgatccctactcgcgtcctcagccgtcacgggctgagtcttctccaacacgctccaaggccctcccctgcggcgcgggggctgggtcccacatgtcatgcaagccggctcagagcagaagaagccaaaccgccgcgcgcggtgcacacgaccgcccagcggttacaagtgaccctccacttttgcccagaccaacgggcgaaaggggcgggcagccatgcaggcggcatgcaaccgcgccaagtgggcgcgcttcttcgactcccaacacgcccagcctggaggcccaggcccacgcgtcatgcagccggtgcgccgactgcttcgtgcatgcaactgcaccgccacttgcgccaccaccgcgcctcctcgactgcggaaccaataccgcgactcgaggcgacccagcgcacgacccagcagcgccagcctggcgcggcgatcagtgcggccaaaaatgggccgacaggaccgggaaaggggataccccgaaaagggtccttccccgtgaaggaaccaggctccgagcctccctactgatcagaggtttgaaggctggccccccgaagggttcaacagccgcctcagatcgcgtgggccctacacccactactggtcagaggttcgaaggccggccccccgaagggttccacggccgcctcaggctactcgggctccgtgcccattactga

SEQ ID NO: 41409 - DNA, 396 bp, Zea mays
  Peptide Sequence Number=SeqID_84784
atgcggtccaaggatctccgctctaaaggacgacgtcatcgccacacccgggcaatcgctgccagggtcttctccggaaatctggcccgagcagggtcactctggggcctcggccaaccatcttccaagggcgccggcccgacccgaggcctcggctggtcaactccggcgtcggtcccgctaacggacgacccggctgggctccggccaaccaggtttccttttcgagccaactccgcccctgttcatgctgatatcgctacccctggcctcggctcatcgaagagcggccaaggggtccctttaactaagctagagaagcctcagacaacaaggccgaccgagccaagggactcctacgcctccgggatacagatacctcactcgtcaccttga

SEQ ID NO: 41410 - DNA, 759 bp, Zea mays
  Peptide Sequence Number=SeqID_84785
atgaacaaaaacactggcattcaaagtgccattacaaacagaactctggttccccctccgcaggtacgaacaaccccactcgatgggggagggcctgcggagcaacagaagactgacgggcggctcgccgctgcccgctctgacagcaacaacaacgacccccgctccggtggccgaactgcagcagcgcagacctcagggtgggcgctgctgcaatcttgccctcgcccgcgccgaggtccgaggggcgaggacaagtacaaagagccggaggcccgaggcgcggatggtggcggtgatcccgtcggcgacggggacttctcgagccgcctccaccccggcaccgacgacaggggccgtcagccctccggcagatccccactcagatcctcccggacgagtggggcaccgacctccgcgcggaggcgccataccggtgcaaaggcaggaccgccccagaacacgaacgccgccctagcagcgcgcgacatctcgggcggttctcccgtgcacacggcgcggcagccgccttccggcaggaggggccaccgggggccaagccgacgagctcgacgcgctggggctgacgacgcccgccgtcgaccagccccgcgttgtcgaagtccgacccgcccacagggccagcgagcgccctctccctcgaacaccgcaggagagggtgacccacgaacccgcgcgggaggtagagctccggctcagcccggcctccaccccagcaaggatgatgaacatccttga

SEQ ID NO: 41411 - DNA, 702 bp, Zea mays
  Peptide Sequence Number=SeqID_84786
atggagcctggcggagggacagctgtcggagcagttgggtccttgctgacatcctcttgcttccgtaagggggctgagagccgtcgtcgtcatagacccgagtcagctcggggtagggtgatgatggcgcctcctgttgacgtggctggcctgcgccctaggttgggcgatgtggaggctccttcgaagccgaggtcgagtctgtcttccgtggccgaggccgagtccgagcccctgggtcgggtgaggcggaggtcgtcggctgaggccagggcggagtccgagccctggggttgggcgaagcggagttcgtcgtcttctggggctgagcccaagtccgagccctgggtcgggcggagcggagttcgtcgtcttctggggctgagcccgagtccgagccctgggtcgggcggagcggagttcgccgtcttccgggacttagcccgagtccgagccctgggtcgggtggagcggagtttcgccgtcttccgggacttagcccgagtccgagccctgggtcgggcggagcggagtttcctatggtgccttcggcagggcctgactgcctgtcagtcccactctgtcaagtggcacttcagtcggtgtggcgcaggcggcgctgtccttctgtcaggccggtcagtggagcggcgaagtgacggcggtcacttcggctctgccggggggcgcgcgtcaggataa

SEQ ID NO: 41412 - DNA, 1737 bp, Zea mays
  Peptide Sequence Number=SeqID_84787
atgtcagttccattagatttcataattgaagtctggtactttgctgaagagcatggtgagttcttttgctatagtgttctgacatttccaggtgttacttttgttcaagacatttgccaaaaatttctagctcagaattttgtagaaaatatgaaagcctgtgaacaatcaaaccccaactcagtagatggccacctcttcattcttagcaagcaggtgaagatatgccttttaccattaggatttgcggcagggacaatgaggcattggtttgactttggaaacaagatcatatgcactattcttgatcttctcaaagacagtttgaaaactttattggatgctgttgatgatggtaacttggatcgatattgcattcgaataacagaatattcaaagaacatagtgctttcaggatgtccccaagtaactacagcattcttgtacatatctgttctccctaatgatctgagtgtttcattgaagagaaggatactgtgtgtattgttattaccttaccaagctagtgacttcattgttagcgcgtgtgcagatatggacttgttggagatatctgtcctgaaaaattctctgtgctatataaacattagaaactgcttcctgttgacggatgatggtatttctaaccttctgatgaagtgtacaaagatccattcgatggttctttcttatacttcttttggaaatcgatcaattcaaatgctatgcgctgccaatccttctggccacaacagtggacatgctcatgttatggcatcttatatgcaagaattacatctggatggctgcaaaggtattgactctgttgctttgtcgcagctagtgagcattataagtatcacaaagtttttgagcttaagggaaacatcacttacagatggtgcactctgcaagtttgttggctctagtctggagtatcttgacgtttcagagactgtgatttctatggtatcattagcaccagttattcaaagaaactgtaaattgaactgtctgaaaacagctggatgctgtagtcttctgttgcaatgtgctaatgtagaacatatcaatggtaacaagtatggagattttctacaggagttaggaactacctactgtctggaggatgttgaaatgggctggggattttgccctattcgaatcgaagaccttgttccttcttttagtaaagtaaggaagatgaaaattggtctcggcacatcattagcggagaatgttctgtgtgctcttcctatgatttgcccattcctcgagtctttgattctaaggtttcaggtgatatctgacagagttgttagacgtctattggaatcagcaacaaatcttcagagaattgcaatttggctgaactttcactttctggttgcaaacttcttgactccagaatgtggtaaagtaactgttgaaggggtttcttcttttttcaactgtaaggctttggaagacgtcctactacggcacacgttaccactactgcggaagctggctttggatctttgcgatgcctgtgaagacggttacgatagcccaaacgatgcggaagggaagatgattagaagtgtaaggatgagtcgatgcaagaagatggcggggtcgtgtttggaggtccccagacaagggtcttcaacttcaaggccggtgcacaaggacactgtagtgctggaatggagcagcagaatgttcacaaccaccatagtgaaagaaagagtgtga

SEQ ID NO: 41413 - DNA, 138 bp, Zea mays
  Peptide Sequence Number=SeqID_84788
atggcgcatggtcttcttcttctccccaggggtaaagatcatagggttgtcctgggatcggtaggccaccacaggatggatctagacgacatagagtcgaatatgggtggaggtggatatgcggaaggctacaactaa

SEQ ID NO: 41414 - DNA, 612 bp, Zea mays
  Peptide Sequence Number=SeqID_84789
atgtctggtgcccaggctggcgactcgtcaaactcgctgcccttgggaattgctggggacgctgctgctaaaattcactgcactgctcggatgtctagacgtggtaaatctgctaaacaaaggaagggtcctttgactggaactgccttcgacccactgcctttgccaactagtgttccagtgtctatgtgtttttgtggtgatccttgtaaggttgataagtctgaggatcatgacacctatcgacagaggtattggatgtgtcctaactttgcatttgggccaactattgttcaacgtcggttgaatttaatgactcctccaccgttatgtgattttgagcagtggattgacatagaaatatcagagaaagacaagaagtggttggagaatcttaaaaagtgggatgcagaggacaaagagaggatggagaaaagacgagaggagcttgctgccgagcaacaacgtgaagacgagcaggaaatgaggcatgttgctgaatgcagggaagagaaggagaagaagtttgagcgtgcacgtcgtgcaaaggaagcaatggaggagaaccctgatgcatttcgcaagggcaaatggccccgttgcactcagtag

SEQ ID NO: 41415 - DNA, 432 bp, Zea mays
  Peptide Sequence Number=SeqID_84790
atggacgattttttgagcttatatcatggaggcaatgtggaacaagatccgtatggaaatgcggtagacttggtcataattcacgcacttgtcgttggcagattaacgaggatggcacagttccacctcctcgacccgttctacgatgagagccaccgggggcgccttctgtcagaaggccaggacctagcaacgcttcgttctaggacacacaatgggttcctagacatggtgttcgacgagaggatatttgatctagagagggaagtaagcaacagaaatgacaaggaagaaagagacaacatcaatggtggttcttctaagtatgctcagatccatattgttgctgcccttgtcacagcaagaatgttggtcctccaacgtctccaccgcacccacagcagacaacaacaatgggaggatactatgtag

SEQ ID NO: 41416 - DNA, 363 bp, Zea mays
  Peptide Sequence Number=SeqID_84791
atgcaggaaaccccgtctgaccgccattacagcagaatcaacccgggaacctccctacatgcctactcccctactgcccttgcccctatcggggtggaggtgagggcagtgccggacacggtggataacggctgtgcaaacccgtcacacaccgacgaggaattgagtcgtcgccgggcagttgcgcgcgtgtccatcgtccaccaggggtcttatccccacgacgcggcggactcggcccagctgttccacaaatcccgcatggtggcggacatctcggccatggccgttgcggaggggctggcaagaggggtccgcgagtcagtcatggattccggctcggtcgcgcagagaatacgctag

SEQ ID NO: 41417 - DNA, 204 bp, Zea mays
  Peptide Sequence Number=SeqID_84792
atgaaggtgttcgtcgccgccactgcaatccgcccgattctcaccgtgggaactttagtcggggttcgtgtgagtttgcttggagccgaggatcatactggtggacgcggacatgcgcacaactgctcggcgatgactcgattccttgtcgatcaaagcaaacatcgcacattcgctgcattaaatctgaaccgtaggccttag

SEQ ID NO: 41418 - DNA, 1404 bp, Zea mays
  Peptide Sequence Number=SeqID_84793
atggcccacccctccgccgccgccgccgccgtatcctccacggcgcccgctgcaaaccctagttctggcgcccgcgaggaaggaggcgcccgctctccgccgtcgccgtctccgtctcagagggggcgggccaaggtggtgatcgttatgggcgccacgggcgccggcaagtcgcggctggccgtcgacctcgcggcccacttcgccggcgtcgaagtggtcagcgccgactccatgcagctctaccgcggcctcgacgtcctcaccaacaaggctcccctccacgagcagaacggtgttcctcatcatctacttagcgtgattgatccctctgtcgagttcacttgccgtgatttccgcgaccgtgccgtgccgattatacaggaaatagtggaccgcggtggcctccctgtggttgtcggcggcacaaacttctacatccaggctctcgttagcccattcctcttggatgatatggcagaagaaatgcagggctgtactctgagagatcacatagatgatggtcttactgatgaagatgaaggcaatgggtttgaacgcttgaaggagatcgatcctgtggctgcgcagaggatccatccaaacgaccatagaaaaatcaaacgctacctcgagttgtatgcaaccacgggtgccctacccagcgatctgttccaaggagaggccgctaagaaatggggtcggcctagtaactccagactcgactgctgtttcctgtgggtagatgctgatcttcaagtcctggacagttatgtcaacaaaagggtcgattgcatgatggatggtggcctgctggacgaagtatgcagcatatatgatgcggatgctgtctatacccaggggctgcggcaggctattggggttcgtgagtttgacgagtttttcagagcatatttacccagaaaagaatctggtgagggttcctgtgcaagcctgttaggtatgcatgacgatcagcttaagagcttgttggacgaagctgtttcccagctgaaggcaaacactcgtagactagttcgacgtcaaagacggagattgcatcggctgagtaaagattttgggtggaacttgcatcgtgttgacgcaaccgaagcattcttctgtgccactgacgactcatggcaaaagaaagttgtcaaaccatgtgtggatgtcgtaagaaggtttttgtcggacaattccactgttttgccaagcacaagcgcaagtgacccctcttcaagagagctgtggacgcaatatgtgtgcgaggaaggaaaagcagacataagaaaagcatgcatgcggatgtacaggcctgcggcaaccgggtgctgcgaggtgcgcacgagtgggagcagcacaggcaagggcgaggccaccggaagcgagtgcagcgcctga

SEQ ID NO: 41419 - DNA, 738 bp, Zea mays
  Peptide Sequence Number=SeqID_84794
atggacgccgacgactcctcgtacgcatcgtcctcctcgttctctccgccgccgtcccccgccgatcatctccgcctgcccccgaagcggcgtgcgggccgcaagaagttccgggagacgcggcacccggtgtaccgcggcgtgcgcgcgcgcgccggtggcacccgctgggtgtgcgaggtgcgggagccgcaggcgcaggcgcgcatctggctcggcacctacccgaccccggagatggccgcgcgcgcgcacgacgtcgccgccatcgcgctccgcggcgccaccgccgccgacctcaacttcccggactctgcccacgcgctcccgcgcgcgcgcaccgccgcgcccgacgacatacgacgcgccgccgcgcaggccgccgagctctaccgcccgtctccttcttcctcttccgcctccggcctgctgctgcaccacggccgccggacgatcgctgccccgccaccgccgctctcactgccgccgccggaggcttcttctacctgctgctggacgaccagtacaggaacccgaggagcaggtaccacgccgacctgctgcgacggcttcctggacgaggattccatctttgacatgccagggctcatccacgacatggcctgggggatgctgctcacgccaccagccatgggccggggcctcgactggggcgcccttgacgacgacgacgaccatagccacgtcgactgcacgctctggacgctggacggatga

SEQ ID NO: 41420 - DNA, 198 bp, Zea mays
  Peptide Sequence Number=SeqID_84795
atgtaccaccataagatggtcaataccaggaaggaagtcagaattgatctacctaccaacccattcaaccggagggtgcatagacaacaacaagcagaaatggatcctccgaatcctccaccggctgggactagtccagtggttgcagctcagatgcagatgctacaacagatgacgaatatgatgcaagatatgtag

SEQ ID NO: 41421 - DNA, 411 bp, Zea mays
  Peptide Sequence Number=SeqID_84796
atgggccggatcacacgtgggcctccatgttggacgaggccgcgagatgggacgacctcgtcacaggccttcgtccagcgatgcgtgggacgaaggtcactcaatctaaacttgtacggtccaaacccgagggttatgaaggctggggagcaccgggaggataaggagagggaatgttttgtccggtttggacatggcggtggcctgactccttccggtgtaaaaggttcacacttagccaataaaaagatcaaatattggattcaacaaaggagaaaaagggcaaccgaaagcacctctggtctgggggcaccggacagtccggtgcaccaccggacagtgtccggtgcaccagaggactccaactcgaacttgcctccttcgggaatttccagaggcactccgctataa

SEQ ID NO: 41422 - DNA, 171 bp, Zea mays
  Peptide Sequence Number=SeqID_84797
atgtccaaaccggacaaaactttccccctccttatcctcccggtgctccccagccttcataaccctagggttggaccgctgagggttgtggttgaaaaatcacaggggatttatctggagtgtgcttcgagcgagttgggagttgagggagctggtgggggggttttatag

SEQ ID NO: 41423 - DNA, 207 bp, Zea mays
  Peptide Sequence Number=SeqID_84798
atgaaagccgagtctaatgattgtggattttttgttatgagatatatgcagcactacgacttcatggatggagctatcaatgcggcctttgaatcagataattcagaggacattcgctctcttgtactgcattacatcatattccatcgcttaaacaaaaacatctccgtgctttcagatctagaaagattcaagttctctcagtag

SEQ ID NO: 41424 - DNA, 138 bp, Zea mays
  Peptide Sequence Number=SeqID_84799
atgtcgacggctgccacggccagcatcgtccaagactccggcctgccctccacggcgcacacgggcatgcaagatcaatcaaggaaggaagcagttccatctgtgatcccttttcagttgccataccagtttagatga

SEQ ID NO: 41425 - DNA, 213 bp, Zea mays
  Peptide Sequence Number=SeqID_84800
atggacgggtctgacagtgtctctggcctcgggacgctcccatcagctcgtcctttgaaattatgtacgaccgacagcgatgagaaggccagtggcacccgcgctgccatctcttctgctctcccccgcctctctagtttggagctcttcttcgggcggcagaggacgacactgagtcctggattcgtgacccatcgactccccgcccgctag

SEQ ID NO: 41426 - DNA, 894 bp, Zea mays
  Peptide Sequence Number=SeqID_84801
atgcggaaggttgatcgacccccaatcaatccgaagcgattaatgattgagtcaagtcaagaatgctttggtgttgacatcccgcgctcgactgacaccagagagcctacaaatacgcggtgtgatggtgatcctccgcaacatagaaagagaggtgttgctgccgatgctaaaaagatccccatgcctagtgtggatgatgatgatgactttgagccaccaaaaaagaagtgtaatatcaaaatggatgccccaaacaagacgcataagctagaccctagagacatgactctccgtattggtccagacaaagaactcaaaatcaccaagcagtttgtccatctgatattgggtcttccaaattcgggtggtgggaagccactaaatattgacgaactgtattatttggaccacttgcaccatgccgcagctcccaacaacaaaagtggcactccgcacatcaagtattttaacaagaatatcataagggcgctgtcaatggctgataagcgtaagcctcgtgagggtggcgaaccatttggtttttgcccttttcggggcagcagtgagacttgttatgtctcaaaatcggcatctattggtcaactcgagtctacaatgaggccagaaacagttaaggcagacccaaatgaacgtggtcgacttcccaacataaacatccaactgcctcttatgcaagacctgatgtcaactaagatccagctgcttcctatacatcaacgctccaagttccaagctaagttgattgcttatgacttagaggttggcaagatagttgccactatgaagcaatgtttggataatattggtaggaagcagtccaagctagctgatacatttggagagttgattgacgaggttcttcggggatga

SEQ ID NO: 41427 - DNA, 1329 bp, Zea mays
  Peptide Sequence Number=SeqID_84802
atgctcgcgccggtgcccaccaggccgcgctccaaccccttccgccggcgcagaggagctgctccgctgcttctcgatcagacttcggcgaagcggcccgctgagtcgtccacctcagcctcatcctgcttctacagtgaggtgatctccaactcctccacatccctcgccccgtatcagcgcctggagaagaggcatcgacgccaggacacagacgcgggcgaggcgcggccggctggctccgagtgctcggaggtgatcggcggcgcgagggtgcgccccgccgaggtcgaggtctccgaatcgtcctgccctgtctccgtgctcgagtccgacctcgcctgcccgaagcagctcgccgacgacgctgaggcgatcgagaaatcctccgcgtgcgatgagctgaccccgtcgtcggagcccgatgaggaggaggtgctcagtgatcccagccactcggggtactcccccagtcccctgatcagctccccattgaccgaagatgacagcgacgacgcgccctctgcgaccttctccctctttctcgacttcgccaagcagttcgtcccctgcttgcaccccaaaccgtgcaccgtcaccagttccactctcgatctcctgacggggaggcggtttgaggacttggacgacgaggagagctacgagcgcttccggcggcgcgagcgacgcgaggcagttgcgcgcgacttcactgaggtgtgcagctccacctccatacccgacagctaccgccctctcgtcgtggagcaacgtgtcatcatggtgaactggatcatccagcattcacgtctgatgaagctccagccagttacaatgttcatgggaattggattgatggaccgcttcttgacacaaggcgttcttcgaaagacttttcaagttgggatcaatatctacagccagagtgaggttgttgccatggagtggctggttcaggaggtcctcaacttcaagttctatctgaaggctgcaaatgctgatgacagggtagcggacctggcaaactacctggccttcatctcacttcggaaccatgagcagctctccttctggccctcgactgtggcagctgcagtggtagttcttgcttgccttgccacaaacaaggagtcctcatgccatttggtgacggagactcacatcaggacgcaggatgatgatctaccagaatgcctaatgaagatggtcacgtatcaggtttctgtggtgtctggtaagcagaatactatactcaggcctgtcatgttgcctgctaaagtttcgtttcagctaaccgcagatccaagtggtgccatcatcaccacctga

SEQ ID NO: 41428 - DNA, 336 bp, Zea mays
  Peptide Sequence Number=SeqID_84803
atggggattgctcattgtgggtacctcaagattaagaccagggctctcaacacctgcgcccgaaggccggaccctcggaaatggccccagccctcatggcgagccacccggacctctagcctaaggggggtctcgtgctgccatgtgttgcacaacgccggaggagacgggacctcccccgaacaccatccgaaccccaaacaagggaggtccggagctgtcatgaggaagggtgataccagtcactactccccacgtaaggtgaggcccggtgctgccacgtgttctatgacacgtgatgtaagccatctgggaaagcttgacgtcaacctctaa

SEQ ID NO: 41429 - DNA, 1170 bp, Zea mays
  Peptide Sequence Number=SeqID_84804
atgggccacaggaagagaaagacgggcgaccgtcatggaagggtcaagccatcagtggagctggaaggaagcgaagatccggatcagattcagatgggggatctagagatcgtgtgcggcggtgacggcgatccgctgatgcaagaaacagaacatctcgacccgacgaggatcgtcagcgatgagttgtatgaaggccagatgggcgtcgccacttcctttccttcgcgggtgaagcggaagagcctgcaccgagttacccgtctgaccaccgttgctggcggtatgaccttcacgtccctacggtcagtgcaccgcgcgtggatcattagggtcgggggtgatccgggtgacaccgtcatcttcgacaccaagacgaagaaggtcattcacgggccgactctcaattctacaaagtggtgccctgtcctaacaacaatgggggacaaggtttatgctctgtgcaagactctctgctggttcacagaccccgatttcccaccctggttcgaggtactcgatctttccaaagccaaagttgtcattgttgacgaccgctcccacctggagggatgctcctggattgagctaccacatccaccttgcttcccttggaagattaccccatttgtttataccatgctgccagttgtacttatcacgtcttatgtggtggtcgacacctacatactggtatcattcaatcaactttggggcacatatgcatttgacaccaattcagtcgagtggcacaaaattgacaccaaggggctaccattcgttggtcgcgccaccccacatggctctttattccttggcttgtcagagggaaatggatccatcaatgcttattgcatcagtgtcactactactgacaatgatcgtgctcctaacttatccatcactatgctcccggtgaaatacatggataatgaaattgatgcagggccctgcttcttttccttggaggatggatgcttttgttcgttcagtttttcgcttgataaatgcagttggactcttcatcccaagaagctcgaattgtttccaaaggagacacatttaaacctgagaacatatcagacagagaatctttcatccctggaggttccagaggaaacattgttggctgtgaagccgaagattgcagtccacagccattgggagtag

SEQ ID NO: 41430 - DNA, 936 bp, Zea mays
  Peptide Sequence Number=SeqID_84805
atgggccgcaggaagagaaagacgggcgaccgtcatggaagggtcaagccatcagtggagctggaaggaagcgaagatccggatcagattcagatgggggatctagagatcgtgtgcggcggtgacggcgatccgctgatgcaagaaacagaacatctcgacccgacgaggatcgtcggcgatgagttggatgaaggccaggtccgatctgcctaccttgtggcatgccactgggattgtgcaccgcgcgtggatcattggggtcggggtgattcgggtgacaccgtcatcttcgacaccaagacgaagaaggtcattcacgggccgactctcaattctacaaagtggtgccctgtcctgacaacagtggaggacaaggtttatgccctgtgcaagactccttgctggttcacagaccccgatttcccaccctggttcgaggtactcgatctttctaaagtcaaagttgtcactgttgacgaccgctccgacctggagggatgctcctggattgagttaccacatctaccttgcttcccttggaagattaccccatttggttatactatgctgccagttgtactcatcacgtcttatgtggtggtcgacacctacatactggtatcattcaatcaactgtggggcatatatgcatttgacaccaatttagtcgagtggcacaaagttgacaccaaggagctgtcattcgttggccgcgccaccccacatgactctttattccttggcttgtcagagggcaatggatccatcaatgcttattgcatcagttcactactactgacaatgatcgtgctcctaacttatccatcactatgctcccgctggactcttcatcctaagaaggtcgaattgtttccaaaggaggcacatttaaacctgagaacatatcagacagagaacctttcatccctgtag

SEQ ID NO: 41431 - DNA, 2931 bp, Zea mays
  Peptide Sequence Number=SeqID_84806
atgagggggttgctggcctcagtgatctccttggactttttcctgctgtcgagcaagctaaaatctgtgtgcgcggctatgacttcccagaggcatagccgatcacaggagaggtcaaaatcaaaggggttgacctgcaggagagttgcagtccatctgctgttctttttcatggttggcattttcattgggttcatgcctttgttctctgtcgatgtttacaagaaaatagtatccgaaaacgagaggcttccgttccatgatggtgtgattgaggtggaaatgatgggcaccaaagttaaggagttggagacagttgtagtagagaaagaggtcgaactgattgacgagcctcaggttcaagagagccctccagttcctgcaatgttggatgatgaggcagattttgctgaatcttcacctgcattacctgctattgaagaatctgacattcctgtgaagaagctgctgataatcgtgacgatcacttctgttcggccacaacaggcatattacttgaatcggctagcccatgttttgaaagctgtacaggcacctcttttatggttggtggtggaatggcctgaacagtcctatgaaacagcagaaattctgaggtcttctggggttatgtacaggcatcttatatgtagaaagaataccacgagtgtacgaaagattgctgtatgtcaaaggaataatgcaatctatcatgtcaaaaggcatcaccttgatggtataatgcattttgctgatgaagagcggtcatactcagctgatgtatttgaagaaatgcagaagatcagccaatctacaccgtccatctatatgcgtcaaatcatcaccgtccgtccgtcgcctccgcttcaagcctccgacaccgtcgtcgcgcctggctccccctcctcctcgccccactccccctggacgcacgccacggtgtccctgccccgctcgcgatgcatcccccgaaaccctaggccttccgcgatgaggagtcgcctcctcctccctccgtcgtggcgttctcgggcgccgcctccgcgtcaacgccatcgccgagatcgacctctaccgcctcgagccccacatgcgcagccgccgccgcgggagaggtgccccacgcctcggccttcaacgacgaggagctcgtctcctcctatctccgtcaccgcattctcggctgtcgcctccgcgtcgacgccatcgccgagatcgacctctaccatctcgagccctaggacctcccctccctcttccacatccacagtcacaacgccaatgggtagttcttcgcccgtgcggtcgaggcggtcccagcaacaggaccaaccacgcacactcgcatctcgctccttgatgttaccagggaaggaccacgacgtccgcgccgacgcgcacctctacaacgcgctaatgaaggcgaacgtcgcggcggacgaccccggtgccgtcctcagggtgttccggcaggtttcagttactggtacattcttggtgaataaagaacatgtggaaagtcacaggtggtcatgtatgtttggggatgttgaagtaccagctgaggttttgaccgatggcacgctacgctgctatgcaccagcacaccaatcaggaagagttccattttatgtgacctgttcaaacatggtggcttgtagtgaagtgcgagaatttgagtatcgtgattctgaagctcattacatggagacttctcgttcccaagccaatggtgtaaatgaaatgcatctacacattcgtcttgagaagctactcactttggggccagatgaccatcaaatgcttgctataaattccttaatgcttgatgggaaatggtcaaatcaagaatcttctgtcaaggaagtagtttccactgctagggtccaaagtttaaagaaactggtgaaagagaagctgcatcaatggctcatctgcaaagtaaacgatgatggaaagggtcccaatgttctgtgcaaggaaggacagggtgtgattcatttagtagcagcactgggttatgattgggctataagaccgataataattgctggtgtcaatgtgaacttccgggatgctcatggatggactacactccactgggttgcgtctttgggaagagagcggacagttagtgttctcatagcaaatggacacaagatcccgatgcggcagtggcggacagcaacgggcgctcaacgccatcgcgcctcctgcgaacccatggtggagcatcttcaaacaagaacaaccgggtacggttcctcaaatcctctgtttggtggagcatcttcaaacaagaacaaccgggaagttcaaggatgtgaattttccaccagctatgtctcccccaaaacggtgggatcatgtgtgatggacgatgcactgacaactggaagcatcaagacatcagatgcagaaaagaggcgtttagcaaaagcttcccttgcctacaattgtgagagcaaaaactgtccgcacttcaggaaacttttcccagagtatgttgagaagtacaatcaacagctacaattggagaacactgctgcagagccggtgcctcaggagaatcctgcacctgctccatcccctgctgcccagcaagccccgaccgtggccaatagggcacaaccactggcggaggcgcgccgtgacaagaaccagaagaaggcggtgcccttctggatggtgctggtcattgactcagttggtcccctagactacctaccacctcggagtcgtattgatgaacctgtgatgagtgcaaagacaaacctgaacgtcgagcaggttttcttttctatagcaagggatatcaaacagagactttcagagactgattccaagcctgaggatcgaactatcaagatcaaggctgaaggggaagctgatgcagcagaggcgcagaaatcagcttgctgcgactcttga

SEQ ID NO: 41432 - DNA, 939 bp, Zea mays
  Peptide Sequence Number=SeqID_84807
atgtgcctggacctgtacaaggaatatggcaccacaatggctggccttaaggcattaggctacgaatttgacaacgatgagttccatgcaactgttcatgatgatatgcttgaaaaaatggtcacggagaccattttttatcaacctaaaacctggttaccgcaggtgttcacaaattctgacaaagctcacgcggaggaagctctatgcagacttggtttacagggttgcttcgatggtgtgatctgctttgagacactgaatccctgcaatggtccgagcgcgttcggcatgctgttcccagatgaaacgttccccgacttggctgatctgaatgaatccgatgggttcagacccatatcacccatcctctgcaagtctgcaagccctccgttgaagccatgtaagctcactcggaacatagcttcgggaaaggcagcaggcttccatactgtgattaactctaatcttgatttgcctttcaagtttattgaaaatgggagcagttcctgtgaagaagcaaactattgtgagggatcacagcgacacttgtcgaacaatgaggagaccattccaccttcagaatctcatgctgttttagatgaaggatctctgggtattcaagttgaggacaaggatgtcagctcttcacaagcacttggtggcacacaagatttatcttctaagaagccccaggaagacaatgttaatattgtgcccatcgaacctgtctatgtaaatgatggtttaatgatgcctaatgatttgatcaggctgttgattacagccgagaaggatgagcttcgtgatgagaagcagaagctgaaattggagaaggagagtttagaacaccagatgaagctgatgacatcgactccaacctacatgcctcatccgaccctgatgccgacgcctttccctcaggcacccctagcgcat

SEQ ID NO: 41433 - DNA, 1299 bp, Zea mays
  Peptide Sequence Number=SeqID_84808
gcggcgctgtccttctgtcaggccggtcagtggagcggcgaagtgacggcgctttatgctgatgggggttaccagctgagaattaggagccttgaggctcagatgtctgctcagatagctctgcgagtgcaccggcttttggatcttccagcctttctgcttgcaaccgatgctgactctgaggcgcacctcacatatctgcctggccttctgacccttttgactaccagcggcaggtatgttgaggagtgggtacgagtcttctacgcctctgtatggattgacccggatcatcactggatgaggtttcgttttgagcgagaggatgtcaccattactgccagtcagatccgccagctctttggattccccgagtcgacgactcgtcttcacagcctctgctacgacacttctgaccctcctcgtcgccctcacggcggtgtggctccgggtacagctcacgtcgcggctctgttccgcccgcccttctctgatgggtcgcgacgttcactagcagactttactacagcagccaagtatttatatgagcttatcagacagactcttctgtcgaggatgggatacagggaggctaccacacatattcagctttggctccttggtgccctggtctctcactctgagtttgacgtcgtggacttccttatttgtgagatcgaggacaccgttttggatgggattcgtgctcgtagacagttgccatatgctcactacttatgccacatctttgcgcagctgattcagcctcctcggtttcagggcacacttgaggcctcacgcctcgtttttggatcctaccgtcctgcgcctgagactcctgtgccagcttctgctcctgtttttgactctcaggccgaggatgcagcttttcatcagttcgacactcaggctacagcagttgatgatgatgatgatgattttggggttcctcttccgcctcctatgcctccacgctcacatgatcatgaggctgggagttctagtgctgcccctactgcccctccggctatggaccctgctcttgcttcgattccccagtctatcactcagcagcaggctcacctggcagccgagcaggcccggttatccgagaggatgctctctatgtttcagaacatgcaggacaggcaggatgcgcttcagcagcagctactccaggatcgggctgagagcagggcattcatggctcttatgctacagtattctggtgtctcggttcccccagttcagtctgctccacctcctccgcttcaggctccagttgtgccagcgatttag

SEQ ID NO: 41434 - DNA, 723 bp, Zea mays
  Peptide Sequence Number=SeqID_84809
atgagttttctcgagagtggcctgtccgtcgggcgcgccagcctgagcaccggacagtgtcaggtgcacgccggacagtccagtgcgccagaggctggtctcaggcagatggcaatcgacagatgttgctcgcgtggactagtggagcgcccatcatggcgtgtgtcgcgccgtgtccccatgcgtgggcaagcgtcgcagccgcgcctggctttatttggtcaagcactccaccgtgcctcactccctccctctgctctcgtctcgctctcactcgccctcgcctcatctcttcttccacccgacgccgaccgccatggccgacgcgagctagctcgtgtccgcgcccccactgactgtcattgtccaaaaatcgagcctgtaactgctttgtcgtctcatgcgctcgtcttggcacccttgctcgagcacaaagaagacccgagcatcgccgtcgacgtcaccattcctcggttccaccggcgcgcatggacggagcgcctccgtccacgacccgccgagccaagagcaccgtcgcgttcgcctccgtcgaccgcgcccttccaccacctcgccttgccatctccaccggcgaatcgcaggaagaagcatgagtgggaattatcgaggagctgccaggaattctcatggaagagggtgaaccagaagttgaagctcaggagtgtcctgatcaccgccccaattccttcgagaaaggtatag

SEQ ID NO: 41435 - DNA, 819 bp, Zea mays
  Peptide Sequence Number=SeqID_84810
atgcccaaaccggacaaaactttccccctccttatcctcccggtgctccccagccttcttaaccctggggtcggaccacacgagttcggattgagtgactgcccacacagtctcgagtggttgtacgacaaaggagtacaggggggtggaaaagaaaacgacaagggattaccccccatatctgggctgggggcaagaattctggcccaccccgggcgcgaaaacacacgcggaggcgctttcggcccagcggcggcccacgagcggggaaacggcgcggccgtgggagggggagacggcgttgcgcagggcccgcttgccagcgagaggggggggggagggaacggcgttacggttgacgggggggtgaaccggccgtccgcggggaggaccggccgccggcgagctcggcggcggttcgccgccggtggcccggttctaggacaatgcgcaggtgtcctagcacggggaggggatggcggacctagtggtgggcttaatttggccagaggaggtcgggagggggctgcccgcggggaggtggcggagcttcgcggcggggttgccgccggtgagctctgggcgagccgtcgaggtgggggaggggtgtattgtttttgcggcaaggtgaggaagttgctagggctaactcaattgcttgctggggcttacccgagaagggagagagaagagggggaatggactcaccggagaagggggaagatggcggcgcttcgcggcttgggctcgtgcgaggggaggagggtggtggtcgaagctggtgcgaagaagaaggagctcggggcgagcattttatag

SEQ ID NO: 41436 - DNA, 2847 bp, Zea mays
  Peptide Sequence Number=SeqID_84811
atgtccgacaaggcagatccagcacacatgcttccaagcaatatggacattattgacttaagttcagatggcgagcaagagatcattgacctgtcttctgacagtgaagacaacaacactctttttcgctcttacagagaagattacgtggactatgatgatcctggtagtccttttcacctgccttttttccctcacaacacagcaccagactggaatatcatggaagaattagatgattggcgtgtgctcgcaaagaaagaatacgatgactggcttagttcaaaggcttcatcctcttatagccctgttgatgatatattaaccactgagatgaacagtaagcagctgccacaatctttcacctacggaggcttcattcctcaatcatgtgcacccggccattcaagtttaggtgacaacaggaccaaggaagagccctctatgacatttagtggttttcaaggatgcactgccagtggaaacggaatgccttcatctacagtgccaataggtccacgtccacatcggatcttccctccgccaatgccatcttctgttaatgatataaaagttgaatatgacgtagaacaaaggcttttcagttctgatgagagagctgtatatgaagaagccctgaagcatatcactcaggaaacgaaggaggaagatctgcccaaaggtgttatgtcagttttactgcttaagcatcagggtcttgggaagacaatttcaacgattgcccttatacagaaggagatggttaagcagtctaggttcatgactgctggttcatacagtacaaagtttgtcccaaacagtgattatgacaatgacagtgatgttgtgattgacatggacaagaaagaaccgaaagatgaacccttgaatgagctagatggttctgcacgattgcatgtcgccagcagtcttaagctctgtgatagtaagccaaacactgctactgataaagctgaacctaagaagaaggccagagtgaggtactctgcatcaaacttgaggtcgaagactaggccagctgcaggaacattggtcgtctgccctgctagtgttcttaggcagtgggctaatgagctctctgtgaaggttatggaagacaataaattgtcagtcttggtttatcatggaagttcaaggactagagatcctaatgagttggcaacatatgatgttgttgtcaccacgtatatgactgtggcaaacgaagtacctaaagaaaattctaatgatgagcgaaagaaatgtgaaatggacggaatatgtccagaaatttccatcggcagcaaaaggaaaaagcagagcaagccaaagaagaaaaacaaacctagcaattcagaaggtggcccacttgccagggtacgatggttcagagttgtgcttgatgaagctcaaacaataaaaaattaccggactcaagtgtctagagcttgttgtggactgagggcacaaaggagatggtgcttatcaggaacacctatacaaaacaaaattgatgatctgtatagctacttctgtttcttgaagtatgaaccttactcaaaatttagtaatttcaaatatatgatcaagcaccaaattactagagattcagttcgtggctataagaaacttcaagctatcttgaggataattctactgcggcgcacaaaagaaacacttatagatggggaaccaatcttaaagctgccaccaaagacaattcagctgaataaaatagatttcacccaaaaagagcgagctttctatttgacacttgaagaaggctctcggcagaagttcaaggcatacgatgcagctgggacgataagggaaaattacgcaaacattcttgtgttattgttgcggcttaggcaggcttgtgaccaccctcttcttttgaacggacatgaatcagatctagttgacagcagttccatagaaagggcaaagcaacttcctaaggaaacagtgacaaatttgattgaaaagctggaaagaggcccggcaatttgttccatatgcaatgatccacctgaggatgctgttgtcacgacatgcggtcatgtcttctgctaccagtgtgtgcatgagaggttaacaagcgacggacatgtttgcccctatgcactctgtggaaacaagctaagttttcgatctgtttttacaccagcagtattaaaactctgtacttcgccaaagccggagtttggtgaagaaactagctgttccacagcagccgacaaaccatcctcgatctgtgaaagcagttacatctcctcgaagatccggtcagcagtggaaatacttaattcaatcatcaagacaccggcccttacagcgggggacactactgaatcgattcccagcatggcaccccctgtcaaggcaatagtcttctcccagtggactggcatgctggacctgctagagctttcactgaacagaaatggcatacagtttaggaggctggatggtgcaatgtccctcgacttgagagaaaaggaagtgaacgggtttaaaactgatcctgaggtgagagtaatgcttatgtcactgaaggctggcaatctgggtctaaacatggtagctgcttgccatgtgatcatgcttgatccgtggtggaatccttacgctgaggaccaggcggttgacagagcacacaggatcggtcagacacgtcctgttactgtttcacggttcacagttaaagacactgtggaagaccgcattttggctctgcaggagaagaagagagagatggtggaatccgcgttcggcgaggacggttccagaggcactgctaccaagctgacggtggaagatctcagatacctcttcatggtgtga

SEQ ID NO: 41437 - DNA, 219 bp, Zea mays
  Peptide Sequence Number=SeqID_84812
atgaagctgtggaaggagacttccaggagttccaagattacgacgagttctaggtgtgggttagcggcaacccccagtcggctgcctgtgaaggccgcggttacctacgtttcttttccgcactttgatctattgcgagaacactgtccagaactgagaaaatgcccggctcagactttccccgttgatagtgatactcaatcaccaaacaagccttaa

SEQ ID NO: 41438 - DNA, 420 bp, Zea mays
  Peptide Sequence Number=SeqID_84813
atggagggccggatctcctgtcttgcgttgggaaaaatatccggcttcgcggcggtctcaacccagccctcggcctgcgcggggccagcagagagagccgaggcagccaccatccttcgcccagcgctgggagggaaaaacaaaatcgacggtctgcatccagcccgcggcctgcgcgtggccagcagacagccgaggcagccgaacggcaaggcaaggcccctgcacttgcacgtgagggctccttccactacttctttaaaagatctacctgatgaggacatcactatgagtacgactacaccagcagcacctccacatcaagcgccacttccttcattagctgggccaatcactcgggcccgtgccagagatcttaacttcgtcatgctactgaagaatgagggcccagaagaatag

SEQ ID NO: 41439 - DNA, 615 bp, Zea mays
  Peptide Sequence Number=SeqID_84814
atgaactacaagtttgaggagctagcgcagacccaccccgaggtcttgttcctctacgtggacgtcgacgatgtccagagtgtttcatccaggtacggagtgaaggccatgccgacgttcttcctcatcaagagcaaggaggtggtggggaagatcgtcggggcgaacccagacgaggtgaagaagctggaggaggagcacgagagaggagcagcgaagaagaagaagaagagcagcaggcagcttccgatgtgctgctacgtgggcaaggccaccaagatcttcctgtgcctcgtggcggcgctcctggtcgcgggcctcgtcctcggcttcggcctggcccgccacacgtggggagccgaaaggacccggcagcaaccggactgccgctggcccgactgccagcagcagcaccagggcggcgaccccccgctcgtcccggatgccgtcaccacgcagcccaacccgctcacgcagccggccgtcgccgcgttccccggtgccaccgccaccccgtcgccgtccgccgccgtcgccgcgccgcccacgggcgtgccgtactttggaccacctggcccgttcgtcgtgggcctcggcccagctgctcatgcgtga

SEQ ID NO: 41440 - DNA, 647 bp, Zea mays
  Peptide Sequence Number=SeqID_84815
atgttgatcctagggcaatagatcttgccatgaaaatcgccgaaaggatgttcctcaaaatgaaggaagatgaggcgaagaacaagattgaagaagaagaaaatgatcgatggagaccaaacgacgaatccacctcttcacaaggttcgtctttcaaatccacttctcatatgtgctttattgctaatgggagtgacagtgaaagcgaaagtgaggatgaggaggagcaagaaagtgatagtgaagatgaggatgatcttcaacaattcttcgctcagctaagcaagaaacatcggatgagcttgcttaaactcatgaaaagagcggaagaacaaaaagaaatgcttcataagcaagaagacttcctcatcagaaaaattgaagacttagagaagttgaccaaagagcatgagaagctaaagtgctctcatgatgatttggtccaaaggcaggttcaaccggggtccagggcaagttcaaccggggtccagagaggttcaaccggggtccaggaaaagttcagccggtctgacctgcagtctgccagtctgactggcagactgactgtcagcctgccccaggcggttgaaccggtcctaggggcagttcaaccggtcctccacagccaaaatcagcctaacggctag

SEQ ID NO: 41441 - DNA, 174 bp, Zea mays
  Peptide Sequence Number=SeqID_84816
atggagagtcatgatctccgggcagaatgggaatcacggcttgtgggtggttatgagattgttgattctggttatgactatggtgctggttgtcagcattgcaaccactgctcaggcgaagatgaagctgtggaaggagacttccaggagttccaagattacgacgagttctag

SEQ ID NO: 41442 - DNA, 516 bp, Zea mays
  Peptide Sequence Number=SeqID_84817
atggcgggcggtggccttccctctcgggtctgtttgctcggtcacgggaagggggcggctggcttcgtggggtttaggggttccgcggttaagcgtccgcgtttatatgcgcagcccaggcggggtggaggttacgccaccggcgaaatcggcccggttgttggcgttagctggatccgcggaggagatgttatgactgcgattccgattcgaacggaggtggaagacgcgcagatggatgggatccgatgctcagtggagcggcgagttcacgtcgtgggcgcgggggaggctgagtcaatccgctcctgtggattcgcggcggaggaatcgcgccggccgcgttccacgacatggcgggcggagctgaggaacgtgggggagaaagcagttgagaggctgcgacgcgggccccgctggcaagagacagagcgcgctgggaggctgcccggtgggggttgggccgtgcagcagaaaacgggagtgggccgaattcaggttctgaagcccatttag

SEQ ID NO: 41443 - DNA, 237 bp, Zea mays
  Peptide Sequence Number=SeqID_84818
atggggaacatattccttatagtttctcttgtgtttgtcatggttattcaatcaacttcatttcccacaagagatgtgcacctaacaattgcaatatccaactatgtcgagtgtggtatggagaaagacaattcaaatctgctttttgcaagaggactcctccttttcctgaccagtgttgctgccaaatgcgtggccaaccaccaaactcctatgtccaagtcccttgaagcttag

SEQ ID NO: 41444 - DNA, 192 bp, Zea mays
  Peptide Sequence Number=SeqID_84819
atgaccgcggaggacggcacatctccgtgggcggggatctctacgcaatcctcaatggatcctcagtcgtcggttgaagatccgatgctcaagattgcataccggtttgatgaggtgctaattgtttcagaaattcataactcaatatccgtagctccgaatttagtggttcttgtttctacgatctcgtag

SEQ ID NO: 41445 - DNA, 447 bp, Zea mays
  Peptide Sequence Number=SeqID_84820
atggcgcggtcggtccaagcccaaggtcggacgaggcggagacttctcctgaggctgaggccggggtcgggtgaggacgcaattcctcccgaggccgaggttgaggccgagccctggggtcgggcgaggcggagacctccttccgaggtcgaggttggggccgagccctggggtcgggcgaggcggagcttcctgttgcgcctgaggctgaacttggctgttgtcagcctcaccctggcgatcctcgcattgaatgcgcctgcgatacggtcggttggagaggcgatttggccaaggttgcttcttgacgaagcctgcccgagttgggcctcgggcgtgccgagggcgaagcgagatcgcgtcccttgggtagacgaaagccttgacctggaacgtgcccatcagtctctgcagcttgtgctgatgatggttaccagccgtgtttaa

SEQ ID NO: 41446 - DNA, 450 bp, Zea mays
  Peptide Sequence Number=SeqID_84821
atggtggcgggacaaactcggatgctactcttccgccacggggggaagaagtcgtcgagttcgccgccgctgggcgagctgacgaccgtcgttgttactgtcgcgctgcggggggaggagtaccatgtcgtagctgccgtcgagggacatgaactcgagactcccaaagcggagcaccatcccgggctgaagaggttgctgaagactgcccatctggaactcaacgggaagttgttcgttaacacgcagcaggcccctacctggcgcgccaactatcggcgtttcgacctcggggggtccctggaccgacgagtaaatttgtcgctgcgtgtcccagcccagatgggttggcgcgagatagaacacaagggggaaaacacggctcgtgttatcctgcgccagggggatgcgctcgtagtaggggttacaagcgttcgcaagagagagtga

SEQ ID NO: 41447 - DNA, 1215 bp, Zea mays
  Peptide Sequence Number=SeqID_84822
atgcatgaggggagtgcaaagacattgccaccgcccgggggattgaccccgtttgaaaaggcgactctccccactcgcatcctcaagcgtcacgggcaaagtcttcaccaacgtgctccggggtcctccccctacgacacggccgccccagagcactcgggcttcaagctcattactgatcaggggttcgaaggctggcccctcagaagggttcgacagccgccccagagcactcgggctccgcgcctactactgatcaggggttcgaaggctggcccttcgaaagggttcgacagccgccccagagcatgcagagcgagggatgactctgggtacgtccattacatggtcgaggctcgggctatgctcccgaggctcaggggctgctctcgcaacccggccaaaccgttgacagcgtcaacaaaccagcctaaaaactcggaacctgaccatacacccgggctacaatcaggtcgcatgagggaaacaaccaggccggccaaggcaccacgaaaggcattaagacctcagaggagtcaaaccactcctccgaggcctcgggggctacacccggcgggggtacccccaacactcctaaacacggctggtaaccaccatcagcacaagctgcagagactgatgggcacgatccaggtcaaggctttcgtgtacccaagggacgcgatctcgcctcgcccgagcccagcctcgggcgggaactgtagtcccggacgaagttatgtctcgcctgagggcctcctcaggcagtgggcgcaccctcggcacgcccgaggcccaactcaggcaggcttcgtcgagaagcaaccttggccaaatcgcctctccaaccgaccgtatcgcaggcgcattcaatgcgaggatcgcctgacaccttatcctgacacgcgcgcctcagtcggcaaggtcgaacctcaggcgcaacaggaagctccgcctcgctcgacccccagggctcggccacaacatcggcctcggaaggaggtctccgcctcgcccgaccctagggctcggtctcaacctcggcctcgaaaaggtggtctccgcctcgcccgaccccagggctcggcctcaacatcggcctcgggaggaatcgcgtcctcacccgaccccggcctcaggagaagtctctgcctcgcccgaccttgggctcggaccgaccgcgccatgggggatacatcattaccctacccctag

SEQ ID NO: 41448 - DNA, 561 bp, Zea mays
  Peptide Sequence Number=SeqID_84823
atgttcggcgccctccgagggcaacatggcgctttcgccccctcctccttgcggaaaggcgacgcaggggctcgacagagccgaagtgaccacagtcacttcgccgctccactgaccggcctgacagaaggacagagctgcctgcgccgctccgactgctgcgccactcggcagagtgaggctgatgggcagtcaggcctggcctcaggcaccatagggaactccgctccgcccgacccagggctcggactcgggctaagccccggaagacggcgaactccgctccgcccgacccagggctcggactcgggtaagccccggaagacggcgaactccgctccgcccgacccggggctcggactcgggctaagccccggaagacgccctggcctcaggcgacggtctccgcctcgcccgacccaggggctcggactcgacctcggccacggaagacagactcgacctcgacctcggaggagcctccacatcgcccaacctagggcgcggaccgaccatgctacgggggacaagaccggcgtcccatccggctcgctccgctag

SEQ ID NO: 41449 - DNA, 213 bp, Zea mays
  Peptide Sequence Number=SeqID_84824
atgtcgcgcgcgttcgacgactactatatcgaggattgtggcgtcatcttggcgccggaggtgacgcggaggaggatcaacaacagtgaccagttcgtcatcctcgccaccgtcagggtgaggaagcaaccaacttttgttgcttctgttcaaaggtggtaccaaaggaagagaaccaagactaaagctacgggagggaaggccctctgttaa

SEQ ID NO: 41450 - DNA, 468 bp, Zea mays
  Peptide Sequence Number=SeqID_84825
atggcttgccccggcctcgggcgactactctgggccagcgacagtacccgacccctccacgtggacggttccggggccaccacgtggccagagaagatgatatactccaaggtatcaacagtgagtccggacccctatgggaaagtgcctgacccctgtatatacagaccgggcctccgggtaaggtccaggacccccacgggtgccaaccggacccctaggatggggtccggacccctctatgtggggtccgaaccgctcacagcagggtcccgagattctaggaaaaagaatacccaggccttaatcaaggccaggcgggggttcggagccgacacgtgtccggaccttatcgtttacgcttctgttccccgcctaggcggagccccaatgctgccacgtggcatggggcacgtgacgcaatgtgccgcctccgcatttaatgagacctgtccattccgctggtag

SEQ ID NO: 41451 - DNA, 414 bp, Zea mays
  Peptide Sequence Number=SeqID_84826
atggctcgccccggcctcgggcgactactccgggccagcgacagcacccgacccctccacgtggacggttccggggccgccacgtggccagagaagatgatatactccaaggtatcaacagtgagtccggacccccatggaaaagtgtcggacccctatatatacagaccgggcctccgggtaaggcgatatgccgcctccgcatttaatgagacctatccattccgctggcaggcggcgaccagtccattctacaggcggcgtgcctgtccatttcattggcagacagcacgcccatactactgcatgcactatgctcatcattactcgcgcgttaccaaggaagctaccgccgcatatcaatactgcgtggactgcggacatcagggcgccaggagattgcacaggcgttag

SEQ ID NO: 41452 - DNA, 516 bp, Zea mays
  Peptide Sequence Number=SeqID_84827
atggcgggcggtggccttccctctcgggtctgtttgctcggtcacgggaagggggcggctggcttcgtggggttttggggttccgcagttaagcgtccgcgtttatatgcgcagcccaggcggggtggaggttacgccaccggcgaaatcggcccggttgttggcgtcagctggatccgcggaggagatgttatgactgcgattccgattcgaacggaggtggaagacgcgcagatggatgggatccgatgctcagtggagcggcgagttcacgtcgtgggcgcgggggaggccgagtcaatccgctcctgtggattcgcggcggaggaatcgcgtcggccgcgttccacggcatggcgggcggagctgaggaacgtgggggagaaagcagttgagaggctgcgacgcgggccccgctggcaagagacagagcgcgctgggaggctgcccggtgggggttgggccgtgcagcagaaaacgggagtgggccgaattcaggttccgaagcccatttag

SEQ ID NO: 41453 - DNA, 1158 bp, Zea mays
  Peptide Sequence Number=SeqID_84828
atgaagccgtggaaggagacttccaggagttccaagactacgacgagttctaggtgtgggttagcggcaacccccagttggctgcctgtgaaggccgtgtttatctacgcttcatttttcgcactttgttttattgtaaagactatgtggatgtctcagacatatgatatggctcgtcttagacacactgcacggaagtcagtcatccccttcttaccctcctgccttgctgagcgtccgcttcgccgtcccgtggccggacagtccagccacttggagaggctgcaccaccgcctgcatgaggagcaggactcttctttctcgctccagcaggagatagagtcggtgaggagctgctcccccgtgcttcccctagaggcgccccctgcaccaccactgggcgccctagcctctggagtagctgctgggggagacccagacgacggaggtggcgacgacagctcgagccacgacaccgacttttctgctgaccacgagccggaaggatgggttgctcgacccgtcactcgcgacgctgcttgcgggtgtcacttccacgatgcgctcgacaccctgctacgtcgggcacttgaccggcgtacttggtccatcgagtatcgctgtgtggtctaccagcatagtcgcggggtctaccctgaccgctgggaggcgacctgcttagtgcgccatccagagaacagtctctggggtgctgaggtctgctcggagcactattctatctctgagcgggactcggctgaggcggccatgcaagatgccgcacggcgtgcgctttcgcactactgcttagtgctcgatggggcagctgatggtctcaacctaaagtactacccccgccgtccatctggcagcacaggaggtgtgattgtctcacctgttggtgaggacaatcctaggttgagcagcacagtcaacctagccgccgtgctaaacagggagctggaccatgcattagatgagctgagtagggctcgtgctgagatcgcccagctgagggctgagcgtgcggaacgtcgtcacctggatgatggatcccccgctcccgtcgggactcagcacccgtaccgctcacctcggcgtggacaccagtcttatggcaaccccgactgcaagaccaagataaatttagagccatag

SEQ ID NO: 41454 - DNA, 1278 bp, Zea mays
  Peptide Sequence Number=SeqID_84829
atgagggttgtccacattgcaaccactgctcaggagaagatgaagtcgtggaaggagacttccaagaattccaagactatgacgagttttaggtgtgggttggcgatggctcgtctcagacacactgcatgtaagtcggtgattcctttcctgccgtctcgacttgcggagcgtcctctgccccgcaccgtgtccggtcagtcgagtcacctggagagactgcaccaccgcctgcgtgaggagcaggaacaccggcgtcagcacagagagcagcagggctcttcctccccacctcagcaggaggtggagtccgtgaggcgccgttcctctgctccccagctggaggcgccccctgcaccaccgcgggacgcccctgctgttggaggaggtcctggaggagaccccgatgacgactcagaccacagcacggagtcctctgagccacaggaggcggagggatgggtcgcccgacccatcacccgcgacgccgctcgcggttgtcacttccacgacgcactcgacaccttgttgcaccaggctttcgaccggcacacctggtcgatcgagtaccgttgtgtagtctaccagcacagtcgtgggaggtacccagaccgctgggaggctacctgcctagttcgccgtccggaggatgacctccgggctgcagaggccgtttcggagcactactccatctccgagagggacactgcagaggcagctatgcaggatgcagcacggcgtgcactctcccagtactattctttgttcggtggggtggtcgacggtcttaaccttaggtactacccccgccgtcctactggcagcacagagagtgtggttgtctcacccgttggtgaaggtaaccctaggttgagcagcacagtcaacctagtcgcagtgcttaacaccgagctggaccactctctggacgagctgagcagggctcgaacagagattgctgagttgcgtgctgagctggcagagcgccgccaccaggagggtggatctcccgctcctgttgggactcagcacccttaccgctcgccgccacgtggtcaccacacttatggttcccctgcctgcgccgatgcaacaggcgtgctcagcaagagcaacgtgcccagcaggaggaacatcaggggcagcctccccccgccaccccccgatgacagtggagcagatgttcttgatgcaaactcaggcagtgcaggctattgggcagactctgcagctatgcagcgggctcaacagcaacctcaaccccagttgcaagtgtag

SEQ ID NO: 41455 - DNA, 159 bp, Zea mays
  Peptide Sequence Number=SeqID_84830
atggcaagagtagcatgtaccctccgtggcaagaggctggacgatggtgtatctgtgctctcggtgaggaagcggcaaacttttgttgcttctgttccaaggtggtacccaaagaagaaaatcaagactgaagctgtgggaggaagggtcctccgttaa

SEQ ID NO: 41456 - DNA, 381 bp, Zea mays
  Peptide Sequence Number=SeqID_84831
atgggcaaggacaagaagggtcagggttcgccacgtcgctccagcgacaaacaaaagcatgagccgagtcctccctcggaggacttcagtgattctgagtactcagaggaggagttttccttcgagtacgaggggtcgccgaagtatcctcccccccagcgtcgttcgacgactcaaacgactcctagggagaactcttccgactcgtccgaggaaggaagcgacgatgacggcaaaggcgacgtcattggtggcgacagcagcggcggtggcgacggcggcaacgacgacggcggcaagggcggcaacggcgacggcgacggtggcggcaaggacagcggcggcggcggcaaggtcaatggcaaagcgccactggcttaa

SEQ ID NO: 41457 - DNA, 273 bp, Zea mays
  Peptide Sequence Number=SeqID_84832
atgagcactgaatctgggattcctgattacaggtgtgggcccaagctatcgatagtttggaagttggacaaccaggttttggaagttggagacagaagttttggaatgcagcaacaacctgatggtgatgttgacattgatgagaagttctgggagcaagcttttgaaattcctagctaccatcaatgtggattgctaaagcgtgatgagttgcgggactggtccgacatgacgtggtgtgtcttggcaaagcattcttgcgtctggcgctag

SEQ ID NO: 41458 - DNA, 294 bp, Zea mays
  Peptide Sequence Number=SeqID_84833
atgtggagaagtgcattgcggcgccgttggtcagaccttggttccgaagccaatagcaacagttgggaagcatcaccagggtgcggcggaagtgctcgcagcgtcaattgggagagaggtggtgcgatgatcgcggaattgctcgtcgatgtagcaatttccatgtgctcgagttccgcggcggtcacgacatttcatgcggcgattcaagacgagcaagttacagaggatcctgaggttcagctggtagagactactgagcaggagctcattgaaggcaagttatgcccttga

SEQ ID NO: 41459 - DNA, 456 bp, Zea mays
  Peptide Sequence Number=SeqID_84834
atggcctccctcggactccagacgctgaaggatatcggcggctgctcactcgggtggctaatcatcttctacccctcgctcatcccccgagcgatctacggcacggcatcaatagtcggcgggacgtgcggagctccattaatgcttcacgtgaacggtgacatgagaatgagatacggcgccgagaggagtacgatcgggaccatggcgttcgagcacgaagtcaggccactagagttgagtcagcaacggcttcaactggtggcactacccggggacggtcgatacagcacatcggcaactcccctccccgggaccgacaccacgatcgtcgataggaagatacgtgtggagtatctgcgcttactccacgtctcagggccattcaatggccccccaaacttcaaggtctccaacgttgacaaatacaagcctaagcaggacccaggaggctag

SEQ ID NO: 41460 - DNA, 504 bp, Zea mays
  Peptide Sequence Number=SeqID_84835
atggcaactgctgagtgtgagtgctacctattgtctatgaatcatggaaccgagctcggccacgtcgacgtcgcgtcagtccgtcgttaccagcgaaggacgcacctcggcaccaagatctgtggcgccgatccgtgttacctcggcgtcacaacctttagcggcaagcaaagggtatcgccgcacgataaattacctgttcctaacaatgaagattgtaacttagacccagacacatatgacggagagttcttccaagaagatgggctagaagggctatttgagatagacttaaccgaagctatcagaatggaagtagatattgagatggttgttgatgaggaggatgatgaggtgcaaaatgagaatgacttagtaatacttgaaggcaatgacattaatgacgaacttgcgccttcatatggtgttgactatgaaatgattgatagtgatgatgagagttatgatccggctaaccccgacacatatgaagattatttttaa

SEQ ID NO: 41461 - DNA, 1158 bp, Zea mays
  Peptide Sequence Number=SeqID_84836
atgacagagggtgagggtcaatctgaaagtgcaagtgcgccagagggagttagtggccttagaagaaattcagatgatgtgggatgggagtatggggttcttgttgatataaacaataaggacaaggtaaagtgcatattatgtgacaagcaaatgtgtggaggggtttaccggttgaagcaacatatcgcccaggaaggaaacaatgcgaagaaatgccagagcatgaagaccaccaaagagaagttgctggaggctcaagaaaagtgcaagaaagcactagatgaagcaaaaaggaaaagggaggagaagactattcatgagctagaacttagagaggaagttcatgtgtctagggttggaggatcagaagaagtgacttgtgttggaagttcagagcctcacaaattaggccccatggacaaatggacaaaagctattgatcctacagcaaccaaatctgaatctttgactcaacagaggctgaacaaggaactttggaaagaaagattacatgacgtgcataaatatattgcaagatgggcctttaaccatgcaatatcgtttaatgcatgtgacaacgatgagttcaagcaaatgtgtgaagcaattggacaatttgggcctggaattgaacctccaactatgtttgacctgcgagggagattgttggaagaagaatatgcaagaaccaagagtttgctgcaagaacgtgaagccgagaagatgaagaatgggtgctctattatgaccgatgcttggtgcacactaagaagagaaaataggcttactacaaaccgcctcaacaagttggtctacattcagttcaacaataggctgattaataagagagcaaagatcaagtccaagaaaattactgatgttctcttgtctagtggtacaactgaagctcaaggtttcctccaagagaatggagatcattgtgcattagtttcctttagagatgacgaagatgaggaagaagtcatggaaggtacagggataccttggtctgtgcttggagatgcagtgggagcggaagaacaactagagctgtgtagaagtgcaagggtgagagagctcaatgaagaagagtttgagtccgaagaagaagagtttgatgaagatgaggatgagtatgagatggatgaaacctaa

SEQ ID NO: 41462 - DNA, 426 bp, Zea mays
  Peptide Sequence Number=SeqID_84837
atgcccaagccgcaccacctccaccgtcgttgggaaggagaacactgtgtccaagccgtccaagcccacctccaccgtgcggtggtccacgccgtcgcttccgcgggacaacaagatccaaagctcggtggactcctccaaggtcgtctccaccttcagggctcccgtgctgctagggagtcgcgccagcggaggacggcgagaacggagacggtgaaggatggtgacaacaaagacgacgaggtcatgcggtgcctgcccaaggaagtgaatgtagacgccttactgagtggggacgtgacaggattgaaggggctggaatcagcgctcctcctgaggctgcagcacgacctcgctaatagggccagggacgatgtcctgaccaccgcaatcgacatctgcctggcgattgcatttgatttgtaa

SEQ ID NO: 41463 - DNA, 165 bp, Zea mays
  Peptide Sequence Number=SeqID_84838
atggccatgatgggttcaacatcagaaaagatgtacctctgccagaataagataacacgcaatgggagtggagagatggcgagagtagcgtgtaccctccatggcaagaggctggacggtggtgtatctgtgctctcggttggcgtgaacctgatctggtcttaa

SEQ ID NO: 41464 - DNA, 387 bp, Zea mays
  Peptide Sequence Number=SeqID_84839
atgggctgctcgaaatcaggcgtgcccaggatgcgaacaaggcttgggggacggtggagggcggtgaagagcggggctggtgaggattcctccccccgcgccgatcagcaatttctcggccacgaagctgccggtgcggccagggagatttggggaagaactttggccactaatcgagtgcaattggggcccggtcgtcgagttcgactgtggcggcagaccagtatgcgacgcgcgacggcgagggttctcaggcttgtgggaaacagtggcggcgacgcatggcgatccagagtctgggtcgcatatttatcggcccccagaggagcccgagtagggcgcggtattggccaagtggatcggcgggattgtcgctgcatctggtag

SEQ ID NO: 41465 - DNA, 363 bp, Zea mays
  Peptide Sequence Number=SeqID_84840
atggccggttcaagggatagttctgaagtctctccaagcaacatcatagagccgacttgggaaaccttgccggctgacgaacagcttcagttcgaggagcataaggagcagatgatccaggaggcaaaagcaaagttcttggccaactttaaagtggacaggaacaacaaggtcgtccgacatcgggcgatggatccggcttcactgcgacccacgccagatatccccaatgaaatgcaggtgcatacagagccctttccgatgaacatgatcgacttcgagggcaagaaagtcctggaaagtggtggccgagaagactcccgctggaggggagactctgaaggtgaccatcacagcctctag

SEQ ID NO: 41466 - DNA, 129 bp, Zea mays
  Peptide Sequence Number=SeqID_84841
atgcgcctcatcctgcggtacctgttcttgacctgtgggggggagtccgagtccgtggtggagcacgtgctttggagcagcgacagggagcgcccgccctggatctcaacaaccccagctcaggtttag

SEQ ID NO: 41467 - DNA, 633 bp, Zea mays
  Peptide Sequence Number=SeqID_84842
atggcgaactcaatggatggatccttaccgatcgtcgcgcagcagagctggctgcccacgggggcatgcggatctgcggcggccatggagctgcggcgagcaattcccaaccacaccgcctgtcgaaggcctgcggacgcgaacagcaatcccgggcgacccttgccacccacacaatcaagcagagaggaaatcggcgacgccgttgcacgagcgacggacttggtccacgcgcggggtccgcggcgtttgaagaagcggttatgccagcgcgtggccggcgaagatcgcggggtggaggcggtcgtgccctgcccgaatttcatggcgccctcggtcaacctcgcccggattcccgcggcgcgatccggccttcgtggtgaggaagatgacccccgaccggaggggcccacatgtcaaagggaacgtgcgactcagctaagaggtttcgtcctacagtcaacatttcctctgataccacttctgtcacacccgggtttcggggcaccaagacctgggcatgaacataaccaccaggtgggagctcacgtgaagtgtaaggcttaccaaagaggatggttagagctgagcattgcttttaaagttggtcaaaattttattagcaattactaa

SEQ ID NO: 41468 - DNA, 459 bp, Zea mays
  Peptide Sequence Number=SeqID_84843
atgggcttcccgctcgtcgactgccagaagaacttccagtacatcagcatggaggtcaagcgcaagatgcgggatgagtttgaccgcttcctgtccgagcatggcctcaccgagttctactaccgaagtttcttgaaagtgtatggatacaggtccaaagtctctgttgtagatgttgtgtatggtgtcatagcgttgcttgaatcactggatgccgagtccaaggacgcaaaggagtcttcagccgctgaacagttttgggttgcttactctgcattgtcactgggcaatgctggtcagttacgaaaagggatgcaatcttccattgcgatacagagggtgatactgagacagggaagctcggtgattactaagacatggtttatacggagtgccaagaagtttcggtgggtgaggctcaatgaccctatggacactatcaagctttgccatccgtag

SEQ ID NO: 41469 - DNA, 903 bp, Zea mays
  Peptide Sequence Number=SeqID_84844
atggtgcgcgagctccgtgttgaatccttctacgcacgcctccgctccaccacggccaccgcggcggtctcctcctccccgctcctgatcctcccctccgtcgccgacgtcgactcgttgtgcgcggttagggtgctcgcccacgtcctctccgtcgactccatccgattctccatccaccccgtttcctctgcggcctctaccagggcgctcctcgcctccttcttcggcactgcctcctcctccccgctctgcctcatcctccacaccaccgatctctcctatgacttcgacctttccacgctcgtcgatgcctacgatatctccgtcgacgccaacagcgatgaccacctcagcggcgcctctaaccccgatgcctcgggctcggatgattctgacgccgacgaggatggcgccgacgccgccggcgacgacaggagaaagaggtgtcgcctcttcgacgaccccgacctcgtgaggttctttgggaggctgcgccgcgagtactaccacctcagcaccttccatggcaagccatcggggtgcctcatgtacgacctcgcccacgcgatgcgcaagaacaccaacaagctcctctggctcgcctgtgtcgccctcgccgaccagttcatccacgaccgcatcaccaaagagcgctaccaggctaccgtcattgaactcgagcagcacatcaacggctctggcaacctcgacctgtccagcgctggtaatgttgtcacgctcaagtacgacaccaagatccgggcgccggaggcctcacgcatcacctacgaggacgatcccaggctcatgttgttatgggagtggagcttgttcgactcctataacaccccatccactcccagaccgacagtgctaactcctggcatctctataggataa

SEQ ID NO: 41470 - DNA, 264 bp, Zea mays
  Peptide Sequence Number=SeqID_84845
atgcccgactttgacgttactgatgatgaagctacaaggggcaaaattcgtgtgcctgccatgctgctaggacaagcagaggagtcaaaggagatggagagagctaccagaaataagtactacaggtgtgagagtggactagatgttacaacagacaccatgtgcaaaggtgaagtaatgatgaagaaagagagtttgaatatggttatagagatgagatatcctattaagatagacctgggccgagtcgacaagccatggtag

SEQ ID NO: 41471 - DNA, 345 bp, Zea mays
  Peptide Sequence Number=SeqID_84846
atgtgggagacgggaggcggcgctcctggtggcacaacgggagggggtgaggcgctgggaggagcggagcacggtggcggcgttcggggcgtcgagggtggggggtgcaggtctcttcgctcttgtcggtgtggttgtctgaactctggaaacttaatttttgttcttctgctctatagtactggacggacaaaactgagaaaaaaaacacaactaaagacttggaatgctggttttggttcttgcctacctggctttgaagaatgtgaacttgtgccgtgccagatatatggtccggatgatggacaatctacatccaccacagaagtcaagtttgtctactga

SEQ ID NO: 41472 - DNA, 345 bp, Zea mays
  Peptide Sequence Number=SeqID_84847
atggcgcccaagaccagacttggctgctgtcagcctcactctgtcgagtggcacagcagtcggagcgacgcaggcgacgctgtcttcttgtcaggccgggcgcgtgtcaggataagatgtcaggccatccttgcattaaatgctcctgcgatacggtcggtcggtgtggcgatccggccaaggttgcttctcgacgaagactgggcctcgagcgagccgaagctttgtgctgatgggggttaccagctaagattaggagtcttgggggtacccctaattatggtccccgacaaataccatttggagatagtaaccatctatttgaatagatgtctatttgaatag

SEQ ID NO: 41473 - DNA, 252 bp, Zea mays
  Peptide Sequence Number=SeqID_84848
atgacaccaaatattccaccgccaccacaatggatccagtttgcatccacaccagctccgggattggggactcaacagttcaacacccctccgacacatatacttgcacctggagatagggttacgcccgacgaagcgggtggtagtgggtctgatcccacagcaggtactggatttgttgagtccctcttcgtgttccctcctcctgctggcggcagcgatcaaagctctaaccatgttggtgatgtgtga

SEQ ID NO: 41474 - DNA, 345 bp, Zea mays
  Peptide Sequence Number=SeqID_84849
atggcgagcccctcggtggctgtggttgaccggcgcgtcggggcaccgaccgacgacagagtggtggggacggcggacgacggcgggctgggatggcagcgagctggggacagcggcggttggttgggggtggtggcttgttgggggcggcggcttgttgggggcagcagcggttggggcggcaggctgggaacggtgggctggtggcggcggctgggggcgacggcgcttgggggcggcggcggcggcatcctccgggccggcggcggcgtgtggaagggaagaaacgaaatgagcccgcgcgtgcggggcggctggctcataaaagaatatgaatataaatga

SEQ ID NO: 41475 - DNA, 782 bp, Zea mays
  Peptide Sequence Number=SeqID_84850
ggccgggtttcctgacgccggtgggcgaacctgctgggcctggtgaggggtcccaacccatcatcttctccacgtacgaggccaagaacgacaccctcaagaacgcgcacctctccgacatctgcatcagcacgtcggcggcgcccacctacttcccggcacacttcttcaagacggaggccaccgacggcaggtcccgcgagttccacctcgtcgatggcggcgtcgcggccaacaaccccaccatggtcgccatgtccatgctcaccaaggaggtgctccgccggaacccggacttcaacgccggcaggcccaccgagtacaccaactacctcatcatctccgtggggaccggctcggccaagcaggcggagaagtacaccgcgccgcagtgcgcgaaatggggcctctttcagtggctatacaacggcggcttcaccccgatcatcgacatcttctcccacgccagctccgacatggtcgacatccatgctgccgtgctcttccaggccctccactgtgagaagaactaccttcgcattcaggatgatactctgattgggaacacatcatcagtggacatcgcgaccaaggagaacatggagtctctgatcgggatcggccaggacctgctcaagaagccagtggccagagtgaacatcgacacaggtgtgtacgagccctgctccggcgaggggacgaatgcagaggcgctagctcacttcgccaagaagctctctgacgagcgcaagctacgcaagcgcaatctcgactcctactag

SEQ ID NO: 41476 - DNA, 525 bp, Zea mays
  Peptide Sequence Number=SeqID_84851
atgccccacctcgtggaggacctgttttgtgatgatccagacttattattttccgccgtgcacccgctgcacaggctgaggcggcgcgaggccgcgggagccgacggcagcggcggcggcggcgggtgcgaggtgtgcagcgaggccgtggagcgcgcgtgctacgcctgcgtcgcgtgcggggtcgccgtgcacccgctgtgcgcgcggatgcccgggtcggcgcggggccccgcgcacccggacgacggcgatggcaagcaaaagcagaagcaggcggcggggtgcggctcgtgcggccgggccctgggcgcgtggcggtaccgctgcgtgacgtgcgccgcggagttgcacccccgctgcctggtgccggcggtagaccagtgccgcggcgccggcgagggcgaggccgggcgcgcgggttccgcggccagtagctgctgcttggggctggtgcacgacctgacgcgctgcttggccacgctgggcaccgccctccactaccgtggttactacaatggttga

SEQ ID NO: 41477 - DNA, 942 bp, Zea mays
  Peptide Sequence Number=SeqID_84852
ctacccaacgggtccagcaaattcatactgtggtttgtggtggtgcacagggccgggttcctgacgccggtggcgaacctgctgggcctggtgaggggtcccaagtacgacggcgtgttcctgcacgacaagatcaagagcctgacgcacgacgtgagggtggcggacacggtgaccaacgtcatcgtgccggcgttcgacgtcaagtacctgcagcccatcatcttctccacgtacgaggccaagaacgacaccctcaagaacgcgcacctctccgacatctgcatcagcacgtcggcggcgcccacctacttcccggcacacttcttcaagacggaggccaccgacggcaggtcccgcgagttccacctcgtcgacggcggcgtcgcggccaacaaccccaccatggtcgccatgtccatgctcaccaaggaggtgctccgccggaacccggacttcaacgccggcaggcccaccgagtacaccaactacctcatcatctccgtggggaccggctcggccaagcaggcggagaagtacaccgcgccgcagtgcgcgaaatggggcctctttcagtggctatacaacggcggcttcaccccgatcatcgacatcttctcccacgccagctccgacatggtcgacatccatgctgccgtgctcttccaggccctccactgtgagaagaactaccttcgcattcaggatgatactctgattgggaacacatcatcagtggacatcgcgaccaaggagaacatggagtctctgatcgggatcggccaggacctgctcaagaagccagtggccagagtgaacatcgacacaggtgtgtacgagccctgctccggcgaggggacgaatgcagaggcgctagctcacttcgccaagaagctctctgacgagcgcaagctacgcaagcgcaatctcgactcctactag

SEQ ID NO: 41478 - DNA, 366 bp, Zea mays
  Peptide Sequence Number=SeqID_84853
atggagccttgcggaaggacagctgtcggggctgtcgagtccttgctgacgtctccttgcttccgtaaggggctgagagccgtcgtcgtcatggagcacgcggggcgccatcattatttgtttaccggggcgagccatatgggacgccggataaggtgtcaggccatccttgcattaaatgcttctgcgatacggtcgatcggtgtggcgatccggccaaggttgcttcttggcgaagactgggcctcggacgagccggagggatggcgcggggtggagacggggcaggctggtctggtcaagtggtgcatggggcggctggggctgggctggtcggatggtgtagggggacgtctgggcaattaa

SEQ ID NO: 41479 - DNA, 312 bp, Zea mays
  Peptide Sequence Number=SeqID_84854
atggaggtgggtcacgacggtgcacgatgggatgacgccacaggccctcatcttctattccggtcagcttatacacgatgcagggctaagattgaacggttgagagggattattactggctgcggtgataaggagacggcagcccatggcgacaggcagatcggtgacgacgtgcaacaccgttggctttgccagagggccgtcaatgggggtcggtgcatagtgctcgctctgctaagggtaaagaagaaggagaaaggcgtcgaggcatatctccaggagttctatgatttcgatgagttcgaggattag

SEQ ID NO: 41480 - DNA, 132 bp, Zea mays
  Peptide Sequence Number=SeqID_84855
atggagtttggaaagaaacttccccgtctaagcaagtcgcaatcgtatagagtctcgaagttcggtgctcctttccgggagaagggcatccgtgcaacgtcccgtagcgagggcattttcatgagcaagtaa

SEQ ID NO: 41481 - DNA, 849 bp, Zea mays
  Peptide Sequence Number=SeqID_84856
atggaggccgctggcgtggccgggggtaacacgacgcggccgagggcggaggtggcgcggcgcagggaaaggcgcggcggcacacacaggcaaaggcgacgacgcgggaaggcgcagctgccaattgcaagcatgtgcgggagtaagaaatccgtagcctacttcgcccacgaccgggcgcaccggctgctccccattgccggcggcgacgacttcacctgcggcgggtgcctggtcgctggcgccggcccgcggtaccggtgcgcccacccgggctgcagctttaccgtccacgaggcgtgcgcgcgccgctccccgaggacgctcaggtccgccgtgcacccgctgcacaggctgaggcggcgcgaggccgcgggagccgacggcagcggcggcggcggcgggtgcgaggtgtgcggcgaggccgtggagcgcgcgtgctacgcctgcgtcgcgtgcggggtcgccgtgcacccgctgtgcgcgcggatgcccgggtcggcgcggggccccgcgcacccggacgacggccacgaggcgtggctggtccgagtcgcgtcgccgccggacgacggcgatggcaagcagaagcagaagcaggcggcggggtgcggctcgtgcggccgggccctgggcgcgtggcggtaccgctgcgtgacgtgcgccgcggagttgcacccccgctgcctggtgccggcggtagaccagtgccgcggcgccggcgagggcgaggccgggcgcgcgggttccgcggccagtagctgctgcttggggctggtgcacgacctgacgcgctgcttggccacgctgggcaccgccctccactaccgtggttactacaatggttga

SEQ ID NO: 41482 - DNA, 282 bp, Zea mays
  Peptide Sequence Number=SeqID_84857
atgtcgacatccctgctgcccgtgtttttccaggccttccactgggagaagaactaccttcgcattcaggtacagttggacatcgcgaccaaggagaacatggagtctatgatcgggatcggccaggacctgctcaagaagccagtggccagagtgaacatcgacacaggtgtgtacgagccctgctccggcgaggggacgaatgcagaggcgctagctcacttcgccaagaagctctctgacgagcgcaagctacgcaagcgcaatctcgactcctactag

SEQ ID NO: 41483 - DNA, 951 bp, Zea mays
  Peptide Sequence Number=SeqID_84858
atggagagcaacgcctcgtccaactgcgccaccgtgccgcagccgccgccgtcgacagggaagctgatcacgattctgagcatcgatggtggcggcatccgcggcctcatcccagccaccatcatcgcgcacctcgaggccaagctgcaggagctggacggcccagatgctcggatcgccgactacttcgacgtgatcgccgggacgagcaccggcgcccttctcacgtcgatgctggcggcgccggaccagaacaaccggccgctgttcgccgcaaaggacctcaacacgttctacctcgagaacgggcccaagatcttccctcagaaaaaggccgggttcctgacgccggtggcgaacctgctgggcctggtgaggggtcccaagtacgacggcgtgttcctgcacgacaagatcaagagcctgacgcacgacgtgagggtggcggacacggtgaccaacgtcatcgtgccggcgttcgatgtcaagtacctgcagcccatcatcttctccacgtacgaggccaagaacgacaccctcaagaacgcgcacctctccgacatctgcatcagcacgtcggcggcgcccacctacttcccggcacacttcttcaagatggaggccaccgacggcaggtcccgcgagttccacctcgtcgacggcggcgtcgcggccaacaaccccaccatggtcgccatgtccatgctcaccaaggaggtgctccgccggaacccggacttcaacgccggcaggcccaccgagtacaccaactacctcatcatctccgtggggaccggctcggccaagcaggcggagaagtacaccgcgccgcagtgcgcgaaatggggcctctttcagtgtctatacaacggcggcttcacccgatcatcgacatttttctcccacgccagctccgaaatggtcgacatccatgctgccgtgctcttccag

SEQ ID NO: 41484 - DNA, 606 bp, Zea mays
  Peptide Sequence Number=SeqID_84859
atggcgaagggggtatcagtgagcagtggccgctggatcctgcataaagggccacgattaaatctggttatcggcaaaccgcacgaggagcagagctcacccggcggcgtacccgccggagaggaaccgtgccgtaccccccgcaccccagatgccccccaattctacccaaggaccccagttgcggaggcaccagggccgaggcatcgagctcccagagcgtcggtcgcatctccaatggttcgttgccggttacatggagagggagcagagagagggcgcgcgctagagatggtgcccaacgcggcgagctgcaggaggactgttggagggcaccgagcagaggtgatggtggatcgcgatttcgacaccgacgacatgcccagttctcacacctacactcagcggacatggcggcacagaaaaggatggtttgagatcatgtgttggcttgatggaaggaggggtctagggaggggtgcttatatgcacgggagggtggcgggcggggccaaagatcctggcattcgttacagcacgaagcgccctggaatttccagtgtccatttggggaaggagctactgacaaatgggacccacgcgtaa

SEQ ID NO: 41485 - DNA, 927 bp, Zea mays
  Peptide Sequence Number=SeqID_84860
atgcaggctcgggtcttgacgctggaagggggtagcaacaccttcggcatcgacgacaccttcggcgaggcccgacctagcctcggacggcgacgcggtccgagggtctccgctccgaaggacgacgtcatcaccacgcccgggcaatcgctgccagggacttctccgggaatccggcccgagcgggcggctcggccggtacgaacaaccccactccatgggggaaggcctgcggagcaacagaaggctgacgagcggctcactgccgcctgctctgactacaacggcgacggcccccactccggatggccgaactgcagcagcgcaggcctcagggggtcatcagccctccggcagatccccactcaaatcctcccgggcgagtggggcaccggcctccgcgtgaaggcgccgtcccgggtggtccacccgtgtacacggcgcggcacccgccctctggcaggaggggccgccgggagccaagccgacgaacctgacacgctggaggtgacgacgcccgccgtcgaccagccccgcgttgtcgaagtccgggccgcccgcggggccagtgagcgccctctccctcgaatgccatgggagagggtgacccacgaacccgcgcgggaggtagagcgccggctcagcccggcacccaccccagcgaggatgatgaacatccttgaagctgagggtgggaccaagatcgcagcccggattgctcctccccaccccaggagctggtggtcaccgtcttgggtaaccaccagcggagggaagcaaccgggctgcatgatgaaaatccttgaagtcgaacgatggctgaagggtaccaactcctgcggagttgcgttcctccaacaacgaggcgaaaagacggcggtttccccccatccggggtctcggaaggtgggaagacacggtgcataa

SEQ ID NO: 41486 - DNA, 1098 bp, Zea mays
  Peptide Sequence Number=SeqID_84861
atgttccaaggccctcccctgcggcgcgggggctgggtcccgcatgtcatgcagaccggctccaagcggaagaagccaaaccgccgcgcatggcgcgcgcaaccgcccagcggttacaagaggccctccacttttgcccagaccaatgggcgaaaagaggcgagcagccatgcaggcggcatgcagccgcgccaggtggacacgcttctccgactcccgacgcgccagcatggaggcccgggcccacgcgtcacgcaaccggcgcgccggatgctgcatgcaggcaactgcaccgccacttgcgacaccatcacgcctcttcggttgcggaaccaatgccgcgactcgaggcgacccagcggcgccagcctggcgcgacggtcaatgcggccgaaacggctgccccgccaactactcgccccgtcgcattacctccgcggctggacaggcggcgcttctggcaggcgcagcgggcgacgcttcgccttcgccgaaacaaccgcaccaaaaaagagaccgggaaagggggataccccgaaagggatccttccccgtgaaggaaccaggctccgagccccccctactgatcagaggttcgaaggctggccctccgcggggttcaacagtcgcctcagatcgcgtgggccctacacccactactggtcagaggcccccgaagggttcacagtcgcctcagacgccgagcgagggatgaccaggggggaccaggtccggcagatcacccgcaggtacttttgggcgtgcctctgggcccctagccaacccccaacgaacggggcacggacgtccactcggattacccgcttgcagctcaccggaggcaccatgttcaatgcccatcgaggaggctcgggggctgctctcgcaaacccggctccggccaaaccattgacagcgtcaacataccagcccgagaacttggaccccgaccgtgcacccgggctacgggctcagactcgggctaagccccggaagatggcgaactccgctccgcccgacccagggctcggactcgggctaagccccggaagacggcgaactccgctccgcccgacccagggctcggactcgggctaa

SEQ ID NO: 41487 - DNA, 1266 bp, Zea mays
  Peptide Sequence Number=SeqID_84862
atgcaggcggcatgcaactgcaccaaggggatgcaccctttcgacttcgacgcgtccagcatggggcccaggcacacacgtcatgtaaccggcgcgccggttactacgtgcgagaaactgcaccgccacttgcgccagtaccgcgccttttcggctgtggaacccgtgccgcgactcgaggcaaccctgcgcatggcccaacagtgccaaccgagcacatcgatcacgggtcagtccgccgcgggagaaggcgcgacggtcgatatggccaaaagtgggccggcaataatggcggcggcaggcgggtggaagcagcagtcaaatcgtctggaccgggaaaggggatactccgaaagggatccttctccgcgaaggaagcgggccccgagcccacctactgatcagaggctggcccctcggaagggttcgatagccgcctcaggccactcgggctccgcgcctactactgatcaggggttcgaaggctggccccccgaagggttcgatagccgcctcagagcacgcagagcgagggatgactcttggtacgtccgatacatggccgaggctcgggctacgctcccgaggtcaaggctccgtccactcaagggacacgatctcgcctcgcccgagcctagcctcgggaaagacgaccgacccaggaggattcacgcctcgcccgagggtcccctcaagcaatgggcacaccttcgactcgcccgaagcccagctcgggcaggcttcgtggagaagcaaccttggccagatcgcctcgccagccgaccggatcgcaggagcattcaatgcaaggatcacctgacaccttgtcttgacgcgcgctcctcagtcgacaaggccgaagaaaacaacgccgcctgccctgctccgactgctgtgccacccaccagggtgagactgacagcagccaagtccagcctcgggcgccataggaagctccgcctcgcccgaccccagggctcggactcaacctcgacaccggaagacggtttccgcctcgcccgaccccagggctcggactccagcctcgacctcggacgacggtctccgcctcgcccgaccccagggctcggactcagcctcgacctcggacgacggtctccgcctcgcccgaccccagggcttggactcagcctcgacctcggacgacggtctccgcctcgccccaccccagggctcggactcagcctcgacctcggaggaatcatcgcctcgcccgaccttgggctcggaccgaccacgctatag

SEQ ID NO: 41488 - DNA, 1035 bp, Zea mays
  Peptide Sequence Number=SeqID_84863
atgcattgcgcccttccaccttccgagcccccggatgaggggcacccgcgttgctttcgtcttgctgctgttggaggagcgcaacttcgcggaagttggtacctttcagccatcgctcggcttcaaggattttcatcaggtagcccggctgcatcccctcgccgatggtcacccaagacagtgaccaccagtttgatggtggggagaagcaagccgggctgcggcctttgccccgccctcagcttcaaggatcttcatcgtccttgctggggtggagggcaagctgagccggagctctacctcccgtacgggccggcgggccacctcctccttcagcattcaggggagagggcgcccaccggcctagcggggggggggggggcggacttcgacaacgtggggccgatcggccacaagcgtcatcagctccagcatgctcggttcgctggctcagctggctctggcgcagcttccggtgccacctcccaccgctgggcggagtgcggctatctgcccgccgtacgggcggttgttgcgccgtgcgcaccggggggaccgcccaagacgtcgcgcactgctagggcggcgttcgtgttcttgggctgtcctgcctttctccggtacgacgcctctgcacggaggtcggtgctcgcccatccgggaggacccgagtggggatctgccggtgggcagatggctaccgtcattggggctgaggtggtggcggctgaagaagtcctcgtcgccgacgagatcgccgccaccatctgcgctccgggcctccggctctttggctttgatagcttgtcctcgcccctcgagtggggacatgggcgagggccttatcgcagcagcgtctgccctgaggtcatcgctgctgctgtttggccgcccggagcggaggtcgttgtcgctgctgccggagtgggcggcgtcgagccacctgggattttgtcgtcctgcaggccctccaatgtgggggttgttcgtacctacggaggtggaaccggagttccgtctgtaatggcaccttga

SEQ ID NO: 41489 - DNA, 702 bp, Zea mays
  Peptide Sequence Number=SeqID_84864
atgtcgcctgcccacgcccctagctcctttttgaaccccgcccgcacccgctctccctccctcacctcattttgcccactctcggtctctgtcgtgctcagccaccgccgcacgagctcgcctgagaagcggcccgccatgccatccacgcagagctccagacgcggcatcgagcctcctcgagcaccgtctagaggtgaggaacctttccccgtgctctggttgccccgattttgccttactgtagtgaatccgcgctcgtcagagctctgcctcgccggtctgccgcacctgtacgacgtccgatcgattcagccccgccccatgctcgcgttttggctctgggtgttccccctccctcaccagagctggtgccagcctcagcgcactctattccccctcctcgtggccgggattgctcgccagagtgaccccgacccgcccagagcgccccctctgtcgttcacccgcttccagccccgttctcagagtcgaaaccccgccatcgagttcgccaatcccctctcaccggtcttggccaactccagtgaccccagaccccccggagctcgtgcctgccccatctccggcgactttactgccgcggacgaagcaacactggccgccgtgccgttaacccctctggtgcccgatccaaaccgcccgcagatccaatggcctggatccttggatacttgttag

SEQ ID NO: 41490 - DNA, 540 bp, Zea mays
  Peptide Sequence Number=SeqID_84865
atggcccaccgccacgtccgcgtcccaggtggaagcaaagcgccggtgggagggaaggacgacgaggaaccccgaaccccccgtgatgaggccgtgaccatagaccaaccagcacgggcccacgggcgtggcggagtggcgggttcgttctggccttgggatcctcgcgacggccggcggccggatttggaaaagacaaatccccctgccgctgcggcgctgccaggctgcctgcgcgcgcccccgtctgggtctggccgtctcgtattcctcgcagaggccgaggctcgctggatggggcgcgcggatgccattggcattcggaggcgcaggctagcggggccgctcgacttgcttgctgctggcagtcgttccgttgggttggcagcgacagcgacagctagcgagtcgcccttccctttcgggtcggagaggcaggctcagaagtcagagggggccagaagctcacatgcagatgcgtccatctgccacgccatgcgtctcattgctcgctgcctctgcttcctatatcagctctag

SEQ ID NO: 41491 - DNA, 330 bp, Zea mays
  Peptide Sequence Number=SeqID_84866
atggagcagaggattacccggtctacgctcgccggcggtcgggtggagtccggcgatcgtgaactggcctctccggcgaagcaaacttcgattcctcgctcggggagcttcaccgaggtgtgcgcagtcttctccgagggctggacggggctgggaaaggccttgctggccggtctacggtggcagggggatcggacggccgcggacacgccgtgcacaggcaaacgcggtggatttgggctccggttattaagtgtactacaacttttatacttggcccaagccatgatcataaggctttcatgcccctttggtcataccttcatctag

SEQ ID NO: 41492 - DNA, 171 bp, Zea mays
  Peptide Sequence Number=SeqID_84867
atgtcgtgcgcgttcgacgactactatatcaaggactatgacgtcatcttggcgccagaggtgacgcagaggagtaccaacagcaatgaccactcatcatcgtcgggaatagctttggctcatctaaagaagtggcttcacctcgtgagccagagccaaagccgtttttag

SEQ ID NO: 41493 - DNA, 638 bp, Zea mays
  Peptide Sequence Number=SeqID_84868
atggagcacagtctggatattccaggccgctattcccctttctctctgaagttccgggagctagaatgggtgtttagaggcgcaagaacaagggcagaaaacaacgaccacgtgttcgacgcactctgggctcgccagagcacgcccgacgcgcgccccgcgtgccccgcgtcgcgccaaagcccagccggcgccatggcccgcgccagcgcctataaagcccccagggaccttgaccgtacccctccacacgcgctcgacctaaccggagcccaaaaccaccggcgtttgcccgtgcacggcgtgcccgcggccgcccgatccccctgccaccgtagaccggccaaccggacccttcccaaccccgtccagccctcggagaagactgagcacacctcggtaaagctccccgagcgaggaatcggagtttggttcgccggagaggccagtccacggtcaccggactccacccgaccgccggcgagcgtagaccggagaacctgccgccgacgagaacacccgcctgcgcacgtggaccggacgattccggccacccccgccatcaagtcgtacatcgttgtgaccgccaggacctcccggagccaaccccgccccttgccggacctctctcaccgctg

SEQ ID NO: 41494 - DNA, 219 bp, Zea mays
  Peptide Sequence Number=SeqID_84869
atggcgagagtagcgtctaccctccgtggcaagaggctggacggtgagtcattgatttttgataagccttaccttgactcccttaaagccagcatatccttgagagtctttttactttgtcgggtgaggaagcaaccaacttttgttgcttctgttcaaaggtggtaccaaaggaagagaaccaagactaaagctacgggagggaaggccctccgttaa

SEQ ID NO: 41495 - DNA, 279 bp, Zea mays
  Peptide Sequence Number=SeqID_84870
atggcgcggatggcgcggtccgacgtggccggcgcgccccggcacggccagcgaggcctggtgcagcaagcacgacgtggttgttacatcaaggggtttggtaaaaatgtcagcaagctgactgtgggtatctacatagcgcaaatcaatgtcgcctttcttacaatgatcacgaagaaagtgaaagtgaacatcaatgttcttggtcttcgaatgcagcacgggattcttggcaacacttatggcactcgtgctaatgcagagcagggaggcacatga

SEQ ID NO: 41496 - DNA, 240 bp, Zea mays
  Peptide Sequence Number=SeqID_84871
atggcagtcgaggtcagtgaggcattgtacgccaaggcggtgagccctgatctattgatggggaatcgatggggacggttgatggcagcccctggcactgttgccttcttcggtagcatgtcgaaggtggatgccttgccgaaggacctttggaagaggaaggccccaacatcatatatcttggaagaacagttgaaggatgatcaaatgaagttggaattgatcaagggggagtgttag

SEQ ID NO: 41497 - DNA, 531 bp, Zea mays
  Peptide Sequence Number=SeqID_84872
atggtggcgggtaccggcgtaccaaactgcacacggcggcgatggagggcacgggtgcgcaattcgctgagcgagggtatatgggagtatacggccgcgactaacccccccctccttatagtcaccgaggcaagggagatcgtgggccagtcagcttcgtcaggaagtctcgccgcgcgcgtcgcgcgggtggttgacgccgacgcagagtgtgatgacaggcgagccctaggtggaagtcgcacacagggcgggagcgtggcggctgcccggtgggtccacggaaacagcgactggcggagtggctgcgcgtgtcggtggatgacgggacgggcccgcgtgtcagtgttatgctgggccgagcgcgtggagagaaagagtgaatgcgccgaggagaagattttgggcccaggcgctgttgagaggaactggggtgtagtttgcttcgccgtcgtgccgtcaatggggctcattgtatgcggctcgctctgccgagggtggattgccccttggggagtgaaagtcgcctag

SEQ ID NO: 41498 - DNA, 891 bp, Zea mays
  Peptide Sequence Number=SeqID_84873
atggcgggcttccctctaggcggaggaggccacggccgcggcgaccaccaccaccctcacgtgaacccttcctccggctccggctccgactccgcggccgccgcctacctctacacggccgccgccgcgccgcgcggcggcttccagctatggccgcctcacccggcgcaggagcaccaccaccacttctacgcccccaacataatccgcttcgccgatgaccccgccgcgggctcctcgcgcggcggcaggggctccgccagcggcgccggcgcgggcaccatcagctgccaggactgcggcaaccaggccaagaaggactgcgtccacatgcgctgccgcacctgctgcaagagccggggcttcgactgccccacccatgtcaagtccacctgggtgcccgccgccaagcgccgggagcgccagcagcagcaggccaccggcgccgccgagccctccaagcgccaccgtgacgccgctaccggtgcccagccctcctctaccaccgccacaaccacttcctcgggtgagcagcagcagatggcggtggtggcggagcggttcccgcgggaagtgagctcggaggcgctgttccgctgcgtccgcctgggcccggtcgacgagcccgacgccgaggtggcgtaccagaccagcgtcagcatcgccggccacgtcttcaagggcatcctgcacgacgtcggcccggagccgtcgacggtcgctgcgggcggcggcttccgccacgccaccgaggggtcctcccctagcacggccgcggcgggcgaaggcagcgtcgtggggcccgtctcgtcatcggctgtggtcatggacccgtacccgacgcccggcccgtacggcgccgctcatttcttccacggccatccgaggtga

SEQ ID NO: 41499 - DNA, 423 bp, Zea mays
  Peptide Sequence Number=SeqID_84874
atgggcaagagtaagaaaggtagcggttcttctcctcgctctggtgacaagcgcaagcgtgagctgactcctccttcggaggacttcggcgactcggagtactcggaggaggagttttcctccgagtccgagggatctccggctcccatctcgcccccggcgtcgtctgatgattcagacgactcccaggggcttaccgcggaggtctggacctatatccgggccgtcgagcgcgccgggcttgagggctcaaatgagtcggagtactcctcggacgaggaggactcctcggactcgtccgaggagggcagcggcggcgatggtggtgatggcggtgacgacggaggcgacggtgatggcggcggcgacagcggcatgggtggtgacggcggcagcaagggcagcaacaagaccagtggctag

SEQ ID NO: 41500 - DNA, 261 bp, Zea mays
  Peptide Sequence Number=SeqID_84875
atgcatatatcttacgcattgcattcattagattgtaatcttgccgacagagagtacgtgctcatccccgagcaaggaactgtccaagaggaggaccaggagcaagctcctgaggctgctatcgaggatctccccgcagccctagctattgaaggtgtgattcaggatatggttgatggtgtgacttggcctaccaccctgccaccgggttggacggtcgagtgggatgctgctccggcaggagaggagcacgaggagtag

SEQ ID NO: 41501 - DNA, 744 bp, Zea mays
  Peptide Sequence Number=SeqID_84876
atggggattgggggcaatacacaagacctatgtgagcaaaaaacaggtgttcgcaaaaattcgcagcgccgacctagcaccccttttcgtggcggcggtgctccttttggtacagatgtcccatttggaccaccaggtcctgacatgctcccgacatttgtcaattggagtacctatggagctgtgacaccaatacaagatcaaggagactgtggttcgtactgggcatttggtgtcaccggtctcatagaggcagctcacttcatacgaaacaaggagttaataaaactttctgagcaacacctgatagatggaaacaacctcaggaactttggatgcaaacatggatcatgctccgaggccctagactacattatgagaaacggtggaattatcaatgcagaaagttacccatacaaggaagcccaagggcctgtccggtctatcacggtgagacaacaagtcattttagcctatttagaaattagatgcgcattgatttgggccttgtttggaatagctctagctctaggaaatttggtagagcagctaggtcgaggacacggcgacgaggaagttgttccaaaggacaccatggtcgtggttgctaaagtttggatgacatcgggagagggaagagatcatgggcgtgctcacctgcggctcaaatcggtagtgacaactctcgttgaagatggcttactctttgtcttgaagagtaatacaacattattcgggctatag

SEQ ID NO: 41502 - DNA, 2124 bp, Zea mays
  Peptide Sequence Number=SeqID_84877
atgcggaaggttgatcgacccccaaccaatccgaagcgtttaatcattgagtcaagtcaagaatgtttcagtgttgacattccatgctcgactgacatggcagaccctacaaatacgtcgtctgatggtgatcctccacagcatagaaagacgggcgttgcagctgctgctgaaaacattactatgcctaatgtggatgatgatgatgactttgagccacccaaaaagaagtgcaatatctcaatggatgccccaaataagacgcagaagctcaacatcagatgcaacccaggagatgttcttgcgtccattcagatattgaatgaaaggcaacgtcaagctatagtcagaaaaggattttctagtattcttgacatgacaattgatgcaattggatgtcgaacacttctctgttggctcatgcagaagctagaccccagggacatgactcttcgtattggtccagacaaagaactcaaaaacaccaagcagactgtccatcagatattgggtcttccaaatttgggtggtggaaagccccttaatattaatgaagcgaacgctgcggcaacacttcgggcctcattgaatattagcaaggatgagtttgttatttcaaagctccaagacagattgaggctaggccaggatgatgatatttctatcagatgtttttttctcattctcttcaaccggctgctattcccaacagctagctggtctatttctttcaatgaggttgtacttacagaagaaatggagcgattccctcaaattgattggtgccatctaatttttagtgacttatgtgaggctgcccagagatggcacaacaggagcattaacaatgtgtcagcgacgatatatggctgttccatcattgttcttctgtattatttggatcatttgcatcatgctgctgctccaaacaacaaaaatggcactccacgcataaagtattttaataagaatattataagggcattgtcaatggccgataagcggaagcctcgccagggtggtgaaccatttggtgtttgcccttttcctatgaggccagaaacttttgatgaagacccaaatcaacatgatcgacttcccaatataatcatccaactccctcttatgcaagacttgatggcaaataagattcagatgcttcctgtacatcaacgccagaagttccaagctacgttgattgattatgacttagaggttggcaaaatatttgcctctatcaagcaatgtttgaatactattggtacaaagcagtccaatctagctgctacatttggagaattgattgatgaggttcttcgggccgatgaatctgttacaccaaatactcaaggtcagacagtggtaggtggcacagttgaaaatgattctggaccagtatttgacaagactcctattgggagtgtttctgcaccaggtctcttcttatctgaattagaatgtgctcgcgctcttcgggcatacttgtgttctaggttcattgaattggacagaaatataattgactttggtgaacatcgcgccaattgttgtgacatacaacaatcttttgctgatggcgcatgtctcgacaacgtgtttatgcaatgtttcattgagtgtgtccgtgatgactggtctaaacatattcctccactcaatgctcaccagctcattctagatgttaatgttgggattggacgcatacatgtgttagattccaacccttatggaccagagatgggtgggactatctggaaaaattaccattgtatacctatggatttgggtgataggaaggtttcatgggccaggttaatgatgagtaggctcaatctagctattcaaaatgctcgaccaagatcagctctccctgcttttttgaagtaccctattgaactcatgaataactgcccaacaatgaaattggggtctaatgattgtggattctttgtcatgagatatatgcagaactacgactacatggttggagctatgaatgcagtcattgatccggattattcagaggacattcgctctcttgtactgcattacctaatattccatcgactaaatagaaacagcttcgtggtctcccacctggacagattcaagttctctcagtag

SEQ ID NO: 41503 - DNA, 276 bp, Zea mays
  Peptide Sequence Number=SeqID_84878
atgaagatgaagatcaataggatgagccacctcaagaagaggacaaggatcaagggggagatgaagttgatcaaaacaaggaagatgatcaagaaattcagggtcaaagatcaccacacccaagagtccaccaagcaattcaaagagatcaccccggtggaggatgcactaagagatccagattgggtgctggcaatgcaagaggagctcaacaacttcacgaggaatgagcgccagatctgccaacggtctgcaacggtcgtcttcgccgtttaa

SEQ ID NO: 41504 - DNA, 531 bp, Zea mays
  Peptide Sequence Number=SeqID_84879
atgtcgtgcgcgttcgacgactactatatcaaggactatggcgtcatcttggcactagaggggatgtcatcgaaaatggatgccctggctaaagagccgccgctggtaccggctcgggaatccattcaaagcagtgtccctgctctggacacgagtaacgttatttatggcactagcagaatacgtctgcgccatctactctccagcacacatgatctggcacaaagattaaatcgagtttggaatggtcttctagacgccattagaaagatgcaagtctctgcagataatttgaggaggttgagcagacgcaaccatgtgcctgaatatgttgagcatgttcacaagaatagtcttgtaaatgccatgagggctgttaatgaaattgcagaaggtctagacactgtgagcacagttctggaggaagttcttattggtccacaacctctacttgaagattatgaagcccttggcttgtacgatgatttccaatgcgatggtgatgttgatggtgactataatgaggactag

SEQ ID NO: 41505 - DNA, 354 bp, Zea mays
  Peptide Sequence Number=SeqID_84880
atgtacaacgtcatcgggctgcaaatcgtgcagcaagggtggatggtccgtgtgtattttgcaagttttcttcaatttgaggtacttattaatgatgatttcattttactatttttttcttttggtgcaatatgttcacggacacggagccaccaagtcctagaacaggagaagcaacttcgaactatgagagctgcttttggactagagggcgagaatgtgcacaaaaaggtgggtgtagaaactgatgtggagaaattgttgcatggaagcagggaacgatgggcgtattcggatgcagactatggtcacacacaaggcgataaagatgtagaagagttttatcctaattaa

SEQ ID NO: 41506 - DNA, 339 bp, Zea mays
  Peptide Sequence Number=SeqID_84881
atggggagaataccaagatccccaaaagccgacttgaagaaggtgtccaaggtgaaggtgttatccaaggtgaagctgttgtctaagatcatggtgttgtccaaattgaagctgttgttcaagttggtccaagtggaagtttctcttccagtgcaaagcccaattatacgaacaagggagtctattttacaggacaacttgataaggttccaaatgttcagtatatgtggcccttctgtttgtgctgcagttcagctagagctgaaccaatgtcccaggctcccagctggacctcgcctcacggatggccccctggagctggacctcgcctggagctga

SEQ ID NO: 41507 - DNA, 1230 bp, Zea mays
  Peptide Sequence Number=SeqID_84882
atggtcacccgagacggggagagggcgctcaccggcctagcggagggggcggacttcgacaacgcgggaccgatcggccgcaagcgtcgtcagctccagcatgcctggttcgctgtctcagctggctctggcacagcttccggtgccacctcccaccactgggcggagtgcggctatctgcccgccgtacgggcggctgttgcgccgcgcgcaccggggggccgcccaagacgtcgcgcgctgctagggcggcgttcgtgttcttgggctgtcctgccctcgctccggcacgacgccttcacgcggaggtcgatgctcgcccgtccgggaggacttgagtggggatctaccggtgggcaggtggctgccgtcgtcggtgctgaggttgtggcagctgaagaagtcctcgtcgccgacgagatcgccgccgccacctgcgctccgggcctccggctctttggctttgatagcttgtcctcgccccttgagtggggacgtgggcgagggccttgtcgcagcagcgtctaccctgaggtcatcgctgctattgtttggccgcccggagcggaggtcgttgtcgctgctgcaggagagtccctcggctcggtcggccttgccactcaaggcttctctcgctcagttaaagagaaccctcggccgctctgcgatgagccggagccggaggcagcagtgctggcgtcctcgggggacagctggctgaggctacggagcggccggtccagccgtctactcgggccaggttcctataggagatcctggcggcgatggctcaggcgcagtgttgacatcttccttcgaggtggagatcctccgaccgtgttgctgtctgaggccgggtcggattccgccgaaggtggagtcgatgccgagggtgctgctgccccctcactgacgtctgaacctgcaggaacagtttatctgtacagaatcgctcatccgagcgagacttacttttcacggaaggtgatgagtgaggattctgttatcgatatagtcgagaaggcacaaaaaatcgtttcggcagaaaagttttcgagcgttaagacttgttcggtcagcgaaatcgcttatccgagcgtgagttacttatcgcagaaggtgatgagtgaggatcccactatcgaagtagtcgaaaagcgcgaaagacgttctgacagaaagacttttttcgaggaaaattttgacgcagagggggttccccccttctag

SEQ ID NO: 41508 - DNA, 549 bp, Zea mays
  Peptide Sequence Number=SeqID_84883
atggagggattcctccattataagatactagctgtttcactactccattgcaaccatcagtatcatgcagacttcgatatatgtcacgatttgcatggtctcatcattgaagagcacgtgtcacacctaccgatagaagttcattcgtacattgtcagtcatcagaacaacccgagagtcgccggcgttggcgacgaccatgaggtccccctatttaaagatggacagagcggtgcaaccgctctggaccgtgtccaagcggcggctgcgccggagcttgccgaacacagcgacacatgcggtcacgtagtactgcttccagaggtcgaactggttgtcgccaagcttcttttcgtcgacgatgagcggcgccaacctaggcgtgtgatgcacgtgggaatgggatttgcggggagggggagaatgagaaagacagtgcggggagggggtaatgggaatggcagaacaacacagaatggcagccgggaagacagtgtgggaatgggaatggcagaacacggaatggcagcctaccccttaccgccttaa

SEQ ID NO: 41509 - DNA, 216 bp, Zea mays
  Peptide Sequence Number=SeqID_84884
atgaacacaattaatgatattgaattacatttgtaccttcggcttgacagaagggtgcgatcaattgcaagggtgtctcgtgagggggaagagaccgaggccactgaaacaactccaatttcagaagtaattgaacgatcaggtctagttgtgacaaagggagttgttgacgaaggtgttcctgatgccaaagctgaacagattgttgctgaataa

SEQ ID NO: 41510 - DNA, 1023 bp, Zea mays
  Peptide Sequence Number=SeqID_84885
atggcgagctcgccgatgctcgccgtctcctccatccccctccctcccccgagcgcctataaaagcacccgcccggaccccgtcctcaccacaccagctccggccatctccactgctttcccccgagccattcgagctagcgtcgtcgtgctcccttcgtcgctccgcggaagagggatccgatcctccggaacgtatagcttcggaagaagggcaagaacccgacccctcggagataaacctcttgtgccaggaaagcttcgacgaaggcaagtccatttttcccttgatgcattatttacctatttctctctaccactgcctaagcctggaatgtgggatgggaatcgaattgcatgggttatgaaggctggggagcaccgggaggataaggagggggaaagttttgtccggtttggacatggcggtggcctgactcctttcggtataaccgctaagccgagagatctccgagacccccttcgatatttgccacctagcaacaaaaatacccccacttggaggaaaagaatccaggctctgtcaggaggagaccccacagaagatgaccccaccatcgtctacatggtcggatacctccacaccctcgacaaccactacgatgatctctcctcccaatgcacccacctaaactcccgcgtggaaagcctagagcagcaagtcaaagaacttaagaaagagaaggcgtctctccaggagtgtctcgacatagcagaaggcgaggaagccaacacccatgaggcctatcgaaccttaaagatggactatgacaagaagctaaggaagctcgctcccaagaagaaaatccagaagaagaccaccaaccaaggatgccaaacggagaagaagaagaagacccctccagccccacctccccccagaatagatgattggtccgacgccgaggatatatccctagcaagccttgatgatcttctcaaggaatttggggataccttagagaaagagttcggtagtacctcagggaacgctctcgtgtag

SEQ ID NO: 41511 - DNA, 1350 bp, Zea mays
  Peptide Sequence Number=SeqID_84886
atggcgaagaccgggaagacgaacgggacgtccgacaatggcgaaaacgatgactccaatcacaacattcacaccagcgttccgaccacggagatatctccattgttctccacctaccggctggccaaggccgcaccgacagccacgctcggcgaggaggttcatactgttcgcatcctgttcctatccgtgaccataatgctgttcgtatccgtgttcgtggccatctatgttggcgagcagcacctgttgcccagccgttcggtgagcagggagcagccgtttggcgagcagcagcaggtgtctgcctgttcgcgttatcctggtggattcaaagtccaccttgagcacgaacagtgggatatccccttaccaatggccttccaccccgccacgctgttcctcctccttgtcctcgccgccgtcgcgccgatcccctccaacgcgcgccacatcattactttcgccccctcacgcgcggtcaatcccgcgtccctcgcttgggaccctacggcgcagcactttgtcgtcgccggcggcggcgatgccgtcctttccgtctcagacgctggggtaaccgaatcgatcgtctcctctggcgcctcttgcgtcgccgtcgacgaccggcgacgccgcctcctcgtcgcttccccgggatccgtctccgcgttcgatctccgctccccgcggccgcaccgcctcatcctctcgacgcctgttgcggaccccgcccctccgggcggcatcgctgtggacccgcacaccgggaacgccttcctcactgtgggcgctcgaatctacaagctatccgtagagggcgagctcgccacgctcgcatccgcgccggcgctcggctccgtgcccctagcctcgctcaccgcacacgtgagccgaggcttcctgctcgtgggccagcccagctcgggcagcgtcctccgcgtggacatggaggacggcgccacgaggaccgtgtcctgcgccctcacgccgaccgccgtggcggtccggaccgatggggcggtggcggtgggcggggccgcggggctgcgcctcgtcgtgagcaacgacgggtgggcttcgtgcggggtgcgggacgaggccgcgcccgcgcccgacggccccgtggccgcggtggcggtgcgggagcggcgacgggtgtacgcgctggttggggcggcggcgatggacgggggcaacaagtggcggatcgaggaggcctcgtggaaatcggagtcggaaggggagatggtggtggtgctcgtcttcgttggcgttgccctcaccatcttcatgttctggaggttccagatgcggcagctcgccggcaacatgaacaagaagatcagatag

SEQ ID NO: 41512 - DNA, 600 bp, Zea mays
  Peptide Sequence Number=SeqID_84887
atgggtgtagccaagggacgacttgtgaccgtggtaggagatgagcggttgcctcccacctctataaatagcctgcctgcttcactggtgtcttcacacatctcccggccgtttgttgcttattctccacttttctcttctcttccaatcaactatgggaaagaacaagaagggcagaagttcgtcgcaccactctggcgacaagcggaagcgcgagccaagtccccctcggaggactttggtgactccaagtactcggaggaggagttctcctccgagtccaaggggtcaccgatctacgcctctccctcggggatcgctgtcgaggtgtggacgtacatccaggccatcgagcgctccgggctcgagggctcggatgagtcagagatctcctcatacgaggagaactcctcctactcgtccgaggaggggagcggtggtgacggcgacaacgaaggcgacggcggcgatggaggcgacgacggcggtggaggcgatggcgacgacaagggcgacgacgacgacggcaagggcgacggtggcagtggcaagggtgacagcggcagtagcaaggccagtggcaaagcgccactggcttaa

SEQ ID NO: 41513 - DNA, 585 bp, Zea mays
  Peptide Sequence Number=SeqID_84888
atgatcttagacaacagcttcaccttggataacaccttcaccttggacaccttcttcaagttcaccaggaggcgaaacaatctcgcctactcccctacccgttcagacttctccacacagccgccgcgagacatgctacggcgcgccgccactacggctacgctcaatggccgcgcggcggcgtggttccgtcacctcacccgtaggccgatgacgcttccgcccgctcatctcgggcgccaccatctgcaggcccaactccgaccaccacgcgtcgtgtgggtgccgccgctcccgcacttgtgtggcgcgcggggctacagctacactcgcatggcgcggcgcatcccaatcgcgaggcccgacgggtactccagctccgacggcgaggcagaggatccggacgcgggcgaggccggggagatcacggagcctgtcggcgagggcgcggagggcgacaactcggagggcagcgagaccgaggtggaggggttcatgctggacttgtcatctgacaacttgttcggcgacagcgacggtgacggcgacggcgacgaggaaggcacagaagagggagggaaatag

SEQ ID NO: 41514 - DNA, 2445 bp, Zea mays
  Peptide Sequence Number=SeqID_84889
atgtttggatatcacaatcagggcggtaaatcaacttctcgtattagaggacatgatgatatgcttcaagctgctcgtacggatagccctttaagccagttgccttcacaaactacagagggtggaaactctcttagcggacaagcctcagaatacgaggaaacagaatcaggtaaccttcaaggtttcccagctacagtgactaatacagacatttattctcgtcaagatgccttaccagttactcttaatgagcctggacttgcaattgaattcaatggagcagataatcagttggatccatcatcattgaatggccttgttaaacctttcctccaaatgtccacacctcaaagtactgttccctcagaattatttcctttcactgaagaacatggaaatgaatccttcacatttcatgaagtatatagtaatggattgagtatcaaggatgcagagattgtaggcaccaatgaagaatcagtatggaagctacctggtgctatcagctcaattccttcagaggacagtttccagcaaaatgatagatcgttggaggaaactattagttaccctctcttgaaaactcgctcgtctaatctttctgaaatgctgaaggacagctttaagaaaagtgatagtttcacgagatggatgagcaaagcacttggtgaagtagattcccaaattaagtccagttctggagtgtattggaacagtgaagagaccaataatatcattgaaacatcaagttgtgatcagttggatcaatgtactattgacccagtgctcgcacaagagcagctgttcagtatagttgatttttctccaagctggacatatgcgggctccaagactagggttctcattaacggtaaattcttaaattctgctgagcttaaaagatgcaagtggtcatgtatgtttggtgaggtcgaagttccagcagagatttcagctgatgggattctcagatgttattctccgtcacacaaacctggcagggttcctttttatgtcacatgtaccaacaggttggcctgcagcgaaatccgagagtttgagttccggccaagtgttactcaatacatggatgccccaagtccacatggtgctacaaacaaaacatatctccagatgcgtcttgataacctgctgtctttgggacacaatgagtaccaggcaacggtatctaaccccactaaggagatggttgatttgagcaagaagataagctcattgatgacagacaatgattcctggtcgcagttgctaaaattggctagtgataatgagcctgtcactgatgatgatcaggatgagttctttgaaaagcacttaaaggaaaaattgcatatctggcttgtccacaaagcaagcgatggtggcaaaggccccaatgtgttagatgacgaagggcaaggtgtacttcatctggcagctgccctaggttatgattgggtgataaggccagcagtttctgctggtgtgaatataaatttcagagatgctcatggatggactgcactccattgggctgcattttgtggcagagagcgaacagttgttgcacttatcgcacttggtgcggctcctggagctttgacagacccaacgccaattttccctacaggaagcacaccagctgatctggcatcagctaatggatacaaggggatctctggtttcttggccgagtcttctttaacaagtcatcttcagaccctcgatcttaaggaaggcaaggggagcaatccgccagaaatatccggtgaaggtcttcaagctggatccatgggagattcactaggtgctattcgaaatgctgcccaagctgccgctcgtatatatcaagttttcagggtgcagtctttccagagaaagcaagcagttcagtatgaggatgacaatggtgcagtatcagatgaccgtgccatatcactcttatctgttaaaccatctaaacctgtacagctcgatcccctgcatgctgctgcaactcgaatacagaacaagtaccgtggatggaagggaagaaaggaatttctacttatcagacagcgcattgtcaagatccaggctcatgtgcgaggtcaccaagtgaggaagcattatcgtaaaatcatttggtctgttggaatagtggagaagatcatattgcgttggaggcgaaaaggggccgggttgcgtggatttcggtctacagaaggtgcaacggtgggcagcagtagtaatttgatccaaaataaacctgaggatgattatgatttcttacaacaaggacggaaacaaaccgaagaaaggctgcagaaagctcttgccagagtgaagtcgatggctcagtacccagacgctcgggatcagtatcaaaggattctgactgttgtgactaaaaatccaagaatcgaaggtatcgaggtcttcttcttttgtttcctagcttag

SEQ ID NO: 41515 - DNA, 372 bp, Zea mays
  Peptide Sequence Number=SeqID_84890
atggcggaggcgcggcgccacgcggtcgcgccgcagctagtgcttgggtttggactggagttgatagcatgtaataccagtgactgggttgccaacccagaacttttgaagagcttagcaagaggatttctttgttccaaacaatacctaagtggtaaagtacacttgaaagagattttgaggctccaaaccaagaacctagaggacttgaacaccttcgatggcgacgcacttgcgaacgaagtggagatcaatctcgacatgcttcatatgttggtgctagatggggtcaatggagaggtagatcgccctgaccttgtcgcggtagacaagggcactcctggtgagaggactttggagctcatgcagtag

SEQ ID NO: 41516 - DNA, 906 bp, Zea mays
  Peptide Sequence Number=SeqID_84891
atggctgcaggcaggctcgcccacgaggccacggcggctggcgcggggcggggccgcggagaggcccgcccgtggccagcaaggggaggattggacgaagtaggcggcgacgggcgcagatctggcgccaaggaagggtggcgtgggctcgccggggattgctggagctcacgtccatggacaagggggccgagcgccggtggaggaagatggatacctacgggagcaagagaagaggggatggggaggagtgtcccccaggagggaacgacgaacctcccggggacgacggcgccggagggccctggtgccaaaggttcacaaaaagccaatgaaaaagaccaagaaaggggttcaacaaagagagcaggggataaccgaaggcaccctgaggctctccactataattcaccggactgtccggtgtacaccggacagtgtccggtgctccaaggagaagcgactctgaactcgccagcttcgagaatccgctccgctataattcatcggacatgtccggtgtacaccggactgtccggtgagccagcagagcaacggctacttcggcgccaacggtcacatgcagcagcatttaatgcgcgccagagcgcgcagaagtcaggcacgcgcgtgacggcgcaccggacagtctacagtacctgtccggtgcaccaccggacagccaggcgaccccaccagtcagagctccaacggtcgaaccctaacggccgggtgacgtggctggcgcaccggacagtgtccggtgtacaccggactatccggtgcgccatgcgacagcaggcttcatcaacggctagtttggtggttggggctataaatacccccaaccacccctcattcaagtcatccaagttttcatacttctacaccttacaagagctctaa

SEQ ID NO: 41517 - DNA, 1086 bp, Zea mays
  Peptide Sequence Number=SeqID_84892
atgaggcgaaaagacggcgggtatccctcatcagggggcttggaaggtggaaagacacgatgcataagggagcgcgaagacatggtcgccttccgaagggggcccacacgtcatgcaaccggcgcgccgaatgcttcgtgcatgcaactgcaccgccactcgcgccactaccgcgcctcctcgactgcggaaccaataccgcggctcgaggcaacccagcgcacgacccagcagcgccagcctggcgcgaccatcaatgcggccaaaaatgggccggccgtaatggcggtagcaggcgggcaggagcagcagtcacgtcgtcagccaagctcacgtcccatccgggggcagcgagagaaccctctctcacggcgtgaagacaatgcgcccgtgttctgttcctcgaacggctcgcgcacgcgcaacggccgccccgccaaccactcgccccgtcgcattaactccgcgggaccgggaaagggggataccccgaaaaggatccttccccgtgaaggaaccaggctccgagcctccctactgatcagaggttcgaaggctggccccccggaagggttcgacagccgcctcagatcgcgtgggccctacacccactactggtcagaggttcgaaggccggcccctcagaagggtaccacgaccgcctcaggctactcgggctccgtgcccattactgatcagggcgggaacgatcttgtaacggaatcccatcggaggaaggcatcgagccctcggaccccgtcgctaggggaccgggtccggcagatcacccgcagctcaccggagacaccatgttcgacacccatcgagggcaacatggcgcttccccccctcctccttgcggaaaggcgacgcaggggcgtatgtaaaaaagccgagtctgtccctgatcgccctctcgccctgtgcggaggctcgggggctgctctcgcaaacctggctccggccgaaccgttgacagcgtcaacataccagcccgagaacttgggacccgaccgtacacccgggctacggccagctcgcatgagggaacaaccagaccagccgaagcattacgcgaggcattaa

SEQ ID NO: 41518 - DNA, 291 bp, Zea mays
  Peptide Sequence Number=SeqID_84893
atggacgagagttgcactcaactcctctcaagtgatccaatgatcaacttgaataccactgtgtttgatacacctagcccaggtgggggttggccgaggcccaacaaattagggttgcccggaggccaacagttcattaagcacacccaactcggggaaaggcccaatcgccccaaaagactagtccaatggggaagggtggctcttccttttaaagtggcttcctcctcccaagttaagcgaggtgggataattctaaggctcacacggtcgtcgtccgactacaattga

SEQ ID NO: 41519 - DNA, 1551 bp, Zea mays
  Peptide Sequence Number=SeqID_84894
atgaccaatacagtcagatctggtcatctggcaccgaaagcgatccctgagcccacaggttgtctgcagaagaaacaaaacagcttccccttcctcactgtggtggcttggtgggggggatccgcgcctcccccatcgctggccagctcatggcgccccccgccgccggaggatctccaatgcgccgtgaacgtcaagtgcgccgcgccgccggcgctggccgcgggggacggcgagctccggtggctgcggcggtgcgtggaggcggcagcgaagggcttcgccatcggcgcaggcctcaagggcggcctcgcgctcttctccgtcctcgtccgcatccgcagccgccgctcccccagatcgaggaaggccggagctatgaccaacgaggaggccgtggtgctcgcggtcaaggagactgtgaggtatggcttgttcttggggacctttgccggcagctacgtctccgtcgatgagtacatcgccgccgtctggggacgtaagagaacagcaaggtggaggtcatttttagctgggttgattgctggtccttctatgctcctgacaggaccaggaactcagcatactagcttggctatatacattctgatgcgtgcagcagtgcttgcatcccgttgtggaataaagagcaagcgttttggaaagatctgtaaacctttgacttggtcacatggtgatgtcttccttatgtgcctctcatctgcacaaattttgtcagcatacattttaaagcaggacagtttgccatcatcatataaatcatttctaaacaagcatggtggaaaagatcttactattttgcaaggtgtgaaggatgtagtcaaccacactgctttcagtaacttagtgggtatcgagaagtactacaaatctgttggtgttgacataaagctagatccaaacatgaaagtgccttgctcaattgtgcatggtaaccagtcatgtacaggacatgtcttttcattcttgttacaagcatatggaagagcagttcctgtatatgttccagtctacttagtccctgcacttgtagttcataggcagcatctcatgaaaaggccttactcaattatagggaagagttttctaggagtagcaagatctagtctgtttctctcagtatactgtgcatctgcatgggcttggacctgcctgctttttaggatcttccggagagccaatacccctcttgtcatccttggcacgtttccaacaggtctggctttgctcatcgagaagaagagcaggaggattgagatatccctgtactgtcttgccagagctatcgagagttttttcacatggatgaccgatgcaggactctgccctccaatacttcagataaagcgagctgatgtggttgtgttcagcatagctacctctatcattatgcactgctatgcgcaggaaagagaagtcttccggtccaagtacctgaatgtgctggactgggtatttggtgtgccgccaccacccgacagtgaggataagaactgctatctaccagatgaagccaagaaatgccagtga

SEQ ID NO: 41520 - DNA, 267 bp, Zea mays
  Peptide Sequence Number=SeqID_84895
atggcgatggtcaataccaggcggggtggtggaattgatctgcctcctaatcgacacactcgaaggatatacagacaacctcagccacagccagcagagatgaatcctcctaatcctccaccaggcggagttgacccactggttgctgctcagatggcggtgatgcagcaaatggcagacactatggctgatatgcgtgcccagatgcagcaagaacgccaggagatgcgtcaggaaagagaatatatacgccaggagttgcgctag

SEQ ID NO: 41521 - DNA, 639 bp, Zea mays
  Peptide Sequence Number=SeqID_84896
atggagccttcagttgatgctaaaaatactgaaaataatagctcagagtttgctgtcaatggccatccagaccaaaatgactccagcgattctgacttaagtaacattgatgatggtgacaactctaaggatgaagatggttctaccgacacaatatcttcatatcatgtgaatgatttccagcgactggctcttgcgtgtgatgatggttctgtacgattgtataatgtgcctgaatcaggtgcattgacttactataggtctcttccaagagtgagcggagatggtgccacattggaatcagttccagaccttgtgaaggcaatgtacctaaacgttgaaagcttcccttgtgtgaggctgttgaatctttctggtgaaattggctgttctaatcctggaagtgagaaggtcattgcaccaattgtaagacttagaaaaggcagtgatcaattggttcaaccatctactattctcctttccttagatcagatgttagatttctttctgagcgttaagaacgtgggtacccacgttcttaacgttaagaacgtgggtaccgtcgaacttaatgggcagccctcgccgacccacgtaggacccataagttcgacggccacctgtccccgtcgaacttaa

SEQ ID NO: 41522 - DNA, 647 bp, Zea mays
  Peptide Sequence Number=SeqID_84897
atggaggaagaggattcctccttgtgcttgtgggcggactcccttgaatgtgttctccccgagcttgcggacttgtcgccggtcccgatctctctcatggcagatgctcccgacatcacatcgagcgactcaaactcgccaccttcgggaatttccagaggcgactcggctaaaattcaccggactgtccggtgtacaccggacagtgtccggtgctccaagggaggttgtcctcaggaactcgccagcctcgggttttcactccagccgctccgctataattcaccggactgtccggtgtgcaccggactgtccggtgcatctgcggagcaacggctacttcaggcgccaacggctacctgcagcgcatttattgcgcgccagcgcgcgcagaggtcaggcacgcccatgctggcgcaccggacagtaaacagtgcatgtccggtgcgccaccggacatcaagcggggcccagaagtcagagctccaactgtcagaatccaacggcagtgatgacgtggcagggggcaccggactgtccggtgtgcaccggactgtccggtgtgccatcgacagacagcttccaccaacggtcaagtttggtggaagctgggtgacgattacccccaacccccccgaccattcctg

SEQ ID NO: 41523 - DNA, 279 bp, Zea mays
  Peptide Sequence Number=SeqID_84898
atgaataatgcttggtctggtggtgcactgggcctcggccaacagctagttcacaggcgcactattttggctcaacgactagcttacatggcttggactggtggtgcactggactggtctagtgaccacccaggaaggaaaacagcaatcaagatctcaagtatgggctacaagacctggtccggaaatcttggacgtggtcacgaaaattctttgcacccatgggttttgaaaacccaccttaaaatcaacatcttgtggtacttgttcttgacctag

SEQ ID NO: 41524 - DNA, 396 bp, Zea mays
  Peptide Sequence Number=SeqID_84899
atgccgaggagacgggctacatcttcgcgccactgcctcatggcctctggcgaggccgtggaacttggagggtggcgtagcaactccctggctgcaaacaacgccccaggagtagcccttgacggagccttggatatctgcgcgggcgtgtgctgctgcgcagcgtgcatagcagcagcactaggcgcagggcggttagagcccctgtggcatggaagatgcagcctcttcctccatcaggaaatcctcgggagacaagtcgcggtgctcgacgatctgaaccatcgtgtcgagcaagaaaaacaggcgaaaaacccaaagccaagccccctacctggcgcaccaaatgtcgaagagaaaatcctccgaccgggtggcggaatgcacccgccctaa

SEQ ID NO: 41525 - DNA, 1527 bp, Zea mays
  Peptide Sequence Number=SeqID_84900
atgggaataagaagagcagtacttaaatctgactctcaagtaatcacaggccaggtcgacaaaagcactgattcaacccacttggccattgcaaaggtggggactagacttattgggaccacttccaccagcccaagggaatttgagatatgtcgtgcatttgagaacaagtccccaacattggtgcccacctctggtgaactcacttccacttttgagctaatggcttcgttcaacaaccaagtcgtagcaccttcggctacgaagctggtgctcccgataacaggcggttcaagtttagagtcggctaacaagaagcagaagaaggaagcgcagagaagggtgcaacatgttggggtgcagggacccttcatcaagtccaaatggtctcacatcccaatcaccttctcccaggaggaccttcagctcaaagattaccctcacaatgatgctatggtcatatcttgtgtcatcaaaggatttctggtccataatgttctggttgacacaggcagtgcagcggatatcatatttgctaaggccttcagacagatgcaagatccagaagacaagattcatgatgctacacaccctctttatggcttcggaggaaggcagtttgtcgtacttggtaaaatcacaatgtcagttaccttcagctatgtccacaacacaaggactgaacaggttatctttgacattgttgacatggaatacctctacaatgcaatcattggtcgagggacactcaatgccttcgaagcaatacttcatccagcatatttatgcatgaagataccttcggaacaagggcccattgctgtccatgggagtcaagaagctgccagaagggccgaaggaaattggacagattcaaaagaaatccataacatagatggagctaaagcctccaatgatctctgtggtgtcaacagagatgttattgagcattcactcaatgtggatccatccttcaggccaagaaaacaaaggcttcggaagatgtctgaagacaaagttgaaggtgctcggaacaaagtaaagagacttcttagtgccggtgtcatcggagaggtgaaatacccagaatggctagccaacactgttatggtgaagaaggccaatgctcttgtacaggagaagctagatggccaaatcaaaaagcaggctccagtgtactttgtctccgaagttttaagtttatcaaagaaaaattatatagaattggataaggtggtgtatgctgtgttaatggcctccaggaagcttcggcattattttcaagcatatcacataattgttccttcgtcacggcctctgaaggacataatgaggaatagagaagctactggaaggattggaaaatgggctgcggagcttaacgaattcagtattgactatgtgcatagatcctcaattcagtcccaggcgttagcaaacttcatcgctaattggacgccaggggctcaggaagaagaaacaaataaagacgccgaagcttggacagtattttgtgatggttcctag

SEQ ID NO: 41526 - DNA, 936 bp, Zea mays
  Peptide Sequence Number=SeqID_84901
atgcggcgctcctccccgtactcgtacgccttcttcgagcgcctcctccaggagcacttcccatttccgcgccgcctcttccaggtgcacgcgctgctcctcacctctggcgtgctgctccttgactcacaatgctccgcggcggcctttccttacaactgcctcgcccacgcgcaccgccgcgtccccgccgcctcctcttcgcgccccccgtccgccccactgcgcctcttctgcgctatgctcgcccgcggcgcgcgccccaactgccactccttcccgtccctcctcatgtccgcctccgcgtccgccgcggcggcgctccacgcgcagtgcctccgccgcggcctcgcggctgactgcttcgtcgcctgctcgctcgtcagcgtctatggccgaacgggacacccgtcttgcgacgcgcgcaaggtgttcgacgagatggagggtcccccggacctggcctcctgcaacgcactgctcgacgcgctgtgccacgccggggacctggacggtgccggggacttctttgagcggatggcggtgagggaccccgtgtcgtggacgacgctcgtgtctgggctgtcgcggggcggacgccaccggtgcgctctcgaggtgttcaggggatttttgctgggtaacgtgggacgacggctcgaggaagcaacgctggtcagcgttttctcggcctgtgccaacgttgacggcggtgagggtcttgccgcgggcatggctgtccacgcatacctcatccgtcatgagattgagctcactgcgttcctgggcacagccctggttgacatgtatgggaagcatgggaggattggcttctgtaagagtgcttttgcggtcgtctgcacgaaggaggattggtggaggttgggttatactggttcgacgcaatggttgctgaatacaaggtggtaccgttga

SEQ ID NO: 41527 - DNA, 450 bp, Zea mays
  Peptide Sequence Number=SeqID_84902
atgccaccgcatgttccatcacaaccggctctgtaccaccgccacatcctcggcggccgccggctgctcgagctccgggactcgtggagcgccaagctggaggcgcagctccggcacttcctccgcgcgctgacgccatcgcaggtccgcgccgtgctgcgcgcgcaggcgcagcgggacgcccgcgctgcgttcgagttctttcgctgggccgaccgccagtggaaataccgtcacgccccggaggtgttcgacgaaatgctggcgctcctcagccgcaccaggctccacgacccggcgcgccgcgtcgtgcgcctcatgatccggcgtggtatacgccggggcacgcggcagtttgcacacctcatgctctcgtacagccgcgccgggaagctccgctccgccatgcgcgtgctccagctcatgcagaaagatgggaaggaaaggtaa

SEQ ID NO: 41528 - DNA, 453 bp, Zea mays
  Peptide Sequence Number=SeqID_84903
atggatagaaaaggagaggcacacctagctagggttcctcccatatctgcagctagactgcagtgcagaggggacaaaggaccgaacgtgcgtcgttttcggaaacacatggctgccttcttcgctcaattccctgtcgcaactgctagctgctgcgctgatgtcagttcgttcgttcagaaagtatttactgggtgttggcaccgatatgggcgtcaatcaatgcgatgtgtaccggcggcggcgctctctgcgatagcgcggatgatccgtggcctagggccagacgggcagtccgcgcgtgcacagggcggcaacgttcgccaacaacatctggatctcgctctcgggatagaccccgtcgggagaagagattctagggtttgtcttgggatcgacaggccactcaagacgcctctggacgacgtagagttgaagagaggtgaagattga

SEQ ID NO: 41529 - DNA, 336 bp, Zea mays
  Peptide Sequence Number=SeqID_84904
atgggccacgccgcatgccaccttcgtcacgtcgtcctaggaaccgacgtccctatctccatgggctacgtagcatgccaccttcatcacgtcattctatcaaccggcgtcaccatctctatggacagcaccgcctgccaattttgtcaccacatcctggacgccgtgcccatctctagggacagcgctaaattacgtcacatcatcttcactaacggcgtctccatccccatggacgacggctctaggggcagtcacggctcggcaatcactagatgcatcgatggtagggatagcaatgggtacccgaaaccttatgggttttcaccccattag

SEQ ID NO: 41530 - DNA, 327 bp, Zea mays
  Peptide Sequence Number=SeqID_84905
atggaggcgtcggagctagccaagatccagcgcgagctgtcccgtccggcgttcgcggtggggcctctgcacttgctgtcccaggcaccggcggagcagagcctgcacgcgcccgaccgcggctgcctggcttggctggacgaccacccgccacgctccgtgctgtacgtgagcttgggaagtgtggcctgcgtcgaccgcggcgcgttcgtggagatggcgtgggggctggcccgcagcggggtgtcgttcctctgggttgtccggccgggcttggtcgacggcgtggcgagagcaggtgaaagtcgcctagaggggggtgaatag

SEQ ID NO: 41531 - DNA, 486 bp, Zea mays
  Peptide Sequence Number=SeqID_84906
atggccggacaagagcatcactactggagaatcgttctgtttccgttgccgctccagggccacatccgtcctacgctccagctcgccgcgctgctccatgcgcggggcctcgctgtgacggtcctccacaccggcttgaacgcccccgacgcctcacgccacacagagctcaccttcgtccccatccacgagccgtcgttccccgacgaggtcacgtcccccggcaccgacatcgtcacgcagctcctggccctgaacgccgcctgcgaggcgcccttccgggaggccctcgcatcgctgcttcgtggtggccaggacgtcgcgtgcgctgtggtcgacgggcagtgctactcggcgctgcgtgcgacacactggctgggcgtcccggcgctcccgctgcggacagacagcgccgccacgttccgcagcatgctcgcctacccacggctgcgtgacgccggtttcattcccgtcaaaggcaagtaa

SEQ ID NO: 41532 - DNA, 312 bp, Zea mays
  Peptide Sequence Number=SeqID_84907
atggacatgggccagctccagcacgcgacctcctcgtcctccggcagcggcagccatggacgcggcacccgaggacccaagatgcagaaagctgaagatatgattcggcaagtccacggtgtcaggcattcaggccttcgtagaggattctggcctcgaggagaccgggatgatgacgaggtccgcggcttcgaggagctcgtgcggcggaggggcgacagaacggaggctgcagcctgcattctcttcgcggcgaccgatgtgcgaggaaaccaaaccatcgatgaggcagccgccggcctgctggagtga

SEQ ID NO: 41533 - DNA, 90 bp, Zea mays
  Peptide Sequence Number=SeqID_84908
atggctgcagcaaatctgagcacagttggcttctttgcagatgcgggcgataaattgaagctgtgggtactctgttttctgaaaggttga

SEQ ID NO: 41534 - DNA, 327 bp, Zea mays
  Peptide Sequence Number=SeqID_84909
atgtggcttgtctgtttgtacacaactgtaacaataagtaacatcagtgtcctctgggttattagggactgcatgtcaagccagcagttggtcgatttcatccgcgagcatatagacacagtggtctttgttgaagcaactgaagcccaatacgcattcaaaaaaccactatatacacgatataagtatgatgtgaagccgggcaatgccattcttgctgaggacaaacatttgccaatcttgtcctcaacagagaatgggaaacaaattcttgatgttgtcacattaagcacccatgagacggggagaaacatagtggactcctaa

SEQ ID NO: 41535 - DNA, 578 bp, Zea mays
  Peptide Sequence Number=SeqID_84910
atgtcgaccgagaaacgccacctagatcagatcgaactcctcagtgttaggcggctccacttcgaccacctgctcttctcctgtgggggggttcttgtcgaccgccatcgcagcaaaatcaaacaaggacctccctacactgaccactcccctactgcccttgcccctttcgggcgcggcggcgcaccaactctcacggcggagcctcaccggcgcacacccactaagcgaaatagggacctaagatatgctacgaccggtgctatacgtagggtagacagtagcagaggcgatgaggtacctcaaaccggcgatgcggttgtagaaccctccgaccacggcacagcggccaagaagaactccggcgagaaattcctggcggcaccgcacttcttcgaccgccgcgagaccacgatcagtactaccacgcgtccacgatgcaccacggctcgatcacgtgaccagatcggcaaggggacaagcttttctctgcgcggccgcggacaggttctcgacctctctctttctctctacggtggtggcgctcgagttgtgggtcaagtgcggcaaagcgccag

SEQ ID NO: 41536 - DNA, 876 bp, Zea mays
  Peptide Sequence Number=SeqID_84911
atgtggtgggcttggtgtatcccggactatccgacgggaaaattcatacgattggatgtcatcgggtttacttacattggagatttgaagcgaaggccacccaagacgcctctagtcgtcgtagagccgaagagaggtgaagattcgagacgtgctcgaccacctcaagccccacactatcgctctcttccacattctctacagccgctgcccacctctagctccggctccacccccaaatcgctctcgcacttcccgcgggaatccttcgccgggaacctccagctctgcggggacccgcttccgccctgcagcagcccgttctttcctccagtgccgtcgcccggcgggcccggccctgcaccgggctcatccaagaagcggaagctctccggggccacaatcgcgggcatcgtcgtgggcgccgtagtggtggggctcctcctcctcatcgccatcgtgctctgcgtggtgtccaaacgtcgtggcgccggcgcccgcgacatccaccgcggccagggggcagcccccccgacgtccggcgtgggtggcgtcttgacgtcctcgtccaaggaggacctcggaggcgacgcgttcgggtcagccgcggcagtcgcggcggcgggggagcagagccgactggtgttcgttgggaagggcgccgggtacagcttcgacctggaggacctcgaggatttcgaggtcgacttcgaggagttcggggttgcgaacagggccatgagcaggtcgaccctgaggccctggacaggagcttctttatgcgggtttgtccccttctctcgcatgtgttcattagtatcatcagcctgcgatgcaatacaacgcaaatgtcgtcgattaatgaatgatttatag

SEQ ID NO: 41537 - DNA, 270 bp, Zea mays
  Peptide Sequence Number=SeqID_84912
atggccggacacggcgaatcggcggcttaccaacctaaacagagcgaaactacaccgagggaaaggggagagggaggcaaaatcgctagagcggtcataccagcctttcgtcgcaaggacgagtccgacgacgcgacggcgcggcttcctggtccagttcgactccgacgagcaattcaatgctcctgggacgaagacaagcccggcgcagcttcctggtccagttcaatgctactggttttctccgacttcaagggatcacggaggtga

SEQ ID NO: 41538 - DNA, 639 bp, Zea mays
  Peptide Sequence Number=SeqID_84913
atgaggaaacaactccacgaggcgagagaacagctggtgagacaaaggtatgagcttggccgccagcctgctaacaccaaactgtctagcaataaaacagtgaggagggtctgtgtccgtggaggcaacacgaagtggagggctctccgattggatacaggtaactactcgtggggaagtgaggctcttacccgcaagactcgcatcctggatgtggtctataatgcatcaaggactcagactcttgtgaagagcgccatcgtacaagttgatgctgctccattcaagcagtggtacctcactcactatggagtggacatcggtaggaagaagaaggtgcatgtcgctaagagggatgacactgagaatgctccattctttgtgtctaaactggcaatcaagatactgccatgtgtaatattgttcaagaagggtattgttgttgaccgattagttgggattcaagatctcaaaagtaaagacgattttctgacaagagcattggaacatattcttattctcaagacgaaagggataatcgatgagaagaagaaagatgacgacgatgacgatgaagaaagcgaggctaagaataggagggttaggtcctcagctgctgaagactctgacacagattga

SEQ ID NO: 41539 - DNA, 396 bp, Zea mays
  Peptide Sequence Number=SeqID_84914
atgtgggcgcagactgccccagccacggtgtcgcgcggcccacggcggagtaggggctcccgaggacgcgcggctcagaggccttacgtcaggctccgcccgctggcttacgtcacgggcagtgggccacgtggcagcatcgagtctccgcctgagcggggagcagagacgtacgcgatatggtccggacacgtgtcggctttggacctccgcctagccttgattaaagcctgggtattctttggcccagaatcccggaaccctgccgtgagtggctcggaccccacaaagaggggtctgggacccgtcccaggggttcggtttgcgcccgtggaggtcctggaccttactcagaggtccggttcgtatatacaggggtccggtatttttccgtga

SEQ ID NO: 41540 - DNA, 474 bp, Zea mays
  Peptide Sequence Number=SeqID_84915
atggccggggaaataccgattacagaccggagccctgatttcctactcctggtgcaagatacatggaacagaggacctagcgaatcatctaaggacatttttctggtgtcatgggtgcacgtggagctcacctacggtacggagcggccccacggtggcggccgcacggcggcgagaaattgccaaccccaatccccgctgaccccttcgaaactacgtgtacgcaatttaccgagacaacagaaggcttgggggtatattgcccacgacagaccgtggagaagcagcggcggcgatacctccacaactcacgacgatggcgctcgacacggcatccagggcttcaacaaggaggttgctgcaacgcggcccgggtgggaactagtggctcgtccagcggtgacaaggcttgagggggggagggtgaagttcacggccaaggcgcgatgcggaaagggaatggaggggaagtga

SEQ ID NO: 41541 - DNA, 1605 bp, Zea mays
  Peptide Sequence Number=SeqID_84916
atgaccaagagcctcctgattctacggtcggccagcaattctaaacaccccttccattcccaagctaatcactctaaagatacaattattcttactggcaggttctcagaaaagttcgtcacacaaaagctgaaacaggtcgatggactcatggatgacatcggtagtgccgcccggtgctgttcagctgttgtcacggaacggagcggaagaggacaagagagtaatctggcagctgcttttaaagaacagtgcagtaaccagcacacagcccagagcaggaggcagttgatggaatgcgtggagctgctggattctcccgatctcttcttcctggacggcggcgatgcgcatgcgaccgacttctcactggagaaccatctcgagtcaagtagctcggcaggtgccaaaaacaaagctgcgccgggtcatagtcatattcatagtcatagtcatagccggcgtgctcagcttcatcggagtaacgcgcctgttccaccgccgctgcctggaacctcttattatggcgcgcggaggaaggcgaaggccgcctgtcgccgtgtccccgaaggcgtcctggattcctgggacaggttgttcttggagggataccagtctgacctccgtgtctccacagacggcggcgctgagatttcgtcgcattcctgcgttctcggcgtcaaatcccctgtcctgagagctatgctggaggaagctagactgagagatgggtttcggtgtatccgtgtctctggcgcgccttcggaagcagtccgtgtcttcatcagatttctctactcttcacggtttgagcaggaacagatgaaggagcacgctctgcatttgcttgtgctctcccacgtcttctcggtgccgtctctgaagacggtctgcgtcgaccaactcgagaggggcttcctcgctactgacaacgtggtagacatgctgcagcttgccaggctgtgtgacgcgccccgcctcgcgctcgcctgtgcccggatggtcatcggggatttcaagaccatctctctgacggatgggtggaaagtgatgagacggaccaatccaagtatggaacaggagctgctcgagtctcttgtcgaagctgatacgagaaggcaggaaagagctaaaaggatggaagaaaagaaagtgtatctgcaactgtacgaagcaatggaggcgctggtccacatctgccgggacggatgcaggacgatcgggcctcgagatcaagcgctcaagggcagcctagcagccgcctgcaagtttcgcgcctgcaagggcattgagctgctcgtgcgccacttctcggcctgcggagtccgggtgcccggcggctgtgccaactgcaggcggatgtggcagctcctcgagctgcattcccgcatgtgcttcctcccggacacctgcaaggttcctctctgcaggcattttaaggagaagatgcggaatctggggaggaaggaagagaccaaatggaaccttttggtgtgcaaggtgctggagcgcggaggaaccatgggttttatgcccggaaggagaaaaaatttcatcaaccctaaggccagctgggtgttgccacgtggctcctcttgtatttga

SEQ ID NO: 41542 - DNA, 453 bp, Zea mays
  Peptide Sequence Number=SeqID_84917
atggcgcaccggacagtccggtgcacaccggacagtccggtgcccctgccacgtcatcactgccgttggattctaaccgttggagcttctgacttctgggccctcctgggtgtccggtgcacaccggacatgtactgtttgatgtccggtgcaccgcaggacgttcagcctcccatttgtgcagttggaccatctacagcaggactcagctcgtcgcggtcgacgcgcgacacgtttgagaacgtggcccaggacgacgacgacgatgacgacgacgctggcgctggcgctggcgccgcaggtcaggtggagattggaccgtctcagttgcaggatgctcctacaactcagccatcacagctgacaccacgtataaggcgtccacgagacccttacactccaggcaccgacgctcttggggccaagggcaagggtaagactaggaggaaatga

SEQ ID NO: 41543 - DNA, 168 bp, Zea mays
  Peptide Sequence Number=SeqID_84918
atggagctagcggccaaacatctcaatgggattcttgggaatacagatgggatgaagtgccgcctgcaccactctccagattgtaagggcgagaggcttcaatttgtggatattcctcgcaaacgggaaaagactgcaaaggaagaaaacagtggtactcaaagttga

SEQ ID NO: 41544 - DNA, 405 bp, Zea mays
  Peptide Sequence Number=SeqID_84919
atggccccgtcctcgtggcgttccggcaactaccgcgagccctccgcttctcctctaggtccctctcctacagaaccctcccaatccaaagcgattcctccgagccgccgcgacggtgtctccccgggctcgcgttccatcgagatccagtcatctggccgctccatcgaggggctgatggagaaggtgctgtccgtgaacatcctctcctcggactacttcaaggagctcttcaagtacaagacctaccacgaggtcgtcgacgagatctacaaccaggtggaccacgtcgagccctggatgactggcaactgccgcggaccctcctccgccttctgcctcctctacaagttattcaccatgaagctcaccgttaaacagatgcacggcctgctcaaacactag

SEQ ID NO: 41545 - DNA, 720 bp, Zea mays
  Peptide Sequence Number=SeqID_84920
atgagcctctacgaagggcatgctacgaacgcagcctctattgcgactactcccgattccatccctgtccgcgccatgccgccgctgcgcggagccaagcgacaccggaaggcggcgttggagaagaaggcggcagcggtcgcaatgtcgtctgccgccgcgggcgaccctcccggcgactggtgggaagccttctgcatccggatgtcagtatcagaaacttcagtttctgctgattggctaaaattacagttctttgaccatgccatttgtatcaatgttccaaggtctcgcttcctaccagttaaggcgacatcagatttgcagctagtacagtctgatctatataccttggttgatggcttcgttacacgtaattcagctagaacaaatccatcaaatccctcaattgaacttggtcctgagttcaagaaggttgggagcttccttggtcgcttcaagtccatacctagcatttttgagcttgacagcttgaaggtttccggtgatgtttggttcggttctggaattgtactgaagggcaaagtgaccatcactgcaaaacctgtcgtcaagctagaaatcccagaaggagcagtgattgggaataagttgtggaatggtggtattgtttacagtacatgtgtttggactttggacactgggttccaattacattatgaggtcagaaattgtgatcaccagcttgacaaatgctaa

SEQ ID NO: 41546 - DNA, 717 bp, Zea mays
  Peptide Sequence Number=SeqID_84921
atggatgttgttgctgcacaaacaaaggctattgctgaaaaaatatcagattggacaaatattgtgttggcatatgaaccagtttgggctattggtaccggcaaggttgcaactcctgctcaggctcaggaggttcatgatggtctgagaaagtggctccactccaatgttagccctgcagttgctgaattgacaaggataatttatggagggtctgtaaatggagctaactgcaaagaacttgcagctcaaccagatgttgatggattccttgttgggggaggctcattaaaggtgaacagagatagatataatgatggtagcatcaaacattcactctttaagcagtcatcattggatctattgacgattgagactcttggtttgaagaaaaatgacaacttttcaagatggatgagtaaagaacttgaagaggttgttgatttgggtattaaatccacttttgatgctttctggagtagcattgagacagtgaaggtgcctgatggttctaatgttctgactaatgaacaactggatgcttatgtagtgaacccttcactttctcaagaccaactattcagcattctcgatgtttcaccaagttgtgcatatattggtacaaatacaaaggtgtgtgcacagtttagtcaaggaaacctgtgtaaacgatttgtaacaggtgcaggaatcactactagagatatgcttatttaa

SEQ ID NO: 41547 - DNA, 285 bp, Zea mays
  Peptide Sequence Number=SeqID_84922
atggaggatgaagaccagtatgaaaaggacatgcaaccagatgacactgtggctaatgaagatatgcgatatgaatctgatgagaatcgtgaactgaaaccaaaagagaaaccagatagcagtgaccagttcaccaaggagcgccttgatgccatccacgacgatttgaagttgtaccgctgccacaccatcaagaactacacgcatgcctccaccaaggccctgaacctggcaaagcaaatcaacacaataaagaggcaacaattaggtgcctcaagtggctga

SEQ ID NO: 41548 - DNA, 228 bp, Zea mays
  Peptide Sequence Number=SeqID_84923
atgtccaaaccggacaaaactttccccctccttatcctcccggtgctccccagccttcataaccctggggttggacctaaaatcaccgtggatatggattggctcgccggcgataaggatgtcaccgtggctcggctttcccaagcttcaattgggtcgttcgcgccaccggttggccggaacacttccatccatatgaccatccgccctgtcaccgtggaccggtag

SEQ ID NO: 41549 - DNA, 342 bp, Zea mays
  Peptide Sequence Number=SeqID_84924
atggatgaacaaagtgcaaatcaagagctaagaaacaggaagaagaagaaaagaggagagttggctgtgtacagccaagaggctgtttcggtctggggcaccggactgtccggtggtgcaccggacagtgtccggtgctctcacccgcgcaagggtatcgctcccccttggtcctcgcaagaaccaagtgctcactatgagatgatcctttgccactccggcgcggtggatccctcgagaccgcttacaaacttgagtcgggtcatcaacaagatcttcacggtgatcaccgagctcccaacgccatcaagccgtctaggtgatgccgatcaccaagagtaa

SEQ ID NO: 41550 - DNA, 1188 bp, Zea mays
  Peptide Sequence Number=SeqID_84925
atgcctgtccgtgagccgtctcctgtcctgtctggatttccacctgtcgttcatcaggtcaggatgccgcgcacgaagaatgtgtcggcgccagggggaggcgatgatgaggatcctcgtcgccccttcaggcaggtcaagggcaagatcgtatacttggagcagcaggaaggccgcaagaagcggcgtatggacagagcagcccgagcagcggcagcagcaaccgctgagcaggccgagctaggagatcagcctcagactccttcagatcagattgcgtaccgtgttcgtcgtctcgcctcctggcctcgctcctccactaccaccactgcttcagcttccactcctccacccactttgcttgcccctgtcaccccttttgtgccatccaccacctccactacaccagcttccactgctcctcctcccgctcctgtttccgctccacctatcccacctgctcgcttccgggagcgcgatgagactgaggtgcgacctctggctgcagatcctaggttgtttgaccttcagcgtgctacagcggcacggttcggattaccactttcatccctactcttcagcaccaggattcaggaatccttcttcagggcacaaatgtctgcacagattgctctgcgagtacaccggcttttggaccttccagcttttctgctagccgtcggtgctgactctgaggtgcacctctcatacctgcctggtcttctgactcttttgactaccagcggcagatcgaggacaccgtattggatgctgattcggcctccacagttccagggcacaattgaggccgcacgcctcgtctttgggtcctactgtccagcgcctgaggatcctgtgccagcttctgctccagtttttgacactcaggccgaggatgttgctcttcatcagttcgaagctcaggatgcagcagttgatgatgatgataatgatgattttgggattccacctccgcctccgcctcctatgcctccacgctcacatgatcatgaggctgggagttgtagtgctacccctgctgcccctcctgctattgaccctgcacttgcttcgattctccagacacttactcagcagcaggctcacttggcagccgagcagacccaccaggcagcagcccatcagcagttgtccgagaggatgctctcgatgtttcagaccatatag

SEQ ID NO: 41551 - DNA, 915 bp, Zea mays
  Peptide Sequence Number=SeqID_84926
atgtacctagaattgattggactgtccgatgctcgcttaggagactatcgtcaacttcactcgtggttaagaacacatgctgagagtgtggcattttatggcgctgagaacagagaagcatctcatattatgcagcggtttgaggctcttgttgagcacctgaatcttgtgcgtcatgaaaactggtggttcggtatgattcaagatttctttctgaagtattttggtgctactgtggcagttatccttattatagaacctttcttctctggcaaccttagacctgattcatctacacttggaagggctgaaatgttgagcaatcttcgatatcacacaagtgtgatcatatcactatttcagtctcttgggatcctttctatcagcacaagacgtttaaatattctaagtatctcatggataccatcttttcagatcattgaactgaataagccgatccgatttgctgactgctcctctcaccactcaaaatttgtgatggaacaggaccatcaagcctatgaagaggttgatcactatgctaagaggaaagcagccaatatctgtgcttccaccggtgctagagctgtcaagagaaaaatagaagcaagcaggatcccacctaatggtttagtcagaagaacaggcaaggaacagaaaatatctacacatgaattttgccagttaaccaagaacgagttgcccccaaaggagactgaggacgcctatggctctggtttgtttctgaacatccatgagctggagctgcgagcatatcgatcaaccgtcagagctctccatgctgcaggactcctgacgtgggagcaagagtcgctcctgacgaacctgcgcctctcgctcaacatctcgaacgaggaacacttgcttcagttgaggcatctcctatctctttga

SEQ ID NO: 41552 - DNA, 456 bp, Zea mays
  Peptide Sequence Number=SeqID_84927
atggtgggagccggtgctaatgggaagattggccagaatgctgaggagattcggcccagtgataagatggagagcgagaaaattcaagatatggaaatacagaagatgaagaactggtcgaaggcagaaccgtctgagctcagggcatcgatcagcacaggcgtgttccttcaggatggcgtgttcctacaaggggcaggggaagacatagacactgagctcacacgcggggtaagaaccacctgtcaactattcaccgttgccgagctatccgctagtgcccctcccccaggagaagacatttttcttctcggagagggccagagtgtgcctcaatccgcatgcaacctgggagattttctgcagcaaaccacattttgtttaaggaaaaagtcgacattacgcgctagccctcccatatataagcacgccgtacctgatcctctggaaaactga

SEQ ID NO: 41553 - DNA, 345 bp, Zea mays
  Peptide Sequence Number=SeqID_84928
atggcggcgcctgctcgcccgggacggcttgcacgaccgtgtgcgcggctggcccacgtcggcaactgcacgcagcggtggcggagcctgcgtgcccacgacggctggaacggccgcgctcctgtggctgccagtggcggcgcctacgcgctcttagctagtctgtggcggcggtggtggtgcgctacgcggctggcccacgacagcttgcatgaccgcgtgcttgcggcattttggacaatcgcctcggtgacggtgacactcatgtgcatcactttccttattgagggcgtcacattgctctgtctttcatgggcgaaagcccggtccatcttggacatgtga

SEQ ID NO: 41554 - DNA, 156 bp, Zea mays
  Peptide Sequence Number=SeqID_84929
atggcgaggggcacggcgggcgcagcgcggagcgagggcacgacggcggtgggcgagggcgcggcgggcgaggtcgcggcagcggtgggcaggggcgcggtgggcgacggcgcggcggcgacggcgcagcggcatggagagcagtggcggcggcgc

SEQ ID NO: 41555 - DNA, 900 bp, Zea mays
  Peptide Sequence Number=SeqID_84930
atggcgtcgagcgctggcggcgcgtcgtcgtcgctggtgaagaacgagccctacatgcgtgctgtcaagatctacctcaagagcctagacatccaaatggagaaacagctagccaagacatggagaagcacaacgggtcgtagtaccaattgcacatctggtgtctcaagaagttcactaaggattatgtttgcaaataattccattaaggagtgtcggggttgccgctttgttgaagctcaagttttggatggagcaggaacaagcattgctgcattggaaacaatctggaatgcattgggctttaacgtgtctgggcctgagctgttcagtgcgcttagaggtcgtctttacgacagcaacaaaaatttagtaatggcaacattgtccaccattggtggtcttgtatctgctatgggaccttctgttgaaaagtcaagcaagggtattttggcagatgtgctgaagtgtcttggtgacaataagaagcacatgcgagaatgcacattgactgctctagattcgttggttgctgcagcccaacttgaaaagatggataaatcttctaaagttcgcaaagctgctgaatccttaatgaatgaaattctcaggatctgtggccaagaaatggtgggacggaacttgaaagatttgccatcacctactttggccattgtatcagaaaggctgaaactgtctactttgaaagatttgccatcacctactttggccattgtatcagaaaggctgaaactgtctactgcacatgaaggattttctgaatctgttaaggtggtgtcaacaagcatgagtttgccatcaaaagcaggtttaaagaacaataaacatggtcctaacgatcgtggttctaatgtgggcaaacctgtgtcccaagtataa

SEQ ID NO: 41556 - DNA, 1143 bp, Zea mays
  Peptide Sequence Number=SeqID_84931
atgtcgcgcgcatgctggctgtgcacgaaggaggggacatgcttgatcaagcaaccgggcgacacctacgacgacttcgccagctccaagcccgacaacgagtgccactacgtcgtcttcgacttggacttgaacaatttttatgactgtgggagcagtggcgtcagtttgagtgcatttgcattcttgttctctgagttggttcagtacaaccagactaaagttgacaacattactgagctagaacggagtcatgctagaacgatagatgcgcataccaatcgtaacaccattgcttctgttgttgcccatttcggagcgtcatggtgcgtgatgtccctatccatgaactacaagtttgaggagatggcgcagacccacctcgaggtcttgttcctctacatggacgctgatgatgtccaggagatggtcttgttcatactatttgctgtcagcatttctttcattcactctactctttatcagagtaaagcttctatgaatatttgctcaaggtctggatctaggggaataaaactgaccatacaaatgtgggagacatcaatggaaggtcaattaagtttaacaaagaaaactacaccatctaattactactacatttgtgaaaagaatggtggctcattgtctgacaagatggatgaacttgcttgctttgcccctgatatgctggcattaggagcctctggttatgggccagaaaaatcagagcaaattatgaatatggcaaaagaggacatgagtgtgggcacatcgtggaacatcttgagaccggagactgttgaatcacttatgtacctatggcgcttgacggggaatacaacataccaagattgggggtgggacatattccaggcatttgagaagaacttccgtgtagaatttggatatgtgggactgagagatgtgaacactggtgaaaaagataacatgatgcagagcttcttcctggcagagacgctcaagtatctctacctacttttctttcctccatcagtcatatcctttgaggactgggttttcaatactgaagctcacccattaagaattgctccagtaaatggtaacaaaggcattggaacaccggtccgtccattcgggagaaaacagggaaagcctgagtaa

SEQ ID NO: 41557 - DNA, 270 bp, Zea mays
  Peptide Sequence Number=SeqID_84932
atgactccagcaaaatactcccatattttgcttgaagatttactgacaattaatatagaaaaagccatggatttggatgtacccattttgctaaatatattgcattttcagaagatgacaatagtgtgttcggtggagatcgccgccgttgacgtttcgatcgccatatttaaccaagtctccaaggaacaccataatcaatgcgaaccgatgcccgcacatggatatgagatggtttggttgtcccttctctacctagaagtattctag

SEQ ID NO: 41558 - DNA, 570 bp, Zea mays
  Peptide Sequence Number=SeqID_84933
atgagcggcaaggctctcctagttgtcgccgtcgtcctcttggtgggcgtagcctctcggtgctcgggcagcaggggcctgcatcagcagggcgatcacgttgctgaacagaagttccaaacagacggtaccggcaatgggtacggaggtggcggcggcgggtacggcggtgatgggggcggcggcggcggcggcggctacacgcccgggtactctggcaccgggacctgcgactactggaagagccacccggacgcgatcgtctcgtgcgtcgggtcgctgggcagcgtcctcggctccctgggcgacgcgtgcagcgccttcttcgggggcaagctgcagacgctgcaggacgcgctgtgcaacgcccgcgccgacggctacggcgacctcctccgcgagggcgccgcggcctacctcaactccgtcgccgccgccgccgctggcaagtacgcctacaccacgcagcaggtcaaggactgcatcgccgccgcgctctcgtccgaggccgccgccgccgcgcaggccgccatgttcaacaaggccaactacgcctgccactattactag

SEQ ID NO: 41559 - DNA, 288 bp, Zea mays
  Peptide Sequence Number=SeqID_84934
atggacgtcttcatggaggactttctagtccaacccacgttggagaccgcccggttcttaatggacgtcggtgtcgctggcctggagaagcgtgtcttccaccccacggcggagccagggtgcgacggcgacgacatcagagcctgctcgatctgcctagaggactacgaggacggcgtggaggtcgtcgtcacgccgtgccccggccgccacgagttccaccaccgctgcattgcgaattggttgcggcgaagcaacacgtgccctttgtgccgccacgctctgtag

SEQ ID NO: 41560 - DNA, 339 bp, Zea mays
  Peptide Sequence Number=SeqID_84935
atgacggtccgctccgcttccgcgtcatcacacgcgacagctgccaccggaataggatgcgcgcccgcgacccgtacggtttgtgacttcaaaaataacagtagcattccgaattttccagctctatatggtaatcttcgaactcatcatggttcacagtcgtcatcatttgcactggaaaaatggaggcaattttttgaagaaatgggtgtgactgattttgtgcaggttggtgaatctgtccttaccaaattgctctggaatttaccggttacctcaccttattcctttctgggacagtatgagccagatgtggaaattctataccttattgtctga

SEQ ID NO: 41561 - DNA, 693 bp, Zea mays
  Peptide Sequence Number=SeqID_84936
atggtgtggagggtgagtgcgcggtggcgacgatggaagggcgaggtgtgcggtggaggcgacgtgtgcggggtttgcggcagaggcccgatgatggaaggcgggggtgtgcagtggaggcggcgtgcgcggggtttgcgacagaggggcagtgggggatgggccccacagccaatacccaacgggatcgccccccgcagctcgatcaccggcagcgttgcgagcgcgaacacgacggtgtcatcgggccatccgagcctccgcagcgactccgccacccatagcctgaatcctgacgccttgatggagtcccccgccgctgcccgcgccacgccgagagcggcggctgcagtgcagcagccaagcgcgagcagcgccacccgcttcagagtatcccgatcgggcgcctcccgctccgtggactccgcctccacacctccacctattgccgccgccgcacacggtgtcctccggacgatggctccggcgctggaatcgcggggaacaggggaggcccggagaagagagcgggcgcccgcaggcgcggtgcgggaggcggcgggttcgcccgtggatgtgacgcggcgagaagaggagcccacctccaccacgtcagcgggggcgaggcagccggtgcggcgagacgaaccgaggccgccatgggcatcgggatcccgttcgtgggttggatag

SEQ ID NO: 41562 - DNA, 1365 bp, Zea mays
  Peptide Sequence Number=SeqID_84937
atgcaggaatcccttgcaggaccgccatcgcagcaaaatcctcccgagggcctccctacactgaccactcccctactgcccttgcccctttcggacttcgccagtcgagcgcgccgcgaggatttcgggcgggagcacatccatacggtggatccggtcaacgcgggcgagctccgtgccgttgaagccgcagcatccggccaaaggagatcacggccgatgggttcggtggtgtttgttcttggcgtgcgtgatttgggcgagtccggagctacccgcgagttctgcggacggttgaagaagacgcggtcctgggtggcccacgcgacaatgctgcgcgatgaagagctggcgcggcatggcaatgactggcgtccacacagtagcgggggtgcacggttctgcctgcctcaacgcccgcgctcctcaccaacgccgcaatcatcgcccacgcgcggatcccccacgatcctccccaccaccgccgccacaatcatcgctcacgcgcggatcccccatgatcctccctaccgtcgccgcaatcaacgcccacgcggatcctccccacgatccccaccccgcacacccccacccttccatcgccggccggaatcgatcgatccaaagctccctttagagctcgagctctatccaacccacgaacgggatcccgatgcccatggcggcctcggttcgtctcgccgcaccggctgcctcgcccccgctgacgtggtggaggtgggctcctcttctcgccgcgtcacatccacgggcgaacccgccgcctcccgcaccgcgcctgcgggcgcccgctctcttctccgggcctcccctgttccccgcgattccagcgccggagccatcgtccggaggacaccgtgtgcggcggcggcaataggtggaggtgtggaggcggagtccacggagcgggaggcgcccgatcgggatactctgaagcgggtggcgctgctcgcgcttggctgctgcactgcagccgccgctctcggcgtggcgcgggcagcggcgggggactccatcaaggcgtcaggattcaggctatgggtggcggagtcgctgcggaggctcggatggcccgatgacaccgtcgtgttcgcgctcgcaacgctgccggtgatcgagctgcggggggcgatcccgttgggtattggctgtggggcccatcccccactgcccctctgtcgcaaaccccgcgcacgccgcctccactgcacacccccgccttccatcatcgggcctctgccgcaaaccccgcacacgtcgcctccaccgcacacctcgcccttccatcgtcgccaccgcgcactcaccctccacaccatcctcgccccaaatcgctcagcctaa

SEQ ID NO: 41563 - DNA, 132 bp, Zea mays
  Peptide Sequence Number=SeqID_84938
atggacggcgacctctcctgcctacagcagctcgttgtcgatgtcgtgcttcgggcatcgagtgttcgacgaaaatcccaagtccatggacagcacatacacaactcaaatccgatcggccaggttgtttga

SEQ ID NO: 41564 - DNA, 1467 bp, Zea mays
  Peptide Sequence Number=SeqID_84939
atggaagtgggcgtgcacgttgatggaaggctggcgcagcgcgtggggaagacgagcgctgcggcatccggatctgcggcgccatggatggaagtgggagcagagggcgcgttgatggcggggccgagcgctgcggcatccggatctacggcgccatggatggaagtgggagcagagggcgcgttgatggcggggagcagagggcgcgttgatggcggggagctgagcgggaggagggtgggggatccgtggagcgacgcgtgcagagggggaggagggtgcggtgcgtgcgccatgaatggaaggcgggcgcagcgcgtggggaagacgagcgcggcgggcgggatgcggaacggcagaaccgtaggcaatgtggacgcctacagtagaggcttaagagatagtagagattttgagcactgtgtgatgatgtccatattatgtaactgctgtatggctcgacttagacacactgcacgaaagtcagtcatccccttcttaccctcccgccttgctgagcgtccgcttcgccgtcctgtggctggacagtccagccacttggagagactgcaccaccgcctgcatgaggagcaggaacgtcgacgacaggagcagcagggctcttctttctcgctccaccaggagatagagtctgtgaggagctgctctcctgtgcttcctctggaggcgccccctgcaccaccactgggcgccccagcttctggagtagctgctggaggagacccagacgacggagatggcgacgacagctcgagccacgacaccgacttctctgctaaccctgagccggaaggatgggttgctcgacccatcactcgcgacgctgctcgcgggtgtcacttccacgatgcgctcgacaccctgctacgtcgggcatttgaccggcatacttggtccgtcgagtatcgctgtgtggtctaccagcatagtcgcggggtctacccggaccgctgggaggcgacttgcttggtgcgctgcccggaggacagtctccagggtgcagaggcctgctcagagcactattctatctctgaacgggactcagctgaggcagccatgcaagatgctgcacggcgtgcgctttcgcactactgctcggttttcggtggggcagctgacggtcttgacctgaagtattacccccgccgtccatctggcagcacaggaggcgtgattgtctcacctgtcggtgagggcaatcctaggttgagcagcacagtcaacctagccgccgtgctaaacacggagctggaccatgcattagacgagctgagtagggctcgtgctgagatcgccctgctgcgggctgagcgcgcggaacgtcgtcatctggatggtggttcccccgctcccgtcgggactcagcacccgtaccgctcacctcagcgtggacaccagccttatggcaatcccgactgcaagaccaagataaatctagaaccatag

SEQ ID NO: 41565 - DNA, 750 bp, Zea mays
  Peptide Sequence Number=SeqID_84940
atggagcacgaaggggggaaacgaggagacgggcgtaaaggggaaaccccgcggccttcgtgtttgtcctacgcccaggttggcccaaccggcaacgcgcccagcgccagcgccgcggcggcccagctcccgcgccagcccagcgccgcgctcggctccctcccgcgcgcgcgcacgcgcctgcacccgctcggcccgccgcgccccagccaaattcccgcccgcgcgcgcgcaaggcggccagcccagctagcgccagcccagctggccgcgcgagccagcccccagctcgcccaggccgcagcccaggccgcgcgctcagccgcgcatagcgcgccctgctgcgctcgctcgcgtggaggacgcccgccgccgccgcccagctctgcgcccacgtcccgcgcgtatcgcgcgtgggtagttccacgtaggtcgctgttcatcttccaaaaacccgaaccgtccgtatccgtcgcgcagtttctcggccaccaacgcttctcctcgtctcgtctctactctctgcgtccctgcaccgtcggagtgtcgccctcgctcgccgcactcgctgcgcagcgaatctcgccatcacaccgccgtcgagccctcgtcccgctgcggtcgtccgccgagccgtttgccgtcgaacctcgtccctgcgcgtcgcagctgtgttgctgcgtgctcgccgctgcccagctcgccccggccgttcgtctaccgtcgccgtgcctcgctacggtcacctag

SEQ ID NO: 41566 - DNA, 486 bp, Zea mays
  Peptide Sequence Number=SeqID_84941
atggcaggagtgaggctgacagcggccaagtccgacctcgggcgccataggaagctccgcctcgcccgacctcagggctcgggctcgggcttggccccggaagatgacgaactccgcctcgcccgaccccagggctcggactcgggctcggtcccggaagacgacgaactccgcctcgcccgaccccagggctcggactcgggctcggccctggaagacgacgaactccgcctcgcccgaccccagggctcggactcagcctcggccctagaggacgacgaactccgcctcgcccaaccccagggctcggactcggcctcggccccgaaagacgacggactccgcctcgcccgaccccagggctcgaactcgacctcgacctcggaggacagactcgaccccaacctcggaggagccaccgtctcacccgacccagggctcggaccaaccacgtcacagggggagccatcattaccctacccctag

SEQ ID NO: 41567 - DNA, 638 bp, Zea mays
  Peptide Sequence Number=SeqID_84942
catcgtcccgactgtgccgggaagccgccgctctcatggcggactcacgcggtcctgcgagagacctacgcgctcccgcgcggctcgcggcgagccgggaccgggagcagccgcacaagaagcctcggctgctgctgatccaccggggccactaccgccggatcacgaacgagccggaggtggcgcgggcggcggaggcggcggggttcgaggcggtggtggcggagctgcgcggcgacgcgacggaagcggagcaggcgcgggtggtgaactcgttcgacgtggtgctgggcgtgcacggggccgggctgacgaacgcggtgttcctgccgccgggcggggtgctcatccaggtggtgccgtacgggaagatggagtacatcgcgagggcggagttcagcgagcccgccacggacatggggctcaagtaccttgactacagcgtgagcgcggaggagagctcgctgatggagacgctggggccggagcacccggcggtcaaggaccccgactccgtccaccgcagcggctgggaccaggttttcgagctgtacctcgccaagcagaacgtccgcatcaacgtcacccgcttcgcgccgacgctggcgcaggcgctcgaccacctacgccagcagtag

SEQ ID NO: 41568 - DNA, 288 bp, Zea mays
  Peptide Sequence Number=SeqID_84943
atgggctccaccatgcctagcgagcggtgcgggtctcagcagcactggtcccgtacatgcatcactaagaaatacctgattgacatatatcaggaatggaagaaacgccagaactcagaggctcactttatccaggcgcctgtagatgccacaactggagagcaccttaagttgcctcagcctgctgcacagtttgagcatgctgccataaatgtcgatgccacagctaagaacggtactccgttaggcaaagtcgacttcgatttcgacactgatgatctctcgtag

SEQ ID NO: 41569 - DNA, 492 bp, Zea mays
  Peptide Sequence Number=SeqID_84944
atggggaagaagactggcctgacttgcgggctcacaaagcagcgagcagatcgggagcgtgggtgcgacatcgctttgatgacgagtgggccaaccgagtcagtggtcatggtggggcatcttcatggccgaaatacggatgccagcaagacatcagcttcacagtacagtggccagcgagtaggccgcgtagtggcccttcggccaatgttctgggccaaagggtttacagagagtccattctcaaaactgagttacagtcattggtatccatcactaccggaattcggctctttgccgagtgccggtggctttgccgagtgctttttatcgggcactcggcaaagtcctacgctcggtaaagatctttatttaccgagtgcgggacactcggcacagtccagcactcggcaaagactgctttgccgagagtcaaaacactcggcaaagagggctctcggcaaagggccgttagcggccgtctacagctga

SEQ ID NO: 41570 - DNA, 335 bp, Zea mays
  Peptide Sequence Number=SeqID_84945
atgaccactgactcggttggcccactcgtcatcaaagcgatgccgcacccacgctcccgatctgctctctgctttgtgagcccgcaagtcaggccagtcttcttccccatgaccgtcttctccctcctcgagtcgaactcgtcgcgcctgccgccgaactcgccgagtggagcgcaccaacctaccggggggcatcagttgtttgcgctaagggtgctcgtgctgttgccaggcaaggatggtggccagggcggtgacaatttatcgccgttgattcggtgtcgtcgcggtgccgcgccatcacgtgtccagcagcgcttgggccgtggctggag

SEQ ID NO: 41571 - DNA, 405 bp, Zea mays
  Peptide Sequence Number=SeqID_84946
atggccgtcggaggagcgctggagcctggcggaaggacagctgtcggggttgttgagtccttgctgacgtcctcttgcttccgtaagggagctgagagccgccgtcgtcatagagcggtaatgatggcgcctcctgttgacgtggtcggtccgcgccctaggttgggcgatgtggaggctcctccgaggtcgaggtcgagtctgtcttccatggccgaggtcgagtccgagcccctgggtcgggcaaggtggagaccgttggctgaagccagggctgagtccgagccctggggtcgggcgaagcggagttcgtcgtcttccggggctgagcccgagtctgagccctggggtcgggcggatcggagttcgccgtcttccggggctgagcccaagtccgagccctag

SEQ ID NO: 41572 - DNA, 177 bp, Zea mays
  Peptide Sequence Number=SeqID_84947
atggcgtcgacggagcaggaggtggcggtcgacgcggccgccgtcgtggaggaagtgacgcgacagcagggcaaagggtgcggcgtcgcaggaggaggggatactgttgtgtcctcgaggaacatcgacattgcctggagcaaggcggatgaagctgattcagtcacgatcttttag

SEQ ID NO: 41573 - DNA, 645 bp, Zea mays
  Peptide Sequence Number=SeqID_84948
atggcgctccctgttgacgtggcgggtctgtgccctaggcagggtgacgtgggggctcctccgaagccgaggttgagtctgtcttctgttgccgaggccgagtccgagccatggggtcgggcgaggcggaggtcgttcggccgaggccagggcggagtccgagccctggggtcgggcgaggcggagtttcgtcgtcttgcgggtcttagcccgagtccgagccctggggtcgggcagagcggagttcgccgtcttccggcccgagtccgagccctggggtcgggcggagcggagttcgccgtcttccgggtcttagcccgagtccgagccctggggtcgggcggagtggagttcgccgtcttctgggtcttagcccgagtccaagccctggggtcgggcggagcggagttcgccgtcttccgggtcttagcccgagtccgagccctggggtcgggcggagcggagttcgccgtggcgcctttggcaaggcctgactgcctgtcagactcactctgtcgagtggcaccgcagtcggagtggcgcaggcggcgctgtccttctgtcagactgctttatgctgatgggggttaccagctgagaattaggcgtcttgagggtacccctaattatggtccccgacagtag

SEQ ID NO: 41574 - DNA, 591 bp, Zea mays
  Peptide Sequence Number=SeqID_84949
atggcgctccctgttgacgtggcgggtctgtgccctaggcagggtgacgtgggggctcctccaaagccgaggttgagtctgtcttctgttgccgaggccgagtccgagccatggggtcgggcgaggcggaggtcgttcggccgaggccagggcggagtccgagccctggggtcgagcgaggcggagtttcgtcgttttgcgggtcttagcccgagtccgagccctggggtcgggcggagcggagttcgccgtcttccggcccgagtccgagccctggggtcgggcggagcggagttcgtcgtcttccgggtcttagcccgagtccgagccctggggtcgggcggagcggagttcgccgtcttccgggtcttagcccgagtccgagccctggggtcgggcggagcggagttccccgtcttccgggtcttagcccgagtccgagccctggggtcgggcggagcggagttcaccgtggcgcctttggcaaggcctgactgcctgtcagactcactctgtcgagtggcaccgcagtcggagtggcgcaggcggcgctgtctttctgtcagactggtcagtggagcggtggagtga

SEQ ID NO: 41575 - DNA, 978 bp, Zea mays
  Peptide Sequence Number=SeqID_84950
atggaggttcgttgccaaaccaacttttgccagaatgaagatggtttccctaagttgctgagagcatgcacagttcgcctcggaataaggagccagccagagtatgatggtcgtgaattcgtcgagcatggcacagagaagtgtgtcgtgactgtatacattggatccagtccacaccatgtggaatggagtgtcactactgctgggcacagattcaaagacacctgccaagtcgtcgctcgcaaggcattgagggccatgtgtcagatctatgaagaagaagtggccgacaccccgctcagattctttcctttttttcagagagaccgtcccgcttggatggccaggatgcgtgcattggaagagcagcagctgcttgaggacgaccccacagtcgtgtacctcactacatacctgctcaccctggatgcgcagtatgatttcttggctcggcaccaccgtcagatgattgcccgagcagaagatgcagagaagctcaaccaagttgatggaggccacttggtaacccataaccaacgtagagccctgcggatccaagagcccgctccatccaaccctgttcaacccatcagagctgaagacccccagattcttgaaggtcacccggtatctatcagaggagagaagaaggcttgggaacccacggaaggagccatagtcttggaaggaattctagtctcccctaaggctatggataagcaagagcaccctgaatcctcccaagatcccccgccagagttgcttgagcccctcaccatgaagaagattccagcaccgtcccttgaggtcaaggaagaagctgcaagcaccccgccagcaccgccaccctcagaggagctacaagagccagtcccgcttgaagaagagttcgaccccgtgttgccatctcagtcgctgccagaagaagtcatcaacatcagctccctcttgacccatccaggagatgtctcagattga

SEQ ID NO: 41576 - DNA, 387 bp, Zea mays
  Peptide Sequence Number=SeqID_84951
atggttggtagcttcatcaacaaggtgctcaaggatttcgaaaacattgcacttgggaaggataacagcctcttctacaaggtggcttttgtgctgttgctggcctccatagttggacgactgaccgatcttatcactttagtatatacaagtgctattattgctctcacggtccctgcattgctggagaaatccgaagaacacattgccagattcttcaagaaaacttcgatatatgttcaggcatttggcagagcatgcaaagagtataaatggggcaaaagccaaaagccaaaagtcaaaccaaacacacccttaagctacggaaaaggttctgttcagaggtactcactggctcagactctggtcgcggctccaaagaagtga

SEQ ID NO: 41577 - DNA, 1566 bp, Zea mays
  Peptide Sequence Number=SeqID_84952
atggccatggccgcccccgctttcctcctgccatcactgttccccaagcccactctcctcgccgcgtccctccactccagcttcccacgcggcctctccctccgctgctcgcccaacggcgccgccgtgccggaattccctgaacctgcctcgcgccgcggccgcaaaaagtcaccgtccccgtcggcgccgaagccgagggctacgaggaggagaaccaagaaggcggaccgggatcccgactcggagggcgaggaggagccggtgaagcggaccaaccgccggacgaggaagtccaagggagaggctaaacaggaggaggtggcccaggcggcgaatcacgggacgggggatacgattcaaaaggccaacgaagaggaggatgcggtggaagtgggtagcgacgacgacgatttcgcgaacgagtggccgccgctggtgtgctgcttcggcgcgccgcggtgggagttcgtacccacggtgcgggtgtcggaccgccagatgcatcccgacatgtactccacgtggaggcacctgcaatgggaaccgcccgagttcgcgcgcgcgccggggagcgcggcgagcaacgtggcgattgcgctcacccggctcggcgggcgcgccgcagtgctgggcaaggtcggcgacgacgacttcggccgcgagcttgtgtaccgcatgaactgcgagcgggtgcagacacgtgccataaagttcgacgacaaagcggtcaccgccacggcgcgcatgaaggtgagcttccgggaccgggaggacggcaagggcgggacgaaacttgtagccgagacggtgaagagtgccgccgaggactccctccgcaggactgagatcaatgtagacgtgttgaaagaggctagaatgttccatttcaattcagaagtcctgctaaacccctcaatgcatgacacgctcttcagagccattgagctgtccaagaaatttggaagcaaagttttcttcgatctcaatttgccattgccattgtggacttccaaggataaaacaaaggaggtgataaacagggcgtggaaagaggctgaaatcatagaggtgtcaagggatgagctggaattcctcctagatcatgagtactatgaatacaagagaaacacccctcctcagtattatcttgaaggatttcattttacaagaaactggccacagtactaccactacagccctgaagagatcgctcctatttggcatgacggtataaagatcttgcttgtgacgtatgggacacttcggatccactattacacacctaagtttcatggctgtgtggttgggacagaggatgcactcataactccatacaccactgaccgaacaggttcaggggatgctattgtggctgctgctattaggaagctgacaacttgtcctgaaatgtatgaagaccaggatacattggagaggcaactgagatttgctgttgccgctggaatcatatcacaatggacaattggtgctgtgcgaggatttcccactgagagtgccacccagaacctgaaggaagaagtctatgtgccttctatgtggtga

SEQ ID NO: 41578 - DNA, 1101 bp, Zea mays
  Peptide Sequence Number=SeqID_84953
atgtcgcctcctgtcgacgtggtcggtccgcgccctaggttgggcgatgtggaggctcctccgaggtcgaggtcgagtttgtcttccgtggccgtggtcgagtccgagcccctgggtcgggcgaggcggagaccgtcggctgaggccaaggctgagtccgagccctggggtcaggcgaagcggagttcgtcgtcttctggggctgagcccaagtccgagccctgggtcgggcggagcggaagttcgtcgtcttccggggctgagcccgagtccgagccctgggtcgggcggagcggagcttcctatggccggtcagtggagcggcaaagtgactgcggtcacttcggctctgtcgactggaggacgcgtgtcaggataaaggtgtcaggccacctttgcattaaatgctcctgcgatctggtcggttggcgcggcgatttggtcagggttgcttcttggcgaagacaggcctcgggcgagccggaactttatgctgatgggggttaccagctgagaattaggagacttgagggttactgggccgccgagcagggtgcaggcaggtttctggccgcggcgccgaggatggtgagcactgactcactgagccgccagagaaggtaccaggatgatcttcaggtgactcgtgacctcactgctagtcgtagcaatacaacaaacatgggtgccgacggcggccctcctaatttgccttcgacgtcagcagccctggcgacgagttccctgcgcaggcgccatttcaacccgtgccccgagaggagtttccaaggcatgatagtcctcggtgtcggggcgggcgaatcgctacatccctggccgagccgtccgatccgcgcagagccgcgcgacgcggtgatctggtggactcccgtaccgaaacaacgtaagcaggggaggttgttgcgaagctgggttggggacggatctgaacgcgagggcccaccggccggtgaccaccgaggcaacgcgcgcaacagggagaacggacagagaggccaccaggtggggccaagccgccagcggctgtccgcgcaagccgagcagtggggttttagttgggccgcgcaaccggtgatgtag

SEQ ID NO: 41579 - DNA, 216 bp, Zea mays
  Peptide Sequence Number=SeqID_84954
atgggcggaaagaaaaaggcgcaagcgtggcgcgtcactgggcgtggggcaccacagtggcacaggtacctcgtcagcaacgccgtcgtatggggtgggcgttcggaagacaaagcgggcagcctctacctttcggcacaagctcggctctgcctctggtacgacgggtgcagtgcaaaggccaacagctattgctccaagaggagcaacaggtaa

SEQ ID NO: 41580 - DNA, 282 bp, Zea mays
  Peptide Sequence Number=SeqID_84955
atggactcccccagctgccggctgttcggtgcccagagatcgccgcacgatctcctcggcggcggcgccgttgcggatgtggtgctgtggaggaagaaggaggtggccaccgggacgctggcggccgtggtggcctcatgggcgctcttctactgcgtgcccggctacactctgctctccttcctggcccaggtgctcatgatcctgctcaccgtcctcttcgtctgggccaaggctgcgcagctgctcaacagctcttaccattttgataatgttgcttaa

SEQ ID NO: 41581 - DNA, 678 bp, Zea mays
  Peptide Sequence Number=SeqID_84956
atgccccctgcaccacaacagggcatcccggctgctggaggagaccctgatagagacggagatgacgacgatgccggtggcagtttgagccacgacacggagcgctcagaggagccggagccggaggggtggatcgctagacccatcactcgtgacgtcgctcgcggattatacccggaccagtgggaggctacttgcttggtgcgccgtccagacgatgatctccggggtgcagagaccttctcagagcactattctatccctgagagggacactgtcgaggcatccatgcaggatgcagcacaacgagcactttctcagtattgctcgttgttcagtggggtagccgatggccttgacctgaagtactaccctcgccgttcgaccggcagtgctggaggtgtgattgcctcaccagttggtgagggcaaccccaggctgagcagcatggtcaacctggctgccgtgctcaacacagagttggaccacgtccttaacgagttgggcaaggttcgggctgaggttgcggaattgtgtgctgaatgcgcggcacaccactatcttgatggtggttctcccgcccctgtcgggattcagcacccttaccgttcaccgccccgtggttgcttcgactatggtaccccatactgcaggacccgcatagatttagatccatag

SEQ ID NO: 41582 - DNA, 123 bp, Zea mays
  Peptide Sequence Number=SeqID_84957
atggtgaggtgtcatgaaccaattctagaagagaacccagaggagccaggagatgaagaacgtgatgtcgcgaacgcacaactaaacaaagaggatcctgatttcgtgcttgaggagttttga

SEQ ID NO: 41583 - DNA, 606 bp, Zea mays
  Peptide Sequence Number=SeqID_84958
atgttcagatttgcagcgcaacatcttcgtcttcttgtccatacaaaaattgctaaagaatttaatgagaagatggttgcatgggccaagaatattaaggtttctgatccgcttgaagagggttgcagacttgggccagttgttagtgaagggcagtatgagaagattaaaaagttcatattgaatgccaaaagcgaaggtgctactattctgactggaggtgttagacctgcgcatcttgagaaggggttctttattgaaccaacaatcattactgatatcaccacatcaatggaaatttggagggaggaagtcttcggtccagtcctgtgtgttaaagaatttagcactgaagatgaagccattgaactggccaatgatacacagtatggtttagctggtgctgtaatttctggtgatcgtgagcgctgccagagattatctgaggagattgatgctggaattatctgggtaaactgctcacagccctgcttctgccaggctccctgggggcggggcattgataactacctgagcgtcaagcaagtcacggagtacatctctgatgagccgtggggatggtatcgatccccctccaagctgtaa

SEQ ID NO: 41584 - DNA, 180 bp, Zea mays
  Peptide Sequence Number=SeqID_84959
atggcctcgcaagcgatggtctcgcgtgcacgcgcaggcgagatcccggcgggcacggcggaggacgtggacgccgcggtggcggcggcgcgcgcggcgctcaagaggaaccgcggccgcgattgggcgcgcgcgccgggggccgttcgggccaagtacctccgcgccatcgccgccaag

SEQ ID NO: 41585 - DNA, 797 bp, Zea mays
  Peptide Sequence Number=SeqID_84960
atgggtaccgactggaaccaagttatggcacaatatggaacttacctatccgaggatgatgccactcagtttcagaacactgcatttgctccttcgcctgagataccagcccagggatcaccagcaccacctccagtgaagaaggctcctcaacgtacaaagctagcaaatttcacgtctgaagaggatatgagggtttgtcaagcttggttggctgtgagttgtgatcccattgtcaacactggtcagaagcgtcaaggattttggaatcggattacagaggcatacaactctcgcagaggatcaatgccagagaggtctacaaaatatctcatgagcaggtgggacagtatcaaaactcaatgttctacatttgctggatacatgatggttgtgcttcgacaaaacccaagtggcatgactgatgcagataagccaaggaaaaggcaaagaagccaaagatcagggaacacatcatccactgattcggagtacctaacacggatgggtgagctttctttggaacggatatctgtgtacaaatcagtagcttcaactgaggagaagaagttggagttcatgaagaaacaggagaggcagaaactcatattggagaggaagaagcttaatctagagaagatgaagatggaacgacaaaaggtgaaggaggagacggaacaggaggttctcatattgagcatggatttgacaaaatgtaaccccctccttcgacagtactatgaggcgaaacaacaggagattctggcaagggttactggaagctcgtcgtcaagcaa

SEQ ID NO: 41586 - DNA, 690 bp, Zea mays
  Peptide Sequence Number=SeqID_84961
atggaacctgcccccgccacagatcttgtccacaaccgcgcaggcacgcgcatggacccagcccccgccgccgtgcccgcggaccgcggatgcacccagtccccgtcgtgcccctgcccccgccgccgtgcccgcggaccgcggatgcacccagtccccgtcgtgcccctgcccccgcccacggatctcgcccacaatcgcgcatgcacgcgcatgaacccagcccccgccgtcgtgcctgcggatatcgcctccctcaaccgtgcatggatccagccaccgatgcacgcccacggcgccctcgcgttgcgcgacgccggttctccacgcgcgctatcgagcgttgacagagcttcttgtaggtgctcttggaattcaaggagcatgccacagaggttaatgttgatttttgtgcctaaagctgttcgtgcaattgggagatgtgcaattaaattggagagagctgctgaaaggtgcatcagcgttttgctcgagctgattaagataaaagttaattatgttgttcaggaagctataattgttatcaaagacatcttcagacgctaccctaacacgtatgagtctatcattgctacgctttgtgaaagtctggacactttagatgaaccagaggctaaggcatccatgatgataattggagaatatgctgaaagaattgacaatggctaa

SEQ ID NO: 41587 - DNA, 1719 bp, Zea mays
  Peptide Sequence Number=SeqID_84962
atggaggaactggcggagctcgccgacaccatcctgcagggcaccgcattgctcgcggacgacgacccctccgaagatcgcccgagccgccgcggctcgtccttcctcacggtcgtcgcgatcggcaacgtcggcgcgggaaaatcagcggtgctcaatgggctcatcggccatcccgtgctcgtgagtacagtcctccccctttctttcttttcgcaattgtctgtgttgcctaccggggagaatggcgccacaagagccccaatctgtgtcgagctgcagcgggacgcatcactcagcagcaaggccatcgttctgcagatcgatagcaagtcgcagcaggtttccgcgagttccatcaggcactcgttgcaggacaggttgagtaaggtttccggcaaggggcggccggatgagatcactgtgaaattgtgcactagcacagccataagccgttctgtgtcaatcctgtgcgcaaggccgggcatgtatctatgcattgtgtactatatatacatcaatgataaaaaccgaaagggcagcgacattagtgcagcgtcaatcctctctctagtctctagcgtgtgtgtctcgactattcgtgcatgctcgccgcgacgttctcctttcgtcgtcggtgacagcgatcaaaccagggcagtgcctggttctaacaactggtatcaaaacctgtgcatgcattacggtgttccatcagccaaccacgagagccgcacaaggaagaaacacatgattccacacaagtctctggtggcggcggcgataatgccggaaagcagtggtgacaaggaggcgatgagagaggcgactacggacaacctgatgtggccaatgttgacacatacaaattaccaagattggtctgcactggtacaatgcaatcttgaaggcatgctgacagagtcatcattatccggcaacaagagcggtggtcaatccaggaagaaagagagatcgggcgcgtgtagtatcgcacatgacccgggagtcaaactcacgtccatgggcaccccacgccgtaaagggaagtgccgcaagtatggcatctatggccactgggcgatggagtgcaagaaggcggcaaaggaggagataccaaagatcttttatgagcatcacaccctaatattaaagcaaacaaaactgtcatataggtctttatttttgaataatcaggcccctccattaaaactaattgacataccgggcgttgaccaacggagcacggatgaatcaataagcaactatgctgcacgcaacgatgcaattctactagttatcattccagctcttcaagcgcccgatgtggcatcttctcgagctctaaggattgccagagaattggactcagaaggtactagaaccattggtgttctaagcaaaatcgatcaagcttctggagaacagaaagccctgggtgctgttcaggccttgcttgtgaaccaaggcccaagaactgcagcggacatccaatgggtagctacaattggccattctgttcctactgcctctgctcagtctgaagcaggttctgaaacaccgccggaagcttattggcaagcagaagttaaaacccttgtatctactcttggtggagctcccgaaagtaagcttgggagagtagctttagttgattcactttctaagcagataaaagcaaggataaaagctaggctgccaaatcttctaaatgggtaa

SEQ ID NO: 41588 - DNA, 861 bp, Zea mays
  Peptide Sequence Number=SeqID_84963
atgagattgattgttctggttatgactaaggtgctgatggctcgtcttagacacactgcacgaaagtccgtcatccccttcttaccctcccgtcttgctgagtgtctgcttcgccgtaccgtggccggtcagtccagccacttggagaggctgcaccaccgcctgcatgaggagcaagaatgtcgacgacaggagcagcagggctcttctttctcgctccaccaggagatagagtctgtgaggagctgctcccctgtgcttcctttggaggcgccccctgcaccaccattgggcgccccagcctctggagtagctgctggaggagacccagacgacggaggtggtgacgacagctcgagccacgacaccgaattctctgctgaccaggagccggaaggatgggttgctcgacccatcactcgtgacgctgctcgcgggtgtcacttccatgatgcgctcgacaccctgctacgtcgggcacttaatcgacgtacttggtccatcgagtatcgctgtgtggtctaccagcatagtcgcggggtctacccggaccgctgggaggcgacctgcttggtgcgccgtccggagaacaatctccagggtggtgagatgtcagagaacaggcgcagaggaggaaggcgtgctcagcaggagcgagccgctcagcaagatgaggtgccccagcaacagcacctgccggccccgcccccgatgtccatcgagcagatgtttctgatgcagactcaggcagttcaagccatcggtcagactctggccgccattcagcagcagcagcaacaacaacagcagcagcaccacctcagcctcagatgcccagagacaagcgtgctgaattcatga

SEQ ID NO: 41589 - DNA, 867 bp, Zea mays
  Peptide Sequence Number=SeqID_84964
atgcccgcctccgcgattcgcgtccttgccgctgctctccgtccagggatgcctccgcggtcgccccgccatcttcgccctcgccccgctctccatggaaggaagggcgtcattccagggattacctctgcgacagcccccaccattctcgccctcaccccgctctccatcgaaggaagggtgccattccagggattacctctgcggcagcccccaccattctcgccctcatccgctctccgccatcctcacccccacccgcccccgccatcctcctcctacgcgcaagtcttcggtgcccttctcctgcccctgccatccccgcatatttggatccggggttcgctcaggttgcctcgcaagggccccaccacgcgcggtcaggggagcatggtgggagcttcgcccacgtccgtggttgttgggagcttcgctcaccatctcatgctcgccttttactctgctccttcacccgataacggggtcgccgcgccgagctccatccgcaacaaactcaagcggccccgcctcatgtcctggtcagcggtgcagatcgtcgggaacttcgcccccgtcggtgagcagtcaccgacttcgtcttcaacgactttggcgaaggcaggcggctccaaagcgcgcgtcacagagatcttcgtcgtcactgtgtccggcagcaaggtcccatgcctcgcgtttgggaccaggaaggcgtcgttcctcttggaggtgccgctcagcgttgttgcctcgctctttgacgagggccatagtgggggtcacgccgttgatatcggcatcgtgatcgaggagcacctgaatcctgtcgtacatgcctgcaagggtgaacctgaatcttgtcgtgattga

SEQ ID NO: 41590 - DNA, 477 bp, Zea mays
  Peptide Sequence Number=SeqID_84965
atgcccgttcttgcagtgtttaaatactacgtcgtctcctggcttcgcgtctctcatcaccattggtgtgaagttctttcacaagtatcagatctggtgataaaccatgaccgggaaaaagaccatgaccgggaaaaagaccacggcttctctatggaggatgaggaagaggcgggcttctctacggcggcactccaaagaaagccaaggtggtggtggaggatgaagaaagaggcggggttggaggatgaggaagaggcgactgtgacactatccatggagaaggacgcgctagagtgtgacatctgctgcctacccttcctgtgcgaagttttcatggcaagtcagattaccatgcatgtatatatacagtacatattgatcggtaggctccagcatgatgctctgctctgtgtaaaatcagtgcaagaacgggcattctggatgtgcaaagtgctgcatccgcacggacggtaa

SEQ ID NO: 41591 - DNA, 1056 bp, Zea mays
  Peptide Sequence Number=SeqID_84966
atgagtacggaattactcagcaagacttacccgactaaagaaaagactctcaaggtgcgcgattgtcttttcatgtatggaatagccgggttcaagcttacccatgacgagggaaactccgagctgtggccagcgcgtagaaagcaaagcgcgcgcatggagttgggcgcaggaagaacagaggtcgaactcagcgagctgcgcggatccgagctgaaaggagccgaggaagatggacgccacgggaagaggaagaagcagctgggcacactgcagcttggaatcgatcttagaaacggcgactggcacggatgggaggagttcgcggacaaggagttcgcgaacgagccggagctgcgcgcgcgcgcaagaaaatcgctcggcagagagaggacggatagggagctccaagcaccgaactgcagccggaaccagaggcactgcgagcaggtagacatgggagggacctcgctggctgagcgagctggaagagagaagcaaggggagggcacagggaaagaagaagcgctcggcgcagggagctgggcgccagagcaggaggctgcagggtgcggcgttgggacacgcgcgggcgacggcgcgtgcacagagaagcgaccgcgccatgggcgttcgcgggcggacgaactaagaagcttgagggagctcggcgagctgcacgggaggagcacgcagggaggtacgccggcgagggagcaggagagagaagggagtggctgcgcgcggcgaggaagctccagagaactgccatgggagctcagcagagaggaaacgcaggggatgggagacgcgctggcatgggaggaaactgggggtcgcggcatgggcgatctggaacaagcgagcagaggggcgcggtccgagcgccgggcgccgggcggagtcgagggcgtgacccagggcgagcgccggctggaagaagagcagcgcgcactggaaataaccacggccgggtggtgggatttttcttcacacgttgagcggcacggccaggaagatcagcgatcggcggtgggagataagctccatggctaa

SEQ ID NO: 41592 - DNA, 465 bp, Zea mays
  Peptide Sequence Number=SeqID_84967
atgtcaccggacagtccggtgaattatagcggagcggcctccaattttcccaaaggtagcgagttcagcgtcaagttccctggtgcaccggacactgtccggtggcacaccggacagtccgctggagcttcatctttagcaccgccagtgccaattgctcaagcccctgctcctagaggcgatgatccggatgattctggtgatgatggagacgatgatgatgaggcagaagaagaagaaaacaacaatgaagaagtcaacgatgaccaagaggacaaccttgttgggatgtggcatatcaccgagcattacacctcgatgttcgagacgggacactttccaaacctgttgcagaatgtattgcatgcgctaggaacctacgtccgacctctatatgacacaaggcataccagcatctccccacaccctgcttggccctttcgggaaaggattaaccccttctag

SEQ ID NO: 41593 - DNA, 777 bp, Zea mays
  Peptide Sequence Number=SeqID_84968
atggtgacctccggcttgatggtgggggaaagcgagccgggctgcggcctctgcccctccctcagcctcaaggattttcatcaccagggctggggagaggactgcagcgtgcccggctttcggacgcgagtggcttcggaaccgctcgtggcgccggcgtctgccacggcagctggaagaggttcttctgccggcgtgatagccaaggctggccacggaccgacctccaactctacggccttctgtccgtccttgccttacgagttttggcatgggcggcggcctcctggcagcagcatccgccctgaggtcagtgctgccgttgttcggccccccggggcagaagtcgtcgtcgtcgccgctgctggagcaggtgacggcgcgccgttcgtcggtcttccgttgctccgcaggccttcccccatggagtgggactcgcctgttgattatctgaaccgcttcaccaagcatgagtcgccccgtgtcaaggtgacgagtgagccgggttgtccgtcagcgggaccgatgccggagttgatcagccgaggcctcaggggcaaccggccgagccgcctgctcgggccggattcccggagaagtccctggcagcgattgcccgggcgtggtgatgacgtcgtccttcggagcggagatcctcggaccgcgtcgccgtccgaggctaggtcgggcctcgctgaaggtatcgtcgatgccgagggtgctacagctcccttccagcgtgaagacccgagcctgcaggatcagattgtcttgtag

SEQ ID NO: 41594 - DNA, 1803 bp, Zea mays
  Peptide Sequence Number=SeqID_84969
atgggcaagaacaacaagcgcaagcgtgagccaactcctccatcggaggagtttggtgacttggagtactcagaggaggagttctcctctgagtctgaggggtctccggctcccatccccctgcgtgagtcgtctgatgactcagacgactcccagggcctcgcggcggaggtctggacgtacatctgggccgtcgagcgctccgggctcgagggctcggatgagtcggagtactcctcggatgaggaggactcggacgacggtagcgaggacgaggaagacgacgacgacgacgacgacggtggcgacggtgacggtgacgacagcggcaggggcggcggcagcggcagcaaggacggtgatggcggcggcagcaggggcagcaaccggggcggcagcagcaggggcagcaccaggggcggcagcggcggcggcggtcccacctcgcgcgcgcccgcctccctcccctctcccttccggcccaggcggcccaagccgcgcgccactcccgccgctgacagcccaaccccgctcgtcagcgccccgcctctctctctcgcgcggacctctcactggcagccgaccccactcgtcagttccatctctctcgcccatgcctcaccggcgcgctcgccgccgagcgctgcacgccccgtcgcctcgccattaaagctcgccccgacttccgcgaccgacccgcctctgtgcccgagccgtcccctcatcctcagcctgcccgagtcgtctcgtcgccgtttgctccatgcccgccatcatggaagctcgtcggtgctcgccgtcccctccatccctctccccctcccgggcgcctataaaagggatagccgagcccgagccctccacaccagccacggccatctcctccactcctccccgagctcaatcgagctagcagcgcccgccgtgcttccctccaccgctccgatggaaaacccctgggtgattaggacttcctattgctcagaggaggaaggctttcctcacctgcttcgaagctgcgcactacgcctggggatccgcaagaagcccgaatatgtctggaaggagtaccgtgaaaatggaatggaaaagtgctctatggcagtctacctgggagaaagccggaactacccaaaccaccctcctttccaaattaccatcatcgggcaccgcttcccagacacatgccagagcgttgctcgaaaagccctcaaacaactgtgccaaaactatagccgagagacctttgaaactcccctccgatatttcccacccagcaacaaaaacacccccacctggaagaaaagactccaggctctgtcaggaggagatcccatagaagatgatcccactatcgtctacatggccggatacctccacaccctcgacaaccactacgatgagctctcctcccattgtacccacctaaactcccgagtggaatgcctagagcagcaagtcaaagagcttacacaagagaaggtatcccttcagaagagtctcagcatagcggaaggcgaggaagccaacacccgtgaggcctaccgaaccttgaagtcagactttgacaagaagctgaaggcactcgcccccaaaaagaagatccaaaagaagaccactaaccaaggatgccagacagagaagaagaagaagaaggcccctctagccctacctccccccagaatcgatgactggtccgacgaagaagatgtatccctagccagcctcgatgatcttctcaaggcatttggggacaccttagacaaggaactcgctagcacctcgaagaacgccctcgtgtag

SEQ ID NO: 41595 - DNA, 597 bp, Zea mays
  Peptide Sequence Number=SeqID_84970
atgaggaaaaaacacggctccgtgccaaaattacacacatgttcaggcctcgacagccaagatgaacaaaaaaccctggcattcaaagtgccattacaaacggaactccggttccccctccgcaggtacgaacaaaccccactccatgggggaaggcctgcggagcaacggaagaccgacgaacggcgcgccgtcacctgctccagcagcggcgacgacgacgacttctgccccggggggccgaacaacggcagcactgacctcagggcggatgctgctgccaggaggccgccgcccatgccaaaactcggactgggaaaggggaataccccgaaaaggatccttccctgtgaaggaaccgggctccgagcccccctactgatcagaggttcgaaggctggccctccaaggggttcaacagtcgcctcagatcgcgtgggccctacacccactactggtcagaggttcgaaggccggcccccgaagggctccacggccgcctcaggctactcgggctccgcgcccattactgatcaggggttcgaaggctggcccccgaagggttcacagtcgcctcagacgccgagcgagggatga

SEQ ID NO: 41596 - DNA, 300 bp, Zea mays
  Peptide Sequence Number=SeqID_84971
atgaagggtattcaccctcatcacctggtgagtgggatgatcagggactccctggtttatgggagggccaaaggtgatggctcagctggtgtaggtgtgaaaagcatagagcagcatgtcaaggaacttaagaaggagaaggcatccctccaagagtgtctcgatatagcagaaggcgaggaggccaacactcgtgaagcctaccgaacactgaagatggattatgataagaagctaaagaagctcaccccccacgaagaaaatccaaaagaagaccaagagccaaggaggccaggctaa

SEQ ID NO: 41597 - DNA, 246 bp, Zea mays
  Peptide Sequence Number=SeqID_84972
atgacgctcggcacaggaagacactcgacaaagaccgctttgccgagtgtcaaagactcggtgaacggcagcggcggaggacgcactaaaaccaaggttgaaagaactgtgccgcttgctaaccattcagacccaaacaacgccaatagctgccatgctgggctaccggggccggggccgcgctacgggcagaaggcggagcggtggtgcaccacggagcgtggagggcaggagcggagcacgtag

SEQ ID NO: 41598 - DNA, 3204 bp, Zea mays
  Peptide Sequence Number=SeqID_84973
atggccgggggcttcgagtggagcagctctgcaagcacaaccagaggagtcgagctccagcagtccattgtcgctctcaagaaaggcgcacatctcctgaaatgtgggaagagagggaagcccaaattctgcactgtcaggctgtcttatgatgagagagcactaatatggtactccaaagagaggggaaaacgtttgagcttgaattcagtgtccagtgtagttctcggacagaagactacaaaacttttgcgtctacattggccagaaaaggaatctcactccttgtcaattatatacaagaacggtgaatcctcacttgacttggtctgcaaagatagggatcaagctgaatgctggtacttaggccttacagccgtaatatcagcaccatgcacccctttacttctgattgattcaacaaacagccgtcggataaacagctgcacgaatagccctcctagctatattcagcaaaggagtaggctttttgctgtgcatgatggaagaaatttcccaaaggtaaattcgctatatggcagtcctaggttgatacagaacaagtatctgcgtaacaatttggattgctccgaaccattcttttctccaagacagagagcatggtcagaactagatttctacttggaaaagattagtcccgaattggtagatcgagtaaaaaataatttgagagacataaaatctgcagaaataattaacgaccaaagaattatgcaaatacctaagctcaaacaatctgagggatccaatgcagcagcagattctctgaaggacatttttgtctggggtgatgctctgggtcgtatgtcagatcatggacatgtatcagcaagcaatatatcacttccaaggttattgaaatcgtcagagattcttgatgtgcagagcattgcctgtggagagaaacacgcagcaatagttactaagcagggtcaggtattctcttggggtgaggaaaatggagggagactgggacacaagacaagtgacagtgtctctgaccctaaaatcatcgactcactttcctccacgcctgtgaagactattgcatttggggcaaagttcacctgtgcagtttcagtttcaggagaactttatgagtggggtgaagggattgacagcctagggttcgggaccaatcagtgtcaaagaagcccatggttcccgcataaattgatcagaacttcagatggcatatctgtggcgaagattgcatgtggtcagtggcacacagctatagtatcctccacaggtaagctgttcacatatggacatggagcatttggtgttcttggacatggtgacacacgtagttttgttcagccgaaagaagtggagtccttgagagggttaagagtcaagtccgtcgcatgtggaccatggcacaccgctgctattgtggaaacatcaggaacactcaagagcaatgctcctggtgggaagctgttcacatggggtgacgcaggcggagagaagctgggccatactgacaaaaagtcaaagcttgtaccaactcgtgtcgaatcgctcgttgattgtgattttactcaggtgtcatgtggtatttcattaacagctgtgctaaccataacgggtgttgtatttaccattggaagcaaggaccatgggcaattagggaatcctcgatctgacactgacagcgcatgtatttgtatggttgaagggccacttaagactgagtttgtcaaagatatatcctgcggaagttcccatgtcgcagtcttggcaatgaatggaaaagtgtttacctggggcaaaggcacagaagggcaacttggtttaggggattacgttgacaggagctccccaactctagtggaggccctggaagataaacaagtggacagtatagtttgttcttccaattccactgctgcaatttgcgtgcacggggaaatctcaagcaaggatcaatctgtgtgcagcagttgcaggttggcatttcggtttacaaggaagaagcacaactgctacaactgtggttccatggtctgcaattcttgcagcagcaacaaggttcatagggctgcccttgcaccagacaagagcaaaagatgccgcgtctgtgatgcttgtttcaacgagctgaataaaacagccgagcacggtaaaatgagctgtggatcaaagatccaaaaagaaccgtcttatttagcagaaacaaggacatacacaccaaagttatcacggatgctgaaggaagcaaatttcatcatggagaaaatgggttcctccgcacaaagtcccggccagagaaatcaggaacccgccactccgaatcaaatgcaaaaggaaaggtggggacaggtagaatgccccgatcgattcaaatgcgcaagagacaacattccacatcgtttgacaccaaagaagcagacaattgatgattatcctatgaggagaatggctgatccagtctcacaaaagactgctgcccctttaacacaaactactagtgataggaggaaagaacaagatttgatagaaaagatactgctggaggaggtgaaacagcttcaagcacaggtaaccacgctagcagaagaatgccggcacaggagcctgaaagttcggttgtacaaacggaaacttgaggaaacctggttgatagtgagggacgaggccacgaagtgcgaagctgcagaagagattataaaggttttaacgaatcagaggaacgctttgtcaaacaaacttttagatggtctggaactagatggttccagtatcgtgcctaacccacccgacaaagctcttgccacctgcaaaaccccaccgctaaacagcatcagggatcaacacaacgcagaggcagaggaagttttggatacgcgatccacagcgtcttccaacaccgtcgcggtggatgactcagctgcgcatcagaacggcagatctagagcctccagtagcagcagaggctactacgacgatgggggaacagatagcacagctgctcctactgactccaacggggtcatcgagcaaattgagcgtggtgtgtacattacagtcgttacgtcccccagcggtaagaagggaatcaagcgcatccggttcagccggaagcatttcggggaggccgaggcacagaaatggtgggagcggaatgagagcagggtattcgcgaagtacgacagcgtggaatacctggcagcgtaa

SEQ ID NO: 41599 - DNA, 357 bp, Zea mays
  Peptide Sequence Number=SeqID_84974
atggagcaaaagatggcagtgaagtgtgacggaaagagcgctgcaactgcaaggaaagaatggaagcgagcaggaggatctgtcgcggttggcggttgcaaacaaagccccaagaaaaatcggaaaaaatttcgttccttgcaagtgcaaccaaaacggagagggcggggcgcggaagaggccgatggtgataggagcaggcagcacgtgcgcagcgcaggcaggcaggcgctgccccggccggcacgaacgactcagctgcccgcagacgatgccgtctcgctcgcacggaggaggctgtggtgtcctgatgcggtttcgccgtggacgacagtggagtgcggccgctggccatga

SEQ ID NO: 41600 - DNA, 1071 bp, Zea mays
  Peptide Sequence Number=SeqID_84975
atggacgaccgcggcttccggctttccgcccgcagtggagcgccgcgtgttgcgtgccgtttaaagcgcacctgcaacagtggcaaccccaccccagtgcaaatctgcccctacgtgaaacgttcccctcctctcctcgccctccttgcgcaggttgaggcccgaggtgtagtgcaaggtggcgacctctcggcggcttgggtcggattgttttcgggaagtttggtctccagtgacccgagcactggagatgccctgtttggaggtaacatctacgatctcgcgttgcttgtattgttttcctggcccggctgggagaaagatcgtatcgagcaaattccgatggcgaccggcgagaccgccgtggatcgtcgcgaggacccccgcgacatggatttgtcaggggaggagcacgtgcggcccaaggcgcggaagccgtacacgatcacgaagcggcgggagaggtggacggaggaggagcacggtcggttcctcgaggccctgcagctgcacggtcgcgcctggcgccgcatacaagagcacatcggcaccaagactgccgtgcaaatccagatcacgcgcagaattcttcaccaaggtccgttggcacgtcggtcggcttacaccacaccttttctgatgtcggaatcgcgtcgtgtgctgaaggtggtccgagaatcgtcgccaggaagcaacgcctccgcgggcgccgcgccggcgatccagatccccccgccgcgccccaagaggaagccggcacacccttacccgcgcaaagcggacggcgcggccaagaagcccgcgccggagctcaagcggctggagaagacgtccctgcgcgaccgggtccgggacgaagggtcgccgacgtcggtgcttgcctcggcgcgcacggcgttacgagcggaggtgtcgggcagcgtggtcgcgaacagctcgagcgccagcaggtcgccagccctgtctgacgccggttccaacgagcgtggcgacggcggcggctcgctggcctcctcggtggaccgggaggacggctgcgcatcgccaaggacgagagcgccatgtaccaag

SEQ ID NO: 41601 - DNA, 729 bp, Zea mays
  Peptide Sequence Number=SeqID_84976
atgtcgaggcccttcccggccaacagatatcttttcccggagaacaatatttgctcgtggcgcatatatccccgtccctggcctcgcgtattgggagacgccgtgctgctttggaatgggcgaactgcgatcggtgtcgctctcgtgcaacttaccgtgaacgtcggcctcctatcgctcgcggcagtatttatacgcttcgtcccagctgcactcctccaccgccgcccatcgatccaagccggcggtcggcttggacggtggctggaaaatgcttcgcttttggaggacgcagaggagcaccacctcgtcgaacgcgttgtcgcctcatggctttgcatttctgtggctatgctaggtcgtggagatgaacgtgcacatggactgcgacggctgcgagaagcgagagtgagctcggtggagatcgacatggatcggcagaaggtgacagtgacagggtacgtggaccggcgggaggcgctgcgcgcggcgcggcggaccggcagggcggcggagttctggccgtggccgtacgacggcgagtactacccgttcgcgatccagtacctggaggacaacacgtacatggccaccaacaagtactaccgccacggctacaacgaccccacgatcggatcctacccctgccacgccttcacgcatgtcctcgacgacgacgcgctcgccgtcttccacgacgacaatgtccacgcctgcgccgtgatgtga

SEQ ID NO: 41602 - DNA, 192 bp, Zea mays
  Peptide Sequence Number=SeqID_84977
atggccaggggcatgtcgttggcggcgctaccattccgcagcaacctcgagccccgcgacgttagtgacggcgtttgtgagcaagcagagctgatctgcgttacttcgtcaggtcatccaagcgcacgcgggttagctgaaaccgggaaccatgtccatgtggcggaggacccctcacaaaaaactaattaa

SEQ ID NO: 41603 - DNA, 948 bp, Zea mays
  Peptide Sequence Number=SeqID_84978
atgggtgcagacagaataagaagaccatgcggcagaaaccttcctgacacgcctgcacggagtctgttctttgtgttccaagtcttcagcctttggagcttggctaacttgattgttttggttgtacatacaaggaggtgcagttttgctccgcctcagagcactgctgctgcagacactaatcccactgaatttatcctagaatctttggaacaaagtgatccacgatcattgatacaatatcttgcataccaagatttgtgtgtggcatctgagtgtaatttggaaccatggcgcagagctgctttctttgaggaatctggtgaaacttataaaagaatcgtgacaacttgtttgaagccacttgaggagtttacttcaaaaattgctgaatcccttgaagatttttctagtgataagccagaattgatgctacaacagtccaaactctttagtgcatttgatgatttccagatatgcgcatggtgtgctcggacattgactgggttaactgcgtgctcacgccaggaggatcggtatggtgttgctcaactcactggctgcaatgctgctgtgatgacaacgttgctgtctgccctagtagcaattgagacatgcttaggaaagaaaacaaacccacagcctgtgcactcattgggtcctgaaaacattaggtgggttaacttctccacaggacgaaaaggcactggagttgcaattgcatgcacacaaaaaggcggcctacacaagaaagcttataccatggcagatgttcttcggacttctgtatatcagatagtttcagcattcatcgatgacctacgagctaatgcaaaaccatccagcttggagaagaactggatcagtgaagggagaaaacctgtatatggttcacaagccgtgttggttcagaagttgattctgtttattgagtaccgtgcagtatga

SEQ ID NO: 41604 - DNA, 333 bp, Zea mays
  Peptide Sequence Number=SeqID_84979
atggaggaaggatgtgaggggtgtggtggatgggagtggagtaacgaactagttgtgggggtagtgtggaaggagaccccggagtcaaccacccaatcggtggtgggagggggaggtggtggtggtgaaggtacgcgcctgatggcaagtgaagaggaggccgcaacggggagtgctcgtggcagggagaagggcggctggggaccagcggtcgatgggagcgaggggaggaggctggctggacgccggccgacggagaagggggagaagcgggccgggatggatccggcggcgctggcgcggaaggagacagatccggcggtgcaggcgtga

SEQ ID NO: 41605 - DNA, 564 bp, Zea mays
  Peptide Sequence Number=SeqID_84980
atggggcgatggcgatcgaccggaggaccacggcatgatggtgtaacaccgtcttcggtcctcactggtgattgctattttgggaagttcatgaagaagaaaggatatggtgcaagaataagatgctacaagtgtgatatccaagattatattattatcgattgtcctcaaaatggcatcaacaaagaggataagggagaaaataagaaggacaagaaagacaagaagatgacattcaaaaagaagggtcatgcctattgtgttgaagaagtaaaaaagaaggctcttgcaagcatcaccatcaacaacaagccctctccttttgacactccatcaacatgctttatggccaaagtccctaagaaaaagagggaagaatccaaggaattggacaagaagcacaaagttcttgagcaatcctttgagaagcatttagctactcaggaggttctcattgaaactcgtgagaagataaaagaagcctatttcacactttttggtcaaaaggaggagtctattgaaatggcaaacataggaaacacttgtgatattgggcttttctaa

SEQ ID NO: 41606 - DNA, 828 bp, Zea mays
  Peptide Sequence Number=SeqID_84981
atgggggacgcctgcaatccttccgccttgtcgttggagggacgcaactccgtgggagtcgatacctttcagccatcgttcggcttcaaggattttcatcaggcagcccggctgcatcccctcgccggtgcttcaaggatcttcatcatcagtgctggggaggggagtgtgccgagttggggtcggtccctgcgcgggcggcggcccgctccttccctcagtgatcgggggaagggcgtccgccgttcatggcatgggcagctgccgcgtgcccggctctctgagccgagcggcttcggagccgctcccggtgccgccttccgccacggcagctggaagaggttccgccgccgacgagctagccggcgccacccacggactgacctccaactctacggccttctgcccgtccttgcctctcgagttgggggcatgggcgagggcctcatggcagcagcatccgccctgaggtcatcgctgccgctgttcggccctccggagcagaacactgagactcaccttgtcgattatctgaaccgcttcaccgagcgtgagttgcctcgtgcaaaggtgacgagtgagagttggcttcgaaaaggaggtgtagttggccagagcctggccgggttgtccactggcggagccgacgccggagttgagctgccgaggccacaagccgagctgatgtctttggggagtgggggccctccgaccgcgtcgccgtccgaggctaggtcagaccccgccgaaggtgtagttgatgccgagggtgctgctgcgcccttcggctgtcaacgtccgagcctgcaggatcaggttgtcttgtag

SEQ ID NO: 41607 - DNA, 663 bp, Zea mays
  Peptide Sequence Number=SeqID_84982
atggccggcccctcgaagggttcaacggccgcctcaggccactcgggctccgcgcccattactgatcaggggttcgtaggctggccctcgaagggttcacagttgcctcagacacagagcgaggacagcgccgcccgcaccgctccgactactgagccacccgacagagtgaggctgacagcagccaaggccggcctcgagcatcataggaaactccgcctcgcccgaccccagggctcggactcgggctcagccccggaagacggtgaactccgctccgcccgacccagggctcggactcgggctcagccccggaagacggcgaactccgctccgcccgacccagggctcggactcgggctcagccccggaagacggcgaactccgctccgcccgacccagggctcgaactcgggctcagccccagaagacggcgaactccactccgccccgacccagggctcggacatgggctcaaccccggaagacggcgaactccgctcccccccacccaggctcggacttgggctcagccccaggagacgacagactccgcttcgcccgaccccagggctcggactcagccctggcctcagccgacggtctccgcctcgcccgacccaggggctcagactcgaccacagtcacggaagacagacttga

SEQ ID NO: 41608 - DNA, 1272 bp, Zea mays
  Peptide Sequence Number=SeqID_84983
atggtccgcgagacaacgttcctgctaggcatttcgccgagcaactacagcaccatctcaaggcggctggtcttggcgacgacctccttcgccaccgcacgcgacattgtcgtgtccgcgcggtgcctcttcatgcccatgaacctccacatgctctcgctcgtcgtccacctctccgagctggctgcctccttgcccggcgagttcggagacctggccgagccggtgcgtctacccggctgtgtgcccatcctagggctcgacatcgtctcgtcgctccaggaccggttcgacccatcgtacgtggtgatgctgcacctcgtcgtgcactgccgcgaagccgccgaagccatcctcgtcaactccttcgacgctatcaagcctgaggccgtcgaggttctgcgccatccagcaaagtccggcgggccaccagtccgcgggatgggagatctggtggtgacttgcaagtggagctacagggagagggagtgcgagagcgagagcgatgagatggtggatgatgaggacaacaatgacgtactccacagccgcctcggactcctggatctagaggagcattgctcctccttggagtcgacgcaggtgcctccgcctcgaccgccgcacgagcacgcgccaagccaattggagagggagggcgctgtgccgctgtcggcgcgggagtggggacgcacgggcgggggcacggtggacgcccacgaaactccgcctcgcccgaccccagggctcggactcgggctcagccccagaagacggcgaactccgctccgcccgacccagggctcggactcgggctcagccccggaagacggcgaactccgctccgcccgacccagggctcggactcgggctcagccccggaagacggcgaactccgctccgcccgacccagggctcggacatgggctcaaccccggaagacggcgaactccgctccgcccgactcagggctcggacttgggcttagccccaggagacgacagactccgcttcgcccgaccccagggctcagactcagccctggcctcagccgacggtctctgcctcgcccgacccaggggctcggactcgaccacggccacggaagacagactcgacctcgacctcggaggagcctccacatcgcccaacctggggcgtggaccgaccacgtcgacaggaggcgctatcattaccctaccccgagctgactcaggctacggggaacaagaccggcgtcccatctggctcgctccgctagataggcaatga

SEQ ID NO: 41609 - DNA, 483 bp, Zea mays
  Peptide Sequence Number=SeqID_84984
atgccgtcctcttcttcttcctccgacaccacgccgccggccgccgcctcgtctgaggagacgttgagtagcgtgatggtggaggagttgcgcgccggcgactctgttgattttggtgtgtcatggatgacgccagcccgcgttgaagatatgcagcggttgggctactttggcggcggagttgctcgtgctccggggacggaggaagtccccgagccggaggtggcagaagaggatgcagacgaaggggccctccgatgcgctgccggtcagagcagtgggcgtgatttagttgaagagttcgtggcgtacggggtctggcccttggcgcacggctgggcgctgggcgaaagagttaatgaggacgtgtgcggccccgggggaaaggatgtcttcgcccgagctccgggagtcttcggctcggatgctgagggttaccgggggttgctggccgaaaaatgttcctatcccctgcgcggctga

SEQ ID NO: 41610 - DNA, 1110 bp, Zea mays
  Peptide Sequence Number=SeqID_84985
atgaacgcgctctctcgcgaaggctgccggcactatgaggccctcgaccaggtggatgaggattttgggcgagatatctttgaggtcgaagaccccgtggtgaaggagtccgccggggccctctatgaccggatgtggggttcatacggtcgtgaggtggtccgggcgcgggccgaggctgcgagggctcaggcggagcgcggcgagcgggtggacgactttggggcgctgaacagcgcgctgcctgagccggggacgacccctgcggaggctgcgactggagtcgccccggggctgaccccggagactgcggaagatgcaccaggcgcccctgcatctgccgcggccggcgaagaccttcccccaaaggtggccgaaggcgcacctgacgcccccgcagctgctgtgccgagcgctgaagatccagcggaggtgggggcggaggcagcgacggaggcggcggcggaggctcccgcagcggcagggccttcgcaggttcaagattttgggcctgcgcacgcaaccgctactactgagtttttggcggcttcgaccgcggaagatggaaatgaatgtggtgggtctgtttctgagttttttgattttactgactctgggagttcggttgagtggaccgaggagtcgtcggaggaggacttggactattttgcggccttggacgtggctgcggcggaggctgcgccacatgccgcggacgcgccaggcgtgcccggtcctagcaccgggcaccgacgacgaagggcgattgcgaagcgtaggattagtgcggaggaaggggctcggcttcgcgttagtagggttggtcggcaggagctgctgtctttgccggccgcctcgggtgtaggggaaggggagttgcgaagcctttttgcaggagtgctccaggtcctcgccgtctggcgttgtgagcctgtaagcgctgggggaagcttttgttttgactatgaaggggccctcccacttgggctccaacttgcccttggactccgtccgagctgttcggatgagtacgaggtcccccgcgctgaactcctttgggatgactgcgcggtcgcgccatgctttggtctgggcttggtatttgtttaa

SEQ ID NO: 41611 - DNA, 450 bp, Zea mays
  Peptide Sequence Number=SeqID_84986
atggaaaaagcaatgaatggcatgctcagtcaccagggttttggcccattttatacagagaaggcacgagatctgaggattcaagtccgacactcggcaaaggctattttacactcggcaaaggctttgccgagtgtaacactcggcaaagaacgctcggcgaactgtacatcggcagcggtctctttgccgagtactttttgtcgggcactcggcaaagaatttgccgagtgccatttgacactcggcaaagaaaagtcaccgtcacggcgccaagtgacggtgacggatcctttgccgagtgtcttctttggcactcggcaaagaggccaattttgccgagtgcctgctatcatggccctcggcaaagacgggtccagtgggccccaccgccagtccctgtgccgagagctctcgtcggcaaaggaggactctttgccgagtgtctag

SEQ ID NO: 41612 - DNA, 651 bp, Zea mays
  Peptide Sequence Number=SeqID_84987
atgtacattttagatgcaaactatgattccacccttcatatttttatattattgccatgtaccactaccggaatcgcaggctttgccgagtgccttttgtcgggcactcggcaaagaaggctttgccgagtgctgcactcggtaaagttaggcacttggcaaagcgccctttaccgagtgctgaacactcggcacaggacgacactcggcaacgacaactttgccgagtgtcaaacactcggcaaagggggctctcggcaaacggccgtcagcggccgtcccaaagctgacggccgtcagtctttgccgaacttcacaacaacttactatggtgacaaactaccgagcgtgcataatccaccccctcgttacaatgatggcgacaatgaatcgaacctcagcatttttcgagggcaactcggaagcgcaagtggttcgaccaccaagaccctgagacatgaagagtggcaccatatcatgctatatgtattgaccaaccttgaagagcaaaaacaaatcaaaaagggacatcctggtcactttgccgagtgtaacactcggcaaagggttgctttgccgactgctatgaccatggcactcggcaaagaaggaaacctgggaaccggtaaagccatctttgccgagtgctga

SEQ ID NO: 41613 - DNA, 438 bp, Zea mays
  Peptide Sequence Number=SeqID_84988
atggttatgaatgtcaaggcatccgttcacaatatacaaattcttcgtgggataaaactacaaagagaggtggcggttaaagcaattcactggcaagcgacaaaagatgtcatgaatatcaaggaacgtaaacacattcttctctccaaccaccacggtcgatgcccacaaaacccgcttgtcgtgaaagaagaaaggtcgacgtgggtggtggtggtggtggcaaagagcgtgcagaggacgatgcgtcgagtgaaaaaggcaggcagccagggcagcatgcagcaggacacaggaaggggggaagccaggacaggagcacacacacacaccttgacacatgcagctggcaggaaactcaccgctttgcacaaacacaaagtactcgcttactatgggactgcactgcaaattgatgagagaggccgggtggtgtga

SEQ ID NO: 41614 - DNA, 348 bp, Zea mays
  Peptide Sequence Number=SeqID_84989
atgatgagacgatcgggtttagtagtgccggaggaggccgttgccaaaggtgacattgccgaagctgagaaaactgtagctgaggatgggagtgatgatgagtttgaagaagacaacaatatcttgagcccgttgaaaccaagccaaattgaatttggaaagtctaccatgtcagtggaggacctagttatgatgaagaagctgggttattttggggaagctgagagacaccagagccccggtgatcggctcaagtggccaacagggtggacaaatgagtggttctacgtgaaggctgatgagaagaagagggagaaattgatgaccatggttatgagccctatgtga

SEQ ID NO: 41615 - DNA, 1239 bp, Zea mays
  Peptide Sequence Number=SeqID_84990
atggaggcgagctcggccgcgtcgccggacctgtcgctgcacatcagcctgcctagcagcgcggcggggtccggcccgtccggcaggcgcgccgccgtggggggaggaacgggaggaggaggaggcgccgggggagacccgtggcggaggctgaacgggtccacagcgtccacggagctgtccctgtcgccgccggtcgagcaggagcacgcggacgcgctgccgtggcgacaccggccgtcggcggcggccgcgtcctccgcgggccaccacccgctggacggcgggggcgggctaggcgccggcgccggcgcaggagggggagcgtcggtggcgctgccaatccgagggatacctatctacaacggcccggggggcttcccgttccttccgccggcctccggggccgacggcgcccccctccaccaccaccagcagcagcagaagctcgggttctacggctcgtaccacccgagcacgtggccctcgtcgctcggctccacgtcgccgtcgccgtcgccgctcgcgccgggcacgccgccgtccccgctgctggacccagcgtcggcggcgttcctgtccccggccgcgcatcaccaccaccggatgctgtcggcatcgggccggctcaacggcatgctcaccgacaccctccgcggctacggcgctggcggcgtcggcggactgggcggcatcgtcggcgggcaccaccaccaccaccaccacctccacggcgcgcagccgttcggcctgggctcccggttcatgcccaagctccccgccaagcgcagcatgcgcgcgccgcgcatgcggtggacgagcacgctccacgcccgcttcgtccacgccgtcgagctcctcggaggccacgagagggctacgcccaagtcggtgctggagctcatggacgtgaaggatctgaccctagcccacgtcaagagccatctccagatgtatcggaccgtgaagagcactgacaagcctgcggcgtcatcaggggcgaacgacggcggctccggcgacgaggacttcgccggcggtggccaggctggctccggcggcgagaacatgtgcgcgaggccgttcggggagcaccggtccacctccgagggtgcggcgagctcggtgggcggcggcggcgggggcgacatggaccagtcttcggcaggcaacggcagcaccaggtggagcaactcgtcaaggtactcaatcctgcacaagcgcgactacccgtactaa

SEQ ID NO: 41616 - DNA, 255 bp, Zea mays
  Peptide Sequence Number=SeqID_84991
atgctcgtaccatcgttttcaccattgtcggacgtcccgttcgtcttcccggccttcgcgctgttcttcctccccagcctgctgctcacggtcgcagccgcgagtcgaccgacgctcatcgacgcgggtacggggcaagtcggtcatgcttctggcctttctccgtgcgtgccgtcgaggaggacatggtggcgcctgccactcttaggttatcttagtgatgaggagtccaagtctgagatattggacaactaa

SEQ ID NO: 41617 - DNA, 465 bp, Zea mays
  Peptide Sequence Number=SeqID_84992
atgcaggaggctaatccgacagatgggccccacgagccagtgaaggccaaagcgcgcgcgtgtgggcttgagagctggctggcgtgcagtagagagggtggggtgggccgcggctccggggccgccacgttgccagaggagacaatctactctaaggtgtcaacagtgggtttggacccctacgggaagtgccggacccctagatacacagaccgaacttcctggcgaggttcaagacctcaacagcatttaatatgcccagtccactctgctgatgggcggcggccaagccatcctgcaggcggcgtgcccgtccgctccggtggcaggcagtacgcccatgctgcggcatacactgtgctcatcatcactcgtacgttgccactgaagcttccgctgcatgtcgatactacgcaggctgcggatatcagggcgcaaggagaatgcactggcgaccagcattag

SEQ ID NO: 41618 - DNA, 159 bp, Zea mays
  Peptide Sequence Number=SeqID_84993
atggccttgctagatcctcccgagcgccttcatcccgaggtggcactcaacttgtgtcgccggctgctgaagacgtcacccaggaggtcgtacaagacgttgtacgccatggagatggcggccgcacgcttccagtgcgaccctactgatgtcgagtag

SEQ ID NO: 41619 - DNA, 675 bp, Zea mays
  Peptide Sequence Number=SeqID_84994
atgcaccacctcaccgtcgtccgttcatcgcaagccttcgtctatcctactgcaccaacggaagcaaaacgaccagcgagttccacccttcgtcttctacactacaagacgaaggcctacgacgacacccgacctggaggcccacgtgggattcggcccattgagagcaagttccaacatttggagcccaccgttcgtgctacgaaaaaaccacccgcgacagcacccaagcgagctagctcgaaggcagccccatccgttgacgaagaagtgaaggcagcgctgctggccgagaaaaagggcaaggcccttgcagacaccacccaccaagaggcctgcgaagacgacgcactcagcaagcgacagcgcaatgatcaaccaactcccaaagggaccctccgcacctgcagctccgtaggacaaccgcaagcacccccaggcttcgctccactagagggcgaggacaccacagaggatggcgaagtcatcggcgtttcagcagaggaacagctacagccgcgggccttgcgcatcaagaaccgtaacctccagaggcagaaagagatcctcgaggccaagcgccaacgtgtctctgcgcaggccaaggtgcgccagatgatacgagacgaggagcaaagggctcaggaactcgagcaagagattacgctcatgtag

SEQ ID NO: 41620 - DNA, 492 bp, Zea mays
  Peptide Sequence Number=SeqID_84995
atgtgtggggacccagccccccgtgccggagggtgggaacccttggagctcgtcggtggagactttgctcgtgacgctttggaatgcgagtggggagagccgcctttaaaaagagatcgatcccccgggcagtggacatgcctccgcactcccctcatgcattgcgcccttccaccttccgagtccccggatggggtgcacccgtgttgccttcgtctcgctgccgttggaggagcgcgaccccgcgggggttggcgctcttcagacatcgctcggcttcaaggattttcatcacgcagcccggctgcagtctcccgtcggcggtcacccaggatgatgaccgtaggcctcatggtggggacaagcaagccgggctgcggcctctaccccgccctcagcttcaaggatgttcatcatcctcgctgtggcggagggcgagctgagccggggtcctacctcccgcatgggtcggcaagccgcctctttctttag

SEQ ID NO: 41621 - DNA, 654 bp, Zea mays
  Peptide Sequence Number=SeqID_84996
atggccgaggctcgggctacgctcccgaggtcaaggcctcgtctaccaagggacgcaatctcgcttcgcccgagcccggccttgggcaggaacagtagtcccagacgaattcacgccttgcccgagggcctcctcaggcagtgggcgcaccctcggctcgcccgaggcccagctcgggcaggcttcgtcgagaagcaaccttggccaaatcgcctcaccaaccgaccgtatcgcaggcgcattcaatgcgaggatcgcctgacaccttatcctgacacgcgcgcctcagttggcaaggtcgaagtgaccgcagtcacttcgccctttttcactgaccgatctgacaggaaaacagcgccgcctcaccccgcttccgactgctgtgcccagccacccggggcaagggctgatagcagcaagttcagcctcgggcgcaacaggaagctccgcctcgccccgacctcagggctcggcctcgggaggaggtctcccgcctcgcccgaccccaagactcggcctcagcctcggcctagggaggaattgcgccctcgcccgaccccggcctcggcctcaggagaagtctccgcctcgcccgaccttgggctcggaccgaccgcgccacaggggatacatcatcatcctacctctagctag

SEQ ID NO: 41622 - DNA, 201 bp, Zea mays
  Peptide Sequence Number=SeqID_84997
atggtaaagcatcagaagatcgagtttgatttccttgacgaggttgatcctttcttctccagtcttggtctcattgactcgaggtgtttttttctatatgtatatgcagatgtaattgtggacattactccacaactcatcacactcaatcaaaaatccaaatcagacatgtatcacaagaacaaacattcaggcatatag

SEQ ID NO: 41623 - DNA, 630 bp, Zea mays
  Peptide Sequence Number=SeqID_84998
atgaatagtacatattgcttttccaggtgtgtggagagacatgtgtattcctcctatgacgaattcctcaggctccatgaagtgtatcaatttgtcttagtatttttattcgtggggatgcctgactcaaatgaactcatgttcaacactgagcaacctacttataattttggagcctataaaatttctaagctaaaaaaggagaggagggcgcagcttgattcaatccatgtcaagtcaaaggctgctgcgaagtttgcacatgcaaattccatcactgagcagcccttcgccccggtggctgcggtgtcgcactggctgacacctgctcgcagttgcattacaagttttactgactatgtattttcagtgtacctacactcagttggaaaacttcaaccacactgcaacaaggtttataaaaggtttgctatcaggaaaaacaaatttatgggctcaaacaaaaaccaagccaagaaaacagatatcaactgtgacgccacactcaaaagcttgtttggtgggagggacaaggttgggatgctggagatctccaagcttttgagtcgtggcttcccgaaaatctccaagcttttgtggtccatggagccagggatggctctttggtaa

SEQ ID NO: 41624 - DNA, 819 bp, Zea mays
  Peptide Sequence Number=SeqID_84999
atgtcggccatcagccggcagcaggggaagctgggcggagggtcattgcggcacggcgtccaggcgtacagcaggcaccagcaacagcccatggcaaacgatcttcttgagacgggatggggatggaagaggctggtgccctacagacctggttatgttgagtggcatgtgttcaagaaataccttggggactatttcgaccataatcgtgaagcttttctttgtgccgagcagaagcctgatccatttggatggattattgctgaaaagagtgccctgattgctgcagccaaattgttgccaattaacttgcaccattgcaaaaacaatcaaaatgctttccagtgcctcaagatggagaaggcacttctcaggtactgtgctagctttctcactcctgacgacaaaaggctgatcctcgggatcaaggaccaggcaaagcaaatgatccaatcagaggtgcttcaagcaatggttcaaatgggtgtccttgttcctactggagatatgactgttgtcagaagaaccgctcaatttttccttaatagctttcaagagtgcctaacagcacaaaggaaggagagagaaatggcaaccgcagaactgggtttcaaaaagcaattaactaaggaggagaagtttgaaaagaggaagcagagacttgctacaatcggagaggatcttttggcgattgctgctgatcaaccatttcgcttccctgccacatttacatttgtggtcagagcattctcagttctagatggtactgggaaaggccttcatcctaggtttcatattacagagattgctaagccctga

SEQ ID NO: 41625 - DNA, 753 bp, Zea mays
  Peptide Sequence Number=SeqID_85000
atggccatgctcctggccgcgccaccccgcctccaggagggccgcgccgcccttgccgtggcagtagcctggccatcaggaggcaggagcccgcgctccatggcctgcggccgccgagggccgcccgtcgcgcgccggtgcgcgcccgccgtgggcgacttgctgcgccagttttcctggccgcctgtctaccacgccttgaccgggagcccgaccgtgccgagcacagcgccgccagccgcgagggcccgcgcacgcggccgtcttggccgctccgcacctgcgccaggctccatgcggagcgccaacagagggcgtcaccagggaggggcggatccgtccgcgccctccatgctagggccgctgcgtgctcggtcggggtcgcgacgagttggtttcgacattgctttggggacggacggcgccatcgttcccttccagccatgggatgtcgtctcggccgtgcccatgcaggtcccgaacctgcagcctccgttcgtgcgctcgatggagattagccatcgccggttacaaccagactgtcatgaccagagcaaaggtgttgataacgtgttggaaagttacgaaaacgagaccagagagaatgacagaatgaagtcactgttgtctttattgcagagagtacactgtttatatataagtacaaaacagtgtctcccaaggggtgtgtcccttgggaaagaactgacaagggttgatcacatcatggattatttaatccagattatataa

SEQ ID NO: 41626 - DNA, 531 bp, Zea mays
  Peptide Sequence Number=SeqID_85001
atgtcgctgccggtgctctacgtctccttcctccacgtcccgcccgccgcgctcgcccgcgacaccaccttctggttcctcatgtccaactccatcatcatcgtcatcgccgccgactccggcatgctcttcttccgctcctcctcctcctcctcgccggacgacgacggtgacggcgacggcggcctccacgcgccgccgccgaccaaggaccagcaggcttctttgtcgtcgcaggccctcgtccccgtagtcgtgcaggacaagagcgtggtgctcagcgaggagaagccgaggcggcagctccggcgcgccgcgactacgacgacgacggacaggcggccgccgccggagactactgccgacgagaaggagaagctggagagcgagtactcgaggctgtcggacgaggagctgaaccggcgcgtggaggagttcatcgccaggttcaaccgggagatgaggctacagctggaggaggaggaggatgaggaggagcaggcgagacgaagcggaagcgaaagcgactga

SEQ ID NO: 41627 - DNA, 270 bp, Zea mays
  Peptide Sequence Number=SeqID_85002
atggaagtgccgtcgcttcggggccccgagaacgccgttgcttgcccgcacaagggcactgtcgtcgctcgccctctagatcggggagccgctgccgccgacctgggaaccgccacctctactccggatcgaggaaccgccgccaccgcacgtcgaggtcggggagctgcggccaccgcagccactggccgggggtccaccgctgcgcgcgctatcgggcaaccgtcgtcgtcgcacgcgccgtcgctaatgaatctggatggggcgtga

SEQ ID NO: 41628 - DNA, 819 bp, Zea mays
  Peptide Sequence Number=SeqID_85003
atggtgaccgccggtttctgggtgggggagagcaagccgggctgcgatcttggtcccaccctcagcttcaaggatgttcatcatccccgctggggcgggagccacgctgagccggcgctctaccttccgcgcgggttcgcaggtcgccctttcccgcggcgttcgggggtggaggcgctcgctggccctgcggacggcgcggacttagacaacgtggggctgatcgacggcgggcgtcgttacctccagcgtgtcggagtcgtcggccgggcttccggcggcccctcctgccggagggtgaccgccgcatcaggccggcgccccactcgtccgggaggatttgagtggggatctgccggggggctggtgtcccctgccatcggcaccgaggcggaggcggctcgagaagtcctcgtcaccgacgggatcactgccaccacccgcgccccgggccaccgcaccggcgtgcttgtcctcgcccctcgagcgtcggcgggggcgagagcaagatcgcagcagcaccggcctaccgtcgctgtagtcaggatgggcggcggcgagccgaccgtcggtcttctgttgctccgcaggccttccccatggagtggggtcgttcgtacctgcggaggggggaaccggagttccgttcgtaatggcacttcgaatgccagtgctttttgttcattgtggctgtcggggcctgaacatgaatccctcggcccgttcggccttgttgtctggggttcctctagcttagttaaagagacccctcggctgcccttcggtggaccgaggccaggggtagcgatatcagtatga

SEQ ID NO: 41629 - DNA, 351 bp, Zea mays
  Peptide Sequence Number=SeqID_85004
atggggcgagggagattcaacctgggacaccaagagagggatgctgaggatctcatggccaccgacgccggagagctgtctagctattggggaggagctgccacgaccgaggagctgcgttgtggcaagggattccttgctcccagcagcttgggcagagataggacgctaacaagaccccagattgacagcgacggttgctgccaagttgacagacaccagatgagaatgaggattcaatactttattgggcaagcggttgagagctcctcacacagccagagaacaaccgtgtcgccatcgtcttcgtcgtcgtcgtctgctccagctgaagatcctctgcctgcctga

SEQ ID NO: 41630 - DNA, 342 bp, Zea mays
  Peptide Sequence Number=SeqID_85005
atgcggccgccagccaccgagcactcctcccttcaggatgcggccgccagtcgtcgagccgggtgcccgcgtgacgtgaccgcgttcacgcgacgcaagtggatcagcgattcatcgaggtcctgcacagtcgatgcagtgaatcctttccctgcatctcgatcggtaatacgactcgatagtgacgattatacttttccttggatccacaatttctattcagcaagccttagcttagtaacccctcttggatcaatcctagatccgtcactggatgtcatggactatggtgtgacgaccaatctctcagcggatgatgagtgcatgcaccagcaggattag

SEQ ID NO: 41631 - DNA, 2370 bp, Zea mays
  Peptide Sequence Number=SeqID_85006
atggacatccgccgcgggccgccgccgccgcgcaccgcgtcgggcggggtggagccgcggttccgccaggtgggattcgtcacggccgccgagcccgcgcggggggccgccacgccggcgcccgcgtcgcccgccgcgtccgacggcctctcccccgtcatgatcccgcccccgctcatccccgtccccgtccccgtccctgtcgcgcccgcttccgagtccctcgcgccttcttccccgcccccggactcctcgtctcgccccgacgccgtctccgaccttgacgacgacgacgacatcgacgtgtcctgggcgcgcccacccccgcccgccttcccagaaccaaacaagagacaccttactgaaagaaagaatgagcatgctcctccgactccagtttcgcagaaaccaaagctttctaaagcagagagacgtgccattcaggagtcccagcgtgctgccaaagccgctgccaaggaggcaggtttgaaatcaacagccatggcttctgatgctaacaccaagcaacccaaaacagcaaagatatctctgaagaaagatgtcaaccaagttaactctccagttgcttctgataagaagactggtgaacgaccgcctgacaaagatagaaaaaaagatgctcctcaaccccgcatgcaatttgacgatacacatcgggtggtgaaagcaaagaagcgttcagttgttagacaatcagaagctcaaaacagggtcgaactgttcagacatctgcctcaatatgcacatggcactcaactacctgaccttgagtcaaaattttttcaacctgatctgatgcatccttctgtgtacaaggttggacttcaatatttgtctggtgacatatctggtggcaatgctcgctgtatagcaatgcttcttgcattcagagaggcaataaatgattactccatgccttctgaaaaaattctgaatagagatcttactgctaaaatcagtagctatgtgtcatttctcatcgagtgcagaccactttcaatcagcatgggcaacgcaattagatttttgaagaacaggattaccaagctaccacttgcattttcagagtcagaagctaaagttagtcttcaatctgatattgatcgctttataaatgagaagataatagttgcggataaggtcattgttagtcatgctgtcacaaaaatcagagatggtgatgttctattgacatttgggtcagcctctgtcgttgaaatgatttttgataatgctcatgaacttggaaagaaatttcgtgttgtggtggtcgactctcgtccaaaccatgagggacaaggattgttgcgccgattagttgcaaagggtatcagttgcacatatacacacataaatgctgtatcttacatcatgcatgaggttacaagagtgtttttgggtgcctcttcagtactatcgaatggtactgtctactccagagttgggacagctttggttgcgatggttgcacatgcttttggagttcctgttctagtgtgttgtgaagcgtacaagtttcatgagagggttcaactcgattctatatgctttaatgaacttggtgacccagatgctatttcaagagttcctagggatgaaagtttgagcaatctcaaaaactgggctgagaatgaaaatcttcatcttctgaatcttaagtatgatatcaccccttccgattatgtttcaatgctcataacagattatggaatggccactgttgggcgtccatgccctggactggactggagcgtggcttggctgttggctcggcccggggcctctggccctcggctcacacttgctgctcaggcaggcagaggatcttcagctggagcagacgacgacgacgaagacgatggcgacacggttgttctctggctcgtcctatctctgcccaagctgctgggagcaaggactgccgccacggcagcagcgtcaccgtgtgttattaatctatactactctattaagttagtaaggtcagcgtccacactcccaatgcccccgcccgcgcgccccctcctatccacatgcgctgcctccgccctcgacgccccccgccatgatccccgcccccgtcctccactgctcccaggccgtgatcctcgccctcgaccaatgcgtgccccagccgtaacccccgcgcaatgcccatcgcacccgcctccccacaaccccggtggaaggagtgctgccacgcccccactcccccgcccccgttgcgaccgccgcggggacaacagcgtgattccctcacctcgcccaccgcctctccgtgacggcagcgcacctccacgactcctgctcctctccctaacgtcctccttttcgacgatccagtggtag

SEQ ID NO: 41632 - DNA, 537 bp, Zea mays
  Peptide Sequence Number=SeqID_85007
atggcggctgagtcgtctgcggcgaagtcgctgctctcgggaaccaagttaacagcgtacagctataattcaccggactgtccggttcttatgccatggaaattcaacgaatgttacacccttttcgtaatagatcatgttaaaaagcacgtgacttttatcgactttacaccgactgaagattggtataagcacatgccatacaagaggttcgcgaaagcgattatcatggtctcaaagaaatataagattgcctacagcaagaaatgttctggatgggcagaggatatttttaagtgggaacatacaattcagactggtattccaattgacttaagagggcttaataccagctacctcgttctaaaagctatgaccatgtgggggaatgacagacaaatggaatttattagggatgcaaagatacttcgaagtaactctgtgattgatctgttaagttatgaggacaatttgtgtcgatataccatcccttcaaacatacaacagcgacttattgatatcactaaaaaggactag

SEQ ID NO: 41633 - DNA, 1014 bp, Zea mays
  Peptide Sequence Number=SeqID_85008
atggaccggtggaccggcgtcgtctacgtcccactctccagaggcggacccctcttccgcgtcgctgcctcgctcctcctctcgccagccaaaacgctcgccgttccacgagtcaacgcgatccttttcacgggcgaccgcgtccgcggcacgggcgatccggtgatcgagcggctctctgacgccgcccacctggctggggtcctcgccgggaagctccctggggaggccaacgcgtgggtggtcgacgccgcgcgctttgctgggccgtttgcggtgtaccgagagctcgttccgaccgtcgacgccgctggagaccccaaggggtatgaccccactggcttccccgccgccgccggtgttgccaacatccttgcacgcagcattggtgagatacagaatcaagtcccggggttgtcggcgaaggattcggctggcaaccagcaccctccatcctaccatccaccggctaggactatcatccttggcttcagcaagggtggagtggtggtgaaccagctcgtgacggaactttctcggtggggggcatcaggatcaacgaaccaggcggcggcggccgacgttccacgaccagcagcagcaggtccaggtccaccaccccatccgacccagaacgaccttcttctcctgggggctcctactcggagcagcgacgacctgctgtcaagtatctccgagctccactacgtggacgccggcctcaaccgcgccggagcgtacgtggccgaccgcgcggtgatcgggaggatacgcgagcacgtcgtacgcgccggcgacaagagcctccgcttcgccctccacggtaccccgaggcagtggtgtgatccgagccgcccgtggatccgggaggagaaggacgcgatggtccaggtactcgcggacgaggcccggaggagcgaggggaggcttgtgctgtctgagaagctgtatttcgagggcagacctcgcagcctgctcatgcattttgaggtcttggaagcgatggatatataa

SEQ ID NO: 41634 - DNA, 987 bp, Zea mays
  Peptide Sequence Number=SeqID_85009
atggatttcagtggtgaactcgacgacttctccctgcagctcatcagcgaccagcttctcggcggcgaggcttgcctccccgtcgttccgaacgccgcggcgtacactgcgtcgtccgttcattatcatcatcccacgcaagcggcgttcttgcagcagccagcacagcaggttgcgtacgtcgacctgacgaacgagtacgccgcggatgccactgcctgcgactgcgaggcggccttccgggcggcggagccggtgatgattcgccggcggccgctgctgctcacggtctcccttcctcctccggcctcgcacgcctggggcccggcggccgccgtgccactgccactggaggccgcggcggcggccctggacgcgaacgacttccgcaagtaccgcggcgtgcggcagcggccgtggggcaagttcgcggcggagatccgcgaccccaagaggcgggggtcccgcgtgtggctcggcacctacgacaccgccgtcgacgccgcgcgcgcctacgaccgcgccgcgttccgcatgcgcggggccaaggccatcctcaacttccccaacgaggtgggctcccgcggcgcggacttcctcgcgccgccgccgccgcccgtcgcggccgcggccacgtcgtcgtcgtcccagaacaaacggaagctgcgcgacgccgaggccacagccggcggggccgccgagccagcagcagccagtaagtccgtcaaggcggctgaggcgtccggatcgccggcgccgccgtcgctgtcccccgcgacaacgacaacgacaacgaccaccacggcggcctcgacggtgacgacgtgctgctctccctcgtcggggtctgctgcagcagcacacgaggtgtttcccatgacgccgtcgagctggacgtgggagcagctggagggcgtgttcgggagcctgtcgccgctctcgacgacacacccgcagctcggcttcccagaggtcaccgttaattga

SEQ ID NO: 41635 - DNA, 527 bp, Zea mays
  Peptide Sequence Number=SeqID_85010
atgtccggtgaattacagcagagtgaattcccgaagctggcgagttcagagtcgcatctccttggagcaccggacactgtccgtcgcattggccgcaatggccccgatacgctcctgaaccgccgcctccatggccgcgacttgcgatacgacctggtcacccacatcgcggcggaaggcttcgatctcaccgtcttccaacttggcctgcaacactgcgatgttgtccgcatttgcactgaccaccttctccaggctactccagcggtggtcctgggactcaagccggtcacaaagctattggagcaacttggactgcgtcgccaaggtccgcgactgcgcgtcgagagacttggattgcgcttccaaggccgccgcgatacccggatctggagcacccgccatccaagcgcttctggtgaagtacggtggcgccgttcgcccaaaaccggtgtctccgataccaaatgtcagacgctcgtcttccccgcggcaacgatagccggcacagccaggaaaatacgaag

SEQ ID NO: 41636 - DNA, 501 bp, Zea mays
  Peptide Sequence Number=SeqID_85011
atgagcaagtgcatgagcacgaggaagcttgtgccagcagccaagaagatgtcagcggcggctagcactacaccttcatcatccacatctcattgtggtgttgtctctgtatctatagaaaagcaacttgatgttgtgatggaggaggggcaaggggagagctggaattggaggttatgttgtcggaatcagatgacaaggttcttggctgttccggctagcagtgtgtcatcaaaatccacttttagcactgggggtatgatccttgatgattacaggagttcattgaagccagcaatagttcaggatttgggagaaggtgatgatggtgacatcgagtccgtggaatttccaaagtgtgtggtggcaagtaattatgtagtcatgtttgtagaaaaacatggtgttgtccctgatttatgtgttgctgattttctgatgacttgtagaggcacatggtcacatactcacatggaggagatggaggagagggagagctag

SEQ ID NO: 41637 - DNA, 243 bp, Zea mays
  Peptide Sequence Number=SeqID_85012
atgaccttcgtgcccatccgggcgagggcgctgtcgaggaagacgatgaagatcgaacagtcaaacaaggcgagggcgctggacggttggagtgctggactgctggagtctcggctcgaacggagtgctggagtctcaggcacacgtcgcacccgcacaccggagcgacggcgcctgcagcctgctctgctccacgccgccacggaccgtggcagcgctagggtttccgttttggggagatag

SEQ ID NO: 41638 - DNA, 1086 bp, Zea mays
  Peptide Sequence Number=SeqID_85013
atggataaaatttgcatgagtgtgtacctgaagggatctcaaagccatggaatccaacaatttagtattaagtcgtcacaaatctgtgaaaccaagcctctgaccatctcttctggtctgttcaaaattttgtcatctggcaagtcgttgcacctgctgtcacttcgtgatattaagatgcagtcaccatttgctcggatgattattcacactcttctcgagtcgtcatgtgatttacacacacttgagatatcagaaaacaatattgctggctggctttcggaattgaacaaatgttctacaaacttattagcgctgaaatcagatatttttatgaactccctgtctgttcttaacctgagggaaaataatttgcaaaaggatgatgttgtagatcttcacaaaattctaataaaaatgcctaacttaagagatttagatataagtggcaatccagtcatggatgaaggtatcagatcattgatccctttcatttcatggtctattcaaaaggaaaatccacttctgagattaacagttgagaactgtgagttgtccagtattggtgtgattatacttctggagtgcctcacaaatgcgaagcaactccttgatgtgctatctattgcagacaatcatctagggagttctgtggcagctgcattggccagattcttgggttcacatgtacgggctttaaatgctacagatatcggcttgggaacagtaggcttccaaatacttgaggaaacattgccaacagaagtagctctttcccacatcaacatcagtaagaatcgtggtgggatcagagcagcatattttgtttccagattaatatgtcgagcaccagaccttgtctcagtcaatgcagcagggaaccttttaccacctgaatcattggaagtcatctgtaactccttgaagcaagggacttgtaatttggagcgagtggacctgactggcaacatgcatttatcaagcaatatttttcctgcattccttgaattcaagaagcatggaaagccaattctggtagtaccaccaaacttgagcacttctgctccatatgatgatgacccatga

SEQ ID NO: 41639 - DNA, 774 bp, Zea mays
  Peptide Sequence Number=SeqID_85014
atgcataagggagcaccgactccccttacttgcgtccccagccgtcgcgggctgagtcttctccaaaacgctccaaggtcctcctcctacggcgcgggggctgggtcccacacgtcatgcaagccggctcagagcagaagaagccaaaccgccgtgcgcggtgcgtacaaccgcctagcggttacaagcgaccctccacttttgcccagaccagcggggcgaaagggcgggcaggccatgcaggcggcatgcaaccgcgccaagttggcgcacttctccgactccaacacgcccggcatgggggcccaggcccacgcgtcatgcaaccggcgtgccgaatgcttcgtgcatgcaactgcactgccacttgcgccaccaccgcgcctcctcgactgtggaaccaataccgcgactcgaggcggcgcctctggcaggagaagcgggcgacgcttcgccttcgccataatgaccgcgtcaaaaaagggaccgggaaagggggataccccgaaaaggatccttccccgtgaaggaaccaggctccgagcctccctactgatcagaggttcgaaggctggccccccggaagggttcgacagccgcctcagatcgcgtgggccctacacccactactggtcagaggttcgaaggccggcccctcggaagggttccacggccgcctcaggctactcgggctccacgcccattactgatcaggggttcgaaggctggcccccgaagggttcacagccgcctcagacgccgagcgagggatga

SEQ ID NO: 41640 - DNA, 249 bp, Zea mays
  Peptide Sequence Number=SeqID_85015
atggagggggagagggctacggctgggaagtggtggctcggccacggcaagaacagggaaggggaggctggtcgccgaccttgggtgcggccagggaaaatggagttgctgctcggcgctatgtacaatagagagagggaggaatggcgccatgggaagctcgagctcggccaggggaaggaagaaaggggttcggcatccaagctgttggagcccaaggagagggtgctggccgccgtgcgcaagtga

SEQ ID NO: 41641 - DNA, 66 bp, Zea mays
  Peptide Sequence Number=SeqID_85016
atggctcgccgtggccactgggcggcgccgccgcgctctgttgaccaagtggatcggacggcctag

SEQ ID NO: 41642 - DNA, 339 bp, Zea mays
  Peptide Sequence Number=SeqID_85017
atggagggggagagggctacggctgggaagtggtggctcggccacggcaagaacagggaaggggaggctggtcgccgaccttgggtgcggccagggaaaatggagttgctgctcggcgctatgtacaatagagagagggaggaatggcgccatgggaagctcgagctcggccaggggaaggaagaaaggggttcggcatccaagctgttggagcccaaggagagggtgctggccgccgtgcgcaagggcagaggaggccggctggagcaccgggcagggcgctcggccatggagccgctgcatgggatttgctgctgcgccctgggagaaaaacagtag

SEQ ID NO: 41643 - DNA, 246 bp, Zea mays
  Peptide Sequence Number=SeqID_85018
atggggaagaaggggggcggctgctgcaaaaatgagggaaggagggggcgactgctgctgccccccacacgaggcggaaccatgacaaaagccccactacggaaccttcggactcggaatgaagctgtacacaatataaaaagcatggtcgggacgaaggttgaaccagttccgaagctacacgcaaggaagcttcggctcagcagcagaaaaaggaaccgacttaaagaggaaaaggctatctag

SEQ ID NO: 41644 - DNA, 339 bp, Zea mays
  Peptide Sequence Number=SeqID_85019
atggacggtgaggaagtcgcgtcggggacggactgcaccgtcatctcagcccaaggtcgggtgaggcggagacttctccagaggctgaggccgggttcgggcgaggacgtgattcctcctgaggatgtgctgaggccgagccctggggtcgggcgagaccgaggcctaaggtcgggcgaggcggagcttcctgtcacgcccaaggctgaactcggtcgttgtcagccttaccccggtgggtggcacagcagtcggagcggggcgagtgacgctgttttcctgtcagatcggtcagtgaaggggcgaagtgactgcggtcacttcgacctggccgactga

SEQ ID NO: 41645 - DNA, 852 bp, Zea mays
  Peptide Sequence Number=SeqID_85020
atggctagggatccactacgaggcctttacaaagttccactagcttccgaaaacccgctacagtttataggaagatccagtacagggttcctggctgacagccatcgcagcaaaatcaaccagggacctccccgcactgacctctcccctactgcccttgcccctttcggaaagcgcgagggctctggagcaaatgttactaagactcagaaaacccaccaggtggactgcgggttgatttccagagagatgagggtctctttagaaaaattgacccgcgaaggggattgcagccgcactcctcgccggagttggccatcaggcgattcgaggcttcccctacccatctacaacgagattcgcatcaagaagaaacattgggacacgctggacatgcttaccgacgttgaaggctacgaagggagctggccacggcaaatgacggctccgcggaggagagctcctgccggcgtgaaattcactgcgcgatggtcagcgccgccacgcacggcctcccccggcaggttcccctgctcccgaggtctaccctcggcatgcaccggagaccaaccgttggcgaatcgaagcttccccccccccgcagaggaccctctcctctctctcccgttgcacggtgacagcgaagtggccccgttttcctgccgtatcgctcggatgatggtaaaggagagttgcctcccatctttatcacccaagagaaatccgctggtgctatggtcgagccggaatttcaggatcggatcgaagcctgttgaggttgttgcgagacttgcgcgtcaacagggtcgctggcctcccttgattcggcttgaggaagaccctggcaagtag

SEQ ID NO: 41646 - DNA, 375 bp, Zea mays
  Peptide Sequence Number=SeqID_85021
atggcgaccataggaagagctgcgacgaccaaggttcgcgatggtagaggtggttgtggctgggagcccaccaggatggctgtcatcacagccacgtcgacctgcaacgcaaacatgctgaactacatggtgttcatgctggactgcatggtgttcacccaggcttgcatggctcccaagttgttggagaagtggacgagggacatcgttatctcctcgttggtcatcgtggggagggtgatggacatgccggaggtgggcggactggatgcgttggtggaggcgagtggcagggattgtgactgggaggaggaggatggcagggaggctggtggggctagtggtggggaactcacggtggccgaaggatcatag

SEQ ID NO: 41647 - DNA, 192 bp, Zea mays
  Peptide Sequence Number=SeqID_85022
atgtcaaatgtcaagggcccggtctcaactttttccagggggtgccttaggtggtatgccacatttttggtatacaacataggtggttttggtgtcatctacaaggtatcttcggaatcgggttatgagtatacaagagtatggtcaggacgaagcctgagcgagacgaaaggcgattatgacgaaggataa

SEQ ID NO: 41648 - DNA, 768 bp, Zea mays
  Peptide Sequence Number=SeqID_85023
atggggcgcatccgtgttgcctttgtcttgctgctccgcgtgtgccggcgacccgcttcttcccccgcatggctggaggacgcctcctccgcacagctggaggatgcccctctcccccgaatcgcgctgttggtgcagcggtcgccgaaccttcggccgctctgcgatgagctgaagtcggaggcagcggtgtcggcgtggacagaggcttcgtcggctcgaaaagaggcttcgtcggcccgggagcacgtggcttccctggccgaggaggtgcgacagcggcggctggagcttggccaagtcatccgccagcgggaccgaccccggagtcatgctaccaaggccgtgagccgggctgaggtcctcgggggacagctggctgagactacggagcagccagccgaggcgttcgctcgggccggaacccttgcggagaacctgaccatgagggcccaatcgcggtgttggcgtcctccttcggggtggagatccctcggctcgtgtcgccgtccgaggctgggccaggttccgccgagggtagaaacgtcaccaagggacctgtttggtagcagaatccctcttccgagcgtgagttacttttcgtggaaggtgatgagtgaggaccccgctatcgaagcagtcgaaacggtacgaaagacgttctggcaaaagactttttcgaggaaaaatttgacgcagagggggttcccccttctagcccccaagggagggtcgggctttgccgaggcaaggctgatccttccttga

SEQ ID NO: 41649 - DNA, 414 bp, Zea mays
  Peptide Sequence Number=SeqID_85024
atggccgaggcttgggctacgctcccgaggtaccctaggacatttccgagaccagcaggagcgatttttgtaacggaatcccaccagagggaggcatcgagccctaggaccctatcgaatgggaccgggtccggcaaatcacctgcagcacaaactgcaaagactgatgggcacgattcaagacaagacctcgtctaccaagggacgcaatctcgcctcgcccgagcctggcctcgggcgggaacagtagtcccggacgaattcacgccttgcccgagggcttcctcaggcagcgggcgtaccctcggctcgcccgaagcccagctcgggcaggcttcgtccagaagcaactttggccaactcgccttaccaaccgaccatatcgcaggcgcattcaatgcgaagatcacctga

SEQ ID NO: 41650 - DNA, 837 bp, Zea mays
  Peptide Sequence Number=SeqID_85025
atgctgcttgaggaggcagttcaacaggggttgttgctcaaaggctgccatcaaggccgcggtcggctgcgccctgctcgtgacctccgctcccaggacatcgtgccatatgacgtgccgtgcgccacactggaaggcgaccgtcatggtcaccaggtcccaagtgatggggcccaaagttcaaaggaaattgacactgatgataaaattgaagtagcccaagtcgatgctgacacaagtgatgtcatactcgtcaccggcaatggagatgggcacgtagcgagcaatcctagcgcaacaaaggcgatcaacattggccaccgtgaaccagagttgctcaccaccaaaaggtgccaaactgagacgagtcatcgcagccccttgcaggaaattgtgggtggagccggtgtcgagcagggccaagaagcacgtctccttgagcatcatgggcatgaccatcatgttgtccatccgaatgcccacaagtgcatggatggagaccaccaacgtgcttaccacagcggcgtcctatggcgactagtctacatttgtggtgtcatttgccatggcgtcctccgcgacttcgtctgcagactcgaagtcacccgactccaagtagaagagctgcatgcactgatggccacagacgaatggctcatcgtagttgaagcacaacccttggtagtggcgctcctactgctctgtcggagtgaggcgacggaaatgttagatcggcggcagggcagccatgaccggctatgtagtgcctccaagtgcgaccgtgggctagagaggcaacgagcacggttgctgctatgccagtcactgggggcttga

SEQ ID NO: 41651 - DNA, 525 bp, Zea mays
  Peptide Sequence Number=SeqID_85026
atgagctcgcggggtcccgacctggctgcgcccggggaggagcaggagacggcggaggagatgctggagcacgtccggggcatggtgccggcagcggtgacgcgggcggcgggcaggttcccaagccggtggaaggcaatcaccgtgaaactggacgcgctgccggcgtgcctgtccgacctgtccagccacccttgcttcgccaggaactcgctgtgccgagagctgctacagtgggtggccgccacgctggccgactcggccgagctcgcggcgcggtgctgggagccgccgacggacgagaagttgatggcgcagagcgccgtcgacgcgctctccaggaggctcgacctcggccttcgggactacgcgctgctcatcaagaccggcatcatgtcggacgccgccagtctgtcaccgccgccggaggaggcgccgtcgtgtcagaggagagtggacgccgccatcgcggccgcgaagaacgaggggagtcgaggtacggacgacgtcgtatgttgggggtga

SEQ ID NO: 41652 - DNA, 528 bp, Zea mays
  Peptide Sequence Number=SeqID_85027
atgctctcacagtcgttggatctgaggtcaagggcatggattttaaaccacccagaccacttgaaatccatccgatcgaagttctacggctcagatctaccgcacgaagaggaggccctagtgacacgctatgaccatcctatatgcctgaagcgacgacagggcctagacacccatgcggtggcgcgcgatgtccagccagcggtggtgatggctaggaatacggtgaccggtagtgttcattgtgttggggagggaaagggggcattttatagcggtgatagaaaggagcgcgagcacgcgactgagggtttggacagtggggtccatgtgtcagtggccgcgccaggaagggaaagtggctacgcaatgggtagggaggctagagtgtgggctcaacttggcagtgaccggcgcggaggtgggaggtcttacaaatcctacccccttaatagaaatctcgtccccgagatttgtaagaaaaatgacatagaaggattagtttgtaattcagcttttaatctataa

SEQ ID NO: 41653 - DNA, 543 bp, Zea mays
  Peptide Sequence Number=SeqID_85028
atgatgcttgtatataggactgatggaattcttggagcaaaggaccagcgcacggtcacctccaaagcaagacccaggctgcttctacaaggagatgtacaaagctatgtgcagcgggtgccagataagctgcagatatggcacctcatatcatgttctcgcaataatatgttgtacataaatagtattttttaccgtcagaagcgaatggaggaggttgttcatgctttggctaccggccaagcttcaaccgatgccatgacgaagcagcctgtgaaggtgtacaaatgggacatggatgggacacttattttgctcaagtcacttctggttggctcatatgctagggattttgaaggcctcaaggattgtgagaaaagtactcaaacaaggaagcgatgggagaacctcattttagaactctgtgatgagcacttcttttatgaggagcggagtgccggtccaagagagattcaccaagccttttcagtcatgccaggagcatcatgtacgccctcaaggagaagaagattgacatggtga

SEQ ID NO: 41654 - DNA, 192 bp, Zea mays
  Peptide Sequence Number=SeqID_85029
atggggaaaggggagaggggatgggggagggaggagagggggaggggggagctcaccggggaggggcgcgacggcgaggggcggtcggcggcaggtgcggccgagggcggcggttgggcagggggcggcggcggcttagggcagggcctcctagggtttcagacgaagcagaactgctcagatttgtatctc

SEQ ID NO: 41655 - DNA, 285 bp, Zea mays
  Peptide Sequence Number=SeqID_85030
atggccggctcggccgccccgcccccctgcctcgcccggctcggccgccccacggccggctcggccgccccctgcgccgccccctgccccgccggttcggccgcccctgcgctccgccggttcggccgccccgccctcgccagcccggccgcccgcagccccgcccgcgccccgcctagggccggtggttatgagattgatggttctggttatgcttatggtgctggcgaagatgaagctgtggaaggagacttccaggagttccaagattacgacgagttctag

SEQ ID NO: 41656 - DNA, 822 bp, Zea mays
  Peptide Sequence Number=SeqID_85031
atgcctttagaaattaggcccgtaacacaaaggcggccacgcagggcccgttacaatgggccagatcacacgtgggcctcagagctggacaaggccgcgccgcgggatgacgtcgcagcaggccttcgtctggtgccgaatggagcgaagggtgtccctgcccattttgtctctgtcagaccagcgactgcagcgaaggcctcgagcgaagggtggcgtctttgccttcgccccaacaataagatcatattgttaactagaacatggagaaccacccgggaaaacaatgctaccacaagggtggaatgggacgcccttggccaagtagttaggaaagctagggagcgattaccttacccaggttggggcaagtggggaggcgtcgctgcagagtatagggaggtcctcatgtcgaactgtctgcaaagcttttcggatgagggattcctatgcttccttattcctgaatccatagcgggttttctcgaactagtggaactttggaaaggcctcgtagcctgtaacacgcagcggcaacgcagggcccgttacaatgggtcggatcgtacgtgggcctccgagctgggcgaggccgcacggtgggatgacctcgtcgcaggccttcgtctgatgtcgtatcgagcgaagggtgtccctgctcgttttgtctccgtcggaccaacgactgcagcaaaggcctcgagcgaagggtggcgtctttgccttcgccccaacatagtgctaccctgtctcgcttccttggtagaggtgtatggggtcagtacaaccctgtggaagatgggtaacacgacttatgggtaa

SEQ ID NO: 41657 - DNA, 351 bp, Zea mays
  Peptide Sequence Number=SeqID_85032
atggacatagaaggtttggggaattacccaacgatttctaattcattttgggatcggattcaggagtcctactctaaccaatatgaagattggaggcttaaaaatttatctaatataattaggaaaaaaacacagttgaagaaatcgtccactagtacacagaagctctatagtggcggttctaaacctatttacactggcgtttttcagtaccgccagtgctacgggccagtggaaatcagcatttccaccggcggttattttggaaccgccagtgaaaagtgcattttcactggcggttttcttaaggaaaccgcctgtgaaaagtgcattccactggcggctgaataa

SEQ ID NO: 41658 - DNA, 1578 bp, Zea mays
  Peptide Sequence Number=SeqID_85033
atgacgcgcgggccccacatggaagtgtctcaaaagaaaaggaaaaggaaggtgttacaggcctccggcggaggcaagccgccgctggcagcgaagtcgggcgcctctgcacctagcaaggcgccggaggcaacggcgggcgccggaggctccaaatcatcgaaggtggtgccgccgaccagcggagtggcggaggcttcgaaggcgacccgagcgttgccgttgtcgggcaaacgtgttgccgacttcggcaccgatattactgtggacgactatcttggcgggtcggacgagggccagcttgctatagttgcgcctggcgcggcgatcgcgacggctgccatagtgccgaaagcgaggggcgaggctcttggcaccggaggcgaggtgtcagccctcgcggtggtcagggacgaggcgggcgcagcgacccgccggctgaagggagtgacggaggcgctgagtcaggtggctgacttcgccaaccgtactgcgtcgggggccctcacggcagctgtgtctgccgaagtcgagagacttcggacgcaacatgctgacgctgtccgtgagaaatcggcctccgacagcaagtgcagtaagctgacggacaaggtggccgccctggagagggagaaggctgaccttcggcgccaactggcggcgaagaggagggaggccaacgaggacatcgccaaggagcaggctgcgcaggcggaagccaaactggcgcgggaggagggcaatcttgccaaggagctcgccgaacatctgcaggagcggctcaccgccctagagaaccgcacgaagggggccgaggccgcgatgcgtgcggaggctgaacggacgcgcgcgcagcttatggatacatatcgtgagctgggtgcgcggaccggtgacttcgaggtgccggaccgagagcccgggcttcgttgtctacaatgggtgcaggaggagctgcaggaactccccactgtcgtgggggggtttatgtcgtacgcctccctggtcacctgcgagggggcgatgaacgcactctcccgcgaagggtgccggcacttcgaggtcttcgaccaggcagatgaagattttgagcgggatgtctacaaggtcgaagaccccgtcgtgaaggaatccgccggggccctctatgaccggatgtggggtccgcacggtcggaaggtggtcagggagcgggccgagactgcgagggctcaggccacgcgtggcgagcgggtggacgacttcggggcgctgaacagcgcgctgcctgacccgaagtcgacccctgcggaggccgcgtctggggtcgccctggagccaaccccggagaccgcggcgatcgtgacggctgcccccacatctgctgcgaccggcgaagacctgcccccaaaggtggccgaaggcgcccctgatgcccccgcggctgctgcgtcgagtgctgaagatcccgcggcggaggcggcggaaacgacggcggaagcggcggcggaggcaacgacggagctcccgcagcgtcagggccttcgcaggtggcgtagttcaagattttgggcctgcgcacgcaaccgctaccactga

SEQ ID NO: 41659 - DNA, 240 bp, Zea mays
  Peptide Sequence Number=SeqID_85034
atggacttcatcggcttccacgccaccccgacgctcgtgatccaggcaacccgcctcgccgaggacctgttcgagcgtgccagcaacggcagcggcaagtgcctgacgtcgcgagtgacgcatgcggcgctgcccgtgttccggagggggagacgaccgaggggggtctgggggcgacgcggggagggcacccgctgtgaattactaatagtaacgctaactactgtcgacaatgagtaa

SEQ ID NO: 41660 - DNA, 315 bp, Zea mays
  Peptide Sequence Number=SeqID_85035
atggcagaccttgcgcggatctcgggtcgttgcaacaccctcaccgcatccgtctcagtcattctgtatcccccgggtataagtacttcggctaccacaatccccctcgtcatcagcagtccgagcttggaatctgcctttgacgagcgaaaaacgaagccgttgcgccttcaactcgtcgccaacaccggcggtgatctggaattgggttggggagcgggagcatggaactccggggtgctccccgtcgggtgctcgggccgcggcgccgtcctgggatgccaggggcagatgagctcgcgaccgttgatttga

SEQ ID NO: 41661 - DNA, 885 bp, Zea mays
  Peptide Sequence Number=SeqID_85036
atgaacgcgctctctcacgaagggtgtcggcactttgaggtcttcgaccaagctgatgaagattttgagcgagatatctacaaggttgaggaccccatagtgaaggaatccgccggagccatctacgaccggatgtggggtccgcacggtcgcgaggtggtcagggagcgggccgagacggcgagggctcaggcggcgcgtggcgagagggtggacgacttcggggcgttgaacagcgcgctgcctgacccggagccgatcccggcgaaggccgtgtccggggccgctctggagccgcccccggagattgcggaaggcgctccggatgccctcgcagctgctgcggccggcggagacccgcccccagagaccgccgaaggtgcgcctgatgcccccgcagccgctgcgccgagggctgaagatcctgcgacggtggcggcggaggcgacaacggaggcgacggtggaggctcccgcgacggctgggtcttcgcaggttcaagattttgggcctgcgcacgcaaccgccactactaattttttggcggcttcgaccgtggatggtggtaataaatatgatgggtctgcatctgagttttctgattttgctgactctgggagctcggttgagtggactgaggagtcgtcggaggaggacttggactactttgcggccttggatgtggcagcggcggaggcttcaccgcacgccgcggacgcggaagatgtgcctggtccgagtatcgggcgccggcggcgaagggcggttgcgaagcgtagagcttgtatgataaggttttgtgcccccgcacacatggctatgcttgcgaaggcgttatgtacttggtctggtgtattttgttatgttgtgctggtgcacatatag

SEQ ID NO: 41662 - DNA, 222 bp, Zea mays
  Peptide Sequence Number=SeqID_85037
atgtatggtttacaggtggtgatgaggaggatggttatgattatgcttatggtaatggttgcctttggtgcaatctatgctcaggtaaagaagaaggcgtcaaggatgacaaagccgaagaacacagagtcgaagcttagcaggcaatccgaagctcaacagatgatgatgaagctcgaatacctagctgtgggaaaaattctaagaaaacttttgtattaa

SEQ ID NO: 41663 - DNA, 240 bp, Zea mays
  Peptide Sequence Number=SeqID_85038
atgaagctgtggaaggagacttccaggagttccaagactacgacgagttctaggtgtgggttagcggcaacccccagtcggctgcctgtgaaggccgcgtttatctacgtttcttttctgcactttgatttattttcaggcgggatcattggttctatggggatgttatgtgattctacccaagatgcagaaacaaaagaatgtgtggcaccagtatcaaatagtacttttgatgggtag

SEQ ID NO: 41664 - DNA, 705 bp, Zea mays
  Peptide Sequence Number=SeqID_85039
atgccccctgcaccacctcagggcatcccggctgctggaggagaccctgacggagacggagatgacgatgcttgtggcaattcgagccacggcatggagcactcggaggagccagagccggagggatggatcgctagacccatcactcatgacgctgctcgcgggtgtcacttccacgacgctctcgataccctattgcgtcgggccttcgaccgacacacctggtctatcaagtactgttgtgtagtctaccagcatcgtcgcgggttatacccggaccagtgggaggatacttgcttggtgcgccttctggatgatgatctccggggtgcagaggccttctcagaacactattctatcactgagagggacactgtcgaggcaaccatgcaggatgcagcacgacaggcactttctcagtattactcgttgttcagcggtgtagctgatggccttgacctaaagctgagcagcatggtcaacctggtcgccgtgctcaacatagagttggaccacgcccttgacgagttgggcaaggttcaggcagaggttgcggaattgcgtgctgaatgcgcggcacgccactatattgttggtggttctcccgcccctatagggattcagcacccttactgttcaccgccccatggtcgcttcgattatggtaccccagactgtaggacccgcatagatttcgatccatag

SEQ ID NO: 41665 - DNA, 462 bp, Zea mays
  Peptide Sequence Number=SeqID_85040
atggggccctctgcccagtctctctcacccgcgctcgctcctccctccctctctctggtccgcggggtccgcatgtcgggctcgtcttcaacagctcgctgcaacaaacgcgcgcggactccgaagctcgccggtgatgtggttactttcgttctactatttaattgggttggtatttacttatacttagtaactgctaataaaattttgaccaactttaaaagcaatgctcagctcaacccatcttctttgcatacactagttgaacttgcctccgggccagttgtactgggggttttctctcctaaactttctggtcaagaccagttgaactggtctgcagggtcagttcaaccggtctctgactcctcagctctgactgtgcagcagtctgccattcagactggcagacaggctgacaggtctgatcaggggcggttcaaccggtctctgacagtctga

SEQ ID NO: 41666 - DNA, 153 bp, Zea mays
  Peptide Sequence Number=SeqID_85041
atggggagtcatgatccccgggcaaaacgggaatcacggctcatgggtggtgatgaggaggatggttatgattatgcttatggtaatggtaaagaagaaggcgtcgaggcggatctccaggagttccaggacttcgacgagttcgaggattag

SEQ ID NO: 41667 - DNA, 282 bp, Zea mays
  Peptide Sequence Number=SeqID_85042
atgaacggcgactccgacgaggcgagctctgacatgaagaagaggacacgccacagcaaggagaaggtggagctgggcgaccgggccggctcaaccgagcctcggccatggcaaatggtcgtcacgccgaggacaacgaggggagagggagaggggatggagagagaaagggaaggggagttggatggagggtgttacaggttcaggttgtctctggcatacactctcgcgggagcaattttggtccgtagggttgtaaacggatggactagattaggttag

SEQ ID NO: 41668 - DNA, 261 bp, Zea mays
  Peptide Sequence Number=SeqID_85043
atggaagaggcagtagaatcggcgcggcggctgcgcacgcccccaacccctaccgcgagttccatctccgcggccctgggggggggagtctccttttccagctgcttgcagagcgagagttcggccaaggcgtcggtgtccgggcggtacccttggaagttgagcaggaacttgtcccggaggcttctccaggaatcttgctctcagttgcaaggggatccaacaagggtgaacaaaggcgttaacaggattctcacgtag

SEQ ID NO: 41669 - DNA, 189 bp, Zea mays
  Peptide Sequence Number=SeqID_85044
atggcagtcggggtcagtgaggcattgtactccaaggcggtgagccctgatccgctgacggggaatcaatggggacggttgatgtctttggaggacatggttgctggagtgacttggccgtccatcttgccaccgggttggactgtcgagtgggaccctgcctcggccgaggaggagcatgaggagtga

SEQ ID NO: 41670 - DNA, 513 bp, Zea mays
  Peptide Sequence Number=SeqID_85045
atggcccgcgccagcgcctataaagcccccagggaccttgaccgtacccctccgcacgcgctcaacctcaccggagcccaaacccaccagcgtttgcccgtgcacggcgtgtccgcggccgcccaatccccctgccaccgtagaccggccaaccggacccttcccaaccccgtccagccctcggagaagactgagcacacctcggtgaagctccccgagcgaggaatcgcagtttgcttcgccggagaggccagtccacggtcgccggactccacccgaccgccggcgagcgtagaccggcctctacgtcaccccgtgaagctccctgtgccattggatttaactaggtcactgtggtttggccagagaacccgccgccgacgagagcacccgcctgcgcacgtggaccggacgattccggccacccccgccgtcaagccgtacaccgttgtgaccgccaggacctcccggagccaactccgcccctcgccggacctctctcaccgtcggtaa

SEQ ID NO: 41671 - DNA, 408 bp, Zea mays
  Peptide Sequence Number=SeqID_85046
atgggcagggccgagctcggaacagaggccgagaagggagagaggaggcaggcacggtggctaggagatctagggcgcggcgagcagagggcttcgcacgctgccaacaaacagcttgcgcgcagggacttcacggcgctcggcgtggcgaggacacacgcgcaggggcgcagcacagggagccgggagccgagcaggaacgcggccaggaagaggcggtcgagctggaagaagagggctggaagccgaccatggaagaaatccgagcagggagggaaggatgtgcgagcagagcagggcgccgtgggagagaagccgtggcaccggagcttgccagagaggggtgcggttgagcaagaagcagggtggaagacgccagggagggaggaggagtggttgtgcgcttag

SEQ ID NO: 41672 - DNA, 246 bp, Zea mays
  Peptide Sequence Number=SeqID_85047
atgcttacagaaattgacatcgagccaactgggttttggtgggtcgacaccagggcaatccctgtggtgtcgagcttgcgttctgtccaagctaagaccgtaaagatcaaacggacccctagccgaggtgttgtcgaggtggtcaccggacacacgcggcggtttgatcagtggaacacggcatgtctagagtatggtttgggggatgcagtactgctaattgaagctgctcactatggtagctag

SEQ ID NO: 41673 - DNA, 2955 bp, Zea mays
  Peptide Sequence Number=SeqID_85048
atggcgggcgggggcagggatgggccggcggcgcgtcttctccggcgcgtccccgccgccgtgtccgtcctcttgatgctgacgctgtgctcccccgggccgcccggcgcggtggtggtggtgtcggcccggaaggtgggcgagacgtgcgcgctggaccggaactgcgacgccgggctgcactgcgagacgtgtgtggccgacggcaacgtgcggccgcgctgcacccgcgtcgctcccgtcgacccacaaaccaaggcgcgggatctgccgttcaaccgctacgcgtggctgacgacgcacaactcgttcgcgcggctcgggcagcggtcgcagaccggggtcgccatagccacgccgtggaaccagcaggacaccgtcaccgagcagctcaacgacgtgcagttaaggcgtacggcacggtgtcggctggttccttcggctccgtcgaatcctggagctgaatttgccagctcctcctgcttccacgctggtaggcgtgggcgtggggtgccgccgagcgggcgcgacgcgacagccaacagcgaagctcacaccacacgccgggcttgctgctgcggctgcgtttgcttgaagcgtgatcgcggcacacatggcactgcactacggtcaatgtctcatactctcatctcattgcttcgccatgatgtcacctcgacaaagacggattggggggctggggagggtgctacctcgccttcaaacatcgcgcttcttctgaacggcgtgaggggtctgatgctggacatgtacgacttccgcaacgacgtctggctctgccactcctacggcggcatctgccagaacttcaccgcgtttcaaccggcggtgaacgtgctccgcgaggtggagcgcttcctgtcgcggaaccccgccgaggtggtgaccatcttcgtggaggactacgtggagtcgcccatggggctcacccgggtgctcaacgcgtcgggcctcgcgcgctacgtgctccccgcctggcgcatgcccaagagcggcggcgactggccgctgctcagcgacatggtccgcgacaaccaccgcctgctcgtcttcacctccaaggccgctaaggaggccgccgagggcgtcgcctacgagtggcgctacgtcgtcgagaaccagtacgggaccaaggggatggtgaaggggacgtgccacaaccgcgccgagtcggccgccatgaacgacctgtcgaggtcgctggtgctcgtcaactacttcagggacctcccgaacctgccggcggcgtgcaaggacaactcggcgcagctgctggacatggtcaccgcctgccacgacaagtccggggaccggtggcccaacttcatcgccgtggacttctacaagaggagcgaccggggcggcgcggcggaggccacggacaaggcgaacggcggcctagtctgcggctgcgggagcatatcggcctgcaacgccaacgggacatgcactccccggcacggcaggacgcccagaggcatcttcaacgcctcatctgacgcagcggcgtggaggccgccgccgccggtgctgcaatggcagaggctcatcctgctgccttctctccttgctcttcttctgggcctgaaggccgcaagaagcggcgtacggacagagcagcccgtgcagcggcagcggctgcagcagccgctgcgcaggccgagcttggagatcagccgcagactccgtcagatcagatcgcctaccgtgttcgtcgtgtcacctcccggcctcgctcctccactcacacctccgcttccactccgccacccactctgcctgctcccgtcactcctattgccccatccacctccacagccatacccgctacctccactacgccagcttccactgttcctcctcctcccgctcccgcctcagctcctcctgtccctccacctcgattccgggagcgcgatgagactgaggttcgacccctggctacggatcctcgactgtttgaccttcagcgtgctacagcggcacggagctcagatatctgctcagatagctctgcgagtgcaccggcttttggatcttccagcctttctgcttgcagccggtgctgactctgaggcgcacctcacttatctgcctggccttcagacccttctaactaccagcggcagtcgacgactcgtcttcacagtctctgctacgacacttctgaccctcctcgtcgccctcacggcggtgtggctccgggccgaggatgcagctcttcgacagtttgacactcagggtacaacagctgatgatgatgatgatgatgatgatgattttggggttcctcctccgcctcctatgcctccacgctcacatgatcatgaggctgggagttctagtgctgcccctcctcctcctcaggctatggaccctgctcttgcttcgattctggcccacctagcggccgagcaggcccggttatccgagaggatgctctcgatgtttcagaacatgcaggataggcaggatgcacttcagcagcagctactgcaggattgggctgagagtagggcattcatggctcttatgcttcaacattctggtatctcagtacctctggttcagtctgctccacctcctccgcttcacgctccagtggtgccatcgattttgtcaggaccccctgttggtacctctccactccggccagtcactttggtgttcacctctctggttctcagctctgtctgcccgcagccgccagtgccaccagtatctgctgttaccactaccgctgtggcagtatctgtgaccgcttctgctccggtagctcctgcagcacggcctcagtccgagtcagtaccagctccagcttctaccgcagatcctggatccgagactgactctgaccctccgccggcgttcgctctgctgcctcgaccgcgaccggatgtgcccccgccgcctcctcctgcttcagatgtttag

SEQ ID NO: 41674 - DNA, 276 bp, Zea mays
  Peptide Sequence Number=SeqID_85049
atggcgcggccgcggccctggcgggcagacgacgcgcggcccctgggcgggaacaccacgatgcgcgcgtcaacagcgacgctggatctggtggcgaggcgctgcctcggcgcggtcttgctggtggcgttggcggcgcgcgggcgcgccggccagacacggacccgcttttctgaaaatctggctgtggggagaatctggttgtgggaagaatctgagtatcattacgattacgtgtggaggaagataaagttgtccataatgctcaggatctaa

SEQ ID NO: 41675 - DNA, 216 bp, Zea mays
  Peptide Sequence Number=SeqID_85050
atggcggcggtggccgacggcgacgctcacgctcccgcgccccacgcccgtgcgcacccctccccgggagcggtggccgcgcccctcgcgccccgtgcggccgcgcccacctccggccggcccaacctcgtcctcccctgcgcagccccctccccttcctctcctctctattccatggatgagaggaagaagacgatggcagtctctggctactag

SEQ ID NO: 41676 - DNA, 1275 bp, Zea mays
  Peptide Sequence Number=SeqID_85051
atggtgaccaccagttcgatggtagggagaagcaagccgggctacagcctcttccccgccctcagcttcaaggatcttcatcatccttgctggggaggggggcggggcgagccggggttctacctcccgcatgggccggcaggccgcctcttccttcggcatttaggggagagggcgctcaccggtcttgcggagggggcgaacttcgacaacgcggggccggtcgaccgcaagcgtcgtcagctccagcatgcctggctcgttggctcagctggctctatcgcggcccccgacgctgcctcctgccgcttgatccgggcgtggccgtccgcccatcgtacgggcggctgttgcgccgtgcgcaccaggggaccgtccaagacgtcgcacaccgctagggcggcgttcatgttcttggatagtcttgtcctcactccggctggggcggccgccattcgttggcgtagcaccggcgcgcaggtggccgctgtcgtcggtgttgaggtagtggtcgccagaggaggtttctccgccgacgagaccgttggcgccacccgtggacagacctctggctctttggctttgatagcttgtcctcgcccctcgagtggggacgtgggcgagggccttgtcacagcagcgtctgccctgaggtcatcgctgctgctgtttagccgcccggagcggaggtcgttgtcgctgctggtgcagtggtcggcggcgagccacttggagtttgttgtcccgcaggccctctggtgtggaggtagttcatacccgcgggagtggaaccggagttccgtttgtaatggcaccttgagtaccgataaccttcagccgctctgcgatgagctggagccggaggcagcggtgtcggtgtggacaaaggcttcgtcggctcgagaagaggcttcgtcggcctgggagcacgtggcttccctggtcgaggagaacccttgcggagaccctggctgcgatggcccaagcgcggtgctggcgtcctccttcgaggtggagatccttctgcctgtgtcgccgtccgaggccaggccagattccaccgaaggtggaaacaacgccgagggtgctgctgctccctctgtcgatgacttgttcgtcgatagcagaatcgcttatccgagcgagagttacttttcgcagaaggtgatgagtgaggatcccgctaccgaagcagtcgaaaagcgcgaaagacgttctagcagaaagactttttccgaggaaaattttgacgcagagggggttccccccttctag

SEQ ID NO: 41677 - DNA, 1188 bp, Zea mays
  Peptide Sequence Number=SeqID_85052
atgcagtcagtggcagtgtgggtgaggggggagaaaacgaagtccgtccggctcttcggggaggaaggcaggaatgggatgccaggctgcccacccgacgccaacccgattccctcgctctcctttgctcgccggcgctttttcgctttgcgcgtgccgggcgcagccgcgcaggcggcaggccctcccttttcatctagactacaggagtggtcgtggtcgtggactcatggttgggttgggctcacgggcgcgcagtgggatagagggatacgcgccctgccgcctgtgggtaaatgggtctcgcacgtggcgtggaccggcccatacatacagatacctacagtgccagcagcagacgcgcgcggcgccgcgctcgaggattcggccatcgcccagccgtcgcgacgccgctggggcatctcgtgtctcgtcaagggctcgagagccgctgacccgacggccctctcgggcgacggcctactgctacttagggggttacaagcgtcctcgtgggagggagcgagaggcctatacgcgccgtctcgtcctccccgcgcgaccaaccctctgtacgagtgccctgggccttccttttataggcgtaaggagagggcccagggtaatgatggcccctcctgtgacgtggtcggtccgagccctcggtcgggcgaggcggaggctcctccgaggtcgaggtcgagtctgtcttccgaggtcgaggtcgagtccgagcccctgggtcgggcgaggcggagaccgtcggctgaggccagggctgagtccgagccctggggtcgggcgaggcgaagttcgtcgtcttccggggccgaggccgagtccgagccctggggtcgggcgaggcggagttcgtcgtcttccggggccgaggccgaggccgagccctggggtcgggcgaggcggagttcgtcatcttccggggccgaggccgagtccgagccctggggtcgggcggagttcgtcgtcttccagggccgaggccgaggccgagccctggggtcgggcgaggcggagcttcctatggcgcccgatgccggacttggctgctgtcagcctcactctgtcgagcggcacagcagtcggagcgacgcaggcggcgttgtcctcttgtcaggtcggtcagtggagcggcgaagtgactgcggtcacttcggctctgtcgactga

SEQ ID NO: 41678 - DNA, 1227 bp, Zea mays
  Peptide Sequence Number=SeqID_85053
atgcagtcggcatgcaaccgcgccaagtgggcgcacccctttgactccaacgcgcccagcatggaggcccaggcccacacgtcatgcaaccgacgcgccggttgctacgtgcgagcaactgcaccgcccctcgcgccactaccgcgcctcctcgactgcggaaccagtaccgcgactcgaggcaaccctgcgtatgacccaacagtgccagccaggcgcatcggtcacgggccagcgagcgaatgcagcggtcgcgtcgtcagccaagctcacgtcccctcatgggacagcgagagaaccctctcccacagcgtgaagacagcgcacccgtgttccgttcctcgaacggctcgcgcacgcgcaacggctgccccgcgaaccactcgccccgtcgcattaactacacggtgggacaggcggcacctttggcaggagaagcgggcgacgcttcgccttcgccataacgaccgcgtcaaaaaagggaccgggaaaggggataccccgaaagggatccttctccgcgaaggaaacgagccccgagcccccctactgatcagaggttcgaaggctggcccctcggaggggttcaaaagccgcctcagagcgctcgagctccgcgcccactactggtcagaggttcgagggccggcccctcggaagggttcaatggccgcctcaggccactcgggctcagcgcccactactgatcaggggttcgtaggctggccctcgaagggctcagccccggaagacgacgaactccgcttcgcccgaccccagggcttggactcgggctcagccctggaagacgacgaactccgcatcgcccgaccccagggctcggactcgggctcagccccggaagacgacgaactccgcttcgcccgaccccagggctcggactcgggctcagccatggaagacgacgaactccgcttcgcccgaccccaggggctcggactcgacctcggccttggaagacagactcgacctcgacctcggaggagcctccacctcgcccaacccagggctcggaccgaccacgtcacaggaggcgccatcattaccctaccccaagctaactcaggctacggggaacaagaccagcgtcccatctggctcgccccgggcatggccgccagggtgccacgtctctactgccacttcttggcttcgacctgcgcctgcccatggagatcggggcatggccggcaggcggctatctag

SEQ ID NO: 41679 - DNA, 840 bp, Zea mays
  Peptide Sequence Number=SeqID_85054
atggtgtcttcatcaccgattgatgcccaccttaccagggcgctgcagcaacagactcgtgagatcctctctgagctcgacaagcgcttcgccacgattgactccaagtgggcgcgccgagtcggcgctccggagtcccaagcggtggaatccgctcaacactgcgatgagttctcctccgccctctacgccggcgtcgaggcacatctctcggcggctaccctacagtctacgggtactcgtgtcgctgccctgcaatctgccctgcatgtgttcgatgcaaggcgtccacgggcgcagtggaggtcatccgtggaggtccggcatgtgttcgcagaccgcgacatcagtgaacaacctgccggagtccatggccgcctcgacaattccaccaccatcaccatggggtccaacatcaacccggatggcgtagctgcaggtggcgccgcagatcgaccagttcgtgcagcagcggcaggctggagctgcgtgccaaatgccggacctgttccacacaagaccgacgatgcagcacctgctcgcggctacacgggagtagcaacaccagcccctggacggcatggtcgttgcttaccacagcaagcagcacgccacgaccaggaggggaagtactgctctggtaatccatacttctggcagagagcgtccacggacccattggtttcaaagaccggtgctcgcaagttgttcgatgaaatgcccacaagcgaccggagatcaccagaccgcgtcctcgacgtcactatacgccaggttctattccctgttggtcaacaaagtgacaacgaacctccaagtgcaggcctccgtctgatgtag

SEQ ID NO: 41680 - DNA, 657 bp, Zea mays
  Peptide Sequence Number=SeqID_85055
atggcggagccggctccggctcccccggtgaccgcgccgctggtggggctgctgtacgacgagcggatgtgcgcgcacgcgacgcccaacggggaggaacacccggagaaccccgagcggctgcgctccatctggcgcaagctcaacgccgcgggcgtcgcgtccagcaagaggcatataaagctgatgaaggaaattagctcaacaatatatgatgccagcaggaacaagattgctaggaaattcaattccatttacttgaataagggttcctcggaatctgctgttcttgcagctggttctgtcatagaggtagctgagaaagttgctgcaggtgagttaagttctgctattgctctagtcagacctccaggccaccatgcagaacatgatgaggctatgggattttgcctcttcaacaatgtggcagttgcagctaattatctcttaaacgagaggcctgatttaggtatcaagaagatattgattgtcgattgggatgttcaccatggaaatggcacacagaaaatgttttacgatgatcctcgtgtattgttcttctcagttcacagaataattgttcttggaacgtccatatcatccatatcatggtttactttccttggaaacactggaaacttgcagttaatagaataa

SEQ ID NO: 41681 - DNA, 663 bp, Zea mays
  Peptide Sequence Number=SeqID_85056
atgtctttcgggctttcaactactttgaaagtggatcctgaaacgacggaagtacacgctcggatcttgacagttgaagggagcagcagcaccctcggcgtcaactacaccttcggcgaggtccggcctagcctcggacggcgacacggtcggaggacggcgctgcagaagaccatcgactacgcgtgcggctccggggcggactgcaactccatccatgagaccggggcgtgctacaaccccaacaccgtcccggcgcactgctcctgggccgccaacagctactaccagaacaacaaggccaagggcgccacctgcgacttcgccggcaccgccaccctcaccaccagcgacccgagctcttcgggctgctcttaccccaccaccagtgcaagcgccgcgggaaccgtgaccccgaccaccggcggcacaatgggaggagcgggaggcccagggaccttgacgcccgccgggacaggcgcaggcacagccggcactaccggcatggggactgcaggcactacgggtaccgggttcggcggcctaggaccagcaggcatggacacagcggcggcggcggcggggggcttgctcctcctcccagaggctgggctgtgcgctgccctcgtcgcgctcctcctctccgccatcgtgctcgcgtga

SEQ ID NO: 41682 - DNA, 309 bp, Zea mays
  Peptide Sequence Number=SeqID_85057
gttgttagagataagaggactggcaagactaaaggttatggatttgtgagcttttcaaaccctactgacttggctgcagcaataaaagagatgaatggaaagtatgttgggaatcgccctattaaattgcgtaagagtaactggaaggagaggacagatgttgaggctctgcaaagacaaaaggatgcgctgctgccttgggatgatgctacttctggaatgtcttcactctctgcactactggggggcggaaatcacgcaagggctgttgtttcatgcaaattgcaacgagctactgctgccatctga

SEQ ID NO: 41683 - DNA, 792 bp, Zea mays
  Peptide Sequence Number=SeqID_85058
atggaaaggctcggacacgcggcgggcacagagatggcacgacggcggcgagcggctttatctacggcggtgagcaaaagggagaggggtaccgcggcggaatccactgagtcacggcgaccaccggtgtgtcaaacatatgcaatgccaatgcttatgatgtcatgctcaagttttagttacagtaacaccaggggtgttacattggtgttaacaaagattcattcttctatcaggagcactctgccatcaataaactcattagcaaggtggtttggagagcctataagggttgctattctgcaaaccgaggcttttcttacaaatgcaaaaggatatccttgtttatcaaagcaccatcagagtctgctaactagattttttaaacattctgttcagagtttgatcaaattggagggttgggaaagcctggttactgtaatttctagtgacaagcggtgttgggacgcccctcaaaaggcagatgttttggcctttgcctctcagtttgtctattgctgcaacaagttggggctggaccgttccaaagtaaatgtaaatggaggcgtgattgcccttggacaccctctaggtgcaacaggtgcccggtgcgtggctactcttctaaatgaaatgaagcgctggagcagagactgcagatttggtgttgtcaccatgtgtatcggatctggaatgggggcaacaactgtgttcgagctgtgttcggcctggctggaggtatctgaaagggaaataggcttacaccttttcctatttgattttggtggttga

SEQ ID NO: 41684 - DNA, 369 bp, Zea mays
  Peptide Sequence Number=SeqID_85059
atggagaaggcgatcgatcggcagcgggtcctcctggcgcacctcctcccctccccctccccctccgccacctcctcgcagcctcagcttgcggcgtcgtcgtgcgcggccggggacagcgccgcctaccagaggtcctcctccttcgaggacgatgtcgtcgtcgtcgcaacattgcaagaggaaaatgaagagattggggcgatggcatcagaaggaaaagcatgtgttcttcctgcccccaggagatctttttgtggcaattatgccagagtcgtgaatcaaattttgcaaggcctgaccaatgtgcatttacagagtgaaattaggctcatgggaattatggaattcattcagattgctatgtga

SEQ ID NO: 41685 - DNA, 414 bp, Zea mays
  Peptide Sequence Number=SeqID_85060
gtagagtatcatcaatcagttttgagggaacaattggagtaccagagacaacaagctgagtacaagagacaacaagctgagtaccagaagaaggacgagtattatgcaaacctccaggcccataatcaagctcttctcttgcaactcgcacaacaagcgggcgtcccgatgccaacatatgggatgtcgcctccggactttgcactgccgatgccaatgctgtcgcctccacctccgcctccgtcacaattccctatgggatttcagacaccacccgcttcagttgccgcacctggagatgggtctggtcaagacgacacatcacattcttgggtgaacaaccttttcaacacgcagagtctagacggaggaagtggctataactcgaaccaaccaggcgatggatatgagtga

SEQ ID NO: 41686 - DNA, 669 bp, Zea mays
  Peptide Sequence Number=SeqID_85061
atggctccgaatccgtatcctacggagtccaggagtggatacggaggtgcggaacgagtgtggtttccagcaatgctccgtaaaacttgggtcgtttctgttgccgcgtttccgctgaaatgttgcccctgggcgaagacaccggtcgcccaaatcaactccaccgtcttcaacctcgtctccggctcggcggcccggcgcattggatctccgtgtcagcgcctcggccacgggtttgctccgacggattgcagcttcggctcgagggcggaccgcgacagcaacgccgggctcaacctcgtctccggctccgtcttcaacctcgtctccggctcggcggcccggcgcattggatctccgtgtcagcgcctcggccacgggtttcgttccgacggattgcagcttgggctcgagggcggaccgcgacagcaacgccgggctcaacctcgtctccggctccgtcttcaaccttgtctccggctcggcggcccggcggtttggatctccgtgtcgtcagcgcctcggcaacgggtttccttccgacggattcaagcttcgcctcgtctccggacgtcgacagcggcaactctccgccggattttagctccgcgtcgtctccggctcggccgcgcctacactcccgcgccccaatctccattttccccgtag

SEQ ID NO: 41687 - DNA, 207 bp, Zea mays
  Peptide Sequence Number=SeqID_85062
atgcagatgaccaaaaccagccatggaacgaccaacgacgagaagcacacaatgtatgctgcctgccttcgctccggtcctcgtggcgctgctgctttgctgcagcggcatgagcagttgctcgaagaggcgcccaaggacgaacaccctgcccctgccatgccggagctgccagaacccgagctagagcttgcatacgatgtatga

SEQ ID NO: 41688 - DNA, 1593 bp, Zea mays
  Peptide Sequence Number=SeqID_85063
atggaagaaggaatcaacagaattctcaaaaacaccattaaaggtagcataccttcaacaacagcacgggaagttatagtcacccaatccagttcaagtatgtcttctggaaagctcttcacatggggagatggtgacaaacatcggcttggtcatggtgacaaggaaccaaaacttaagcctacgatagcatgtggtcatagtcttacggtaggactgacaacatctagacaggttctgagcatgggtaatattgtctatgatatcatgggtgaacacgttgtccaagttgcatgtggttcctaccatgttgcagtcttaacaaataagagtgaggtttttacatggggaaagggggccaatggaagactgggtcatggagacgtagaggatagaaaaatacctacagtggttgaatcattgagagacagggctattaggcacatagcttgtggttcaaacttcacttcagctatctgtcaacataagtgggtttctggagctgagcagtcgcaatatgcctcatgtcggcaaccatttgggttcaccaggaagaggcataattgccataattgtggtcttgtccattgtaatgtgtgcacctcacataaggtcctgagagcagcattggctcctaatcctgcaaaaccataccgtgtttgtgattcatgttttatgaaattgaatagtgcaacatactcaagtacaattaataagaagaaagaggttgtgcctcgccattctggtgaaagcaaccatgatgctaaattagctagagcaattgtgcccagcaatttggatatgattagaagtttggacagcaaggcagcaaaacaagggaagaaaactgatgcattgtcattccttcggactccccaaatgagttcacttcttcagctaagagatatcacattatctggtgtaattgatctgaacaagtcagttccaagagcagttcgcacatcagtccgatcattgaactcatctagggttgtttcccctttctctcgcaagcctagtccaccacgctcaaccacaccagtcccaacaactcatggtctttcaattgctaaaactgctgctgatagtcttgcaaaaactaatgagatgttaagtcaagaggttgaaagactccgtgcacagtcggagatcgttaaaaaatctaagaaaagagagcacctgccccctgtgtatgctccagcatctccagtagagttttgccaaagccccaaacaatgcaactacactggcataaaggaaagatacatatataacaagatactgcaggaaaacgtaatgttgggcgcacctaggaaaacgaaaatgaaagaggagctcaccatggaagagatctacgatagatgggtgcaaaatcacgttgaaatccgctttggaagacgagtccggtcattttccaagaacccgccccatcctcctcttcttccgcacgccgcaggtcgtgccctccccatcctcagcgctgatgagctcggggaggagaacgacggcaagacgaagcccactcgagtgagaggacaacaaatctggagaaggcatgactggatccacacttggacccatgaaaacacctag

SEQ ID NO: 41689 - DNA, 1614 bp, Zea mays
  Peptide Sequence Number=SeqID_85064
atggaaggagaatcaacacatcgagggaaggtccgtgtggttctggaaggtccgactccgctctcctctctgatgtctctctcgcccgccatctgcgccaagaatcgccgccatctccgcgctcctctctgcaatccaccgccatccatggcagctctatccgcgcccacaaatcgcgcgcagattcatggcagccccgccctgctctcctctctgcagtccgccacgattttttggcgcccacacctctgcagtctgccccgctccgcgctcctctctgcaatccaccgccatccatggcagctctgtccgcgcccacaaatcgcgcgcagattcatggcagccgcctttccgctcgagcactcacgcaatcatcaccgccgccattcatggcagctctgtccgtgcccacaaatcgcgcgcagattcatgcttcccgctatcacattctcaccgactgccccggtcgcgcttccttctcctgcagccatcagaaaagggggcaaaaaggccaccgaattctcctcgcccgggcacaacctcgctccacagtccaggccaaaccagcaggccgcctttccgctcgagcacccacgcaatcatcaccgtcgtcttcctgtcgctcttctcttccccttccattcctcggcaccatgccctcgggaacgtcgcatgccctccgcacaaggcgccgcctgttcccgcatcccggttctccactcctccgtcttcgccgccaccgccgtggccgcatctgagggcgtccacagcatcaccgtgcccccgctcgcgtcttcctcgcccgcacgcgcgccgccagcacttccttcccctccagctcttccttccccggcagcaatcgcacccgccaatgccgcccttccccggcagcccgcccccgccaatgccgcccttccttcccccacctacgccgcccttccttccccggcagcccgcccccgccagctccgcgcgctccaccaaaccggaaggcaagatcaggggcgagttccgcgctccgcccaccagccgcgcgagccgccgccgggaaccaaaccggaaggcgagatccggggcgagttccgcgcgtcaatagtagccatcacagtgatgccgtgcgagggagaggaaggaacgccgcgcgagtcgccgccgagaaagccgccaggcatcaccgtaagaatcgccatggtgaagactcgccggagcacggccgctgcgaagcgcccgtccccgtcaccgtcctcttcgtccgtacctcccccgaagtggcccaaggcgagacccccctcccccagcggatcgaataatatcgcgtcgcggcctgctgatttgacctgtcggcgaaccgatctgaactgtggccatgaccaggcggagtctccggggtcaccgatggcctccgcgctcgcgagagcggaggaggattccgtggcgggagcggcacccgcgaggagcgacggctcggtcgacgacgcggcggcggttgcacagaaagatcaaggagcggataagccttcttccgccgtggccgagagttcaaagaggagaaaggagccagagcaacagcaacccgcagcgccacgggcaaagctgctctcgcagtgctcatag

SEQ ID NO: 41690 - DNA, 417 bp, Zea mays
  Peptide Sequence Number=SeqID_85065
atgtcgaccgccgccgacgcttttgcccacgctccagcgccgcagatgggggcgccgttcttcgacctaggagataaacctccaaaacttggtcagtgcgaggccggcagcttggaggaacaaagtagatctggtgtaccgaggaaggaaggaaagcaaacctgcccggagcaggccgacaacacctacactgacagattcagtccactcactgcagcccaggaagattcggcggcagagcggagacgggcatgcttgcttagcgatttggagggcgcgctggtttaccatctccccgagtgggagagtggacgtcacaatttgtggagtgaagcttgtgacctcttcaccgccgagcgcgagcgtcaccagcctgctctcaccgctgaactggtccaccgtgctgagttgcagtag

SEQ ID NO: 41691 - DNA, 570 bp, Zea mays
  Peptide Sequence Number=SeqID_85066
atggatctcccccgtggccaccgtccgcggatctcccagcacaacctagctttgaagcagtcgcggcgcgagtttgccgcctgtgtggaggttgtggccaccgtcgctcagatcgacctctgtttcacgccttcgtctccgctgccctcagcccccttccgctctcagatttcggcatctcccggactcactagcatccttctctcctcccgcgcagatgcttcgtggcggcagcgaaccggatctggccgctcgctagggccttctgcggtgcgccggcctcgcgaacggatgcggggccaacgggacgcccagcccgcagagcaagtcattatcactcaagacaaaattgatggcctaggtaaaaataaatcgatatcgaaccatgatcaagatgtcgattatgatgagtgcatatgtcgtccagcagatatctttgaggaagctgacaaacctgcaaaaaagcccactgtcctttcaaagaagcctgtcatagcagttgtaatggttcaaaacatgttaagcttgatagcagcagctctgaaagtagctcatatgaggatgaagtaa

SEQ ID NO: 41692 - DNA, 606 bp, Zea mays
  Peptide Sequence Number=SeqID_85067
gctcggatcttgacagttgaagggagcagcagcaccctcggcgtcaactacaccttcggcgaggtccggcctagcctcggacggcgacacggtcggaggacggcgctgcagaagaccatcgactacgcgtgcggctccggggcggactgcaactccatccatgagaccggggcgtgctacaaccccaacaccgtcccggcgcactgctcctgggccgccaacagctactaccagaacaacaaggccaagggcgccacctgcgacttcgccggcaccgccaccctcaccaccagcgacccgagctcttcgggctgctcttaccccaccaccagtgcaagcgccgcgggaaccgtgaccccgaccaccggcggcacaatgggaggagcgggaggcccagggaccttgacgcccgccgggacaggcgcaggcacagccggcactaccggcatggggactgcaggcactacgggtaccgggttcggcggcctaggaccagcaggcatggacacagcggcggcggcggcggggggcttgctcctcctcccagaggctgggctgtgcgctgccctcgtcgcgctcctcctctccgccatcgtgctcgcgtga

SEQ ID NO: 41693 - DNA, 1113 bp, Zea mays
  Peptide Sequence Number=SeqID_85068
atgccgcctctcctcacctcctcctccgtaccggcgctgccgctggccgcgtggtccaggtaccgcctcagggttgcggcttccaacgccgcctccgccccggacggggccggcgccactgccagatgcaccagcaccggcgggttcccgtccttccttcccggggcggtggagcgcatccgcgacggcgctgccatccgcctggccaagcgaatcgagcgcgtgcccgtccaggcgagccgatttctcccgatttactgtgctgtcgtacgctcaaatgcgcaatggctgagcctgaacttatcctatcttcatcttcagaccagtttctcgggtagcgcgatatcgagcagctgtgtgaggccgctcaagcagcaacaggacggtgatccggtcgtgctgctgcatggattcgacagttctgttctagaatggagatacacctacccattgctcgaggaggccggattggaggcttgggctgtggacatccttgggtggggcttctctgatttggaaacacggccgccatgtgatgttgcatccaaacgcgagcatttttaccagttctggaaatcttacatcaaaaggcctatggtgttagtcgggcccagccttggtgctgctgttgccattgatttttcagtcaactaccccgaagcggtctcgaaattgatcttcattggtgcaagtgtatactctgagggcccaaaagatatgaccaggatgcctaaatttgtttcatatgctggggtgtttatattgaagagtcttccactgcgatttttagcaacaagattggcatttaaaaaaactccaaatgaattctttgattgggtgcaagtgaagcataaatgcctgatcctgtggggagaggatgatggaataataagcagcaaactagcatataggttgcatcaggaactcccagacgctattctgaggcaggtccggcagtgtggccatattcctcacgtggagaagccaagggaggccgcaaaacatgttcttgaattcctcgcaagaaacacgtcagacaagtcagaccagtctccttccgagccgtcagacaagtcagaccagtctccttccgagccgtcagtagtcgtgtaa

SEQ ID NO: 41694 - DNA, 198 bp, Zea mays
  Peptide Sequence Number=SeqID_85069
atggatttctatggtgataaaagttacagctttcccctcaagaagcctttcgctagactgttcttgtggaatttgcaaagtgatattttggaaaccccatggatgagttacagcttttccctcaagaagcctttcgctaagactgttcttgtggaatttgccaagcgatatttggaagccgatgaagggttatggtga

SEQ ID NO: 41695 - DNA, 411 bp, Zea mays
  Peptide Sequence Number=SeqID_85070
atggcgacaaatagtcgaatgaaggtggcgaccacctatgacgcgccgtctacctccagatctaaatccaccacaacccgcttcttcccccgagtcggagtcgccatggaaggaaagctagaggatgaaaaataccctttcaacactcgcagttatcacagacagcatttcccttggcaacaaccacaaaaactagttggagttgatgtgcaaagcaatgaatataataagcacaagaggaagatcctcgtcagtccacttgttaatgtgataatcaattgctaccatggaatttataaaaccaatataccgctcatgagctgcattgtgtgccttggaaccactatgtttgagaagtattttgtttcctatattccaaatattccatacatcaacgacaaatgcatttga

SEQ ID NO: 41696 - DNA, 378 bp, Zea mays
  Peptide Sequence Number=SeqID_85071
atggcttcccttgggagagaggtgtgggagttcgaccccgccgcaggcacgccggaggagcgcgccgaggtcgataggctgcgccaggagtacacccgcaaccgcttcacgcgacggcaatgcagtgaccttctcatgcgcatgcaggaaaacataccggtagacgacgttggcggaagcagtagtttcgacgatgagatcgtgagtagtcgtgtgaggacgcttttcaacaaccttattcacgccctctcccggtgcaggatctcgaaggcgacaggtttcgaatacttgctttcccgatcgcagatgcacgtcgacggtcaggtggaagagaactacgatggcgccttacataggaccgtgactgcaaaccgataa

SEQ ID NO: 41697 - DNA, 1176 bp, Zea mays
  Peptide Sequence Number=SeqID_85072
atgactaccagccttgtggtggagagaagcgagccgggctacggcctccccctgccctcagcttcaaggatgttcatcatccacgctggggaggagggggagccaagtgggaacttcgccttccgcgtgggctggcggtccacttcttcctccagcattcgggggagaagggcgttcgccggccttgcggaggaggcgaactctgggtacgcggggccggtcgtctgtggcgccgtcagctaccgcgtgtctggctccccggcctgggcggctctggtgctgcctccggcgctgcctcctgccgctagggcggagtgtggctgcctgtccaccgcacaggcgacggtcgcgtcgtgcgcgggttggccacatccacggcttctcccgcgccatcggtcgcaccgggaggtcgtacaagacatcccgccgcccatcggtgcggaggtggtcgctgccaccagtggggctgatgtggtcgcctccgctgaggtggtcgccgtcgttggtggggctgttcggagccaacttccaacgcgactcttgctggtgcagggtagctcattcctgcagaaatggagctggggtcccgcttgcccacggtacgagaccaggctgagcggctacatggtttccggaccccccaggagacaagtgctcgttcttcagagccagacctccagggccacggtacgggaccaggctgagcggctgcacgggctccggaccaccctaggagaccaatatccgttctctagctccggtcctgaggacctggctgagcggttacacgggctccggaccaccctatggaacgaggtcccgttctctagagccggcccccaggctgtcagacctccctactttcgtgtcaggggccctaaactgcaagcctggctgttcaattcggatgtcgccatgtcagacagatgggaatcgtatgggtggggtccttcccagctgagggagagttgcggagccctccttggtatggaacctgtcgtggggctaggtcccgacctagggttcccgtctgcatttgacacgggagccctcgtctctggctgtgatcacttctatatgtacatgtctgcagctcggacccgtgggggtccagaagggcctccgaaggaaggcgtgctccatctccgtaggccgaggaacacggggtccctctga

SEQ ID NO: 41698 - DNA, 393 bp, Zea mays
  Peptide Sequence Number=SeqID_85073
gagcatgaggtctcaaatgcaattgatgaactcttgtcaaagattcccgctggtctaactgaggatgggcttcaacttgtgaaaactagggtgctggagagtgccgggggcttcttcgatacaacatttacttccagcaaagtcaaagtatataaatgccctgagctggttgcggagcttcatatggcaatgggtggtcgagttcgccaaaggatgtttagaaataccgcatctttggcaatattcggtatcctggtatgtgaaatccttgaagataatgctgtaaacgccgagattgacaactccaattctgaggtttgggtggttacctcctggctcagggatcacctgttggttcctcaagagagaaagaatgctttcctgtggaagaag

SEQ ID NO: 41699 - DNA, 549 bp, Zea mays
  Peptide Sequence Number=SeqID_85074
atggcccgcgcccgcgcttataaaaccctcccagacttagattgtacccttccgcgcaccctcaaacctcaccggagtctagctcgtcgccgtttgcccgtgcgcagcgagtccgcggccgcccaatccctctgccaccgtagaccggccagtggagccattcccaactccgtccagcccccggagaagaccgtgcacacctccgtgaagctccccgagcaaggaatcggagtttgcttcgccggagaggtcagtccacgctcgccggagctctcaaccccgccggagtacgtggaccgggtaaaccactcaaccatccttcgattccttgtgcacacggtcgctatgttaccccgtgaagctcaccatgccctcagattgaaccagttcgccgtggtttggccggactgtaatcttgctgacggagagtacatcctcgtgccggagcaaggagctgctcaggaggtagcccccgatccagcacccgagcctgcaccagaggacctgcctgccactgctttggaaggcaagccccggttttatgcataa

SEQ ID NO: 41700 - DNA, 279 bp, Zea mays
  Peptide Sequence Number=SeqID_85075
atggtgggtacaagtgcggtcactgcacgacggccagtcggggtcagtggggcattgtacgccaaggcgatgagccctgatctgttgccagggaatcaatggggacggttgataaactcagctagtgcttttggcaaccaaaccccacagccaaacagctgcatgtctagaggttctctggaggaaatggttgctggaataacttggccgtccaccttgccaccgggttggactgtcaagtgggaccctgcctcggttgaggaggagcatgaggagtga

SEQ ID NO: 41701 - DNA, 879 bp, Zea mays
  Peptide Sequence Number=SeqID_85076
atggcgcctcctgttgacgtggtcggtccgtgccctaggttgggcgaggtggaggctccttcgaggtcgaggtcgagtctgtcttccgaggacgaggtcgagtccgagcccctgggtcgggcgaggcggagaccgtcggctgaggccagggctgagtccgagccctggggttgggcgaagcggagttcgtcatcttccggggctgagcccgagtccgagccctggggtcgggcgaagcggagttcgtcgtcttctggggctgagcccgagtccgagccctgggatcgggtgaagcggagttcgtcgtcttccggggctgagcccaagtccgagccctggggtcgggcgaagcggagttcgtcatcttccgggggctcagcccgagtccgagcccctggggtcgggcgaagcggagttcgtcgtcttccggggctgagcccaagtccgagacctggggtcggcagtcggagcggcgcaggcggcactgtcctcttgtcagaccggtcagtggagcggcgaagtgactacggtcacttcggctctgtcgactggagggcgtgcgtcaggataaagctttgtgctgatgggggttaccagctgagatttaggagtcttgaggcgcctacaagcagacgcctaggcatcttctccagcaacgccaaccctattctggtgcaggagatctcgtgctaccttgggctggagctaaggcagatcaagatcgagcggttcgtggacggcgggatctacgtacagctggaagagagcgtgcacggctgcgacgtgttccaggtgcagcccacctgccctccctccaacgagaacctcatggagctcctcatcatgatcgatgcctgccgaagggcctccgccaagact

SEQ ID NO: 41702 - DNA, 268 bp, Zea mays
  Peptide Sequence Number=SeqID_85077
tcggcccgaccccccctcccgaccgccgccgagccccctcccggcctcttcccggccagggaggacctcgtccgcttgctcgccgtcatattcatcgcagcggccgccgccgcggcctgtagcgtcctcaaccgccgccctgagcccttctgcgactctccccagtggcccgatgactacgccgacggagagctgctagtcatttcattaagaggagaaaacaaaaacaaacggcgcgactggaaagataacgccgtgtacaaggcag

SEQ ID NO: 41703 - DNA, 374 bp, Zea mays
  Peptide Sequence Number=SeqID_85078
atggcgccccgcacgctctatgactatggcggctctcagcccccttacggaagcaagaggacggtaatccccgaaggtgacatcgacttcccaaacgtcccccacggactacatgtttattatgaagaacctcgagggctctttagcaacttgtcaaggccgaaaggattcgacgatgctcatcacgccatcacccttaatcacctgatccgtccgatcaactgccaacgctccagatcaaccctagtgaaccggtatttgcacgctggcgaatgcaagagggaaaggaaggaatgcggcacaacatataggatcgttggtgacgaggtcacgccatgtgctccggggttcgtggtgtacttctgccatggccg

SEQ ID NO: 41704 - DNA, 177 bp, Zea mays
  Peptide Sequence Number=SeqID_85079
atgtctggtgcaccagaggactccaacgcaaactcgccaccttcgggaatttccagaggcgactccgctataattcaccggactgtccggtatacaccggacagtgtccggtgcgccaagggaggatccactgttagtaaagcatttctacaaacggagtctttgattcttgaatag

SEQ ID NO: 41705 - DNA, 405 bp, Zea mays
  Peptide Sequence Number=SeqID_85080
atggatggcggcaaccacccccgcggcggtgagccctccgtctcgcagctcctgcaaggcctccagaaggggctggagattcttctgtctctcgcgcggggccccatagcgccagttgctgccggcggcagtcaccactcgttgagaaaacgatgggagcctcccatcgtcgttccggaggaccgggaaaggggatactccgaaagggatccttctccgcgaaggaagcaggccccgagccctcctactgatcaggggttcgaaggctggcccctcggaagggttcgacagccgcctcagagcactcgggctccgcgcccactactggtcagaggttcgaaggctggcccctcggaagggttcgacagccgcctgaggccactcgggctccgcgcccactactga

SEQ ID NO: 41706 - DNA, 630 bp, Zea mays
  Peptide Sequence Number=SeqID_85081
atggagcatcgtcccgggctggagaggttgttggagactacccatctggagcctgacgggaagctgttcgtcaacacgcagcaggcccctacctggcgcgccaactgttggtgtttcgaccccgagggtccctggaccgacgaggcggatgcgcttgaagtagggggttacaagtgttcgcgagggagagagagagagagcctgttcgtcagcccgtcctcccgtgcggccaccttctcgtacgagggccctggaccttccttttatagacgtaaggagagggcccagagaccatcgtccgaggtcgaggttgagtccgagccctggggccgggcgaggcagagcttcctatggcgcctgaggccggacttggtggctgtcagcctcaccctggcgggtggcacagtagtcggagcagcgcaggcggcgctgttttcctgtcaggcgatccttgcattgaatgctcctgcgatgcggtcggttggtgcggcgatctggccaaggttgcttcactgcgaagcctgcccgagctgggcctcgggcgagtcgaagctttgtgctgatggtgtttaccagccgagttttagtagtcttgggggtacccctaattatggtccccgacaaaactga

SEQ ID NO: 41707 - DNA, 144 bp, Zea mays
  Peptide Sequence Number=SeqID_85082
atggggaagcctgtcccatcactcctcacactcctcctcagccgagtgaccacacttgtacccaccataaccggaatgggagaccacgtctcaggtcgcgtgaggggtaaagtctactgccaggttcaatcagggtgggtttga

SEQ ID NO: 41708 - DNA, 183 bp, Zea mays
  Peptide Sequence Number=SeqID_85083
atgtcagttctctccaagtgtcgccctcaatgcgtcgttgtgggctcctcggcgtcgacgactgcaagtgaggttgtctctgcgcccgtgcatgtggagccggtaggtccagtcatcatcctctctgacgatgaagatggggagatcgattggacggcactgagggacgacgacgacgagtag

SEQ ID NO: 41709 - DNA, 189 bp, Zea mays
  Peptide Sequence Number=SeqID_85084
atgcagcagtcgacgatgcttgctgggaggcatatcatagcattggcttgccccgccatcatcatcgccatcatcgtcgccactgtcgtcgctgtcctcgtcactgctaccatagtcactgctgtcgtcgtcattctcgtcatcttcgtcgttcgaggagatgatgctcatccaatggccagaatatcg

SEQ ID NO: 41710 - DNA, 204 bp, Zea mays
  Peptide Sequence Number=SeqID_85085
atggaggaggccttacagatgagagagatccacctaccaccgaaggcacagacgaggggccaccgtaggtcctcaatgaacgtcaccatagatgcattcttcaagattctcaagtttccagattgcaactgcaatatttgccaattctccattcaaagaaggaaaaccaaatggatttctaagcttaaggaggcatttacttga

SEQ ID NO: 41711 - DNA, 150 bp, Zea mays
  Peptide Sequence Number=SeqID_85086
atggcgagcgacagtgagttggagctcggatgccagaactgcagggtagccatgccatggaagatggagaaggggtgccagctgctgatcactgcagaagatatgttccttgatgtatacgctacaaatcttgttcaggacttgaggtga

SEQ ID NO: 41712 - DNA, 156 bp, Zea mays
  Peptide Sequence Number=SeqID_85087
atggcaagcttggtcccactcgtcggggtgacaacgcgtgtggggaaaggaatcctgggtcgcgcagaagggaaggtaggacggcggctaaacggcgcaaatgggccggctgaggaacgcggcccaactgcccaagcgcagatgtttgaaatatga

SEQ ID NO: 41713 - DNA, 198 bp, Zea mays
  Peptide Sequence Number=SeqID_85088
atggcgcgtaccaagaccacccaacgaaaagcaactggacctcgagaagttgcagcaatgggagctggaccatctggagcatctaatggaagaccttatggggagttggacctttttggagcccctccttcaatgaacctcgaagatgaacgttctcccgaagctggcagtggagcggccaaggacgaagataattag

SEQ ID NO: 41714 - DNA, 195 bp, Zea mays
  Peptide Sequence Number=SeqID_85089
atggccatgatgggttcaacatctgaaaagatgtacctctgtgaggtaagctttgcctcggtcggaccaatatcagaaaggccaccacgcaatgggagtggagagatggcgagagtagcgtgtaccctccgtggcaagaggctagacggtggtgtatttgtgctcttagttggcgtgaacccattctggtcttga

SEQ ID NO: 41715 - DNA, 936 bp, Zea mays
  Peptide Sequence Number=SeqID_85090
atgcacatggtgacatttcacgagcgacaaatggtcgagcgagtcgtcaaccgtccaggtgctgataggtcaatgattacagcatattttgaggcgaataagctgcacgaggaggctcggggcatcctgtatcgtgaattccctgagtggtacacttggcagcagggcaaagtgtggcaaaggaggaaacaaaatacatgtggacaggttggtagaatcatcttcgctctaccatctaagggggagcacttctatcgtcagctcctcctaaaccatgtgactcgtgctacctcctatgcggatctaaggacaatagacggtgacacactaccatcgtttcgtgaggcagcacaaagaaggggattgcttgaagcagacaacacaatagatgagtgtctcaatgaagctgcactttaccaaatgccatcagcactacgaaggttgtttgcaacgatactggtttactgcgaaccgaatgatgtggcaaaattgtggcagcgacaccttgacacaatgtccgaagattatcatcatattactcagagcaaaacccatttgcagcagatggtcttgattgacattagaaacatgttgcaatccatgggtaaagacataaagacattccccctctctgctatcatcgatagatatgacaattcacaaggtattgatagagagatttacgaggaggaaagtatcgaggcgacgacagaagatgttgctttgcaagaaaccctaaatgaggagcagaagtctacctatgaaaagatcttatctgttgttgacaccagtaatggcggtgtgttctttgtggatgggcctggtgggactggaaagacttatatgtataaggcattgcttgagaatattttgttatgtgtcggtggtggaactgaggaagtgaacaacgatggtgatgttcgtcttccagataag

SEQ ID NO: 41716 - DNA, 399 bp, Zea mays
  Peptide Sequence Number=SeqID_85091
atgactgtcacagggttgattctgggcgaaccttcttcttatcttctcctcgctatcttcttttcactgaccttttctttctctttgctcttcccattggaggactctatcaaagagtattaccatcatacagaggaggaaactaaagactatgaaccatgtacaacagtcttcaacccaagaatcaccaagcattgtgatcttaggggcgagggagtggaaaatggagttgcttgcaatttgacagaggggatttatctggagctgagaactaagaacacgctgcaccatgatgcttcgaaggttcgccgtagcatcagcaccaagcacgacatcttcattagcagcaacatcactagagtcatcatcgtcaccctcaccgtggaagcactaatgtag

SEQ ID NO: 41717 - DNA, 309 bp, Zea mays
  Peptide Sequence Number=SeqID_85092
atggcaagagcaaggaaggggagggagatgctgctgctgggcgccgaccatggagcaaggagctcgctggaggttgttgccgccgcgagcagggaggacgaaggggcgtcgtgtggagaggaagctgcaggggtggcgccatggggagggagagctgaggcaccgctggggaagaagggcgccatggaggggagcgcgcagagccgctgctcggctgggaagaacacagggagaggggttgtggcggctggaaaaaaaatggaggggtgggagtgcaaaacagcccaagtaaggaaagaggactcctaa

SEQ ID NO: 41718 - DNA, 444 bp, Zea mays
  Peptide Sequence Number=SeqID_85093
atgggcaagagtaacaaacgcaagcgcgagccgactcctccgtcggaggacttcggcgactcgaaatactcggaggaggagttctcctccgagtccgaggggtctccggctcccgtctctctcccggcgtcgtctgatgattcagacgactcccaggggattgccgcggaagtctggacgtacatccgggccgtcgagcgttccgggctcgagggctcggatgagtcggagtactcctcggatgaggaggactcggacgacggcgaggacgatgacgacgacgacgacgacgacgacggtggcgacggcgacggtgacggcagcagcagcagcggcgggggcagcggcggcggcgacgagagcaagggcagcaccagaggcggcagcagcaagggcagcaccagggtcggcggcagtggcagcagcagcaaggccagtggctaa

SEQ ID NO: 41719 - DNA, 402 bp, Zea mays
  Peptide Sequence Number=SeqID_85094
atgcgcttctggagaatggttggttttggtaaacttccaaagtaccatcaggatcctacagcagaagagttagccaaaacactcgaatgttggccttcattgaactattatatcactggttgtaaatatgttcttatgccatggaaattcaacggatgctacgcacttttcgtaatcgatcatgttggccaaatattattctatacggttaataccagctacttcgttctacaagctatggtcatgtgggggagtgctagacaaatggaatttgatagggatgcaatgattcttcgaaggaactttgtaattgatctgttaagttacgaggacaattcatgccgctatgccatccctgcaaacatacaacaaagacttattaatatcgctaaaaaggattag

SEQ ID NO: 41720 - DNA, 255 bp, Zea mays
  Peptide Sequence Number=SeqID_85095
atggatcccagggtaactccaccgaggaccgggtcgacggtggccaactctggcgaggctatctggactggccgtgaggcaagtgggtacggtggccaacccctggtctcatccatggtgaagatcttttcacctcgatgcgttatccgggcaccaatgggcacgaatcgcatcgccggcgcgaatcaaggcgcgggggtcaccggcggcaaggtgcactgcacctgcaatctcattcagttcactgtaccatga

SEQ ID NO: 41721 - DNA, 366 bp, Zea mays
  Peptide Sequence Number=SeqID_85096
atgtacggctcgacggcggggatggccggaatcgctcggtccacgtgcgcaggcgggtatccttgtcggcggcgggtgtgccgaccaaatcaaggcgatctggttcaatccaatggcacgaaggaatcagaaaatggttcagtggattacccggtccacgcactccggtggggttgtgaactccggcgaccgtggactggcctctctggcaaagcagacttcgattcctcactcggggagcttcaccgaggtgtgctcactcgtctccgagggttggacggggttgggaaaggctgggctggctggtctacggcggcaggggctcgggtggccgcggacacgccgcatacgggcaaacggcggtga

SEQ ID NO: 41722 - DNA, 222 bp, Zea mays
  Peptide Sequence Number=SeqID_85097
atgaaggttccaagctcaagtgaagaagaggaagatgatgatgatgatgatgatgatgatgatgatgatgatcaactctcaacatcaccctttgaggacgaagaaacagtccgacgcgtcggaaagggagataaagagtgggcaatgaagctaaaagccaaggaccttcggcctaacatattgacgaagctcagaaacatgatgatgactgaaaggggctaa

SEQ ID NO: 41723 - DNA, 741 bp, Zea mays
  Peptide Sequence Number=SeqID_85098
gacacttcccccacgcctcagcacgacgtggagtctgggaggcagtcttccccttcacctcagccagagatgccccctgctccaccacagggcatcccggctgctagaggagaccctgacggagatagagacgacgacgatgccggtggtagttcgagccacggcaaggagctctcggaggagcaggagccagagggatggatcgctagacccatcaagcacgacgccgctcacgggtgtcacttccacgaagctctcgacaccgtgttgcattgggcctttgaccgacacacttggtctatcgagtaccgttatgtagtctaccagcatcgtcgcgggttatacccggaccagtgggaggctacttgcttggtgcaccgtccgaacaatgatctccgggggcgctaccttctcagagcaatattctatcactttgagggatactgccgaggcagccatgcaaggatgcaccacgacgtgcactttcgcagcaatcccaggctcaacaacatggtcaacatggccgccatgctcaacaccgagctggaccatgcccttgacgagttgggcaaggttcgggcggaggttgcggaattgcatgctgagtgcgcagcacgccactatctggatggtggttctcctgtccttatcgagattttgcacccttaccgttcacctccccttggtcgctttgattacagtacccctgactgtaggactcatatagatttggacccatag

SEQ ID NO: 41724 - DNA, 1074 bp, Zea mays
  Peptide Sequence Number=SeqID_85099
atggaggtcccaacatatacctctgaggttgtacaccctacaacagatgtatcggaacctgattcatcctcagataacgcatgtgactgggttatccctgaatacaccagtacacctttcatgccagcttcaacacagaccgaggatgtcggttcacccgatatgtctactgagccactaagacgtaaacatcatgttctgcgtggtgaaagacaagctatcttagcccatcaaaacaagaaatttgaagcaaacattgcacgtaacgtggctactttggttgatgatactatcagtgacgtcggaaaaatggatgattcgacacagcccgggttcaactatagagatcaacaacactggaatacacgccaaagtgcaatcgtggcaacaaatgggagtgcaaacatggtcgaacaaggaattgatgacgatgatgagggtgtcatattcggagaggataatgatgagaatgagggatatctattcgccgatgaggagactaacgaggacttcgacatagatggtactcaagatcaatctgttgccagtaatgtgcctgacccgtacgacaaggtgtacagtaacatccctgaagaaacacatatgctgaagcacgttcccgactgtggttattgcactgcgaagaagtttgagtatgagccgcctgggttttgctgtcgaggtgggaaggttgagctagccccactagagacccctccccaactcaggaggttgtgggatagtgccgactctgatgctaggcactttcgtgataacatcaggtttttaatggccatttttctttcacttccctgtactgttgcctcgataatagttggcatacttcgtggaaatccgtactctgagcaccttaggagcatgagtcatgttgagaaccttgctgactatcacatcgcattgaaccttgaccagacgttgaacaagaagacatataacaaacctctcacttcgaaggtggccgctgtctgggtcgaggggagtgcatggcgaggccagttcagcaagagtgttatgctacatgtgaaggataggtcaagccacggcatacgctga

SEQ ID NO: 41725 - DNA, 165 bp, Zea mays
  Peptide Sequence Number=SeqID_85100
atggccatgatgggttcaacatcggaaaatatgtacctctgccaggtaccaaactttgggtttgaaaaggtgaagaagcggcaaacttttgctgcttctattcaaaggtggtaccaaaagaagagaaccaagactaaagctgcgggaggaaaggtcctccgttaa

SEQ ID NO: 41726 - DNA, 171 bp, Zea mays
  Peptide Sequence Number=SeqID_85101
atggggagtaagcgcgcgggatatgagcagagatgcgccatggctggagagaaaaatgcagagggagcgcacggctgttgggagaaggaagacggcggctcccaggagataaagccaacgcttgaaaaatctgcgtacggcaaaaaaaatcgaaattcgcagatattttga

SEQ ID NO: 41727 - DNA, 399 bp, Zea mays
  Peptide Sequence Number=SeqID_85102
atgggaaggcgaggggaaggagctcggactggagaagcaaggggagcaagcagcgggtgcggcatccatggaagcaggggcgcgtcctatggctggagcaggagcacgccggcgaggagaagacgcgagagggaaggagaagcagggagggagcgccgtggggaagagccgctcggctggggaggtgcagcagccatggagcttggggaaagggaaccggcgagcagcggagaggaacgagcggccgagctgccgaacgcctggcagggagaagatccaagcgcgctcagccatgggaagaggatagagggagcgccgtgcgttggagaggaggaagggcgagggataaggctaacggctgaaaaatcagggaagggagagagagcggctgggatatag

SEQ ID NO: 41728 - DNA, 236 bp, Zea mays
  Peptide Sequence Number=SeqID_85103
attgcaacctcgccgacggagagtacatcctcgtgctggagcaaggagctactcaggaggtagcccggatccagcacccgagcctgccccagaggatctgcctgccccagctttggaaggcaagccccggttctctggaggacatggttgttggagtgacttggccatccatctcgccaccgggttggactgtcgagtgggaccctgcctcggctgaggaggagcatgaggagtga

SEQ ID NO: 41729 - DNA, 543 bp, Zea mays
  Peptide Sequence Number=SeqID_85104
atggtggaaaaggacttacaagtggagcaactgtcaaatgagatccaagaacttgaggaactagtgggaacgagggagaacaccatcgaggttctcgaggatcagttgatcaacacccagcagcagcttgcagaggctaaccagcacctggatatgcaccaccaggagatccaggacatggaggctgtcagcatccagcctgatagggagcacagggactattccacggcagctatacacctccactgggagctccggtgttgggccggcgacggaagaagcccaatactaccgatcctggaggcagacagcgctccgtacttcacgcgagcggcgaagatggctggggcatcagatcctggcgtatccacagctctcgccactcaatccaagcaaatcgaatctcaatccaaacatctggcggcgcagtccaagatgctccaacaactctgtgatcgactcgaagcgcaggatctgcaatggagttccttgaagcaatccgtcgccaacaacgccgaggatatcagctcgattcatctctga

SEQ ID NO: 41730 - DNA, 309 bp, Zea mays
  Peptide Sequence Number=SeqID_85105
atggaggtgggcaccggcagaggagcgcacagggaaaacaccaaaggcgctcggccatgggagagggagaaaggacaaagctctggccaaggagaaacagggggcgcgcggatggcgaagacagctcggatccgagcagaggctaggcacgaaaatgaggaagagactgtagttgaagaagaagttgtcccgcaagctgagaacccaccagccgaaaataacttctacttcgacatctgtggtgtagacccagaacctcctgcaacacaaggcaagccccaatgcatttcccctttccttgctctttaa

SEQ ID NO: 41731 - DNA, 1221 bp, Zea mays
  Peptide Sequence Number=SeqID_85106
atggccggttcaagggatagctctgatatttctccaagcaacatcatagagccgacttgggaaaccttgccggccgacgagcagctccagttcgaggagcacaaggagcggatgatccaggaggcgaaagcaaagttcttggccaacttcaaagtggacaggaacaacaaggtcgtccgacatcgggcaacggatccggcttcgctccaacccacgccagatatccccaatccacgatgtgcacaacgttgtatgtatgacgtgcggcccccacatgtcatattcatccccgtcaccctcgcgaccacctgcccacctccgcacccgccggccggatttaccgggtccacgccgcggattccgtttgggaccccgggctataaggggggaaggattgagaggacccagccatgctgccgtgacaccgtcgcgtcatcccctcgttcaccacttccagccgccaacaaagaagccgggtgggtgaaaggaagccgccgcgggggaatctccgattcaatcgtcgtccgcaccgtcgagggtgcctggggtcttcctcgggctcggggaaaggctgccgtggccgcttcaccaaggattggacgcttgtggtgccggaattgctcaccggagctcggcatccgccgctcgccgtgggcggagctgctggttttagggtgccggattggggcaactccggccagcatccaccgccgtgtgggcggcgctgccgtcggcgtggtcggatgggagaagattgcctcggggccgtccgatctgccacgatgtgcacaacgttgtatgtatgacgtgcggcccccacatgtcatattcatccctgtcaccctcgcgaccacctgcccacctccgcacccgccggccggatttaccgggtccacgccgcggattccgtttgggaccccgggctataaggggggaaggattgagaggacccagccatgctgccgtgacaccgtcgcgtcatcccctcgttcaccacttccagccgccaacaaagaagccgggtgggtgaaaggaagccgccgcgggggaatctccgattcaatcgtcgtctgcaccgtcgagggtgcctggggtcttcctcgggctcggggaaaggctgccgtggccgcttcaccaaggattggacgcttgtggtgccggaattgctcaccggagctcggcatccgccgctcgccgtgggcggagctgctgtgtgattaa

SEQ ID NO: 41732 - DNA, 1713 bp, Zea mays
  Peptide Sequence Number=SeqID_85107
atgtcatcttcttcctcatctgttgcgaatgcgtcgctggccgattcgtcatccgaagatacgttgagcaatttggcggcggtggagttacagccgggccacacggtggagtttggcgtttcgaggatttcctcgattcgcgtgcaggacatgcagcagttggggtattttggggatgaggtcctgcagaggtttgaggtccaggtccaccagttgacacctaacgccgtggtggccttggcgaagtatgtctggacggtgacttcgtatggcgaggatgatgaagacgaaggggccctccggtgcacagcccgcatgagcagcttgcgtgatttggttgaggagtttattggttatggagtgtggcccctggcgcatggctgggtgctaggcgaagtaagccctcgccaaatgcctactttaggccagcaactggtgcgaagtccgaccttctctttggatctgcgcggccgagacctggccgcgttcattcgtgaagtggaggacggggctgtgaggattgtggggcggtatgcgctgaggacggagagtctgcggagttgggatatccgagggtccaatgttcgcttgaatcgggtcttcgagttgaatcgtttgctgtacggtggttaccctggagatgacgctactgcggttgttgaccgccgcgagaaaaaaaccgcagtgatggacaaggatcgtcaagatgcggcgcagaagcattgggcaatcactagggccggggaccctatgcgtgaggtgaagcgggcgcggggaggcacgaagtccgccgcccctagaggcagcaaaccaccactggcggtgaagcctgccgtcctcgggcccagcaagtcttggcggcatatggatgctgttcgggacaagttggctgcggagaacaagagccgcaggctggcggagaggctggcggctgcggaggccgagaaggaggaccttaggcgtcaattggcggaggagaggagggacacaaacaaagcttgtgctgaggtgcagtccgcgcaagccgagggcaaggttgtgcgggcggaggaggctagtctcgcccgccaacgcgccgaggagatggagacgaggctcagtagcctgcgcgaccgcctggacaagacggaggcctcgacgcacgcggaggtcgagcagacgcatactcagcttgtggacgtgtactgggagctgggtgcgtggaccgcgaccttcgaagcgcccggtcaggaggaggagctggaggcgctcccgaccattgtgacgggcctcatgtccttcgcctcccttgtcacctgcgagggggccgtgaatgccttgtcccgcgagggttgcgggcacttcgaggccttcgaccagtctgacgaaggcttcgagcgtgaaatcttccaggtcgaggaccctgtgatgaagcggtcggctggggctctttttgacaggatgtggggccctcatggccgagagactgtctgggagaggtctgaccgggcgatggatcaggaccttggtgatctggatagcacgctgcccgaggcatcgggggtggagatggtgcctccatccgatgcaggcaagggcccctcggcgacccccgcgccgactggagctggcgaagaccccgtgccagctactgcgctgatgggtgcggacgctaagcaggtggtggctgaaccagctgccgaagacctagggccttcgcaggtggcggaatag

SEQ ID NO: 41733 - DNA, 2664 bp, Zea mays
  Peptide Sequence Number=SeqID_85108
atgaacgtatgtgagctcactcttgctgtctcacacccccccacaggtcaagaacaggtgaagcagcgcacctccacttatggtcctgacatccctcgcctcaggctctttgtcaagcacgagaccagggagagggtgcgcgtgcagattacagatgcagataagcagaggtgggaggtcccctacaacctgctcccaagggagccagccccacccgtgaccggcggcaaggtcacgggcgcccccttcacgggcgccgagtaccccggcgaggagctggtgttcacctatgggcgcgacccgttctggttcgcggtgcaccgccggtccactcggcagccgctgttcaacaccagcgccggcgcgctggtgttcaaggaccagtacctggaggtgtccacggcgctgcccaagaacgccgccctgtacgggctcggcgagaacacgcagccggggggcatccggctgcggcccaacgacccctacaccatctacaccacggacatttccgccatcaacctcaacaccgacctctacggctcgcacccggtgtacatggacctccgcagcctgggcggccgcggcgtcgcgcacgccgtgctgctgctcaacagcaatggcatggatgtgttctacaggggcacgtcgctgacctacaaggtcatcggaggtcttctcgacttctacttcttctcgggcccgacgccgttggccatagtggatcagtacacgtcgatgatcggccgtcccgcgcccatgccttactgggcattcgggttccaccaatgtaggtgggggtacaagaacctttcagtggtagagggcgttgtggaaggttaccgtaatgcccagataccgctggacgtgatctggaacgatgacgaccacatggatgccgctaaggacttcacactcgatccggtcaactacccacgccccaaactgctggcgttccttgacaagatccatgcgcaaggcatgaagtacatcgtcctcatcgaccctggcattgccgtgaacagctcctatggcgtctaccagcgtggcatggaacgtgacatctttatcaagctggacgggcagccatacctcgcccaggtgtggcctggccccgtctacttcccggacttcctcaacccgaacggtgtgtcgtggtggatcgatgaggtgcggaggtttcatgatctggtcccggtggatggcctctggattgacatgaacgaggcctccaacttctgcacgggcaagtgcacgattccgaagacgcaccagtgccctattcctgacaccaagacaccatggctctgttgcttggattgcaagaaccttacaaacacgaggtgggatgagccgccgtacaagatcaacgcctccgggcagactgcccgtctcggcttcaacaccatcgcaaccagcgctacacactacaacggcatcctggagtacaatgcgcacagtctgtatggcttctcgcaggccattgccacgcatacggcgctgcaagggctgcaggggaagaggccgttcatcctgacccgctccacgttcgtcgggtcgggggcgtatgccgcgcactggaccggagacaacaagggcacgtgggaaaatctccgttactcgatctcaaccatgctcaactttggcatcttcggcatgcccatggttggctctgacatctgcggtttctacccgtcgccgactgaggagctctgcaacaggtggattgagctcggggccttctaccccttctccagggaccatgccaacttcgcgtcaccgaggcaggagctgtatgtctgggactccgtggcgaagtctgctcggaacgcgctcggcatgcggtacaagctgctcccctacctgtacacgctcaactaccaggcgcacctgaccggggcccccgtggcgcggccggtgttcttctccttccccgacttcacgccgtgctacgggctgagcacgcagttcctgctcggtcccggcgtcatggtgtccccggtcctcgagcagggcgccacttcggtgagcgccatgttcccgccgggcacctggtacaacctgttcgacatgagtaaggtggtggtgtccaggagcggggccccagtgaagctggacgcgccgctgaacgagatcaacgtgcacgtgtaccagaacacgatcctgccgatgcagcgcggcgggttcgtctccaaggacgcccgggcgacgccgttcacgctcgtggtcgcgttcccgttcggggcgacgcaggccgacgcggagggcgcggtgtacgtggacgacgacgagcgcccggagatggtgctcgcggaaggccaggcgtcgtacgtgcgtttccacgcgagcgtgcgcggaaaggccgtgacggtgcggtcggaggtgctgatgggaagctacagcctgcacaaggggctggtcgtcgagaagctctcggtgctgggtctggagggtaccggcaaggaccttgccatccaggtggacggcacggacgccactgccgtcgcgacgtcgagcccttactttgcagcaggtggcaacgcgaagctgcagggggaagaaggcgtcgaggatagtaagaacggcgtcatggtggagatcggcgggctggcattgccgctcgggaagagcttcaccatgacatggaacatgcggatcgaagcatag

SEQ ID NO: 41734 - DNA, 177 bp, Zea mays
  Peptide Sequence Number=SeqID_85109
atggagcagttcgagcatggagtctgcacgcaccaaggatcaactctgctaccgtcagaaaatacaaatgcctccagtatggagaacggggaaccagggtgtcgaggcatttgctctaccattgcgggcactgtggagcactccctcgccgcgcgagccgcgaggccctctctgtga

SEQ ID NO: 41735 - DNA, 165 bp, Zea mays
  Peptide Sequence Number=SeqID_85110
atgggggggtcgcggccaggatttataccagaggataggggcaaggtccgagcggaaaaggaggcagtgaccgatggaattgtggacattactccacaactcatcacactcaatcaaaaatccaaatcagacaaatatcataagaacaaacattcaagtgcatag

SEQ ID NO: 41736 - DNA, 327 bp, Zea mays
  Peptide Sequence Number=SeqID_85111
atggcacccaagagagctagttcgaaggcagccccatccgtcgatgaagcagcgaaggccgcgctgctagccgagaaaaaaggaaaagccctcatagacaacactccccaagaagcctgcgaagacgaagccctcagcaagagacaacgacacgaacaccccactcctgaaggcactgtacgcacctgcagctccggagggcaacaacaagcaccgcccctaggcttcgctccaccagagggcgaagacgcaacagaggacggcgaagtcatcagcatctcagccgaagagcagctacagctacggtccctactgaaagtcgcctag

SEQ ID NO: 41737 - DNA, 1998 bp, Zea mays
  Peptide Sequence Number=SeqID_85112
atggcctcagggcggacgctgctacaaccttgccctcgcccacgccgacgctcgaggggcgaggacaagtacaaagagccggaggcccgaagctcgaggggcggtgatcccgtcggcgacgggaacttctcgagccgcctccgcctcggcaccgacgacagggggccgtcggcccgccgtcagatccccactcggatcctcccggacgagcagggcaccaacctccccgcggaggcaccgtaccgccgccttccagcaggaaggggcactgggggccaagccgacgagcccgacgcgctggggcagacgacgcctgccgtcgaccggccccgcgttgtcgaagtccgacccgcccacagggccggcgagcgccctctccctcgaacgtcgcgggagagggtgacccacgagcccgcgcgggaggtagagctccggctcatcccggcctccaccccagcgaggatgatgaacatccttgaagctgagggtgggaccaagatcgcagcccggcttgcttccccccacccaggggctggtggtcaccgtcttggaaagacgcgatgcataagggagcgtgaagacatggtcgccttccaagggggtcaccctccttttaaaggcggctctccctacttgcgtccccagccgtcacgggctgagtcttctccaacacactccaaggtcctcccctgcggcgcgggggctgggtcccacacgtcatgcaagccgactcagagcagaagaagccaaaccgccgcgcgcggtgcgtacaaccgcccagcggttacaagcgaccctccactttggcccagaccagcgggcgaaagggtgggtagccgtgcaggcggcatgcaaccgcgccaagtgggcgcgcttctccaactcccaacacgcccggcggaggcccaggcccacgcgtcatgcaaccggcgcaccgaatgcttcgtgcatgcagctgcaccgccacttgcgccaccaccgcgcctcctcgactgcggaaccaatgccgcgactcgaggcgacccagcgcgcgacccagcagcaccagcctggcgcgacggtcaatgcggccaaaagtgggccggcagtaatggcggtggcaggcgggcaggagcagcggccacgtcgagaagcgagcgacgcttcgccttcgccataatgaccgtgtcaaaagagggaccgagaaaaggggataccccgaaaaggatccttccccgagaaggaaccaggctccgagcccccctactgatcagaggttcgaaggctggccccccggaagggttcgacagccgcctcagatcgcgtgggccctacacccactactggtcagaggttcgaaggccggcccctcaaaagggttccacggccgccttaggctactcgggctccgcgcccattactgatcaggggttcgaagggttcacagccgcctcagacaccgagcgagggatgaccatggaatcccatcagagggaggcatcgagccctcggaccccgtcaccaggggaccgggtctggcagatcacccgcagctcatcggagacaccatgttcggcgcccatcgagggtaacatggcgcttttccccccctcctccttgcggaaaggcgacgcaggggccgtcaacataccagcccgagaacttgggacccgaccgtacacccgggctatggccagctcgcatgagggaacgaccagaccagccaaagcgttacgcgagacattaagacctcgaaggagtgaaaccactcctccgaggcctcgggggctacacccggcgggtgcgctcgcgcgcaccccccggaacaaaacgcaaccgagaaaggctggtccccttgcaaaaaagtgcgacgaaagcctccaagcgagtgctaacactcccttcaaggctcgggggctactgtcggggaccataattaggggtaccctcaaggctcctaattctcagctggtaacccccatcagcacaaagctgcaaaggcctgatgggtgcgattaa

SEQ ID NO: 41738 - DNA, 928 bp, Zea mays
  Peptide Sequence Number=SeqID_85113
atggtgacctccagttcgatggcggtggagagcaaaccgggccgcggcctctgcccctccctcagcctcaaggattttcatcaccagggctggggaggggactgccgcgtgcctggctctcagacccgagcggcttcggagccactctcggcgccggcttccgccacggcagctggaagaggttcttccaccgacgagatagccagggccgcccacggaccgacctccaactctacggccttatgcccgtccttgcctcacgagtttgggcatgggcgggggcctcctggcagcagcatccgccctgaggtcatcgctgccgctgttcggccccccggagcagaagtcgtcgtcgtcgccgctgccggagcgggcgacggcacgccgttcgtcggtcttctattgctccgtagccccccccccatcgagtggggttgttcgtacctgcggaggtggaaccggagttccgtttgtaatggcactttgaatgccagtgtttttgttcatcgtggctgtcgaggcctgaacatccttgttgttcgaggcttctcttgcttagttaaaggaacccctcggccgctcttcgatgagccgaggccaggggtagtggtgtcagcgcgaacagaggcagagttggctcgaaaagaagacctggtcggccggagcctggccgggtcgtccgttagcgggaccgacgccggaattgatatgccgaggcctcgggccgggctgatgtccttggaggacggctggccgaggccccggggtgaccggccgatccgcctgcccgagccggattctcggagaagaccctggcggcgatggcccgggtgtggtgatgacgtcgtccttcagagtggagatcctcggaccgcatcgccgtccgaggctaggtcggacctcgccgaaggtgttgtcgacaccgagg

SEQ ID NO: 41739 - DNA, 339 bp, Zea mays
  Peptide Sequence Number=SeqID_85114
atgcggcgggtacgcacggtctggcgattcacctcccaagagtcgagtggtccaccgttcagcgagtgcgggcgccctgctactgaagccaagcaggcagatattgaagagggagatactggtgaagaagagattgattataacaccgttatgccatcgaagcccagccatttggattttgggaagtcgactatgtccgaagctgatatgcccatgatgacaaagctgggtgttgggaccatgcttcgtcaccgaaggtcctgcaggaagaaacaccttcggcaaaacctgtttatacgtgacaccgaaactaccgctcatgaagcttcgatattatag

SEQ ID NO: 41740 - DNA, 150 bp, Zea mays
  Peptide Sequence Number=SeqID_85115
atggcagttggggtcagtgaggcattgtacgccaaggcgataggttctctggaggacatggttgctggagtgacttggccgtccatcttgccaccgggttggactatcgagtgggaccctgcctcggctgaggaggagcatgaggagtga

SEQ ID NO: 41741 - DNA, 348 bp, Zea mays
  Peptide Sequence Number=SeqID_85116
atgtgccaccgctcgccggacttcatccgagcgctggtgaacatggacaacgccaaccagtgcaccatcgctcggttccttgcaccagtagcacccccgacctcccctaaagctccccagctagtagaattgaactctagcatcgctgttgattggaattcagagccaccgtcaatcattgccacctccgcatggagaccgggcagctccgaccaccactggccacaacccgaccatcaacgtgttcgccgaagcctccctgacctcaccgaccaccccgccggagctctaccaccgccgaaattcaaatttaaatcccgcagagaacttgaaaaaggcataacttga

SEQ ID NO: 41742 - DNA, 273 bp, Zea mays
  Peptide Sequence Number=SeqID_85117
atgaaattttttttgaagaaaacaaaaatagctcctgagccgaaggcaacaatctctaaaaagctaaagcttgacacagtgccctctaaggagccgaagatagatgtcaaagctgaagctgaaggtgccaccgaagccaaagatgctggtgaagccaaaacgacaatgtcagaaattgataggattgtgtcagatatagttgcagatgtcactacagagacaaatgtagctgttgaagaaataatggccacagtgctagatgaaggaaaataa

SEQ ID NO: 41743 - DNA, 354 bp, Zea mays
  Peptide Sequence Number=SeqID_85118
atggccgacatcgaccaggatgagcccctcaatccaaaggccctcgccgaccccgacaacaacttctacaagatcaacggtgtgaggctgcaccacaagagggggaggaggttggggcggatcctcggcaaccttgggaaacatggcgtggtggcggagcgggaacaatggaaggggatggagggggcgttgatggtgggggggggtcctcggcaaccttccatgacgggcggtgtttcctacgcgcttgggaaacgtgacgtggtggcggagcggcaacaatggaaggggatggaggagggcgttgatggcggggatcctcggccaccttccattgatggaggagggcgttga

SEQ ID NO: 41744 - DNA, 552 bp, Zea mays
  Peptide Sequence Number=SeqID_85119
atgactcaaccgctaccattttcccctttaagtcctttggaaccaacattgactcaatttatgccaacttcgaaggattctgacgaaggtggaaaatcttcgaagggccatgaaattttatctgaagagaagggtctaatgttaagtaaagccttaaggatacaacaagagaatgaagaaaaggagctgaccacacttcaagacgaagttgcaaaacttcagaaatccttagaggagaaagaggcagagataacatccttaaaagaaaaggtaaacaaagtcgaaaacaagaatgaagaagcaataaaagtgcataatgccgatatgacgaagattaagaaacaagacaaatcaatcagttctcacggaacggctttggtactcgagaaagccagatgcgaccttgtcaaggctgtcggagaagctagcttcagcatggccgttgatgatatcaaagctccttcgaagaatgtactcaaccccgcaaagagatttttctctgagctatgggacaaaggaggccaacagctatctgtcctagaagctgaatag

SEQ ID NO: 41745 - DNA, 381 bp, Zea mays
  Peptide Sequence Number=SeqID_85120
atgggaagccgctccacctctagctgggcacctgtagcgcctccacccgagctgccaatcatggagaatgcactgagggaacgaaccaagcggacggtcaagcgtaagaaaaggatagtaaaaaggatgatcatgaagaagacactcacccgaccgacggggacaaaatctcgtgtcattgatgcctgggcgatcaagttcgcctccccaaaaccaccaatcatgcactcgatggtttccaagctcgcgtcagctcgcagtgaagcagattcgagtcaccgaccctcctccgcctctggtttgtcgctcgccgcaggtcgcacaggtggcacagccctgctggagcacaaagcgaccacggatgtcgttgattgtccctaa

SEQ ID NO: 41746 - DNA, 252 bp, Zea mays
  Peptide Sequence Number=SeqID_85121
atgggcgggccagccacggatcctaccctagtcgtggtggcgcctactgtggaggtcgtcgctttaggtggcatggcgcaggcggcaccactctctagggccgttcgcaaggtgatgcgcagggaaagagtaggtcatggcctatcccgccatggtggagacggctcctcgggctatgtcgcgatcttcgattcctttggtggctgcccaagggaggggtccacccaaatgcactcctccccgtacgtttga

SEQ ID NO: 41747 - DNA, 453 bp, Zea mays
  Peptide Sequence Number=SeqID_85122
atgggcaagagcaacaaacgcaagcgcgagccgactcctccatcggaggacttcggcgactcggaatactcggaggagaagttctcctccgagtccgaggggtctccagctcccgtctctcccccggtgtcgtctgacgatttagacgactcccaggggattgccgcggaggtctggacttatatccgggccgtcgagtgctccgggctcgagggctcgaatgagtcagagtactcctcggacgaggaggactcttcggactcgtccgaggagggcggtggcggcgatggcggagacgatgacgacgacggaggcgacggtgacggcggcgacgatggcggtgacggcggcagcaggggcggcaacagcggcagcaaaggcggcaaagttggcagcggcaggggcagcaacggcagtggcagcagcaagggcagcaacaaggccagtggctag

SEQ ID NO: 41748 - DNA, 477 bp, Zea mays
  Peptide Sequence Number=SeqID_85123
atgtctcctgctcgcgcccgcgcctataaagcccccttagacatcgaccgtactccacgcacgctcgacctcaccggagccagagatcaccggcgcttgccctgcaaacggcgtgcccgcagccacccgatcccctgccaccgtagaccggcctgcagagcccttcccagccacgcccgaccctcggaagagaccgtgcatgcctcggtgaagctccccgagcaaggaatcggactttgcctcgccggagaagccagtccacggtcgccggacttcacccgaccgctggtgaacgtagaccggcatacatattcttattcattgcattcgatagattgcaacctcgctgacggagagtacgtcctcgtgccggagcaaggagttgctcaggaggtagccccggatccagcaccagagcgtgccccagaggatctgcctgccccagctttggaagacaagccccggttttatgcataa

SEQ ID NO: 41749 - DNA, 498 bp, Zea mays
  Peptide Sequence Number=SeqID_85124
atggactacctagtctcgagagagggcgagggagaggacgacccaaacggtggcgagcttgaagatagggttgaaggtctcgtcgtagtccactcttgggcgctaggtgaaacctcaaagaactcaacaggccttgtagcagtggagcaagccattagaagtcagcttgttcctgaagatccacttgtcgttaaccgcattggtgtttgtggggatccacgagggcagcgcggatggaggagggaactagggaggcatccgaagcctagctgttctgggagaggtgtaaggacacgagagattcaactgaatgtcgtgggagagaaagaaggagcgagagatggagttgtcgaacttgcgtttattgtcacattggagggcacgaatcggtcgacggaactaggtagagacctaggcgaagaattgggtgaggttgacaaacgtgtcggacttcaaccgaagcacaaaagtccaaagaaaacgagagaaatcatctaa

SEQ ID NO: 41750 - DNA, 267 bp, Zea mays
  Peptide Sequence Number=SeqID_85125
atgcagtacaatggatcaagcagtctcattagctgcgagaagcagacgattcgaatcgagttttcatccttgcaagtgaccgcacttgtacccaccataaccggaatgggagaccacgtctcaggtcgcgtgaggggtaaagtctacgggcagatcctctggggcacgctctggtgctggatccggggctacctcctgagcaactccttgctccggcacgaggacgtactctccgtcagcgaggttgcaatctatcgaatgcaatga

SEQ ID NO: 41751 - DNA, 916 bp, Zea mays
  Peptide Sequence Number=SeqID_85126
atgcccattggttcccatgggtgtcttgatgggtgttggcacttcgaggtcttcgaccaggcagatgaagactttgagcgagatgtctataaggtcgaagaccccgttgtgaaggaatccgtcggggccctctacgaccggatgtggggtccgcacggccgtgaggtggtcagggagcgggccgagattgcgagggctcaggcggagcgcggcgagcgggtggacgacttcggggctctgaacagcgcgctgccagacccggagccgacccctgcggaggctgtgaccggggctgccctggagccaaccccggagaccgcagcggttgcgacggctgcccccgcatctgctgcgcccggcgaagacctgcccccaaaggtggccgaaggcgcccctgatgcccccgcagcagctgcgccgagtgttgaagatcccgcggcggaggcggtgaaaacaacggcggaagtggcggcggagccaacggcggaggctcccgcagcgtcagggccttcgcaggttcaagattttgggcctgcgcacgcaaccgctactactgagtttttggcggcttcgaccgcggaaggtgggaatgaatgtggtgggtctatatctgagttttttgattttactgactctgggagctcggttgagtggactgaggagtcgtcggaggaggacttggattattttgcggccttcgacgtggctgcggcggaggcttcgccacacgccgcggacgcgccagacgtgccaggtcctagcaccgggcgccgacgacgaagggcggttgcaaagcgtagggttagtgcggaggaaggggctcggcttcgcgttagtagggctggtcggcaggaactgttgtctttgccggccgctgcgagtacaggggaaggggagctgcgaagtctttttgcgg

SEQ ID NO: 41752 - DNA, 906 bp, Zea mays
  Peptide Sequence Number=SeqID_85127
atgacagttggcgcgccaggtagggggacattagtgtgccaagtgacactttctgctctgatggcccaatcgtcagcatttgccggaggcgagacctttgccccagggagccgcatcacattcagcaccctcgacttcttctccaccgccaccagcgagctcagcctcaccacccccaatgttcctgacaccgtgggcacacaatctgcacactccaccaggagcaaggtagagaagcagcgccgaaaaaggtgtgccgctgccttaaagcagtacctcaataggcacatcataagaaaggcggatggagcctcgtcttcaactctagtggacgtcattgatcaccaactgacattcgtcctcgacttgctcgaggacgattcaagccacaactcgaccgaggctaactctgacattgaagaagcatcagaaagggcctacttcgtggcaccgccatcgccaaatgacaatggtagaggggacaaggaggcccccaatcaagaggaggacgatagcgagcaatattttatcaatcccgcagcagccttgatgctccgatccaacccagagtcgggcgcgttggaggcgaaggtgatgtactggaaccttcacaactttgtggatagggacatcgtgcagcaaggtgaagaagtcgagcagccgcacaaaagtaggcgcgagcgcaaccccaacccgcttggaccaggatcgcgtgccttcgggcatgagatcaggattgcgcatttccccctaaaggtacatgcaccagcaaacatctccaaatatgacgaatccacaaaccccaatgtatggctgaaggactactgcctcacatgtcgcatggcggcgatcaaggatgattacctaatcatccagttcctcccctacaccacatggaaggggtga

SEQ ID NO: 41753 - DNA, 483 bp, Zea mays
  Peptide Sequence Number=SeqID_85128
atggttcctttcatgcctatcaggatgctcccgacactccctatttttgctgcttggctcatcggcgtcacgcgagctctttcccttgcagaaaattgcccctaccgcatcctccctatcagtgaacttggtcgctatgtcgaggaggtcgacagtcatctttggtcgcccctgcccgagctcgtgggtgaggtcctcactgatgttgtcataggtgaaggcattcaacacgtcaggagctcttgggacacttgtaggtgccctaaagttcctgacaaaggccttccgaagggggaaatgcgcaatcctgatctcatgcccgaaggcacgcgatcctggtccaagcgggttggggttgcgctcgcgcctacttttgtgcggctgctcgacttcttcctactcccaacacctattgtcgatgatgtgtcagatatcgcagatgcctccaaggcggtccttcatgggaacatgtgtccttcttga

SEQ ID NO: 41754 - DNA, 277 bp, Zea mays
  Peptide Sequence Number=SeqID_85129
atggagaatttccctgaaaccatggggtgcctcatgatctttggtggggcagaagcatacggtgacaagcgtcgcctcaaggtggctcaagtagaagtgttcgtgttcgaggtggtggacttcctagggtattacaacgccatccttggaagtccatgctacaccaagttcatgaggagcatccctaaggacatcgccaacacgaccatggtagaccccggtgccacctggcctatcgatggagaaggaggcgccaaggtgaccctgagcgccgccg

SEQ ID NO: 41755 - DNA, 294 bp, Zea mays
  Peptide Sequence Number=SeqID_85130
atggccgcggtgctcagcgcgttcgtgccggacaccgcggtccggtggcgcgggctggtgacgggggaggtggcgcggcggatgggcgtcgcgacggaggcgaaggcgctgctggcgaggctggagcgggtgggcgccgcggtgcgggacgccgaggcgcgggccgcgtgcggggacgacggcgcggcgcggtggctggccaatgtgcgggctgccgcctacgaggcggacggggccgtcgaccggtgcagggtcgccgcacgccggcgcagggcccacgaccaacagaagcag

SEQ ID NO: 41756 - DNA, 420 bp, Zea mays
  Peptide Sequence Number=SeqID_85131
atgggcaagagcaagaaaggtggtggttcttcgcatcatttcggcgacaagcgcaagcgcgagccgactcctccctcggaggacttcggcgactcagagtactcggaggaggagttctcctccgagtccgagggctctccggctcctgccactcccccggcgtcgtctgatgattcagacgactcccaggggatcgccgcggaggtatggacttacatccgggccgtcgagcgcgccgggcttgagggctcggatgagtcggagtactcctcagacgaggagaactcctccgactcgtccgaagagggcagcggcggcgacagcggcaagggcggtgacggcagcggcaagggtggcagcggcgacggcggcgacggcagcaagggcagcagcaagggcagcaacaaggccagtggctag

SEQ ID NO: 41757 - DNA, 2880 bp, Zea mays
  Peptide Sequence Number=SeqID_85132
atggtgagcggccacatcttccactgccggaagaactcgtggccggcggaggagtacgtcggccggaccgcgctgcagctgttggatttcgatggcggggcgccgccggagcaggcgtggcggaggcggctcaacagccacgcgaacatcctcaaggagttcagtgtcactttcatggaggcaatgaggatgatgagccttggcctgagactatggtcgtatgttcgggaggaggcgtcacatggacggaaagcaccgatcgatccgttcacaaaagagcgctgtaaaccgtcagcttcccagggtgtgccacttggtgggatgggatggcataacactgccttttctgaatggttgcatgcaaccaaggttatgatgtctgggaagatatttgtatctcgagacgggggtaataagaaatactcatcagttttggctcctggacatcatgaaggtctgaagaaaaatagtgactctggaatttcttcatgggactggaatttaagtggtcaacactcgacctatcatgcattgttccctcgggcatggactgtttatgatggtgaacctgatccagaccttaaaatctcatgtcgtcaaatatcacctttcattcctcatgattacaaggatagcagtcttccaacatctgtatttgtgtatactctagtaaacactgggagagatcgtgcaaaagtaagcctgttaatgacatgggcgaattctattggaggtttttcgcataattcaggaggccactacaatgagcccttcataacagccaaggataatccacctgtcacttttgctgttgctgcctgcgaaactcagaatgtgaatgtgacagtcttgccagtgtttggtctttctggagaaaaccatgtttccgcaaaggaaatgtggaacaccatgctacagaatggtcactttgatcgggaaaatttcagtgctggtcccagtatgccttcttctccaggacagaaactctgtgcagctgtctcagcctcaacttgggttgagccacatggtagatgtactgttgtgtttgctctggcttggtcctcacctaaagtaaagtttcaaaaaggatgcacatataacaggaggtacacccaattctacggaacttctgagaaatcggctgttaatttggtacatgatgccttaacaaaatataaactttgggaagaagaaattgagaagtggcaaaaccccatactgaaggatgaaaggcttccagaatggtataagttcactctttttaatgagctttactttctggtagctggggggactgtttggacagatggtcaacccccagcaatcgatgagaaaaagagtcctggttttaatcaccagaagtcctcaaagaggggtactaaagacaccaatcagggatctgttaaagatagacatgtcaacctggcagtggagcaagtacctcatggtggttacatggctaatggtgatgatcacagtgtatccaagttcgcagcagttcatggatcagaaatgcaagaacaaatcaatggactcaagtcagaagagccaattccttacttgatttcaaaggatggccctgaacacgttggcaagtttttgtatctagaaggagtggaatacatcatgtggaacacatatgatgtgcatttctatgcatcttttgctctccttgatttgttcccaaaaatagagttgagtatccaacgtgattttgccaatgctgtgctgtatgaagatcggcgcaaagtaaaatttttggctgatggtacatccggaatccgcaaggttaaaggtgcagtgcctcatgacctcggaacgcatgatccgtggcatgaaatgaatgcatataacatacacgatacaagcaaatggaaagatttgaaccccaaatttgtgctccagatatacagagactttgctgctacaggtgatatgcaattcggtcgagatgtttggcctgcagtctgtgctgctatggactatatggatcagtttgaccgtgatggtgatggtctcattgagaatgatggatttcctgatcaaacctatgatgcttggactgttcatggaatcagtgcttactgtggttgtctttggcttgctgcacttcaagctgcagctacaatggctcatcgccttggggatcggcactttgctgagaagtacaagctcaagtttataaaagccaaagcagtatatgaggcgaagttatggaatgggtcatatttcaattacgacagcggcacaagtagcaacagtagatccattcaggctgatcagctggcaggacagtggtatgctgcctcgtcgggcttgcccccgcttttcgatgagcacaagataagaactgctctgcaaaaaatatttgaattcaacgtgatgaaggttaaaggaggacggatgggagctgtaaatggtatgactccaaagggaaaggtggacgagacatgcatgcaatcacgtgaaatctggactggtgttacatacgctgttgctgcaaatatgctgctccatggaatggagcatcaaggctttacgaccgcagaaggaatttttactgcgggatggtcagaagaaggatatgggtattggttccaaacaccagaaggatggaccacagatgggcattatagatccctcgtatacatgcggcctcttgccatttgggcgatccagtatgcagtttctcctcccaaggctattcttgaggcccccaaagttaacctaatggaccgaatacatatctcccctcacatggtccgagcaattagcgagataagcattagaaagttttgtgctgttcacttgaatagagctagaaataaaagaactgggaagctggtgtctacggctaaccgtagggctgttggaagttaa

SEQ ID NO: 41758 - DNA, 636 bp, Zea mays
  Peptide Sequence Number=SeqID_85133
atgggggatacccgccgtcttttcgcctcatcgttggaggaacgcaactccgtgggagttggtacctttcagccatcgttcggcttcaaggattttcgtcatgcagcccggctgcacccctccaccggcggtcacccaagatgctgcagcgtgcccggctttcggacgcgagtggcttcggagccgctcgcggcgccggcgtctgccacggcagctggaagaggttcctacgccgacgagatagccagggccgcccacggaccgacctccgactctacggccttctgcccgtccttgcctcacaagtttgggcatgggcgggggcctcctagcagcagcgcccgccctgaggtcagtgctgccgctgttcggccccccggagcagaagtcgtcgtcgtcgccgctgctggagcaggtgacggcgcgccgttcgtcggtcttctgttgctccgcaggccttcccccatggagtggggttactcgcctgttgattatctgaaccgcttcaccaagcatgagtcgccccgtgtcaaggtgacgagtgagagcctagccgggttgtccgttagtgggaccaacgccggagttgacaagccgaggcctcgggtcgagctggcgcccttggaagatgattag

SEQ ID NO: 41759 - DNA, 276 bp, Zea mays
  Peptide Sequence Number=SeqID_85134
atggcggtcatgcgagggatccctgcattggagcttcctattaactgtagcggggttttcttgaaggctagtggaacttttgtaaagggctccgtaatggttacccctaccttcgcctccctgggtagaaggttgaatgggaaagtcgcgcgatcccttgggcagatgggttacatgacttgtggggtaagatgccgcaactctcaccgagattgtaaaactggatatactagccgtgcttcaccggtcatggagcagctccggaccctcccatga

SEQ ID NO: 41760 - DNA, 189 bp, Zea mays
  Peptide Sequence Number=SeqID_85135
atgacgagctccacgggcgtgtaccccaacacgagcgccatcgagtcggcggtgccgccggtggaggacgagggcaccaaattgttcggggatttggaatatagccgtcgcggcacccagcagaggaagaaggacctggcgaacggggcccacgcgacagaggaggccagagctgtcgcgcgcatgtga

SEQ ID NO: 41761 - DNA, 471 bp, Zea mays
  Peptide Sequence Number=SeqID_85136
atgttgaaccatatacaacagtcttcaacccaagaatcaccaagcattgtgatcttaggggcgagggagtggaaaaatggagttgcttgtgatttggcagaggggatttatctggagtgtgcttttgctttgagcgagatgggagttgagggagctggtggggggtttatcaggtgcgatggaggggaaggggggcctggtgttgccggcgatgatggcggcggtgggtgcgctgcaaaggtggcgtgggcggcggtagtgcgctgcaaaggggggcatggggtggtggtagtgcgcatggaggcgggcacgcgtgggggggcacgggggcagtgctttgattctcacggtcggtcctttggactgagcggctggactggcttcttctgtagcttgttccaggcttcaaggggctctagccaaagtgaagaaaaacttcactacccaatgcacgcagaggactgggtataa

SEQ ID NO: 41762 - DNA, 674 bp, Zea mays
  Peptide Sequence Number=SeqID_85137
gcaacaaagtcgcaaccatacaccgacagtcacccaagacggtgacctccagcccctggatggggagaggcaagccgggctgcgatcttggtcccaccctcagcttcaaggatgttcatcatccccgctggggtggaggccgggttgagccggagctctatctcccgcgcgggttcgtgggtcggcctctccttcggcgttcgagggagagggcgctcactggccctgcgagcgggtcgaacttcgacaatgtggggctggtcgacggcgggcgtcgtcagcctcagcgcgtcgggctcgtcggcttagctcctggtgccccctcctgccggaaggcggctgccgcgccgtgtgcacgggaggaccgcccaagatatcgcgcgctgccagggcggcgttcgtgttctggggcggttctccctttgcaccgctacggcgcctccacgcagagaggaaaccctcggccgctcttcgatgagccgaggccaggggtagcggtgccagggcgaacagaggcagagttggctcgaaaagaagacaagagcggagacccttggaccgcgtcgccgttcgaggctaggtcggacctcgccgaaggtgttgtcgacgccgagggtgctgctgctccctttagccgtcaagatccgagcctgcaggatcggattatcttgtag

SEQ ID NO: 41763 - DNA, 273 bp, Zea mays
  Peptide Sequence Number=SeqID_85138
atgaccgggaaaaagaccacggcttcctctaacggcggcactccaaagaaagccaaggtggtggtggaggatgaggaagatgtggggttggaggatgaggaagaggcgactgtgacactatctgtggagaaggacgcgctggagaaaaactacatgcttcggtttgtcggtgcttttcttctcattgttagaaatgatctgttcagcatagaagacctgtgcagcatgattagcaaggatccatgggtcatctttgtaacctaccttacttag

SEQ ID NO: 41764 - DNA, 183 bp, Zea mays
  Peptide Sequence Number=SeqID_85139
atggggtcttgggcccctaagtgggccggctgggcggtatggccaaggttgcttcacaacgaagcatgcccgagccaggcctcgggagagcagagggggcgcccaccgtctgaggaggccctcgggcgagacgtgaattcgtctgggaccactgttccaacccgaggctgggttcgggtgtga

SEQ ID NO: 41765 - DNA, 1014 bp, Zea mays
  Peptide Sequence Number=SeqID_85140
atggatcctagcacacatatgatggttcacactctccaaaccacccgcgtcaacaccagctacgcccctcagccccggcagatcccggtctacccagtggtagtcgaggaagttccggcgaatctccctcccgtccgagtggagaacgtaatcaatttggaggacaactcggaggagcagctgccgacccccaccccgttggccgagtccctggccttcgtagctgggtcatcgacgtcagcatcgtcggcaccagccttccaagcacctgcacctggaggcgacgaccccgacgactccggagacggcgatgacgaggatgacgacgacgaagacgatggagaagacggacacatcaacgaggaagctgaccacgcccagcaggacaacttcatggggtttggtcctgttgtcgaacattatacatcaatgttcgagacagggcacttccccaacctgctgcaggaggtgctgcatgcgctaggcgcctacgtccgccccctgtacgagacaaggcgggtgagcgagcctccccgggcttgctattacatcactcgcatccacgtcagggtgatggatgcaggtgacagggggttcaggactctgtctgctcacgagtccctgataccgttgtccacctacgctgcccgtcggactctgtggtcgctcagccacacctaccggcagcagctgcagaacacgaggttcaggcatcttcctcaacgcctgcgtggaggaagccagaccaacattgtcccaggtgagcctggtgaggatcgcctcaacaccctagctggtgtagtggccggtctcaacaccgacctggacagtgccaccctggatctctacagtgtgcacttggagctggagaatgcccacgccaggattgcagccctggaagcccaactgcaaggactggatccgccagaagctcaggtccccgtcgtggcgctgtctcctccccgcaagaggctgcgctatggagagcccggatccgtcactaggctgctctaa

SEQ ID NO: 41766 - DNA, 282 bp, Zea mays
  Peptide Sequence Number=SeqID_85141
atggcagtgtctgcctcgcccgagcttgtctcgggcgagaaggacaaaacatgggacatgactcatccgaagtccgctggggacaaccgcattcaatgcgaatacctaccccactcaggcctgcgggagggcattccttcaattgtgacttccgcctcgtctgagcctggctctgacctcggtatccatgatggaggacgccccaacgtcatcatatgttctggagctgacgcgccccttaagaagcctttccccatacttagcactatgtcaactactacg

SEQ ID NO: 41767 - DNA, 513 bp, Zea mays
  Peptide Sequence Number=SeqID_85142
atgacacaaatgtattctatgggccgccagagaggccccctatgggacagagacatgggccttcaggggacatcaggaggtttccacttcggatccctctcctgcatcgtggaccagaagggcaccctgcacagtgtagcagacacaggaatgggagccccgaggtctcatgccaccgtcttggctcaaaagaagtccgcgtcgaggcctaagatgaccccgacgacgactgtgggcaagcctcggttagtcgtgattcgggccgcatcggtgcgcgcccaggttcaggggcaccgactcatccgcgtgccgcatcagactatcgtggcaccgaccagacgtggggctacaccatcgccaccgcctcgggcgtccatcgtggctgttacaacgcggtggactcctttgtccacctccctaacccaaatttggacctggatcaatcagaataagaaagggactaagggccccatcattctcaagagcaatggattgatgatacccataatctag

SEQ ID NO: 41768 - DNA, 303 bp, Zea mays
  Peptide Sequence Number=SeqID_85143
atgggcgtgagagaggtggaaatctcgcggccttcgtgttcgtcccgcgcccaggtcgggttggggcgatgtggaggctcctccgaggtcgaggtcgagtccgagcccctaggtcgggcgaggcggaggcagttggctgaggccagggcggaatttgagtcgaagcggagttcgtcgtcttctggggctgagcccaagtccgagccctgggtcgggcagagcggagttcgccgtcttccggggctgagcccgagtccgaaccctgggtcgggcggagcggagttcgccgtcttccggtgctga

SEQ ID NO: 41769 - DNA, 558 bp, Zea mays
  Peptide Sequence Number=SeqID_85144
atggaggcaagaagagcttcgaggtaccgagtgcacgggagaaggtcatggaggttgaggaacccaaagccaggggtgaagaggaagacttgcaaagtcaagatcatcgagcaccgcgccgaaactttagaggatttcgcgatggagcaagaggttgcatcctccgcgccacgagtacccgaccgccccgactctgggactgctgccgtacacgctgtgcagcagcacacgccagcacaggcgtcctggactccatcgagggcagcgcctacggcgctgtctgcggccagggaattgctgcgccacccccctagctccacggcttcaccgggggctatgaggcagtggcgcgacgacatcgaccggctgctcggcatgacacattctacttcgactagatcgaggcctcagtcatcccggcgccaacgcgaggcgacgacatctgtgcgctcgccctccgtaaggggtgcacagaccgacgacctccgggcagagctcaaccgtaggcatacgagagaggacactcggatctctttggaaagggcgcgtgagcgctga

SEQ ID NO: 41770 - DNA, 225 bp, Zea mays
  Peptide Sequence Number=SeqID_85145
atggcgagagtagcatgtaccctccgtggcaagactctggacggtggtgtatctgtgctctcggtgaggaagcagcaaacttttgttgctttttctctaaggtggtgccaaagaaagaagctcaagagtgaagtcccggaggatgttgtcactagtacacataggctctatagtggcggttctagagctgtttgcactggcgtctttcagtgccgccagtgctag

SEQ ID NO: 41771 - DNA, 183 bp, Zea mays
  Peptide Sequence Number=SeqID_85146
atgagggcgtctcagttggtcattgttgcgacccattccagggatcatccacatgctcccctttcgtccagatggcgtatatcagatccatgtggctgcacacgtgcagatccaatgcgcaaagggtttgtgtctagtggggtcatcgttaggttgcagctcgaggtcgagttgcatgtccag

SEQ ID NO: 41772 - DNA, 81 bp, Zea mays
  Peptide Sequence Number=SeqID_85147
atgtcggccgggggcctttgcccacggtcgggcaagaagaagaaaagacgtgagaaacaacctatcccggtaacacggtag

SEQ ID NO: 41773 - DNA, 438 bp, Zea mays
  Peptide Sequence Number=SeqID_85148
atggagtattcgacaaagacatcgcttccactctacaccatcggtattatctatcctttgtcggcgcagctccgctataattcaccggactgtccggtgtaccaccggactgtccggtacaccaacggagcaatgactatctgcgcgcaacggtcgactctgacggatgaacagtgcagcacagtaacacgacagaagtcagagcagaaggtcagaggggcaccggactgtccgatgccgcatgaggacaaagcctccaacggtcgaccagctccaagccctaatgacatggtgacgtggcggtgcaccggacactgtccggtgcgcccatcgctagcagccttctccaacggctacaatttggttggtggctataactaccaccccaaccggccacttaaagaggggggagcccaagcaacattccaagtcatatag

SEQ ID NO: 41774 - DNA, 1548 bp, Zea mays
  Peptide Sequence Number=SeqID_85149
atgacatggtgcaacagcttcaacgacgtgcgcgccgtggagaacaacctggccaccgccgccgccgtggccgccgccgccgccaagaaacagcagcagcagcaggcatcctcgcacgtcaacctcatcaggacctgcccctcctgcggccaccgcgcacagtatgaacaggtgcaggcggcggcgacgatccaggacctgccggggctgccggccggcgtgaagttcgatccgacggaccaggagctgctggagcacctggaggggaaggccaggccggacgcccgcaagctgcaccacccgctcatcgacgagttcatccccaccatcgagggcgagaacggcatctgctacacgcatccggagaggcttcctggtgtcggtaaggacggcctcatccgacacttcttccaccgtccgtctaaggcttacacgaccgggacgaggaaacgacgaaaggtccataccgacgagcagggcggcgagacgcgatggcacaagacgggcaagacccgcccggtgttcaccggtggaaaactcaagggctacaagaagatcctggtactctacaccaactacgggaagcagcggaagccggagaagacaaactgggtgatgcatcagtaccacctagggtccgatgaggaggagaaggacggcgagctcgtcgtctccaaggtgttctaccagacgcagccgaggcagtgcggcagcggttcggcgacggctaaggacgccatcccgctcgctgccaacgcagcgactgaccaccaccaccaccaccaccatgacggtggcaatggcggcggcaacaacatgttgaaggaggcaggcattgtagatttctacagcccagcagcactaattagctacaaccaggcagcttctaacagcagggttgccgcttctgctcacctggtgcctaactttgaggatggtggccgggctgggctagaaggggcgcagccgcgcagcgcagggcggcgcgtcgtgctcccgcccctcagagcagggcggacgcctggggctcagcgcatggcgggcggacgcgggacgcctagggtgcggaggacgtgggatgcagcacagggagccaaggaggagccagggaggatgttggaacttgctatcagtcgcaagaaggccaacagggcgccttgtgtgaaggacgcatgtgccctcagctacctaggttatccccagaatattcccacaaagcagggttacagactggcccgttacaatgggccggatcgcgcgtgggcctctgagccggacgaggccgcactgtgggatgccttcgtcgtcggtctttgtctggtgccgatcaagcgaagggtgcccctgcctgctttgtctctgtcagagcagcggctaagcagcggagactttgagcgaagggtggcgtttctgccttcgctccaacatttgccctccaagggaccagttcgacaaagtcacctggtgccgaagacgtcgcttgatggcggagacgctgccctcgctcgaagtggttccgcgggggtttttgatgtgaccgttgattga

SEQ ID NO: 41775 - DNA, 654 bp, Zea mays
  Peptide Sequence Number=SeqID_85150
atggctgaaaggtaccgactcccacggagttgcgttcctccaacgacaaggcgaaaggactgcgggcatccccatccgggggctcggaagccatcgtgggctgagtcttctccaacacgcttcaaggtcctccccctacggcgcgggggctgggtcccacacgtcatgcaagccggcctagagcagaagaagccaaaccgccgcgcgtggtgcatgcaaccgcccagcgattacaagcagttctccaattttgcccggactagcgggcgaaagggcgggcagccatgcaggcggcatgcaaccgcaccaagtgggcgcacctctccgacttccaacgcgcccagcatggaagcccacgcccacgcgtcatgcaaccggcgcgctggtcgctacgtgcaagcaactgcaccgccactcgcaccactgccacgcctcctcgactgcggaaccagtaccgcgactcgaggcaaccctgcgtacgacccagcagtgccagccaggcgcgacgacgacgcgctcgtgttccgttcctcgaacggctcacgcacgtgcaacggccgccccgcgaaccactcgccccatcgcattaactccgcggcgggacaggcggcgtctctggcaggggaagcgagcgacgcttcgccttcaccataa

SEQ ID NO: 41776 - DNA, 736 bp, Zea mays
  Peptide Sequence Number=SeqID_85151
gcgggcccagcagtcagagctccaacggtcggaacccaacggcctggtgatgtggctggcgcaccggacagtgtctggtgaccgttggcgcgaagtagccgttgctccactggctcaccggacagtccggtgcacaccggacatgtccggtgaggagttcaacgtgaagtcccctggtacaccggacactgtccggtggcacactggacagtccggtacccccaatactcctaagcatggctggaaaacatcttcaaaacagaccgtaaagactgacggattcacgcctcgcccgagggcctcctcagatagtgggcgcacccccggctcgcccgaggccaagctcgggcaaactttgtcatacaacaacctcggccaaatcgccttaccaccgaccggaaacaacactattcaccccgtttcgactactgtgccaaccaccagggtaaaactaatgacagtaagtcacgacctcccccgagttcagcctcgggcgcaacagggagctccgcctcgcccgaccccatgcctcgacctcagcctcagccttgggagaaggtctccgcctcgcccgaccccaggcctcgacatcaacctcggcctcgggagaaggtctccgcctcgcccgaccctaggcctcggcctcagcctcggcctcgggagaagtcaccgcctcgcccgacctcagcctcggaccgactacgccacaggggatacatcattaccctacccctag

SEQ ID NO: 41777 - DNA, 429 bp, Zea mays
  Peptide Sequence Number=SeqID_85152
actcttcgaggagatagagcttcaacaaaatctggcctttgaggggcatccggttgctgatagggatggcaattttacccgcgggttcggccgcctgcccgcccagccacaagcagccgccggccgccagaaaggccaaaccgcagaaccgagcgccctgcgtccggcgtccctgccgtccaggtccggctgccgtggtgctggtgagccgaagcggcaacaagcagaagaggaggccaaaatgaaggaggctgaactgatgcggggaaacccgttgattaatatcaacaatgttggctccttcagtgttaagagaaggtgggacgatgacgtggtattcaagaatcaagcacgaggagagaccaagacactgaaacggttcatcaacgacgccatcagaagtgatttccaccgtaaatttcttcagag

SEQ ID NO: 41778 - DNA, 709 bp, Zea mays
  Peptide Sequence Number=SeqID_85153
atggagccggtgtcccggaagcgcaagggcgcgcccccggtgtgctccgccaccaggtccctccaagatttggcctcccgcaagcgcgcctgccggggctccgagccgcagcaatcccactgcaccgacgcccccgtcccagccgtggtgatgacggcccccgtggcgagcggcgcgtcggcgccagcgagggtcctcccggggggcgggctcaagcggaaggtgggctgcatcgacaacgccacgcggatcgggtggcggaagcggctggagagcgagtacgacctccgcgatgagatcgggcacggcaagttcgggtccgtccgcgtctgccgccccaaggccgggagcccgggacccatggcgaggaggagttcgcctgcaaggccctaccaaagaacggcgcacctctcgggccacccgggcgtcgtcacgctcagagccgtctttgaagacaccgacgccttctacctcgtcgtgtcaccgccatccccgcagtgggagattccgatcctccgcgcccgcgcgcgcgccatggagccggtgtcccggaagcgcaagggcgcgcccccggtgtccgccactaggtccctccaagatttggcctcccgcaagcgcgcctgtcgaggctcgggcccctggtttcggccggggtggtttcttgcgtttgatttgatgggtgtctcatttcgttgccatcacagcggtg

SEQ ID NO: 41779 - DNA, 963 bp, Zea mays
  Peptide Sequence Number=SeqID_85154
atggcgggcatgtcaagaatcacaacattgtcatacctgatgttcccctggccacatgatggaagtgtttcttcagattttgcgggatctgccagattccacaaggtcttgcaaggtcaagaattgttgggtttcaaaacccatgatggtcctgctatttctgcttctcaggcaactgaagcaagaaatttgcagtacagtgatgaacggagtaacaataacttagggatcccaagacttggtgttaggtctccaactggaatccctgggtttccctaccattgctcaggctttggggaatctcaaagattccaaaaggtcttgcaaggtcaagaagtgtttcatcctttccgaggaggatgtttggctgatggccatataagaactgctggcatgtatcaacctgacggtaggcatgtatctggtgcagcttataaatggtctgcaccacaagggtatgatttcccacagccagcaaaaccggtttttctgttgcaagaatcatccccatcatctgtgatgatgtttccacaaactagatctaagataactcacttggaatatgagtactcaagacatgaggatggtagacttgataggactgttcctactcaagacatgggaagaagcaatcaaacattatctctttggcctcatcttgtttcaggcgaagcaatagaagaatgtactggaactgtgaatatgcactcccccgtcagtggtgcagagcatgaatcaaacaatgagagtacagttgaaaatggctgcaaaatctttggtatctcattggctgaaaagatccgatcatgcgatgaagcagactcttgtagtgcaaaatgtaattctcggctccagcctttgaagtcacaaatgccaaaatcgctaggcagctgttgggccactgttcacgagcaaaggcctgttgttggcagggtggttgacgtctcggcgacagatatgtga

SEQ ID NO: 41780 - DNA, 1224 bp, Zea mays
  Peptide Sequence Number=SeqID_85155
atgtggtctagaaaaaagaggtaccgatccaatctatcctacttttatgcttatatatgtaatgcagataatttgagccacataagatttatctcatcctctgaaattgggctgaacaatgtcgacagcaggccaaagcttgttgccggttcgcctgaaggatttccgggtcatattgatgggaagctggataacatggtggatcctgctgctgcctttgggatgctttttggaagtgactattttgaagattacgttggccagcttggtctagcatctatagcttcagtggaggttgaggaaaactcaaatagtcaagaggcaagagcaaaagttcaagaaaagataaaagagttacaaagagaaagagaacaaaagcttactcagagtctgaaggaccgacttcaatcatatgtagatgggagaaatgatgaatttgtgagctatgcaagcgcagaagctaggcgtttatctgaagcagttcatatattcttgccatttaaatggacaaagtatcatcttttgctctatctgatagaactgaatttgtttttccgcggcggttttcaatatgactattctggctatggtgcatctactggcaagattatagttcatgtactaaatttttttgttctacactctgcagaaaactttagggctctttgtacaggtgaaaaaggtgtcgggtccaatggcaaacctcttcactataagggaataccattccatcgtattatccctggcttcatgattcagggcggtgacatagttagaggcgacagcaaagggagtgagtctatatatggaggcatcttcccagatgagaatttcactgtaaaacatacacatccagctacacctgatttcaagaaagctttgtaccgagacctactaagttgtttgtcagcaacaagtccaaatattctggggttgttgctgtggcgaattctggacttgattctaatggatctcagtttacataactactatcaagacaagctgctttgtaggttggatggggagcatgttgtctttggcagggtgatccaaggaatggataccgtgtacgccatagaagggggcgctgggacttacaatggcaagccaaggaagaaggcggtgatcaccgacgctggtgagatacccaaggagaaatggggtgatcaggaagcgcagggtgttttctacttcttgtcaccatgccattttcaaatcaggtag

SEQ ID NO: 41781 - DNA, 219 bp, Zea mays
  Peptide Sequence Number=SeqID_85156
atgcagtcgagtttgttgcgcagcggaaggtgggagaaagtcccctggcaccacggagtccgcgctatccgcccgccgatttcccccaagtcatttccggatcctgctcgatttaccggtgattccgcggattctgttttggtggctgcttcggctttgtttggtttcagcggaggggaaagagctgacgctctggtcctacccaacagtggttggtga

SEQ ID NO: 41782 - DNA, 78 bp, Zea mays
  Peptide Sequence Number=SeqID_85157
atggcgtccgccacggctgggacggcgcgggtgcgctcggttctggaggagggcgacggtgccactgatttgacatga

SEQ ID NO: 41783 - DNA, 150 bp, Zea mays
  Peptide Sequence Number=SeqID_85158
atgggcgggggcctcctggcggcggcatccgccctgaggtcagtgctgccgctgttcggccccccggagcagaagtcgtcgtcgtcgccgctgctggagcagggatgcttgtgcgggcgagagttgcttctcgcggaaggtgatgagtga

SEQ ID NO: 41784 - DNA, 384 bp, Zea mays
  Peptide Sequence Number=SeqID_85159
atggcacccaagcgagctagttcgaaggtagccccatccatcgacgaagcggcgaaggcagcgccgctagttgagaaaaaaggcaaggccctcgcggacaacacccatcaagaagcctccaaagatgaagctgtcagcaaaagacagcgtcaggagcaccccacccccaaaggcaccctacgcacttgcagctccggaggactaccgcaagcaccacctccaggcttcgctccaccagagggcgaagactcaatagaagacggtgaagtcatcggcatatcagccgaggaacagctacaactgcaggccctacgcatcaagaaccacaacctccaaaaacagaaagacatcatcaaggccaagcgccaacgtgccatcgcatag

SEQ ID NO: 41785 - DNA, 207 bp, Zea mays
  Peptide Sequence Number=SeqID_85160
atgggttcgaaaaccctgagtacggagtgtactttcgcaagtcttacccgacaaaggaaaaagaattctcaaggatatgctggcttgtgggattcaaggctctgggtctatcccacagatgtcaaaatagaagttgttctcagccgggggattcttagcctgcggggcaacttcttcttcgactacaacttcttctccgttttctaa

SEQ ID NO: 41786 - DNA, 357 bp, Zea mays
  Peptide Sequence Number=SeqID_85161
atggaccgcctcgagttggcgattatctcggagatggccgtgcaccatgggcagcctctgcctggtatgcgtgggatgcaccgaggcttccctctcgaagtgagagggccctggctggaggctcgaagcgggtcctcggagccgagaggccaaactctcagccttctggaccaccgcgcattccagaagcccccaaagttcaccgtggacgcgacatccctcggtggtggagggctccggaactgtagcatggacttggggtctcttagcccggagaagtccagggcgaagtttgggccatcttcttcctcggagtccaagcacccagaggggaacggcagcccgacgtacatctaa

SEQ ID NO: 41787 - DNA, 147 bp, Zea mays
  Peptide Sequence Number=SeqID_85162
atgaccaaggacgaaggcctcaacagagagagcttcgacaaggaagtccaaccaacgatgatggatggtatgatgacttttatcatgaagagcttcggcataacggcgggaaggggaaaccgacttaaagatgaaaagccaaattag

SEQ ID NO: 41788 - DNA, 912 bp, Zea mays
  Peptide Sequence Number=SeqID_85163
atggccccaatgtggtgtaaccgtgtgagccatgtgaaagatgtgtgggcaatgtatcctgacttggttgagagggtcactgttcagtgcatgagtgcgctgtaccgccttcaggccctgcagagcgacgctatggcacacgttgctaacatcgctcaaaccaccaagctcaccctcgacagccaagaagactttgtggtcgacttgtcctccgagttggtggagaaggatttgctggtggaaaggctgagccagcgcattaccaccttggagcaacaggtggagattcgagacaacactattgatgtcttggagaaccagttgcatgatgtgcatcgagaacttgaagaagctaatgaccacctggacatgcaccacttagagatggaggccaatgaggccagaagcgagggagaagaggctcccgaggagttaggaccagcccctggagctgatggctcagcaaaacgagattctgcgacagctcttgcagcgctagccccaccctcagcagcatggtggaggccagcatcagcgacctccggcagcggcaacctaccaggagttcttgagtacgcagccactcttgttcaccaaggcagaggatccgttggacgccgacgttaccacgctgattctgatgagaagaagagagaccgcttccgcagggatctcaacaccaagctgcgggaacgtcttaacactgtccgggctggtagcttcaatgagttggtcaacctggccatctcccaggcggattgtattgtagctcaccgggcagagaagaagagaaaggcaccaatggcagcaccatccgctcaggcccagaggttcaggattgtttctcacaatcagagcaggggatttcagcagcagacaggcagatgggtgatcaggccacctcagctgtaa

SEQ ID NO: 41789 - DNA, 183 bp, Zea mays
  Peptide Sequence Number=SeqID_85164
atggggttcggtgtatgcggctcgctctgccaaggttggtttgccccttggggaggtgatgatgaggacgatggtcatgattatgcttatggtaatggttgtccatgttgtaaccactgctcaggagaagatgaagtcgtggaggaggacttccaggagttccaagagtatgatgagttctag

SEQ ID NO: 41790 - DNA, 219 bp, Zea mays
  Peptide Sequence Number=SeqID_85165
atggttatcccaaaaccatataaagcaatagaaaactacccaagtgattcaggggtaaacaagtctggactgcgcgctaaatcccagaatgtgcaggggctaactcagaagattcaccagacccaggggctctttagcaaatgggcacgacgaaggggtatctgcgcttcagagccatcggatccaattcctgcggccatgattagatcctaccgttga

SEQ ID NO: 41791 - DNA, 169 bp, Zea mays
  Peptide Sequence Number=SeqID_85166
atgaggagcaagccagccggcgatgccgccgagggggaggagtgggagtccatcagtggcaagagacaccgccgctcatcagcaccacgcgagagcaccccagttgatcagggcgcacgaggcacgaccaacagtaccagtaccgccgagctaggatcgggaacagctg

SEQ ID NO: 41792 - DNA, 237 bp, Zea mays
  Peptide Sequence Number=SeqID_85167
atggactcccactcctccccctcggcggcatcgctggccgtcttgctcctcatcgcgggcacccgcgcgatgcttggcgctcctgctggaaggtcgacatcagggctgtgcggcgcacggctggctccaggcaaagacatatggaggatgaagaagccgttcggccgtgggatggatagtgacttggatccgatggctctgaagcgcagataccccttcgccgtgcccatttgctaa

SEQ ID NO: 41793 - DNA, 2067 bp, Zea mays
  Peptide Sequence Number=SeqID_85168
atggagaagtgcaaaccaatcaagacccccatgcctacaaatggacatctcgacttagatgagggagtgaccttgattgcccgtgtgccgtctcctgtcctgcctggatcgtcacctctcgtacatcagttcaggatgccgcgcacgaagaatgtgtcggcgccagggggaggcgatgatgaggatcctcgtcgccccttcaggcaggtcaagggcaagaccgtttacttcgagcagcaggaaggccgcaagaagcggcgtacggacagagcagcccgtgcagcggcagcggctgcagtagccgctgcgcaggccgagcttggagatcagccgcagactccgtcagatcagatcgcataccgtgttcgtcgtctcgcctcccggcctcgctcctccagtcacacctccgcttccactccgccacccactctgcctgctcccgtcactcctattgctccatccaccaccacagccatacccgctacctccactacaccagcttccattgctcctcctcctcccgctcccgcttcagctcctcctgtccctccacctcgattccaggagtgcgatgagactgagagagaccctgcagcaggtgacctattcagcacacgtattcaggagtcgtttttcagagctcagatgtctgctcagatagctctgcgaacccttttgactaccagcagcaggtatgttgaggagtgggtacgagtcttctacgcctctgtatggatagacccggatcatcactggatgaggtttcgttttgagcgcgaggatgtcaccattactgccagtcagatccgccagcgttttggatttcccgagtcgacgactcgtcttcacagcctctgctacggcacttctgaccctcctcgtcgccctcacggcggtgtggctccgggtatagctcacgtcgcggctctgttccgcccgcccttcacagatgggccgcgacgttcaccggcagactttactacaacaaccaagtatttatatgagcttatcagacggactcttctgccgaggatgggatacagggaggctaccacacatattcagctttggctccttggtgccctggtctctcactctgagttcgacgtcgtggacttccttatttgtgagatcgaggacatcgttttggatgggattcgtgctcgtcggcagttgccctatgctcactacttgtgccacatctttgcgcagctgattcagcctcctcggtttcagggcacacttgaggcctcacgcctcgtttttggatcctaccgtcatgtgcctgagactcctgtgccagcttctgctcctgtctttgacactcaggccgaggatgcagctcttcatcagttcgaaactcaggctacaacagttgatgatgatgatgattttggggttcctcctccgcctcctatgcctcctcactcacatgatcatgaggctgggagttctagtgctgcccctgctacccctcaggctatggaccctgctcttgcttcgattctccagtctatcactcagcagcaggctcacctggcagccgagcaggcccggttatccgagaggatgctctcgatgtttcagaacatgcaggacaggcaggatgcacttcagcagcagctacttcaggatcgggctgagagtagggcattcatggctcttatgcttcagcagtctggtgtatcagtacctccggttcagtctgctccacctcctccgcttcacgctccagttgtcccatcgattttgtcaggaccccctgttggtacttctccgctccggccggtcactttggcgttcacctctccggttctcagctctgtctgcccgcagccgccagtgccaccagcatctgctgttaccactactgctgtggcagtatctgtgaccacttctgttctggcagctcctgcagcgcggcctcagtccgagtcagtaccagctccagcttctaccgcagatcctggatccgagactgactctgaccctccgccggcgttcgctctgctgcctcgaccgcgaccggatgcgcccctgccgcctcctcctgcttcagatgtttag

SEQ ID NO: 41794 - DNA, 180 bp, Zea mays
  Peptide Sequence Number=SeqID_85169
atgacgaaggttctcaaaacacttgcacttcagcataatcaaatgagttttagggaattgaaatcaagtgatcaacactggtatggccaccagcccaccattccaccttctgaaagggaaatgtgcccttgggccatttctaagtattttggtgatttagtgtccaacacaagtgcttaa

SEQ ID NO: 41795 - DNA, 612 bp, Zea mays
  Peptide Sequence Number=SeqID_85170
atggaggaaaggctacgagtggctgaacagaagcaggtacagatgatggggttcttggcaagagcaatgcggaacccagagttcttccagcagttggcccagcagcaagacaagaggaaggagctcgaggataccatctcaaagaaaagaaggcggcccattgacaacacaccattctacagtgatggggaaagcgaacagcttgattcacagttgaaaatgttcgagtcaggtgttctcaatgggctcaatgaacctgagctggagaatttagcagtgaacattcaggagcttgggaagggaagcatagatgatgggaacttgactcaagttagtgaccagtcagagctgaacgacgacttctgggcagagcttttggtcgaagattttggagacaaggcaggacagccagagttggagggaagaactgaagacgtgaatgaccttgctcaacaactggggtgggagttacgtgtggggtgttggctaaatgtctcttccggcgtcttctggcaaaatgatctcgtggacggtgactggcaaagatgcctaggggccaacgttgggcgcccacagtacgccttctgcatgtgcactgtcacagttggctag

SEQ ID NO: 41796 - DNA, 762 bp, Zea mays
  Peptide Sequence Number=SeqID_85171
atgcagatgatgatgctctctgatctctcgtctgacgaccacgagggccactggatccagctcctatggcgggggacattggccagctacgccctcagccctctcttcctcgcaccggcggcctcggccaccgcgccgctgccgccacctccgcagccgccggccgaggagctcaccaacaagcaggccgcgggcggcggcaagaggaagagaagccagccggggaacccagaccccggcgcggaggtgatcgcgctgtcgccgcgcacgctggtggcgacgaaccggttcgtgtgcgagatctgcaacaaggggttccagcgggaccagaacctgcagctgcaccgccggggccacaacctcccctggaagctccgccagcgcagcagcctcgtcgtcccgtcgtcgtcggcggcggcaggctccggcggcaggcagcagcagcagcagggcgaggccgcgccgacgccgccgcgtaagcgcgtctacgtctgccccgagcccacgtgcgtgcaccacgacccggcgagagctctgggggacttgactgggatcaagaagcacttctcgcggaagcacggggagaagcggtggtgctgcgagcgctgcgggaagcgctacgccgtgcagtcggactggaaggcgcacgtcaaggggtgtggcacgcgcgagtaccgctgcgactgcggcatcctcttctccaggtacatctcatctcatgatcaccgtgcatatatgcatggacgacgtgctttgctgtaa

SEQ ID NO: 41797 - DNA, 597 bp, Zea mays
  Peptide Sequence Number=SeqID_85172
atggcgcctcccgttgacgtggccggcccgcgccctaggttgggcgatgtggaggctcctccgaggtcgaggtcgagtccgtcttccgtgaccgaggtcgagtccgagcccctaggtcgggcgaggcggaggccgttggctgagcccagggcggagttcgagtcctggggtcgggcgaagcggagttcgtcgtcttctagggctgagcccaagtccgagccctgggtcgggtggagcggaattcgtcgtcttctggggctgagcccaagttccgagccctgggtcgggcggaacggacccgagtccgagccctgggtcgggcggagcggagttcgccgtcttccggggcttagcccgagtccgagccctgggtcgggcggagcggagttcgccgtcttccggggcttagcccgagtccgagccctgggtcgggcgaagcggagcttcctatggtgcctgcggccgggcctgactgcctgtcagcctcactctgtcaagtggcaccacagtcggagcggcgcaggcggcgctgtctttctgtcagaccggtcagtggagcggcgaagtgacggcggtcacttcggctctgtcggctga

SEQ ID NO: 41798 - DNA, 645 bp, Zea mays
  Peptide Sequence Number=SeqID_85173
atgcctgaaaggtaccaactcccgcggagttgcgttcctccaacgacgaggcagaaagacggcgggtatcccccatccgggggcttggaaggtggaaagacacgatgcataagggagcgtgaagacatggtcgccttccaagagggtcaccctccttttaaaggcgactctccctacttgcgtccccagccgtcgtgggctgagtcttctccaacacgctccaaggtcctcccctacggcgggggctgggtcccacacgtcatgcaagccggcccagagcagaagaagccaaaccgccgtgcgcggagaagcgagcgacgcttcgccttcgccataatgaccgcgtcaaaaaagggaccgggaaagggggataccccgaaaaggatccttccccgtgaaggaaccaggctccgagcctccctactgatcagaggttcgaaggctggcccctcggaagggtttaatagccgcctcagagcacgtgggctccacacccactactggtcagaggttcgaaggccggcccctcggaagggttcaacgaccgcctcaggctactcgggctccgcgcccactactgatcaggggttcgaaggctggcccccgaagggttcacagccgcctcagacacagagcgagggatga

SEQ ID NO: 41799 - DNA, 711 bp, Zea mays
  Peptide Sequence Number=SeqID_85174
atgcgcgagagggtagaggcgcgcattccgtgcagtaaggccagggagggcgttaagcgtggataccggggagggctgctgcatgcaggggccgcggcgcacaggaaggtcgcggaagccgagtcccggcgcgggacggcggctgagaagggagccgggagaaggggatggggatggaggcgggctgtagaaggcgcggatgatgagtcgggccgtttcccgcgccaggaccggcgtggccgcgcccgcgcaagggccacgcgcacccgcgccaccatggacggacgacggggaagaaagccagcggccagattcacggccatggcggcggcggtgaggcccagggtctcggcggcgctgatggcgacgcccgcggtggcctatgcgcccagcccggccttcgcgcccaccccggcagctggacccgcgccctgggcggcgccggcgggttggatttggcgcccgccgagcctggacgtggtcgcgctgggccgcgcttggccggaggccgcgagcctgtgctggcgcttgcgcgtccgcggctgtgaggcgacagctcgcgcccgcacgcctgttcccggcggcggccacagtgctcgctcgcgacggctgcgcccatcggagaggaggtggggagggccaagggagccgccggctggggggtggcggcggccggctggggagaagggccgccccgggagggatggatga

SEQ ID NO: 41800 - DNA, 978 bp, Zea mays
  Peptide Sequence Number=SeqID_85175
atggcggcggagcccgcggcggccgaccacgatctccggccacccctggcggatggcgccgctgctgccggcgtgggcgccgcctccttggcggcggcggcgggcgcggcagaggcgctgatgagcgcgacgtcggagcagctcacgctggtgtatcagggcgacgtctacgtcttcgaccccgtcccgccccaaaagttgccaaataaagttccaatagaagcatgttttcagggtgaccatatgcctatgtcattattgatttgtttgagtgcatatggtgatgagattgtttcactgacacgtgtatcccagggccacatgcgagccagcgtgtcagttcaggctgttcttttggtacttggagggtacgaggttccgcctggtttggtaaacatggctgtttcttcagcaaatgatgagaagaatacaactgtggctgctagaagggttgcttccttaatgagattccgtgagaagagaaaggaaagatgtttcgataaaaggattagatacagtgtgcgcaaggaggttgcccaaaagatgaaacggcgtaaaggccaatttgctgggagatcagattttggcgatggtgcctgttcttctgcagcttgtggctctccagctaacggcgaggatgatcattttcgagaaacccattgccaaaattgtggtatcagctcaaggcttactccagcgatgcgtcggggcccagctggtccgaggtccctctgcaatgcttgtggcttaatgtgggcaaataagggtgctattcgtagtcctctgaaggcacccaaaatgtctcagcagccaaaggacaattcatgtaacatggtagatactgatgacaaaaactcaaatgttcttcctgtggagcataatcaagccacacccaaaactgactcgatgatgccaaaagaggagcagaagctggacatacgcttgcccaccgaagaagatacgaaggcagtttcatga

SEQ ID NO: 41801 - DNA, 1101 bp, Zea mays
  Peptide Sequence Number=SeqID_85176
atggaccggtaccagagggtggagcggccgcggaacgagtcaaccatcgaggagaacgagatccgcatcaccgcgcagggcctcatccgcaactatgtctcctacgctacctccctcctccaggaaaggagaattaaagagattgttctaaaagccatgggacaggcaatcagtaaatctgtagctgttgcagagattatcaagaaaaggatccctgggttacaccaggataccaacatcagttctgttagcatcactgatgtctgggaacccatagaagaaggccttgtcccgtaccaagctccagtgtacattgaacaaccaaggcaacagcaggtgccaccaccacagcgccaaccacgcagaccaccagcacaattccagcagctggagtatgaaggtatggcagtgattcttatgcacggggtcgaggaagagggcgtgggcgtggaaggggctggggtagaggtggctacggtggctatggtggatatggaaacaaccaaggtggctatcatcagggtggtgggtattatgacaatcaaggtggatataatggctatgataatcaaggtggatatagtggctatgataatcaaggtgggtatggtggtggatatggctataaccaaggcagatatgggaactatcaaggcaatgacacatcttgatctgttgatccagaaaatggtggatataaccgaggaagaggaagtggtatgcgaggaagaggcaattggggttaccgaggaggttatgaaggtggcaggggcggtggctatggaggtggcaggggcggtggatacgaaggaggcaggggaggcggctatgaaggaggcaggggaggcggctatgaaggtggcagggtctatgaaggtggcaggggagggggctatgaaggaggcaggggaggcggctatgaaggtggcaggggagggggctatgaaggaggcaggggtggcagtgctcagggtggaaggggttacggtggccgtggaaggggtagaatgggtggtcgcggacgagggaactagtgcagttctggcgtttccttcaaaatgcatgcctcacctataccaggggaaacgacaagttatctga

SEQ ID NO: 41802 - DNA, 639 bp, Zea mays
  Peptide Sequence Number=SeqID_85177
atgccggggagggcggactgttgctgcccagctaggatgcaacattccgtcctctgtccttgctttcgtggcgaggacaggagcgaggacctgccggtgcgctttggggcgaccggcgctcgctggtgcgttaaaggaaaccctcggccgctcttcgatgagccggagccggaggcagcggtatcagcgtggacagaggcagagttggctcgaaaagaagacttcgtcggccgaagcctgaccgggccgtccgctggcgggaccgacgccggagtcgagttgccgaggccatgggccgggctgatgtcctcaggggacagccggctgaggcttcggggtgaccggccgagccgtctgctcgagccggactcctggaagagaccctggcggcgatggcccgggcgtggtgctgacgtcgtccttcggagcggagatcctccgactgtgttgccgttcgaggctcggtcgggcttcgccgaaggtggtgttgacgtcgagggtgctgctgctccccctccatcgagtcgagaaggcccgaaaaatcgtttcggcagaagggtctccgagcgttgggacttgttcggtcagcggaatcgcttatccgagcgtgagttacttatcgtagaaggtgatgagtga

SEQ ID NO: 41803 - DNA, 1116 bp, Zea mays
  Peptide Sequence Number=SeqID_85178
atgcaggcggcatgcaaccgcacccaggggacgcaccctttcgacttcgacacatccagcatggaggcccaggcccacacgtcatgtaaccggcgcgccggttactacgtacaagaaactgcaccgccactcgcgccagtaccgcgccttctcgactgcggaacctgtaccgcgactcgaggcgaccctgcgcatgacccgacagtgccaatcgagcacatcggtcacgggccggacaggcggcacctttggcaggcgaagcaggcgacgcttcacctccgccataatgaccgcgtcaaaaaaggggtcagaaaaggggatactccgaaagggatccttctccgcgaaggaagcgggccccgagcccccctactgatcagaggttcaaaggctggcccctcggaagggttcaacaactgcctcagagcgctcgggctccgcgcccactactggtcagaggttcaaaggtcggcccctcgaaagggttcaacggccgcctcaggccactcgggctccgcgcccactactgatcaggggttcgaaggctggcccccgaagggttcgacaactgcctcagacgcagagcgagggatgaccttgggaaactacgcctcgcccgacccagggctcggactcgggctcgaccccggaagacgacgaactccgcctcgcccgacccagggctcggactcgggctcggccccggaagacgacgaactccgcctcgcccgacccagggctcggactcgggctcggccccggaagacgacgaactccgcctcgctcgacccagggctcggactcgggcttggccccggaagacgacgaactccgcctcgcccgacccagggctcggactcaggctcggccccggaagacgacgaactccgcctcgcccgactcagggctcggacacgacctcggccccggaagacgacgaactccgcctcgcctgacccagggctcggacacgacctcgacctcggaagaccgactcgacctcgacctcgaaagaccgactcgaccccgacctcggaggagcctccgcctcgcccgacccagggctcggaccgaccacgtcacagggggggccatcattaccctatccctagctag

SEQ ID NO: 41804 - DNA, 626 bp, Zea mays
  Peptide Sequence Number=SeqID_85179
atgcagcctccaaggtgtaagaatgtgaactcactgtattgcatagagccgaagtcgaggtggtcgcggtcggaagacgcgcagcaaaagcctgatcttcgggaggggtcgacgttcgagcgtcaacgatcggcagggcgacacagcaaaagggcaccagcaggccgacctttctgcgtcttcgatcatccgggcctcaacgagccccgccagggagaccgacagcagcgcacgcggctgcgctggtcaaggtgtccgcgcccgcgacagaaaggaaggggaatgtcggatccggccgggaaggccacggcagcgacggatccggacggggagacgcgatccagccaaagggacggcggatcgagccgagaaagtcgcagcaacgtggatccggccgggaaggccgcgacagcgacggatccaacgaaggcgaggaaggggagggcgacggggcggttccagccgggcaggggcctgcgccggacctggcaaagggtgttgacggcaccggcgacgggagaagctcgaagtgggaggcgctgcgtggctagcgcgatggcaagggactacacgggcaaagatgcagacacaaggtttttcgccagggtatccatgccggggaagag

SEQ ID NO: 41805 - DNA, 1977 bp, Zea mays
  Peptide Sequence Number=SeqID_85180
atgacggtggcaggcgggcgggagcagcggtcacgtcgtcagccaggctcacgtcccatccagggacagcaagagagcctcctcccacggcgtgaagacgggaccgggaaagggggataccccgaaaaggatccttctctgcgaaggaaccgggctccgagcccccctactgatcagaggttcgaaggctggccctccgaagggttcaacagtcgcctcagatcgcgtgggcccgacacccactactgcgggaacgatcttgtaatagaatcccatcggagggaggcatcgagccctcggaccccgtcgccaggggaccgggtccggcagatcacccgcagctcaccggagacaccatgttcggtgcccatcgagggtaacatggcgctctcccccctcctccttgcggaaaggcgacgcaggggcgtatgtaaaaaagccgagtctgtccctgatcgtcctctcgccctgtgcggaggctcgggggctgctctcgcaaaacccggctccggccagaccgttgacagcgtcaacataccagcccgagagcttgggccccgaccgtgcacccgggctacggccagttcgcatgagggaacaaccagaccagccgaagcattacgcaaggcattaagacctcgaaggagtgaaaccactcctccgaggcctcgggggctacacgcggcgggtgcgctcgcgcgcacccaccggaacaaaatgcaaccgagaaaggctggtccccttgcaaaaaagtgcgatgaaagcctccaagcgagtgctaacactcccttcgaggctcgggggctactgtcggggaccataattaggggtaccctcaagacgcctaattctcagctggagcatttaacgcaaaggtggcctgacacctttatcctgacgcgcgccccccggcagagccgaagtgaccgccgtcactccgccgcaccactgaccggtctgacagaaggacagcgccgcctgcgccacttcgactgcagtgccactcaacagagcgagtctgacaggcagtcaggccttgccaaaggtgccataggaagctccgctccgcccgacccagggctcggactcgggcttagccccggaagacggcgaactccgctccgcccgaccctagggctcggactcgggctaagacccggaagacgacgaactccgcttcgcccgaccccagggctcggactcgggctcagacccggaagacgacgaactccgctccgcccgaccccagggctcggactcgggctaagacccggaagacggcgaactccgctccgcccgaccccagggctcggactcgggctaagacccggaagacgacgaactccgcttcgcccgaccccagggctcggactccgcccgggcctctgccgaacaatctccgcctcgcccgacccgggggctcggggctcggcctcggccacggaagacagactcgacctcggcttcggaggagcccccacgtcgcccgacctagggcacaggcccgccacgtcaacaggaagcgccatcatcatcctaccccgagccgactcgggtggacgtcagcaaggactcgaccgctccaacagctgtccctccgccaggctccgttgctcctccgacagccacgacatcacgccagcaggccttcttagagaaggttggccgcgcgggacgagggcgggacaggcgctctctcagggccgctcgcttccctcacccgcgtggacgcttgtaacccccctactgcaagcgcacccgacctgggcgcgggacgaacacgaaggccgcgggatttccacctctctcacgcccgtctccggccacctcgcttctccccccttcgcgctcgcccacgcgctcgacccatctgggctggggcacgcggcacactcactcgtcggctcggggaccccccggtctcgaaacgccgacactatgagttgctcaatcaatgcagataactttgggagctaa

SEQ ID NO: 41806 - DNA, 1883 bp, Zea mays
  Peptide Sequence Number=SeqID_85181
atgccctctctaggcgggcagcgggtgcgaagtcctgacttcgcgttggatctgcatggccgggatcccgccgcattcatgcgtgaagcggaagacggtgcggcgaggattgtggggcgctatgtgccgaggacagagggtgtgcggagctgggatatccgtggatccaacgaggctgccccggccactaagaagagaaaattaggtactgcagttggaggagtgggggtctctgatagttttgttgtggatttgatggggacgtgcgcagccctcggggggaaggatgtcttcgcccgaggtcagggagtcttcagcgtgaatgctggagtgatggagagggaccgtcaagacgccacgaagaaacgccgggcggacgtcaggatcgcggaccatatgagcgaggcgaaaagggcgcgggggagtgcgaagtccgctgcctctggtggtagcagactagtgccggctacgaaaccagccgcccccgtgcacagcaaggcgtcggccagtgtgaaggttgccgcctctgacgggagcaaggcacccctgggcggggccgtgaaaggacgaaggccgccttcaccggcgcgacgtgttgccgactttggcacggacattagtgtcgaggattatcttgttggtaagttaaaactccttcttctttttttcgacgaggtctttaaccagtatcatggtgcaggttcgggtgaggggcaactggctgttgtcccgcctacggtggcgaccacttcgccaacggcggtggtgggggcgaggggtgccgcgcgggacccatgggccaatttctgcgcgagcggtgagattctgtcggccgctgccgctaaggacgtggcgggctccatgtctcagcgactgagggaagcgtcgcagcagctgtcgcagcagctgaagcaagtggccgacttcgccgacctcgtcgcgtcaggtgccttgactgtggacgttgccaccgaggtcgagcgtctttgggcacagcatgcggatgctgtgcgggagaagtcggctgcggaaagcaaaaaccgtaggctgtcggagaaggtggccgccatggaggccgagaagatggatctcctgcgccagctggcggaggagaggagggaggtgaacaaggccatcgccgatgtccacgtggacaaggccgagacctcgacgcgcgcggaggtcgagcggacacacgtgcaggtcgtggacgcgtaccacgagctgggtgcgcggactgctgacttcgaagtgcccgaccaagaagtgggccttcgcttccttgaatggttgcaggaggagctgctggtgctcccgaccattgtgataggtttcatgtccttcgcctccctcgtcacctgtgagggggccatgaatgctttgtcccgcgaggggtgcaggcattacgaggtcttcgaccaagcgaacgaaaactttgagcgtgaaatctttaaggtcgaagaccccatggtgaaacaatcaacgggggcactctttgataggatgtggggtccacacggccgagaggcggtcagggagcggtctgacagggaaatagagcagatggctcatgccgaagatgtcgaggaccttgttggtctggacgacgtgctgcccgaggccgcggagggcatttcgatgccgccctcggatgccgcgttagatgtggctgcagtggagccttcgccgcgcgcggagagttccgaagagctcccgggcgcgagtactgggtataggcggcaaagggcggtggcgaaacagagagtgagtggattggcgcgaagcggtgagggggagctgcgaaatctttttgagggtgaggaattgaggataatgctgtttaactatagggagatgggtattatcccgaaggttgaaccaat

SEQ ID NO: 41807 - DNA, 621 bp, Zea mays
  Peptide Sequence Number=SeqID_85182
atgggggtagatttattaccgcgaattgatgactcgaggacgctggccatggtgtacaacagagccacgatgaaacgtggtcgctggcgaagaattgtggcatgcatggttgatccctgccctcctgaggtggttgcacacgagcggtacaaccaggcgagctcccagcgcgatattcctaggccacagccactgcgtggcacgcggtcaacggcgacgtccttggacccggtgcagacgacggcgattttgtcacggtggacgcgcagggaggaagtggaggtaagggagggaaagagggggtatccctacttatcccccgaagactcggctcgggataggggtaacgacgcgctcgattttcggcaatggtttcgagcttcgctcgcgggttgttgttgtcgccgcaaccgggataacatgcggggcccgaccggcagcgactcaagcgcgcgcgcgatgagcagatgccagtgggcccccgatgtcagaatgaccatgtgcggggaaaggcagagacttgggccgcgccagagggattcacaaggtgggccaaatggatatagtcggcccaggagtctcacctctgggcaaaatttacatattcaaatcccattataa

SEQ ID NO: 41808 - DNA, 453 bp, Zea mays
  Peptide Sequence Number=SeqID_85183
atggcccgtattagatgcactgctcgtaagtcggtgatcccctttttgccctctcgcctggcggagcgccctctacgccgcacggtgacaggtcagtctagccacctggagagactgcatcgttgcctgcacgaggagcaggagcatcgacgccaggagcaggagcagcaggactctcctccctcgcctcagcaggaggtggagtctgggaggcagccttcccctccacctcagccagagatgccccctatatcaccatacggcatcccggctgctggaggagaccctgacggagacaacgacgatgccagtggtagtttgagccaccacacggagctctcggagcagcaggagttggagggatggatcgctagacccatcactcgcgacatcgctcgcgggtgtcacttccacgacgctctcgacatcttcctacgtcgggccttctattga

SEQ ID NO: 41809 - DNA, 390 bp, Zea mays
  Peptide Sequence Number=SeqID_85184
atgcaagatgttgcacgacgtgcactttcgcagtactgctcgttgttcagtggggtagctgatggcctcgacctgaagtactaccctcgccgttcgactgacagtgctggaggtatgattgtctcgcccgttggtgagggcaatcctaggatgaacaacatggtcaacctggtcgctatgctcaacaccgagctggaccatgcccttgacgagttgggcaaggtttgggcggaggttgtggaattgcatgctgagcgcgtagcgcgccactatcaagatggtggttctcccgctcctgtcgggattcagcacccttaccgctcgccgccccatggtcgctttgattacagcacccctgactgtaggacccagatagatttggagccatag

SEQ ID NO: 41810 - DNA, 564 bp, Zea mays
  Peptide Sequence Number=SeqID_85185
atgggggtagatttattaccgcgaattgatgactcgaggacgctggccacggtgtacagcggagccgcgacaaaatgtggtcacaggcgaagaattgcggcacaaacggttgatccctgccctcctgaggtggttgcacatgagcgatacaaccaggcgagcccccagcgcggtattcctaggccacagctactgcgtggcacgcggtcgatggcggcgtccttggacccggcacagacggcggcgattttgtcacggtggacacgcagggaggaagtggaggtaagggaggggaagagggggtatccctacttatcccccgaagactcggctcgggataggggtaacgacgcgctcgatttccggcaatggtggcgagcttctcgcgtgggttgttgttgtcgccgcaatcgagatgacatgctggccccgacctgcagcgactcaagcgcgcgcgatgagcggatgccagtgggcccccgatgtctgaatgaccgtgtgcggggagaggcagagacttgggccgcgccagagggatttacaaggtgggccaaatggatatag

SEQ ID NO: 41811 - DNA, 186 bp, Zea mays
  Peptide Sequence Number=SeqID_85186
atggcaattggggtcagtgaggcattgtacgccaaggcggtgagccctgttctgttgacggggaatcgatggttccctagaggatatggttgctggagtgacatggccgtctaccttgccactgggttggacaatcgagtgggaccctacctcagcaggagaggagcaggaggagtgatgggctag

SEQ ID NO: 41812 - DNA, 504 bp, Zea mays
  Peptide Sequence Number=SeqID_85187
atggcttctcacgaatccacgaaaggagggaacgcacattcccacacggacgggcttgcacgagagggttttcccatattttgtgggaagtactgcagggagccggttatgctacgcctccccagtacgcggtgcagtttttcgaggagcaccggagccgaggatactattaagtccactgctctacatgtgctgaccaccttctgtggctttcaccccttggagctatcgacccatcccattggcttgttccccgctgagaaagaggatgacccaatgtggaaggatcgagtggagcatgccaaggatgtgtgggctctctacccgggacagaccgctcacctgacggtacggtgcatgagtgccctatatcgtttgcaggccttgcgaggtgaggcgatgtaccagctgatgggactggtggagtctaccaagatcaccctggataatagggaggaccttgtcgtagacttgtccaccgagttggtggaaaaggacctctag

SEQ ID NO: 41813 - DNA, 519 bp, Zea mays
  Peptide Sequence Number=SeqID_85188
atggcccatggggccatgttggtcacatgcccacgcaatgacgcaaccaaggtccaaggcaattcatctaaaatggcacctactcctggtgatggtgaagaactagatgcatccctaccagtaccagggctcccatctgagaggcacctgctgccaccaccacatccgtcgttatgttcaggttcaaagaggaagaccattgcagttggtactggagccgcacctatgattgctggatcatcttcttcaagtcattcccagtcatcaccttcagttgctgctagtgttgataaggatattgttaatccttcaaatgttgttgaggttgatgatagtaatgaagttgatgttagtgggaagaggcagaagaggtgcacatccatagtttggcaatactttaccaaaaaagagaagatagttgagatagatgggaagaaatacaaccagatgtggggacattgcccttcccaaattgcaaggcaatgtatagagctgagagctatcaacgaatcaagctga

SEQ ID NO: 41814 - DNA, 1122 bp, Zea mays
  Peptide Sequence Number=SeqID_85189
gtcggcgccgccgcgttcgcgggcaaccccgagctctgcggcgaggtggtccgccgcgagtgccgcggctcccacctcctcttcttccacgggggcggcgcgaacggtaccgccgctccccctgtgcagagcgctgctgctagcgacagcgggccgcagcgggagaacctgagcgtgccggattcgtccgtgccaaatgcgaagagagcgagacggaggatgaccaaattggccgtcgcggtcgctgccgggtctgtcctcgccgcgcttcttgtctacgccatgattgcgatgaagaggaacaacaagcggaggcgcccgagcaccgcgtcgtacgagagccccaaccccaagaagagcgcgcccgcgtccgaggtgagcagggacaatgctgacatgggctacgtcgagtgcgtccccgacgaggagacggcggccattatggtgccggaggagaaggcacggcgcctggagcggagcgggtgcctgacattctgcgcgggcgaggcggcgagctacagcctggagcagctcatgcgcgcgtcggcagaggtgctcggccgcgggagcgtggggaccacatataaggcggtgctcgacggccggctcgtggtcattgtcaagaggctggacgccgccaagattggcccagcggcactggaagcagaggcgttcgagcagaacatggatgctgttggccgactgcgccatccgaaccttgtaccactccgagcattcttccaggcgaaggaggagcggctgcttgtgtacgactaccagcccaatggcagcctctactctctcatccatgaaaaactaagatatccacatagagatggcactgagtacccgaaacccgaatactcgacgggttttacccgatatgaaggcggatacgggatgatttctctacccgcggtgattgatatattggaatttaagactttcctaacgggtacgggttacccgacgggtaaaaatacccgcgcgggtacggatatgggcactcttgacccagcatggctattgtatgaaattaagaatataacagcacgaatatctggcagcaaaatgctgatgcctagtcaagtagtgaacccactaaacaaaacgtatatgtga

SEQ ID NO: 41815 - DNA, 522 bp, Zea mays
  Peptide Sequence Number=SeqID_85190
atgtcttcttcctcccttatgcgtcgtgtctttccatcttccaagcccccggatgggggcccggctgcacccctccaccggcggtcacccaagatggtgaccttcggcttgatggtgggggaaagcgagccgggctgcggcccctgcccctccctcagcctcaagaattttcatcaccaaggctggggaggggactgcagcgtgcccggctttcagacgcgagtggcttcggagccgctcgtggcgccggcgtctgccacggcagctggaagaggttcttccgccggcgtgatagccagggccggccacggactgacctccaactctacgaccttctgcccgtccttgccttacgagttttggcatgggcgggggcctcctggcagcagcatccgccctgaggtcagtgctgccgctgttcggccccccggagcagaagtcgtcgtcgtcgccgctgctggagcaggtgacggcgcgccgttcgtcggtcttccgttgctccgcaggccttcccccatgtag

SEQ ID NO: 41816 - DNA, 420 bp, Zea mays
  Peptide Sequence Number=SeqID_85191
atgggcagccgcgacaagctcgcggcggcgtcgagcccccgccgcgtcctcttggtggtcttcgccttctgcttcgcattcgccaccttcctcaccttcctctacaccacctcccacttcacgaccgcgcccggctccggctccggctccatcgcggcctctaccaccaccaccaccaccacgacctccggctctgcgggcggcggcggcggccaaggccaagcagggcccgagtccgtgtccaagcggctgccggtcccggtgttccatgcgatgaaccacttcgcgtcttctcgaacgcgacgcaccgcatgtcagacacggacatctgggccatgtcgtacgtgctctacgcgcgggagcactgaaactgctggtgttcagactgggctcgtgaacccccgatggggctggtgctga

SEQ ID NO: 41817 - DNA, 648 bp, Zea mays
  Peptide Sequence Number=SeqID_85192
atgggggggatggtgtttctggcggtaatggcggtgggtgcgctgcaaaaaggggggtgggcggcagtagtgcgctgcaaagggcgtgtgggggcggtggtagtgcacatggaggcgggggcacgtatgcgggggggggcatgggtgagtggtggggtcgatgaccctgatattcgaatactctgggtccacaagactggaccactctggtatgaaaaaggagatcggcctcctgggactagtaattgtatcacatttgagtcccagaggattggggacgcttcatcgggcgacgtggaggctcctccgaagccgaggttgagtctatcctccatggccgaggccgagcccgagcccctgggtcgggcgaggtggaggttgttcggcagacgccagggcggagtccgagccctggggtcgggcgaagcggagttcgtcatcttccgggtgctgagccctagtccgagccctgatcgtcatcagaggcagtggactgtctatcggctcttacctagagtcgagatgacgggtaagagaagacacgcgtcccctgttcgtccctatcttaatcccactcgtatctttgctaacgatacgctcaattgcgacccttttgtggctgtccccaccagcacacaccaagttgag

SEQ ID NO: 41818 - DNA, 306 bp, Zea mays
  Peptide Sequence Number=SeqID_85193
atgcaggtggtgtgcaaccgcaccacggaggcgcgccccttcgacttcgacgcatccagcatggaggcccaggcccacacgtcatgtaaccggcgcgccgattactacgtgcgagaaactgcaccgccacttgcgccaatgccgcgccttctcgactgcggagccggtgccgcgactcaaggcaaccctgtgcatggcccaacagtgccaaccgggcacatcagtgacgggtcaggaccgggaaagggggtatttcaaaagggatccttctccgcgaaggaagcgggccccaagccctcctactga

SEQ ID NO: 41819 - DNA, 386 bp, Zea mays
  Peptide Sequence Number=SeqID_85194
gacccccactagttcagtctgcccctcctccagctcttcaagcagctgttgtgtcagctattcaggcaggacccccacttcctccttttggtccttctctgcttcggccggtcactctggatttctcgtcgccggtcgtcggaaccgttagtgctcagtcgccagtgccaccagtgcctgttgttaccattgctgctgtggcggtgtccatgactgcttctgctccggtggatcctgcattgcagactctgtcagagtcagtaccagctccagcttctactgcagatcctggatccgagagtgacggcgaccctcagcttgcgtttacgcttctgcctggatcacgaccgaatgcgcccccgcctcctccctcctctggtctgtag

SEQ ID NO: 41820 - DNA, 45 bp, Zea mays
  Peptide Sequence Number=SeqID_85195
atggcgcaccggactgtgcagtgcgcccatgtgcaggaagttctg

SEQ ID NO: 41821 - DNA, 289 bp, Zea mays
  Peptide Sequence Number=SeqID_85196
atggaaaaagagccacttgacatggttgagagctcagttcgagtcatcgagacacatgttgacatcattcgcagtctagtgactgatggggttgtggatactagtgaaaccggaatcagtaatggcatcggcggaatgcctgaatcggcagaccccaagaagagattaagccctgtagtctaccacctcccgttatttgtgggcttcaccgatggctggaaacatttggtgatagcaaacgaccttcgggttgaagacgtctgcgagcttgttaaggggccagtcgatg

SEQ ID NO: 41822 - DNA, 1406 bp, Zea mays
  Peptide Sequence Number=SeqID_85197
ccggcgagcggggcggcggcgagaaagggctgggcttcctgcagcgcgcggcggcggcggcgctggacgcgttcgagtcgggcgtgatcgcgggcctgctggagcggccgcgcgcgctgccgcggtcggcggacccggccgtgcagatcgccggcaacttcgcgccggtcggcgagcaggcgccggtgcggtcgctgccggtgtcgggccgcatcccgccgttcatctcgggcgtgtacgcgcgcaacggggccaacccctgcttcgagccgtcggcggggcaccacctgttcgacggcgacgggatggtgcacgcggtgcgcatccgcaacggcgcggccgagtcgtacgcgtgccggttcaccgagacggccaggctccggcaggagcgcgcgctggggcgggccgtgttccccaaggccatcggcgagctgcacgggcactccgggatcgcgcgcctggcgctgttctacgcgcgcgggctgtgcgggctcgtcgacccgtcccgcggcacgggggtcgcaaacgccggcctcgtctacttcaacggccgtctcctggccatgtccgaggacgacctgccgtaccaggtgcgcgtgacggccgacggcgacctccgcaccgtcggccgctacgacttcggcgggcagctcgccgggtgcggcagcatgatcgcgcaccccaagcttgacccggcgtccggggagctgttcgcgctcagctacgacgtgatcaagcggccctacctgaggtacttctacctgcggcccgacggcggcaagtcgggcgacgtggagatcccgctggagcagcccaccatggtgcacgacttcgccatcacggagcgggatgccggcaccggggaggtggtggtggtcgggtcctgcatgacccccgccgactccatcttcaacgacgccgacgacgggcgccagctgcagagcgtgctgacggagatcaggctcgacacgcgcacgggcgcgtcgacgcggcgcgccgtgctgccggcgtcggcgcaggtgaacctggaggtggggatggtgaaccggaacatgctggggcggcggacgcggtacgcgtacctggccgtggcggagccgtggcccaaggtgtccgggttcgcgaaagtggacctgggcacgggcgacgtcgtccggttcgactacggcgacgggcgattcggcggggagccctgcttcgtgcccgccgagggcgcggcgccgcgcggcgaggacgacgggtacatcctatccctggtccgcgacgagcgcaaggggacgtcggagctcctggtggtgaacgcggtggacatgcggctggaggccacggtgcagctcccctcccgcgtgccctacggcttccacggcaccttcatcagcgagcgggagctggaggcccaggcctga

SEQ ID NO: 41823 - DNA, 669 bp, Zea mays
  Peptide Sequence Number=SeqID_85198
gatcacctattcaccaccccctctaggtgctctcagacccgccacaagaacaagatcaaccatcatcttctatacaagcatctccaccaactcaagatgagggaatggctcaagaagaagaggatgaaggccaagacgatgagcaacctcaagaggaggacgttgatcaagggggagatgaagatgatcaagataaggaagattatcaagagattcaggatcaaataccacaacacccaagaatccaccaagcaattgaaagagatcaccccgtcaattccatacttgccatataggatagagaatgcacttagagatccggactgggtggtggcaatgcaagaggagctcaacaacttcacaaggaatgagggtaatgatgtaccccctgcggtgtggtgggtccaagtccaaggtcgggcgaggcggagactcctcctgaggctgaggccagggtcgggtgaggacgtgattcctcccgaggtcgaggttgaggccgggccctggggtcgggcgaggcggagaccaccttccgaggtcaaggtcgaggccgagccctggggtcgggcgaggcggagtccatcttccgaggtcgaggtcgaggccgagccctggggttgggtgaggcggagtccatcttccaaggccgaggcgagggccgagccctag

SEQ ID NO: 41824 - DNA, 531 bp, Zea mays
  Peptide Sequence Number=SeqID_85199
atggggatgatccgcaagattaatctaatgggtgtgtctctgcaggaaaaagcaaagaaagagaggatgctttgcatgcggggagaagggccacttcagggacagctgtcccctgtggccgaacctaaaaaggggagcagcaaaggaaaggcgctaacaagtgtcaaaacatgggatgattcttcaagcaaagatgaacctacaaggacacgcatccattgttcctcatcacgctcatcacggtcatcacacaagtgccttatggtaagaggtttgctagaaaaatttgaaacatttacaaatttaaattgtgagttgtcaactaaaattgagcaattagaatctagtgcttcatccactgctatcgatgatggccttattaaaaggaatgaaaaacttaaggctaagttagctacctcccaagaagctattgaaaatttgctagggaaaatggaaattcttagcatacacaataatgagctaactactaagctacaaaacattggtagcaccaggggcatctttagttaa

SEQ ID NO: 41825 - DNA, 183 bp, Zea mays
  Peptide Sequence Number=SeqID_85200
atgacgcccgaggaaatccttggaaaattcgtgagcgggcgcatgatggtgaaggaagcaaggcacaagaaaagtacgggaagaaggaaaggaagaactacaggaaagctccgggcgaggcgcacatgggagaacagcgtcactctgactgttcttcttccaactccgatgatgagggactag

SEQ ID NO: 41826 - DNA, 432 bp, Zea mays
  Peptide Sequence Number=SeqID_85201
atggcgccattaaggagagaacatgggggaggagggagagagagggtcgcggtggtttctggctcgggaggtggacgggtgcataggctggttcaacaacgaactcgctgctctcgagaattggcgagggcgccgtggataaaaatcaccggactgtcgggtggtgcaccggactgtccgatgagccatcagcgcccgcgccaacgttcggcagtgcgatcagcgagcgacacgtgggccaagccaatgatcaccaggccgcaccggactatccggtgtacaccggacagtgtccggtgcgccaaggggaccaaaggctcaacggttggctgcaccagaagaggaaagaaatcgggcgttgttcatgtccggtggggcattggactgtccggtgcgccaactggaagaaggcaagaattgcctaccaaatga

SEQ ID NO: 41827 - DNA, 474 bp, Zea mays
  Peptide Sequence Number=SeqID_85202
atggccaataaatcgagatctgatgatccaccaatgatggtccataccattcaaaccactcggatcaacaccaacttcatacctctgccacggcaagttcctgtctacccagtggtagtcgaggaaatacatgtggatctccctcgcattcgggtggagaacggagtcattctggaggacagcttggaggagtttctgcctacgcccaccccgttggcagaatcactagccttcgtagctggatcgtcagcttcagcaccgccagcaccagcagtccaagcccttgctctcggaggcgacgacccagacgactctggtgatgatgatgaagacgacgaggaagaagaagaagatggggaaaacctcaacgatgaagccaatgaagaacagcaggaccactatgtggggttatggcctgtcactgaacattacacctcaatgttcgagacatggaacttccctaccctgttgtag

SEQ ID NO: 41828 - DNA, 195 bp, Zea mays
  Peptide Sequence Number=SeqID_85203
atggccttgaccgttactttctctttctcgcttagtcgtaggtataacagtcagttggcggagtccgaaggagttgcaggtgaagaccctgagcagcagtcggttggtgaaggcaagtgtcccttgacccatctatgtcctactcattcttataattcatctcccgcatttacgcactctatacctaaagattga

SEQ ID NO: 41829 - DNA, 87 bp, Zea mays
  Peptide Sequence Number=SeqID_85204
atggcgacgagcaagaactccactatgaagatgaagaatacaagagaagatcccctggctgaccctagagtggttgtgtcaagctga

SEQ ID NO: 41830 - DNA, 81 bp, Zea mays
  Peptide Sequence Number=SeqID_85205
atgggaacaattgatgaagaattggatgacgatgaggactatcaggttcctgaagctgatatagaggatacttcatcatga

SEQ ID NO: 41831 - DNA, 330 bp, Zea mays
  Peptide Sequence Number=SeqID_85206
atgtccggcgagggtgatcttcgccttccggtgaagttctgccgggtccgagggcttggaaagcttcacgggcctatggcggagctaaccgaaacgctggcgcgacttgggggtgactggagtgggctggccacggtggccgaggctctggcggcaatggcgggcagaaagagctcgccggagctaaggaggggtgtctggctggcggtgagatttggagcccggaaatccggtctgtctccctgctcaaacccgaggcaaatccagggttttgtcgtgtctagggctcgcgtcccaatgccatcttctggcatgcaacagaggggttag

SEQ ID NO: 41832 - DNA, 582 bp, Zea mays
  Peptide Sequence Number=SeqID_85207
atgtctggtctcgcgccaccccttcgttgccgctgtgccgcacaacgcttcttgctctctattcctggccgtgcttctggggccagacgacaaccccattcccatcagctgagctggttcatggagatggattactcgagagggtccatggacaacatgggcaacgagatgctcgggaagagaggcgaggtagctctacaccatcaccaggccctgggagcggtggagcaccaaggagtacgcccgcttcatcgaggctctactcatgtttggacgcgtctggaagaaattggggagcatgtcagcaccaagacaatcgtccagttgaagacaatccttcccacgtgcagggttaatatgtttgcaagcgtggatggtgctaaagaacatgtgtatggtgcatccaacaatgcagctcgatccacaacaaacagaaaggctgcaaagaggctatttacaaaagaacttggaagtggagacattgctgacgaggacaggcaccaaaaggaagttgaagtgagactattagaggaggagacgacaaaaagagttgagcaagctattaggaagaaggttgagtag

SEQ ID NO: 41833 - DNA, 359 bp, Zea mays
  Peptide Sequence Number=SeqID_85208
gtgactctcatgaatgggtgaaagtggagagtgattcagcaaccgtggggattactgactatgcccagcgtgctttgggtgagcttgtttatgtggagctaccagaagttggcatcagtgtatcccagggaaagacctttgctgctcttgagagtgtgaaggcagccagcgatacctattcaccagtgtctagagaggtggttgaagtgaacgagaaactaagtgacttgcctggattggtgaatacaagtccatatgagaagggatggcttatcaaggtcaagctcagtaattcaggtgagctcaattcgctcatggatgatgataagtactcgaaattctgcgaaggcaaccattga

SEQ ID NO: 41834 - DNA, 477 bp, Zea mays
  Peptide Sequence Number=SeqID_85209
atgaagcaaccttggccagatcgcctcaccaaccgaccgtatcgcaggcgcattcaatgcgaggatcgcctgacaccttatcctgacacacgtgcctcagtcggcaaggaagctccgcctcgcctgaccttgggcctcgacctcaggaggaggtctccacctcgcccgaccctagggctcggcccccgcctcggcctcagaaggtggtctccgcctcgcccgaccccagggctcggcctcaaccttggcctcggaaggaggactccgcctcgcccgaccccagggctcggcctcaacctcggcctcggaaggtggtctccgcctcacccgacccagggctcggcctctacctcgacctcgggaagaatcacgtcctcgctcgaccctggcctcggcctcaggaggagtctccgcctcgcccgatcttgggctcggaccgaccgcaccacggaggatgcatcattaccctacccctag

SEQ ID NO: 41835 - DNA, 729 bp, Zea mays
  Peptide Sequence Number=SeqID_85210
atgccgggccgccgcttcccgctcgcgtcaaagagaaagggcggcgccgagaacgtgctcatacgcggcgacggccacatcatgctcacggacttcgacctgtcgctggagtcgacggcgtcgccggctctggaggacgcgaggagcgtcgtgggcgacaaggacgacgacgtgccggagccggcaccgacctgcctcccgatcccggagctgcagctccttcggctgcggcggtggaagcgccgggccgcgccgcggccgcggttcgtggcggagcccgtggacgcgcggtccagctcgttcgtgggcacgcacgagtacgtggcgcccgaggtggcccgcgggggcgggcacggcgcggccgtggactggtgggcctacggcgtgttcctgtacgagctcatctacgggcgcaccccgttcgtcggggagagcaacgaggccacgctccgcaacatcgtgcggcggccgctggagttcccggccgccgcgaccgcgcacggggactccgccgcggcgcgggacctgatcgcgcggctcctggacaaggacccgcgcaccaggctcgggtcgaagcgcggcgccgccgacgtgaaggcgcacggcttcttcaagggcctgaacttcgcgctgctgcggtcgacgccgccgcccgtggtgccgccccccgccgccccgcaccggtgcgacaaggccgccgacgtgcagcagctgttcgatcacttctga

SEQ ID NO: 41836 - DNA, 870 bp, Zea mays
  Peptide Sequence Number=SeqID_85211
atgatgcctccgcgtggaggtcggtgcctgcccgtccgcgaggacttgaatggggatctgccggtgcaggctggggcggccgccattcgttggcgtagcgccggcacacaggtggccgctgtcgtcgatgttgaggtggtggtcgccagaggaggtttctccgccgacgagaccgttggcgccacccgcagacagacctccggctctttggctttgatagcttgtcctcgtccctcgagtggggacgtgggcgagggccttgtcatagtagcgtctaccctgaggtcatcgctgatgctatttagccgcccggagcggaggtcgttgtcgctgctggtgcagtggtcggcggcgagtcacctagagtttgtcgtcccgcaggccctctggtgtggaggtagttcatacccgcgggagtggaatcagagttccatttgtaatggcaccttgaatgccgaagtccctcggctcggtcagccctgcgatgagccggggccggaggcagtggtgtcagcgtggacagaggcggagtcggctcgaaaagaggcttcgtcggcccaggagcaggtggtttcccaggccgaggaggtgcagcagcggtggctggagcttggccaggtcatccgtgagtgggaccaaccccggagtcacgctgccgaggccgtgagccgggctgatgtcctcgggggacagctggctgagctacggagcggccagctgaggatcacttatccaagcgagagttacttttctcggaaggtgatgagtgaggatcccgctatcgaagcagtcaaaaagcgcgaaagacgttctggcagaaagactttttccgaggaaaattttgacgcagagggggttccccccttctag

SEQ ID NO: 41837 - DNA, 384 bp, Zea mays
  Peptide Sequence Number=SeqID_85212
atggacagtaacatgtgtttccattttctctcgctactgcttcagccacctttcctacccatctcataccagctttacattactaccattttttcttcatcaaatcctttttgggaggcttggaaagggaagggtgctcccagcccccgtcgtgcccctcggcccctcccaaccctcgtcgtcgtaacagagggtgctgtgacaagccagcagatgagcatggtgatcccgctggagcagtccatcacgccggtgcttcaggactttatgaatctcaacatattctatctaccagtgtattactgtggaggtgaggagtatagctcaaagtatgatctgctcttctctgctatccttctccgctcccctcatactccaccttga

SEQ ID NO: 41838 - DNA, 207 bp, Zea mays
  Peptide Sequence Number=SeqID_85213
atggccgcttggcgggtgagtaatctcctcttctgtttcaccgtatcctcagctgcctctagctttagccgcgacgcattgggatacctgggcaccggctcgggccttctctggcacaactccaccgggtgggatggcgccgccgccacctgggcacagaggagggagaagacgacctccctgccgtctatccgagctggacggtag

SEQ ID NO: 41839 - DNA, 270 bp, Zea mays
  Peptide Sequence Number=SeqID_85214
atgcagagcttacagcgaaaaataaacgctgattccgctgaagtaaaaggcgaagaagctcctaagggaggcttacagcgaaaaataaacactgattccgctgaagtaaaaggcgaagaagctcctaagggaggcttacagcgaaaaataaacgctgattccgctgaagtaaaaggcgaagaagctcctaagggaggcttacagcgaaaaataaacgctgattccgctgaagtaaaaggcgaagaagctcctaagggaggcttacagtga

SEQ ID NO: 41840 - DNA, 381 bp, Zea mays
  Peptide Sequence Number=SeqID_85215
atggcatcctcgacggaagaaaacatgaaggctttgctcaaagtccttgtagactgtgccaaggatgccacaaaatcactgggtggtttagtagatcatgctttagaccacatgcatgatgaagagatcgtagctagaaccttgtatgccatcaaagataaactagaattgctacagcaagatgccttagaggcaaaagtgcaagcatttccagaaattgttaagtacgatgggaatgacataagtgttgaacctacatcttcgtcgacccctccaactgttactgaaccatctgttgatgaagaggagttctactgccccgatgtcagtgatgagtggtacttcagcgattctgataggtctactcgtaatagctactag

SEQ ID NO: 41841 - DNA, 405 bp, Zea mays
  Peptide Sequence Number=SeqID_85216
atgatgaaggcattccctagctgtagactcccctatttgaatgtactcgtctaccgcatcagaaggggaccgagtcctggcatgcctgttgcgtcaaccctttgtgtaaacttttgggcgaggtcggccggctcgggcggttacggagatctcggagggacagcgaccgtgaagaagagtttgagctctgaagatgctgctgactggacggtcccacatgccagggacgaaggtgaggacgcgggtgccgctgagggcttgacgatcgagcccacctatcggcagaagggtcaggcgtggacgcgtggtgcacagggcgcacgtgttgttgggccggcacaggctgagcattgtggcacaggtcccacctgtcagcgtgtgagggaggtgaggccggctgcctag

SEQ ID NO: 41842 - DNA, 645 bp, Zea mays
  Peptide Sequence Number=SeqID_85217
atggagccttccatggcttgtggcaggcttctcgccggtcaccatctccttcttggcgtgatctcccgacatcacttcgagcggttaggctctaatgaaacccagcaggcgcgccgcctgctggatgaccttgacatcgcctgccagcggatgggacgggatgcattaaatgctaagagggcacgtcgcccgtctccgcctgagcgggaagtggagggcaaggcccgcacacgtgtcagcatcggacccctgcacacaccagggtccttcccgttccgggaccctgctggagtttggccctacccggaggctccggacttatatgtatataggggtccggtgtccttctgtgggaatccggacttactgagatgtggtgtctttccttgccacgtggcgccctttggcctgcccacccggtggggtcaggcgccgtcttccgcgtggctgggagacatcgcacgggtgcagcgtcttcatgctgtaggagaggaatttgagccgcctgtgattgggagcaccagcttcgtagacaaagatgccacaacttggttgctttgcgaagccatcatcgtagttgtggaagtgagttcatcggaggtgggcgcccatgttggtcacttgttctcaaatgctatagattaa

SEQ ID NO: 41843 - DNA, 612 bp, Zea mays
  Peptide Sequence Number=SeqID_85218
atgaacagtgctcccgtactgttcacgctgacttggcatttgctttcgcgacacgcttgtagccctgctttccttcgagccgaagcatttgagaacaagtccccaacagggccctaccctctgtatgggttggtgacctgcttcttcctccagcattcggagaagggtgttcaccaatcctgcgggggggaccttggctacatggggtcggccgactgcaggctgtcagctgcagtgtgtctggccctttggggctggatggctctggtgctgcctccgacgctgcctcctgccgtctggtcggggcgtggttgccgaaccgccgcacgggcaacagtcgcgccgtgcgcgggtttgccacatccatggcttcccctacccgctgagcgcactgggggaccgtacaagaggtcgtacgccgcggcggtggctgcgacgttcttggatggtcttgtcctcactcctgttggtcgaacgggagctaggacccctttgtgcgtgctgaggcagccgccgcccaccggtgcagaggtgtcgccgccgctggtgaggctacctcttacagaggtggttgcctccactggcgagggcatcagagccttctgccgctga

SEQ ID NO: 41844 - DNA, 294 bp, Zea mays
  Peptide Sequence Number=SeqID_85219
atggcgattgtgggcggcgattgtgggaccgtagtgatgcaccagcaggtttatgggcgtctaccaaagctagcgggggcctccatgggcgaagaaaaccaccagtgccccactaatctctcatcgtcgctcatccatcgccgcaaatccgcagttcgccatgggcgtgaggccttgtgcctccacctcggcagtgaggacacgtgtcatctgaagagcaagttggtacctggaatctcaagtgccaggcaagttgtgcccttgatcacttctttttacccactcatgttctaa

SEQ ID NO: 41845 - DNA, 276 bp, Zea mays
  Peptide Sequence Number=SeqID_85220
atggcgattgtgggcggcgattgtgggaccgtagtgatgcaccagcaggtttatgggcgtctaccaaagctaacgggggcctccatgggcgaagaaaaccaccagtgccccactaatctctcatcgtcgctcatccaccgccgcaaatccgcagttcaccatgggcgtgaggccctgtgcctccacctcagatccaagaagaaggttaacctcaaccaggaagaagatgagtcaaatccaacttcaaaaggaatcaagatccacagttcaggataa

SEQ ID NO: 41846 - DNA, 693 bp, Zea mays
  Peptide Sequence Number=SeqID_85221
atggacgggcttgagaggagctcgctctcggtggaccaactccccgacgacgccctcgtgcagatcctctcgcgcctcggcgccaagtcgctgtgccgatccaagtgcgtctccaaaccgtggcgcgacctcatcgccgatcgcctctactgcaaggatctcccccaatcgctgcaagggttcctctacttcgacgtcggaagacgcggcgacggccacgatgctgctgctgctaatgcctacggcggcgatctcgccggcagccgcgacgggatgctgcttcgccacggccacgggcgtttcatcgacctgcttggtaaacccatgccactcctcgacccttcgttcgcctttttgaaggagcagccgggcgtcaatgctatcgagctcctcgattcctgcaacggcctcctcctctttggacacaggcgggtttcagacacatacgactccctgggctacatcgtgtgcaaccctgtcaccgaacagtgggtggcgataccatcctccggctggactccgactccagcagaagaaattgtggacgaacacgtcaaggacccgcgtccctttatcatcttcgacccatccctctcctcgaacttcgacattgtgcagttctggcaagatggcacggtggacgatgtggaaggggtgcatgttaaaataggatattttctatatatagtctag

SEQ ID NO: 41847 - DNA, 819 bp, Zea mays
  Peptide Sequence Number=SeqID_85222
atgggggagagcaggaggaaccttgagatgactagctcatctcctcaatggtgcaggtctgctggagcttgggaagggacagggtggagactacagctggtattctctgcaaagagaggtcacttgaagctttttattcagtcacaagagttctttaggacacttcagcggcactacagcaacacctgtatagatgctaacaaacaggctgctataaacttgtttttgggatacttccagccacagcaggaaaaacctgcactgtgggagttagaatcatctgctgggaagcataacaataatctttttgatggccacccaagtacattgaaaagagtaaaatcagatggcaccattcttcatgaaagtaatgcttctatatctggctctggtcgttgccataatgaacagttaagtgcatcgcagcctgatgtccagaatgggtttcaattcccaacttcagaatccgattcacttcatgaaaatgacatttcatcagcttgtggaagtggagtagcacacctaaggtatactcctacagcctctgacgtgcttcatgtcccaagagctaaagttgaatattgccatgattctggtgattcaaactttttggatcttgaatggctttccacttcaggcaactcaagtgatgaaaggtctattgcaactagcacgccagatgcaaacctatcaaatgagaatgtcattagtggcataactcctgatatcatggaaaaccatcttgctgaaatgcagtatcagaagttacctcggaattttgtgcagtgggttaatcacggtgataccttttggtactaa

SEQ ID NO: 41848 - DNA, 267 bp, Zea mays
  Peptide Sequence Number=SeqID_85223
atggcggctcgccagcaacaccgccatagctttgagaaggtctacgacgctaactccgcgctcgcagccttgctgctggctgacagagtctggcccgtgtttctctttcctaagatctcctctgacccgagtagccacaggtgcagctgcagccatggacgccaccggcatcggagggggagggaaggcaaagaagggagcgaccaggcacaaggttggcgagcccagcaagaagtcggcgtggagttgctcagtgtgaagatttaa

SEQ ID NO: 41849 - DNA, 1131 bp, Zea mays
  Peptide Sequence Number=SeqID_85224
atgtgcggcggcgcgatccttgccaaccttcgcgagccggcgccgcgccggctcacagagcgggacatctggcagcagaaaaagaagctcaagaggggcggcggcggcgggaggcgctcgttcgcggcggaggacgatgaggacttcgaggccgactttgaggtcttcgaggccgactccagtgattcagatttggagctcagggaggggactgacgacgacgtcgtcgagatcaagcccttcactgccaagaggactttctccagcgagtcaatatcactaaggtttgcttttttcctgtttgcagatggcttaagcaccatgactagtgctgtagcaaggtcagccaagaggaagagaaagaatctatacaggggtatccgccagcggccttggggcaagtgggctgctgagatcagagatcctcagaagggtgttcgtgtttggcttggtactttcaatagtcctgaggaagctgcaagagcttatgatgccgaagcgcgcaggattcgtggcaagaaggccaaggttaactttcctgatgcaccagcagttggtcagaagcaccgttctggctcagcttctgctaaagcatccaagtcaagttttggacagaagcctatcgtcaaagtagctatgaacaaccttgccaacacaaatgcatccttcttccaatctgctagctacccctccaatttatttgttcagcatggcaatatgccatttgttccagcaatgaactctactgcttctgttgatgatcttatcatgaatctgcactctgaccagggaagtaactcctttggctgctcagacttgggctgggagaatgataccaagacaccagacatcacttccattgctcccatttccactattgcggaaggcgacgagtctgcatttgtcgacagcaattcaaacagctcatttgtgcttcctgccctggagaacagtgctgttgatctcactgatgggctgacagatttagaatcctatatgaggtttcttctggatggtggtccaagtgattcagttgatagccttctgaaccttgatggatcgcaggatgttggtagcgacatggacctctggagcttcgacgacatgcccatcgtcggcgatttcttttga

SEQ ID NO: 41850 - DNA, 1656 bp, Zea mays
  Peptide Sequence Number=SeqID_85225
atggagcaggacccggagcgcgcctgccttcggagcttcgagctccacgagagcgagtcgagcctttacgttctaggaactaattctgacagaacactttggagactactcaagatcgatagatcagagccgtcagagcttgtgatagacgagtgttctactgtatatactgaaagtgaacatcctgacttgttgaagggtcttgatgacgagcacaggtcaactggcggagtaaaatttgttacaaagttttatggcataattggttttatcaaattccttgggccatattacatgttgattattactgagcagaaaaaaatcggggaaatctttggtcatccagtgtatcaggtgaccaggacttcaatggttgaattagcaaattctaagacaagatctacttttcaaaacttcaaggacgagaacagatacaggaagatcttgaatgcacttgatcttaggaaggatttctttttcagttactcataccacattatgagaagtcttcagaagaacttggctgatccacaggatggatggaccttatacgagactatctttgtgtggaatgagtatctgacacggcggatccgtaattgtctcagaaatactttgtggactgttgcattggtccatggtttctttaagcaggataaattctcaatatctggcaaggatattatgttcacactcatcgctagacggtcgaggcattatgctggaaccagatatttaaagaggggggtgaatgagaagggaagagtagcaaatgatgttgagactgagcaaattgtctatgaagctgtgcctggacctactgaagagacatcaaaattgaatcttaaacctgatataatattgcatgagatgcagaataattatgaagctacagagcttcattttgaaaatcttagagcaagatatggaaaccctatcattatcttaaacttgattaagacacgtgagaggcgagagtctatactccgccgagaatttgataaggcgatcaagataataaacaagagcctgtcagaagagaatcatctgaggttcttacattgggatcttcatcaaaactctcaaggaaaacctacaaatgtactcgacgtccttctaaaagtggcatttcgggctctgaatttaactgagttcttctattgtcaagtcgcaccaaattctgagacttctgcacaatgccccaccctattgaatggtcttgatcaatatttatgtgatgacaacaatagtgacgacacagaatgcactgagattgttggtgatgtatcccaagaggatatctcaggcagctctgattcctctggtaatgcaaccacagaagataaatttgagaatagtggactgccaccaccaaaaccaccaaaattccaaaaaggtgttttgaggacaaactgtatagattgcttggatcgtacaaatgttgctcagtatgcacatggtttagctgctcttggacatcaattgcatgcgcttggttttatagaatctccagaactaggtttagaagctcccttggcccatcatttgatgcacttttatgagatgatgggtgacacacttgctgtacagtatagcggttctgctgctcataacaagacagacttccaagatgctgtgaacaaactgttcttgtga

SEQ ID NO: 41851 - DNA, 534 bp, Zea mays
  Peptide Sequence Number=SeqID_85226
atggcgggcgtcgacggaggatttcctaggattgcgggaggagatcaccgtgccgatggaaggtacgccatgcgcgaggatgtcgagggcggatttaggggcatgagcaaggaagcgagggggtgcacggggaacgagcagaactgtggtgcacgtgtggacgtttgggccgctttgaaatgtgtaacaccctacttcctgttgtggctatgtattgatttttggagtatgaggattacaaaggagctttgggaaggctcagtcgctgttgatgaggatgggtgcttatcctgctattggttcatgtccttctttggtgccgggggtgcaggcttcacgtggccgatgaggtccatcggtagtgatgtagatgttcacctcccggaacaactgttccgaagtggtgggtgccttctagaggatagcccgtacgaagaccgggtcgttggacccacgttagaattcctcggtcacggctgcctctacgacgtcggggatgcagttcctcatggtttagaaatgcctcaggaatga

SEQ ID NO: 41852 - DNA, 237 bp, Zea mays
  Peptide Sequence Number=SeqID_85227
atgtcttcatcacgtggttttggtggtctccgcaagaaacttgcaggtcgctttaaatccaagcgccctcgtggcaatgatgatgactatacaccgaccactgattcagaggcccaatcctcagctgggggcactgaatccatggatgctgaagattttcctcatgtccatcctgattatgccattgacacgtctggatggacctattcaaagcgaaggttctatatgagtgagtag

SEQ ID NO: 41853 - DNA, 624 bp, Zea mays
  Peptide Sequence Number=SeqID_85228
atggcggactgcttttatctttatgacacatttgatattggtttcattacaactgatgaatttggtaatgcggatatcttagaagcaacctatcctgctgttgcgaagagacttcatggggactggatacaggatccagcgatacctgttgttactgggttccttgggaagggctggaaatctggtgctgtaactactttaggccgaggtggtagcgacttgactgctacaaccattggtaaagccttgggactgagagaaattcaggtatggaaagatgttgatggtgtacttacttgtgatccaaatatctacccacatgcaaagactgttccatacttaacatttgaagaggccacggaacttgcttattttggtgctcagattgtactaactagcatagtgctcaagtcaaatgtcactatgttggacattgtgagcactcggatgcttggtcagtatggttttctggcaagggtatttgctatatttgaagatctatgtatatctgtggattgtgttgctaccagtgaagttagtgtttctgtgtcacttgatccatcaaagatctggagtagggaactgatacagcaggcaagtgtttccattccttcattgtattag

SEQ ID NO: 41854 - DNA, 557 bp, Zea mays
  Peptide Sequence Number=SeqID_85229
tcggcctggcggctgcgtccgggcggggacgcgtcggagcggcgcagctctgctgtggcggccggagacaggacgcgtgcggggaggggcgcagctctgctgctcggtctcctggccggagacgggtccctgacggcggggtcgcgcggtcggcgcagggcgcggacgtcggggcggcgcaggtgctcggcgcggacgggcgcggtgcttggctcggcggcgttcctggcggctcggccgcggtcgggtctgagcggcgtcgggtggcgcggctcgcgccgtcggctggtgccctccggtcagggaaaaatcctgctgtctacaaatttcttggtgagacgatccatgtagatgtcctacatggcccatgcgccgctgtgtacggcaagctccggcgcagccgccgcttggacgtggtccagagcggctgcaccgcgctgtccatcgtcaaacatggggacctcatggtcgtcgccaatgtcgatgactctcgggttgttctgggcatcgcaacctacgacgacgccatcacgccgtctagctcatcatccacctga

SEQ ID NO: 41855 - DNA, 1269 bp, Zea mays
  Peptide Sequence Number=SeqID_85230
atgggcaccgaacatggtgtctccggtgagctgcaagcggggcccacgcgatctgaggcggctgttgaacccctcggggggccagccttcgaacctctgatcagtagggggggctcggagcccggttccttcacagggaaggatccttttcggggcatccccctttcccgttattacggcgaaggcgaagcgtcgcccgcttctcctgccagaagcgctgcctgtcccgccgcggagttaatgcgacggggcgagtggttggcagggcggccgttgcgcgtgcgcgagccgttcgaggaacggatcacgggcgccctgtcttcacgccgtgagagggggttctcttgccgcccccggatgggacgtgagcctggccgacgacgtgaccgctgctcccgcccgcctgccaccgtcattactgccggcccactttcggctgcattgaccgtcgtgccaggctggcgctgctgggtccatccggcgcgctggttgcgtgacgcgtgggcctgggcctccatgctggcgtgttgggagtcggggaagcgcgtccacctggcgcggttgcatgccgcccgcatggctgcccgccccttccgcccgttggtctgggcagaagtggggggtctcttcccggctgcacccctccaccggcggtcacccaagatggtgacctccagcttgatggtgggggaaagcgagccgggctgcggcctctccccctccctcagcctcaaggattttcatcaccaaggcaggggaggggactgcagcgtgcccggctttcggacgcgagtggcttcggagccgctcgcggcgccggcgtctgccacggcagctggaacaggttcttccgccggcgcgatagccaaggaaggccacggaccgacctccaactctacggccttctgcccgtccttgccttacgagttttggcatgggcgggggcctcctggcagcagcatccgccctgaggtcagtgctgccgctgttcggccccccggagcagaagtcgtcgtcgtcgtcgctgctggagcaggtgacagcgcgccgttcgtcggtcttccgttgctccgcaggccttcccccatggagtgggggttgggtaaccggccgagccgcctgctcgggccggattccaggagaagtctctggaccgcgtcaccgtccgaggctgggtcggacctcgctgaaggtgtcgtcgatgccgagggtgctacagcccccttccagcttgaagacccgagcctgcaggatcagattgtcttgtag

SEQ ID NO: 41856 - DNA, 897 bp, Zea mays
  Peptide Sequence Number=SeqID_85231
atggcctcagggcggacgacgctgcaacaatgccctcgcccacgtctacgctcgaggggcgaggacaagtacaaagagccggaggcccagagcgcggatggtggcggtgatcccgtcggcgacgaggacttctccagccgccgccgcctcagcactaacgacaggagccgtctgccaccggcagatccccactcggatcctccaggacgagcggagcaccgacctccgcgcagaggtcctccccctacgacccgggggctgggtcccacgcgtcatgcaagctggcccagggcagaagaagccaaaccgccgtgcgcggtgcgcgcaactgcccagcggttacaagcattcctccactttcgcccagaccagcgggtgaaagggcggacagccatgcaagcggcatgcgaccgcgccaagtgggcgcaccccttcgactccaacgcgcccagcatggaggcccaggctcacacgtcatgcaaccggcgcgccggttgctacgtgcgagcaactgcaccgccactcgcgccactaccgcgactcgaggcaaccctacatatgacccaacagtgccagccaggcgcatcggtcacgggtcagtcagctgcgggagaaggcgcggcggtcaatacgaccaaaaatgggccgacagtaatggcggtggcaggcgggcggaagcagcggtcacgtcgtcagccaagctcacgtcccatccagggacaacaaaggaaccctctctcgcggcgtgaagacggcgcgcccgtgttccgttcctcgaacggctcgcacgcgcgcaacggctgccccgtgaaccactcgtcccgtcgcattaactctgcggcaggacaggcggcacctttggcaggagaagcgggcaacgcttcgccttcgccataa

SEQ ID NO: 41857 - DNA, 642 bp, Zea mays
  Peptide Sequence Number=SeqID_85232
atggacgacgccggaaggccaccaccacacgctcccgtggcggtgaccgcctccgcctccgcctccgccaccgccgcgcccgcccctccccaaccctcagccactgctgccgtcgacaggtcctcccccgaccccgacgcgctctatgaagaggggatgtggcaacaaatggccatggacagcggtgccactatgcaacctgggtcatatcctgagcgaccagtcctagcaataaatgcacaacttattaaagacactaagatgcatattcaaggcatcgttgttgatacctggacactgattagagcaatgtcaaaagttacaaatttgctaggacagggtgaagaactgtgcaaattctattctcgttacggcatctgcaagttcggcgccaactgtaaattcgaccatcctacagtggttgctccaatgatctttgggaataactctcgaaaccgaataaactttggatacagagatgccagttttcaggtgcctgcactatttgacattattgctgcacctatggttccgaacagaggaacagttgaattctctggaggggctgaagcctgcacttgtgcagttgagattatatcatcgcgtcgatttattttggaacctgtattcagctggtgttga

SEQ ID NO: 41858 - DNA, 192 bp, Zea mays
  Peptide Sequence Number=SeqID_85233
atggccatacccataccacaggtgtacccgctgttcgtgacgatgggtgttgctatgggcatatgcggacttcagctctttcggaacatcaccggcaacctggaagtcaggtccggatctacactcttcactccttttgcctattcgattcttgcaagagatgtgctgctccagctagagcagggtacatag

SEQ ID NO: 41859 - DNA, 1263 bp, Zea mays
  Peptide Sequence Number=SeqID_85234
atgcacctgcgcttgaaccctgttctccacacgcttcgcctcgtactcgacattatggcaccggtccagcttggtgtttggttggaggacgaggaggacgacgacgtctctactgccagaaaagacgccccgccacagcacagcaccacgcaagtcaaggaaacagttgcttcgcgaggggtgacgaggccgatcaactgtgtcagtgctcatcagcttatgcgatggagcgaggacgccaacaaggtagtgcgtgacgcgctaggcgctacggaacgaaggcgaggccggccctcgcgccccggagaagtgccaaaactggcatccggattggatctgcatgccggccggaggagcagcgaagcatcatcagctgctgttgggacgctgggtttgtcttggcagcaagaagacgagctgccggtgattgggcgccacgggcacgcggtgggtccgcggtccgcccaggaaggcgccgcgccaacagactccctcccacgcctcgcgccaggctgtggccgtacgcgtggtggggtgtgcctccgggccccggcctccgcctccgcctcctccccgaccccgacgacgtgttcgctcggtctcgtgcccgggcaggcagggacgcctgatccccggctcatgctcccatcgcagcctaaaatcttctgctcatctcctgttgcggtggaacggagcggcagcaggcacagccacccgtatcgccgtgctgcagggacacccaccccggtgtcggtatgtacgggcgcacggcgcgacgcgtcatcactcgcccgtgccgctgtcgagcggcaccaggcccgggcgcccgtgcaagcctctcggccatggctgccgtccgtccgggacctggcgtctctgccgcgcttcaactcctccggcttcgcgcgttcgtgtgcgtcatccaatccaacagccggaccggacggacgacggctgtggcgggcgcaggtcagtcgtcatttcagcagagatctgggcgcacttgctgggatcctgacaggtcgtattcccgaccgacaggaagcccagggcgcgggcaggacagttggggttcgggaccatgacgagctcgctggtccatcgtcggacccagagcgggctcttgccgatgacgatgatcatgagcagcgacagcgacaccacaggccacagcattgggcatcattcgtcgagccaatcattgctgctctcctgctagactcgctccagattggaccatactgtttctgctgttgggcttaa

SEQ ID NO: 41860 - DNA, 219 bp, Zea mays
  Peptide Sequence Number=SeqID_85235
atggcgctggcgcccggcgagagcgggcgatatcgcctcgctctcgcccgcgctggagcgcccgcccgggcgagaggcgggcgagagggaggcgagagggaggtgaggcactggcggggcgagagcgcgggcgagagcgacgtggcgcgatctgactggtccacgtgtcgcgatctgattggtccacgtgtgctagccgttgcaactagccgtttttga

SEQ ID NO: 41861 - DNA, 90 bp, Zea mays
  Peptide Sequence Number=SeqID_85236
atggaggaggctatgctcaacctcaatgaagagtcgtcgagcaggcccaagcgtcgtcgacgctacatcaatcgtgatcgtatcgcatga

SEQ ID NO: 41862 - DNA, 1059 bp, Zea mays
  Peptide Sequence Number=SeqID_85237
atggcggcgcgaagggcaggaagggcagttctctcttctctggctagatctctcgggttgcgaaaacctaagaggagcagcgggcgacgcttcgccttcaccgaaataaccgcgccaaaaaaggctccgagcctccttactgatcagaggttcaaaggctggcccaccgaagggttcaacagccgcctcagatcgcgtgggccctacacccactactggtcagaggttcgaaggccggccccccgaagggttccacggccgcctcaggctactcgggctccgcgcccattactgatcaggggttcgaaggctggcccccgaagggttcacagccgcctcagacgccgagcgagggatgaccaggtgtacgttcgatacataaccaaggctcgggctgcgctcccgagctcaccggagacaccatgttcgacgcccatcgagggtaacatggcgctctcccccctcctccttgcggaaaggcgacacaggggcaggctcgggggctgctctcgcaaacccggctccggccaaaccgttgacagcgtcaacataccagcccgagaacttgggccccgaccgtacacccaggctacggccagctcgcatgagggaacaaccagaccagccgaagcattacgcaaggcattaagacctcgaaggagtgaaaccactcctccgaggcctcgggggctacacccggcgggtgcgctcgcgcgcacccaccggaacaaaatgcaaccgagaaaggctggttcccttgcaaaaaagtgcgacgaaagcctccaagcgagtgctaacactcccttcgaggctcgggggctactgtcggggaccataattaggggtaccctcaagactcctaattctcaactgggctcggactcgggctcagccctggaagacggcgaactccgctccgcccgacccagggctcggactcgggctaagacccagaagacggcgaactccgctccgcccgacccagggctcggactcgggctaagacccggaagacggcgaactccgctccgcccgacccagggctcagactcgggctaa

SEQ ID NO: 41863 - DNA, 244 bp, Zea mays
  Peptide Sequence Number=SeqID_85238
atggatcaaaaaaccgttctctttcacacttggggcttggacttcccgctgttatctgctgcgatccccgttatcccatcgggatctgagattccccctacaggcaacattggaggagctgatccaccgccgatcaacgacgggaaccaatctcctcgacaccagcagggagatcgacaagaaggaggaggcgggtcttcgctgcaagacgccgccgcaatgatggctaggaacaacaacgacg

SEQ ID NO: 41864 - DNA, 807 bp, Zea mays
  Peptide Sequence Number=SeqID_85239
atggtgcaaattgggtcaacgagcttccgtcggtactatgggggaaccggaccacacccagccgtgctactggggagaccccgttcttcctggtctacggggccgaagcctgtcttcccccagaaatccttatgggctccccatgggtccagtctttcgatgagtctatgcaggaacagctacggcgtgaggacatggacttcatcgacgaacgcagatggcaagcggcgatccaaaatgcacggtacagccaagcgctcagacgctaccaccagcgggtttgtgcatagtagggagctcaaggtcgaggacctggtcctaaggcgagtactgaaccgagaagggctccagaaactctcccccagttgggaaggacccttcaaggtgacagaaatatgtcgacctgggtacaactactcatcatcagcaggatcccactggaagcgctcggccaccagctccacggtgtcttgtatgccctcccgggcgacgtctttagtgtcggccaccggaccagcgatcaccggctccaaggatatggtcgggtcgtggctccggaagcatgttaagacatactcaatcaccgcccgacagagcttgccaccttctgcctccaggcgggcgccaagaatctggtccagacgccagaggcgatcggcggcggagtccagcattgggagcgtgtcggagataaacgtcggcagctccgtcaccgggatagggatcatccctagcagcaccagtgtcgtgctcgcctcgccggcccatgcagcgatgcgctcgacccgggcgcggtgctccgcctga

SEQ ID NO: 41865 - DNA, 1554 bp, Zea mays
  Peptide Sequence Number=SeqID_85240
atgaaggaggcatcacgccgggttccgcccattggcttatgccgcgtgcagtatgccacgtggcagcatcggggctccgcctgggcggggagcaggagtatccatgggtccagcactttcccatgggggtcccgactcactgttgacaccttggagtatatcactttctctggccacgtgacggccccggagccgcccacgtggtggggtcaggcgctgttgctggcccagagtagtcacccgaggctggggcgagtcatggtctggtcccacgacaccccagcactctatgatgatctagggctgccaacggcggtcctggccacgctgccaaccctcgacgacagcggcatggcggttcgtcagatcggcggtcgggaccccctccatggaatccagatccctagtgcagcagctggaggtccccagccctccggtgcggctcctagcgcccccgtcgtggcccccagccccttggacaagggtaaaggggctgcgagcagcgcctctgccttaggtggcaccggagggtcggaggaagagaggcgacgtcgcctgcgtcgcgctgacgggtcgcttgtttccgacccccccagaagcgtcagaggactgctggtggggacgaggagaccggctcccaggtccagggcacgcagaggcgcctcagtcgtccggtcccgccgtcgccaccaccaccgtcgggcccgccgccgccaccaccaccatcggtcccgccaccaccaccactacctggggatcttaacccatcgtctgttcgctagggcttcctcctccaccgctcctaaggccacaccccctccgctaggcaccaggcccaccgatgggtccagctctcagcaacaggaatctgctaggagtggtgccggcgatccgcctccagccactgcccagacagcgccagcggcttctcatgccccagccgggggtccggtggcagcggcgccagcatcatgcggcgtcgcagcgacagaggaggtcccagctgggggatccgcgcccacctccgacatcacgcccactcccgacgttgggggtgaaaccggaggcacgtccagctccaaccccccgcctgcaccggaggagatggaggtggagtgggaggcgcttgaggccgagcaccagcgcctcagcgactggcgcacccagctggaggagcgcactaggacggcgtcccgccaattcatctccgagcggtcccaacttgagcgggaccataaggaggagctggaggcacaccggagcaagaagaaggtggccaggcgggaggaggccatgtctcagcgggaggctctcgcaatagagtttcgggccaagctgagtgccctagaccagaccttggaagagcagtgggtccagcagaccaaggttgtggagaggctgcaaaagatgcagcatgagctcaagggcaaggccagcaacgccgccctcgccgaggaaaaacttaaagcgaaggagcagtccttggacaggcgggagacagacctcgccaggcgggagatggatctcacattccaagaagaaatgctgacctag

SEQ ID NO: 41866 - DNA, 498 bp, Zea mays
  Peptide Sequence Number=SeqID_85241
atgcccagactgagtgggtgctcgatatggtgtgccgcctacttggacgggatgcgccagcgttcggcggaaggatttgcgtcgacgccatcctccccggtgtgcggccttgttggagcggcgctcttccaccggtgcttggcttcaaggatgttcatcagcctcgcggcggtggggaaggtggtcgctgccgttggtgcagaggtggttgcctcagctggcgagccgctcggagctagctacccacgtggccctactgaccaacaggtcgggcttatgagggaggacctcaccgggttggcagatgctccagtggtcaggaagaggtattccttcagtcatagcaagatagtcaccctcgggtcggcgtattcccgttaccttgaagggtccttcccagctgggggagagttccatttctgcatggacttgtcaggagcctggacccgtggggagtccagaagggtttccgggggaaggcaggcttcggccccatag

SEQ ID NO: 41867 - DNA, 384 bp, Zea mays
  Peptide Sequence Number=SeqID_85242
atggctgctactcgagggatgaacccctctttaaaggaggactcccttgctcccgcctcgaagcgccgcgagaagcctcccccgatgcacgccgagagaagtcgcaccgccactcgtgccaataccgcgtctcctcgggggccgtcgcagaagactgagaagataaattttcaaaaccaatgcagcgactcgaggcaccacgcgcatggcccaacaaagccattaagtgcggaggtcacgagtcagtcagctgcggggacaggcgtggcagtcagcatgataaaaggtggacctgcagtaattgcatcaactggcgcgcagaaacagcgagccaatcgccaatcaaacttttggccccacctgcaggctcgtatcgtcccctga

SEQ ID NO: 41868 - DNA, 384 bp, Zea mays
  Peptide Sequence Number=SeqID_85243
atggccggcgggcgcggggacgagtggaagggtgcggccgagccgagcaagaagaggagagggcggggaagggagagggagggagagggaagggaggccggggctcaccgcgggcgagggcgctggtgggcgacagttccgggcgtcggggcgagatggagcagggaggagagagaggggtttggggagggggatgatgggtggggcccgcgggggaagatgcagcggcggtttttccaaccgcgcgcgtcgggcgcgggggatgtgggggggccagctgggggtggctgggccgcaagccggctgagccggaaggtcggctgggccggcgcgggggcccatggcgggaaggggagagggggacaaggccggctggccagctag

SEQ ID NO: 41869 - DNA, 513 bp, Zea mays
  Peptide Sequence Number=SeqID_85244
atgcggtcgagtttgttgcgcagcggaaggtgggagaaagtcccctggcaccacggagtccgcgctatccgccccccgatttcccccaagtcattttgggaccctgctcgatttaccagtgattccgcggattccgttttggtggctgcttcggcgttgtttggtttcagcggaggggaaggagctgacgctctggtcctacccaacagcgtcgcggtggtgaatctaggtgtgcgcaggggagtgacctatggggcccacgtgtcatacacagcacgagagtgcggcacgagctgggccgcaggaataggtcagggggtgaaatgggccgaaatgaggtgtggaggacagagttggtggtcgacggctgaggtgaaggtcatgcgggcttgtgctgatggaccgggagcggtgaaggatgatttttgggtcttggctgacgatccggtgcagcggggtgactatccgtggtggctgacacctgagacacacactcgcacgaggacatggtga

SEQ ID NO: 41870 - DNA, 1731 bp, Zea mays
  Peptide Sequence Number=SeqID_85245
atgggaggacttggggtttccgatggttttgctagagagttgatgaggacatgcgcggccccggggggaaggatgtcttcgcccgagctccgggagtcttcggctcggatgctgagggttaccgggggttgctggcctaggaatgttcctatcctccgcgcggctggcgaggacttttttacatctcgcatggttcgtgaatggagagtttttccttacgggcggaatattgctgttgttgtgtcggcagtgatggacaaggatcgccagggagctgcacaaaagcgccaggcggctgtcaggctcgttgaagccaggccgaagaggcagcggggggctgcgaaggctgcggcccccggcggaggcaagctgccgctggcggcgaacggagtggcggaggtcgcgaaggcggcccgagcgttgccgttgtcaggcaagcgtgtcgccgacttcgccaccaatattaatgtggacgactatcttggtgggtcggacgaaggccaacttgctatagttgcgcctgccgcggcgaccacgacggctgccgtagtgccgaaggcaaagggcagggctcttagcgccggaggcgaggtgtcggccctcgcggctgtcagggatgaggcgggcgctgtgtcccgccggctgaagcaggtgaaggaggcactaagtcaggcggctgacttcgtcgaccgcacagcgtcgggggcgctcacggcggttgtgtctgccgaagtcgagagacttcggacgcaacatgctgacgccgtccgtgaaaaatcagccgccgacagtaagtgccgcaagctggcggacaaggtggccgcactggagagggagaaggctgacctccggcgccaactggcgggggagaggagggagaccaacgaggccctcgctaaggagcaggctgcgcaggcggaggccaaattgacacgggcggagggcaatattgccagggagtgcgccaagcagctgcaggagcggctcaccgccctggagagccgcgtggagagggccgaggccgtgtcgcgcgcggaggcagagcggacgcgcaaacagcttatggatacataccgtgagctgggcgcgcggaccggtgacttcgaagtgccagaccgagagcccggacttcgctgcctggagtgggtgcaggaggagttgcaggcactccccactgtcgtggaggggtttatgtcgtatgcctccctggtcacctgcgagggggcgatgaacgcgctctcccgcgaagggtgccggcacttcgaggtcttcgaccaagccgatgaagattttgagcgagatatctataaggttgaggaccccatagtgaaggaatccgccggagccatctacgaccggatgtggggtccgcacagtcgcgaggtggtcagggagcgggccgagacggcgagggctcaggcggcgcgtggtgagagggtggacgacttcggggcgttgaacagcgcgctgcctgacccagagccgaccccggcggaggccgtgtccggggccgccctggagccgcccccggagactgcggaaggcgcaccggatgcccccgcatccgctgcggccggcggagacctgcccccagagaccgccgaaggcacgcctgatgcccccgcagccgctgcgccgagtgctgaagatcctgcgacagtggcggcggaagcaacagcggaggcaacggcggaggctcccgcaacgacagggtcttcgcaggtggcgtag

SEQ ID NO: 41871 - DNA, 777 bp, Zea mays
  Peptide Sequence Number=SeqID_85246
atggggctcggtgtatgcggctcgctctgccaaggtggttatgagatcgatggttctggttatgactatggtgctgtcagcccggctacatctcctcgccggtggtcacccaagacggtgaccaccagcccctgggtggggagaagcaagccgggctgcggtcttggtcccaccctcagcttcaaggatgttcatcatcctcgctggggtggaggccgggctgagccgaagctctacctcccacgcgggttcgtgggtcagcctctccttcagcgtccgagggagagggcgctcactggccctgcgagaggggtggacttcgacaatgcggggctggtcggcggcgggcgtcgtcagcttcagcgtgttgggctcgccggcttggctcccgacgccccctcctgccgcaagggtggttgtcgcgccgtgcgcacgggaggaccgcccaagacgtcgcgagctaccagggcggcgttcgtgttcggggcggtcctgcctttgcaccggtacggcgcccctgcgcggaggtcggtgctccgctcgtccgggaggatccgagtggggatctgccggagggctgacggcccctgtcgtcggtgccgaggcggaggcggctcgagaagtccccgtcgccgacgggatcaccgccaccatccgcgcttcaggcctccggctctttgtacttgtcctcgcccctcgagcgtcggcgagggcgagggcaaggttgcagcggcgtttgccctgaggccatcgctgctgcagttcggccacccgtag

SEQ ID NO: 41872 - DNA, 756 bp, Zea mays
  Peptide Sequence Number=SeqID_85247
atgccggaccgggccagcactacgaaccgaggctacggccccagcaccgcacgacgctcgtgccgggttggctcaggcactattaaatgggtcgtgcctcgggccggctctctagacacggcccatttggccatctatacctccataattatggtcttcgcctcaattgccacctcctcgttcgccattctacttcttttctatctcccctcatgcctccaccttcgcgctattccattctcggcagagggcgtaggagcaagcgcctcctccccgtattcgtccaacaccagccccgacaccgattcgcgccgtggctattgcacgtccacgaggacgtttcacatcatgcgcgcaccatcgtctttgtcgtcgtcggacgtcctattcatcttcccggccttcgccctgttcatcctccccaacctgctgcccccatccacggtcgccgccgtgagccgaccgacgctcgtcgacgcggcttcggccgccgtcggactccgcgtctccgcccggagtggatccagcgccgatgaactgtggcaaacggtgtatctggcggcgctggaccgacatgaagaggctgcgtggttggcgcttggcgtgctgcacctgcacggccccgccaatggaatctccaagctcgggatcacgaaagctcgtgttctgatcttgtattcatgttttgtgctgtctgtatatcagctcttgttatttctatctgaagttcctcgcacattgatgctgattatgtga

SEQ ID NO: 41873 - DNA, 527 bp, Zea mays
  Peptide Sequence Number=SeqID_85248
gccgtatctgccccggcgtctcacagttgagtgacagccctaggtgccaggaagaggtctgcggcggacttttgcaaagattcgcacgtatgcgacctctggcgacgtttgaacactggaagaaacaaaccgccacgtgttcgacgccgtctgccgcgccagagcacgcccgcgcgcgcgcccgcgccgcgcccaagccgagccagcgccctgccattcccagccccgtccagcccccggagaagactgtgcacgtctccgtgaagctccccgagcgaggaatcgggctctgcttcaccggagaggccggcccaaggtcaccggacttcaaccgaccgccggcaaccgtggaccgagaccctccccgagccaaccctacacttcgccggaactccctcgccgccgagtacatcctcgtgccggagcaaggagctgctcaggaggtagccccagatccagcaccagagccagcaccagaggacctgcctgccactgctttggaaggcaagccccggttttatgcataa

SEQ ID NO: 41874 - DNA, 267 bp, Zea mays
  Peptide Sequence Number=SeqID_85249
atgctgatcagaaccaaattgtcgatgtttgtggccttccaaaaggttgaagctcgaattgttctatctgttcttcggaagatcaaagagcaatacctcctaggtcatgttgagctgccacttcgtattatcatcacggatcatgagaagacatcaagagctgaagctgaaactactgcagttgacatcgtgcaggcaataattactgaaactagtgcagttgatgtcgtgcaggcaagagctgaagttgaaattagttttgattga

SEQ ID NO: 41875 - DNA, 1191 bp, Zea mays
  Peptide Sequence Number=SeqID_85250
atgtcggagaaaaagcgccgcgccggtgcgagcgcggccggcgccgcatccagctccaagaagccgcgtgcttcctcggccgcgtcgtacgccgagtccctccgctcgaagctccgccccgacgcctccatcctggccaccctccgctccctcgcttctgcctccgcttcaaaatccaaggccgccgccagcatcctctccggccggggcttctccttcgcggtgccctcgcgcgccgcctccaaccaggtctacctcccggacctcgaccgcatcgtgctcgtccgccgcgagtccgcgcgccccttcgccaacgtcgccaccgcgcgcaaggccaccatcacggcgcgagtcctctccctcgtccacgccgtcctcggcaggggcatccacgtcaccaagcgtgacctcttctacaccgacgtcaagctcttcggcgaccagacccagtctgacgccgtcctcgacgacgtctcctgcatgctcggatgcaccaggtcctcgctccacgtcgtcgcctccgagaagggcgtcgtcgtcggccgcctcgtcttcgccgacgacggggaccggatcgactgcacgcgcatgggcgtcggcggcaaggccattccgcccaacgtcgacagggtctcgggcatcgagagcgacgcgctcttcatcctcctggtggagaaggacgctgcattcatgcgactcgccgaggacaggttctacaaccgcttcccctgcatcattctgacggccaaggggcagccagatgtcgccacccggctgttcctgcggaggctcaaggttgagctgaagctgccagtgctcgcgctggtggattccgatccatacgggctcaagatcttgtcggtgtacatgtgtggttccaagaacatgtcgtatgacagtgccaatctgacgacgccggacatcaagtggctcggtgtccggccgagcgacctggacaagtacagagtgccggagcagtgccgtctccccatgaccgatcacgatatcaaggtggggaaagagctgctcgaggaggacttcgtgaagcagaatgagggctgggtgaaggagctggagacgatgcttcgcaccaagcaaaaggctgagatacaggccctcagttccttcgggttccagtacctcactgaggtctacctgcctcttaagttgcaggagcaggattggatttga

SEQ ID NO: 41876 - DNA, 405 bp, Zea mays
  Peptide Sequence Number=SeqID_85251
atggacacgaatggcttggaatgcctattagcaaagctacctggtggccagttaatttcttctcggactgccagttgtgtcttatacttgaaataccatgcaatagtgtcaaggttgtacatgtccttagaaggctatggaaagataaaaaaaatttgggagtccaaactgttaaatctaaactatccaagatatttcagttgtatgaagccaaatttagtgacgcgtgcatgtgtgccaatcaacactcagcgtctcttcctggttctgcatagtgtggagcaagagacaagagaacttgaagctgaacatgagaacttataccttgatgatccggaagcagtagcagcaacacaaatagatggtggtggtggcgagcttagttgttggcttgttggttcttag

SEQ ID NO: 41877 - DNA, 798 bp, Zea mays
  Peptide Sequence Number=SeqID_85252
atgtcgcgcgcgttcgacgactactgtatcgaggattgtggcgtcattttggcgccggaggtgacacagaggaggatcgacaatagtgaccagttcgtcatcctcgccatcgtcagggtagcttttttgccgcggagaagcgcccaacccaacccgccgttcctcctccaaagcgccctcctgccccgcaaaatggagacctctttcctgcccaccacactccccaacacaaggcctctccccgcgctccgaacctacgccccagccgcctcgatccgttcccaacagcgccctcgtcgctccaccatacgcgcagccatcacccggggccggaaggaggagacggtgaccaccgtccgggagcaactggaggggtgctacctcctggcgggtatcaagctgctggtggcgaagaacacgctggtggggaaagccatcgagggtaccccttgggaggcgctcaagccgtgcatgaagggtatgaatgcctggctcttcgtccacactgaggaggtacccgcagcgctcaagccctaccgcgccttccagaaggaggagcgtgtcgaggagaccaacgacttcgtcggcgccgtctttgagggcaagttttacgggcccggcgacttcaaggcgctcgagactatgcccagccgcgcagaggtgtacgccacgctgctcggcgcgctgcagggacccgctacgtccctcgtcgccacgctgcaggcgccagccagagatgttgttgcggtgctctccgcctacgtgcgcaagctcgaggaggaggctggagccgcctag

SEQ ID NO: 41878 - DNA, 450 bp, Zea mays
  Peptide Sequence Number=SeqID_85253
atggggtgtatcccccgagcttcgagtagatttttaaaaaataatctgctcgaaggaattggcgtgaagctattcgcattatgctttggaggtattcactgcgtgccctgcacagatgtgaccgttttgaaaaatatactgataattcctgggcgtcccccccaatgggtgtgggcaagggacggcttggggcttgcggcggaggtctggacgtacatccgggccgtcgagcgctccgggctcgagggctcggatgagtcagagtactcctcggatgaggaggactcggacggcggcagcgaggacgaggacgacgacgacgacggcgacggtgacggtgacggcagcggcaggggcagcggcggcggcagcaaggacggtgacggcggcggcagcaggggcagcaaccggggcggcagcagtaggggcagcaccagggccagtggctag

SEQ ID NO: 41879 - DNA, 843 bp, Zea mays
  Peptide Sequence Number=SeqID_85254
atggagggggcgtttgtcctaaaaacgtcctattgctcggaggtagaagggttcccttaccttcttcgaggttgtgcgcttcacctgggagtccgcaagaagccgaagtatgcctggaaggagtaccaggagaatggagttgagaaatgctccatggtgatctacctcggggaaagccgaagctatccaaaccacccacctttccagatcactgccattggcaaccgcttccccgacacttgccaaaataccgccctaaaagctctctgtcagctatgccaaaactgtgacaaagaaattagcgaaacacccctctgctacttcccacccaccaacaaaaatagccccacgtggaggaaaagactccaatccctctcagggagagagcacaatgagtatgaccccacggtaatctacatggccagataccttcacacccttgacacccatttcgatgaccttttctcccactgcacccgcctaacctcccgggtagagaacctggaacagcagatcaaggaactgaaagaagaaaatgctgctcttcagaacagcctcgaggaggcggaaggagaggaagccaacacctgtgaagcatacaggagcctgaagaaggactatgccaggaggctaaagcgcttcgcccccgtcaaaaagattcagaagcacttcaagaaccaaggatgccagaccgtcgaggagaaagcggaggaagagcctccatcaccaattgccgccctaggactagataacctctccgatgtcgaggaggtgtctttagctagcctcgatgagatccttaaagagtttggggacgttctagcaggtgacgcgcaggcatag

SEQ ID NO: 41880 - DNA, 312 bp, Zea mays
  Peptide Sequence Number=SeqID_85255
atgatgagattatctatgatacgctgttttcccttctcttatgatgatgtgatacttgtggtcttcaagggggctcgagcggtttctcgagtgcctctccgtggttatgagattgttgattctggttatgactatgatgctgctagtccactacagccagacaggatacttgctgagtatgttgatgtgtactcacccttgctctacacaccaaacccccccccaggttgtcagcattgcaaccactgctcaggcgaagatgaagctgtggaaggagacttccaggagttccaagactacgacgagttctag

SEQ ID NO: 41881 - DNA, 363 bp, Zea mays
  Peptide Sequence Number=SeqID_85256
atggccagctccttcccagtcacatctggcaaaataagacccacccttaagctcgccagcctcttctcgtgctatggcacctgcccgatccctaggaaccgggccaccggcggagagtcgccgttgaacccgccggcggccggttttcccccgcgggttggccgattcacccctcccccgtcggccgctgacgccgtctcccctcccgctctctctggcgcgtgggcccgtaaccacgacgtcgtctcctcacgcgcccgctccgtctctcgcacatgggccgtgctgggccggcacgcccgcgccgcgcacgcgcacgcaccgcgcttggctgggccggaattccccctctcgacccactag

SEQ ID NO: 41882 - DNA, 348 bp, Zea mays
  Peptide Sequence Number=SeqID_85257
atggcaggaatgtactgcaacgcccgcgactgcctcaacaagagaatgcagccgccggcccgcaccgctgcgcggatcctcttctcccccgtcgacaaggcgaaaggctcggcgaagaagaaggaccggggaagggggataccccgagagggatccttctccgcgaaggaaccgggctccgcgccccccattactgatcaggggttcgaaggctggccccccgagggttcaacagccgcctcagatcgcgtgggcccgacacccactactggtcaggggttcgaaggccggccctccgaagggctccacggccgcctcaggctactcgggctccgcgcccattactga

SEQ ID NO: 41883 - DNA, 745 bp, Zea mays
  Peptide Sequence Number=SeqID_85258
atgccatcctcttcttcttccgccgacgccacgctgccggccgccgcctcgtctaaggagacgttgagtagcgtgatggtggaggagttgcgcgccggcgactctgttgattttggtgtgtcgcggatgacgtcagcccgtgttgaagatatgcagcggttgggctactttggcggcggagtcgctcgtgctccggggacggaggaagtccccgagcctgagggcgagttggttgttttcgaggcgttcttcgtcgccggactccgcttgcctgcgcaccgggtcttcgaattaaatcaattgtcgtacgacggctaccctggtcaagacgaggcggaccgccgtgggaagaagccggcggtggagactggaggcgaccctgcgctggcggccgccccctcctcaaaaaagagaaaattagtgatggacaaggatcgccaaggggcagcgcaaaaacgccaggcgactgtgagggttcacgaagctcggccgaaaaggcagcggggagcggcgaaggctgcggcctccggcagaggcaaaccgccgctgccggcgaaggcgggcgcttgtccacctagcaaggcgccggaggcaacggtgggcaccgaaggccccaaactgacgaagggggccccgtcggccagcggacaggcggagggtgcgaaggcggctcgggcgttatcacggccaggcaaacgcgaggcagacttcgacaccgagattaatgtggatgattatcttgggg

SEQ ID NO: 41884 - DNA, 450 bp, Zea mays
  Peptide Sequence Number=SeqID_85259
atggctgctgttgcttgcccagccagcagtggtggtcttccaaacaggaccgatgccaccggtggctggcctgtccgaggaagtcctgccgctgccgtatggcctattcgctgcagccgctccaccgccgtcatgcttattcgcgacgccgcgctgtccgccttctggcttgtctgcgacgtcgcattgcccgccgtctggcctgtccgcgacgccgcgttgcccgctgtttggtctgtccgcgacgccgccctgtccgtcctctggcctacacacaacttcgtacctgcttgtccagctccagcttgggaagaatccccacctgcagttgcccctacatgggagaggtccctgcttgctgctgccgcaaggagtcattgcgcctgcgccgcatcgaagacgaaggtggctggaggcaacacaccatccccatccgactccatctgttag

SEQ ID NO: 41885 - DNA, 282 bp, Zea mays
  Peptide Sequence Number=SeqID_85260
atgtctttcgtgcttttcgactacttcgaaagcgggatcctgaaaacgacggagtacacgctcggacctcgacggagggggagcagcagcaccctcggcgtcaactacaccttcggcgaagtccgacctagcctcggacggcaacgcggtcggaggatctccactctgaaggacgacatcagcaccgcgcccgggccatcgctgccagggtcttctccaggaatccggcccgagcagacagctcggccggccaccccgaagcctcagccagctgtcccctga

SEQ ID NO: 41886 - DNA, 1800 bp, Zea mays
  Peptide Sequence Number=SeqID_85261
atggagctccagttccacctccgcaggtacgaacaaccccccacgattggagggcctgcggagcaacagaaggccgacggatggctcgccgccgcccgcttcagcagcagcgacgacgacttctgctccgagcggccgaacagcagcagcgatgacctcagggcggatgctgctgccataaggccctcgcccacgtccccactcgaggggcgaggacaagcagaaggccgtagagttggaggtcggtccgtgggcggcaccggctatctcgtcggcggagaaacctcttccggctgccgcggcggaaggtggcaccggaagcagcgccgaagccgctcggactggagagccggacacgcggcagctgctagcgccacgaacggcgaacgcccttccccccgatcgctgagggaaggagcgggccactgcccgcgcggagaccgaccccaactcggcgcactcccctccccagcactgatgatgaacatccttgaagctgagggaggggcagaggccgtagcccaacttgcttctccccacctaggagctggtggtcaccgtcttggggcagaagaagccaaaccgccgtgcgcggtgcgcgtaactgcccagcggttacaagcattcctccactttcgcccagaccagcgggtgaaagggcagaccgccatgcaggcagcatgcgaccgcaccaagtgggcaccccctttcgactccaacgcgtctagcatgggggcacaggcccacacgtcatgcaaccggcgcgccggttgctacgtgcaagaaactacaccgccactcgcgccactaccgtgcctcctcgactgcggaaccggtaccgcgactcgaggcaaccctgcgtatgacccaacagtgccaaccaggcacgtcgatcacgggtcagtcagccgcgggagaaggtgcgacggtcgatacggccagaaatgggccggcagtaatggcggtggcaggcaggcggaagcagcggtcaagtcgtcagccaagctcacgacgggcggcacctttggcgggcgaagcaggcgacgcttcgcttccgccataatgaccgcgtcaaaaaaagggactgggaaaggggattccccgaaagggatccttctctgcgaaggaaacgggccccgagcccccctactgatcggaggttcgaaggctggcccctcggaggggttcaatagccgcctcagagcgctcgggctccgcgcccactactggtcagaggttcgaaggccggcccctcggaagggttcaacggccgcctcaggccactcgggctccgcgcccactactgatcaggggttcgtaggctggccctcgaaagggttctacagccgcctcagacgcagagcgagggatgaccctaggtacgttcgatacataaccaaggctcgggctacgctcccgagaggctcaggggctgctctcgcaaacccggctccggccaaaccgttgacagcgtcaacataccagcccgagaacttgggacctgaccccaagtccggcctcgggcgccataggaagctccgcctcgcccgaccccagggctcggactcggcctcggccccagaagacgacgaactccgactcgcccgaccccagggctcggactcggcctcggccctagaagacgatgaactccgcctcgcccgacccagggctcggactcggcctcgacctcggaagacagactcgacctcgacctcggaggagcctccgcctcaccctacccagggctcggaccgaccacgtcacaggaggggccatcattatcctacccctagctag

SEQ ID NO: 41887 - DNA, 323 bp, Zea mays
  Peptide Sequence Number=SeqID_85262
cggcgcgtggcgagcgggtggacgacttcggggctctgaacagcgcgctgccaaacccgaagccgacccctgcggaggctgcgactagggtcgccctggagcccaccccggagaccgcagcgatcgcgacggctgcccccacatctgttgcggccggcgaagacctgcccccaaaggtggccgaaggcgcccctgatgcccccgcagctgctgtgccgagtgttgaagatctcgcggcggtggcggtggaaacaacgacggaagcggcggcggagccaacggcggaggctcccgcagcgtcagggccttcgcaggtggcgtag

SEQ ID NO: 41888 - DNA, 144 bp, Zea mays
  Peptide Sequence Number=SeqID_85263
atggggaagaccccaaaccctagacagaggcgtttctgtccaactcttggaatgaccaatcaagttgttaacgcggccaaggaggcagttcaacgctcagaggaccttgatataaggtttggaatttcagactctacatgctag

SEQ ID NO: 41889 - DNA, 789 bp, Zea mays
  Peptide Sequence Number=SeqID_85264
atgcaggcggcatgcaaccacaccaagggggcgcacccttttggcttcgacgcgtccagcatggaggcccaggcccacacgtcatgtaactggcgcgccggttactgcgtacaagaaactgcaccgccactcgtgccactaccgtgcctcctcgactgcggaaccagtaccgcgactcgaggcgaccctgcgcatgacctgacagtgccaaccgagcacatcggtcacaagtcagtcagccacgggagaaggcgcgatggtcgatacggccagaaatgggccggcagtaatggcggtggcaggcgggcggaagcagcggacaggcggcacctttggcaggcgaagcaggcgacacttcgcttccgccataatgaccgcgtcaaaaaagggactaggaaaggggatatcccgaaagggatccttctccgcgaaggaaacgagccccgagcccccctactgatcagaggttcgaaggctggcccctcggaagggttcaacagctgcctcagagcacttgggctccgcgcccactactggtcagaggttcgaaggtcggcccctcgaaagggttcaacggccgcctcagaccactcgggctccgcgcccattactgatcaggggttcgtaggctggcccccgaagggttcgacagccgcctcagacgcagagcgagggatgaccctggagggaggcatcgagccctcggaccccgtcaaaaggggaccgggtccggcaaatcacccgcaggtacttttggagcgcgcctccgggccactagccgacccctaa

SEQ ID NO: 41890 - DNA, 588 bp, Zea mays
  Peptide Sequence Number=SeqID_85265
atgtggacaacaacgccgacaactacgtcaaggcattccctctcaccaccatccaccctatatatatttcccttcatcaatgtcttaccacattatctacatcttgaagaaatgtttcaagagagtaatcttgtcggcgtttcgagacagggggtccctaagccgacgagtgcggcggagcctgatggagggacagctgttggagcggtcgagtccctgctgacgttgtcctgcttcctcggagtggcgcaggcggcgctgtccttctgtcagactggccagtggagcggtggagtgacggcggtcacctcggctctgctggaggcgcgtgtcaggatagaggtgtcaggcctcctgtgcgttaaatgcccctgcaatttggtcagtcggtgtggtgatttagtcaaggttgcttctgagcgaagccaaggccttgggcgagccggtgatgtgtccgccataaaaagggggcctcgggcgagacggaagtctctcgagctttatgctgatgggggttaccagctgagaattaggcgtcttgagggtacccctaattatggtccccgacaaatctattctgattcttag

SEQ ID NO: 41891 - DNA, 1299 bp, Zea mays
  Peptide Sequence Number=SeqID_85266
atggagcatggtgttatcccagcgcctaaaaggaatgcaaacacttctctggattatgtcttccagagccaagtcaagggaaagattcccatggttaagcctaagtttctgatacccaaccaactagagcatggaaacataaaatttcatcagagacgtgtgacatgcttggagtttcatccaactaagaacagtgttcttttatcaggagacaagaaaggacttctgggtatctgggattatgttaagttgcatgagaaaatcacttatgattctgtgcactcctgcattctgaatagcatgaagattgataccaccaacgatggtatgatatatacagcttcctctgatggtactatcagttgcactgatttggatactggtattggctcttcccttgttaaatctcacccaaatgggttggaatgtagtttactttggtcatgttctatagatcactttgttcaaaaaagaatttatgaagatgttatttcagtctctctctaccttcccccatcttgttctggtccaagctcttggcacatgatatacgggatggacttaaacactgacaaaggtcttcttttggtggcagataactttggttttctttacttcctggatagacgatcaaagacgagaattggacatccaattcttatccataaaaagggtagcaaggcccgtatttgggatacaaggaagcttgaagccaactctccccttgccagccttgctcatggacgggttgttaattcaggatacttttctccacgaagcggaaataagatcttgacaacttgtcaggacaaccgaattcgtgtatgggactatattcttggtgatctgcaatccccaagtagagaaattgtgcacagtcatgatttcaatcgtcacctgactcccttcaaagctgagtgggatccaaaggattacaccgaaacagttgcagtgattggccgttacataagtgagaactacaatggtgttgctctgcatccaattgattttatagatactagttctgggaagcttctggctgaggtgatggaccctgacataataacaatcagcccagtgaacaagctacatccgcaagatgacatcctagctacaggaagctcaaggtctattttcatatggaagccaaaaattgaagatgaacttactgaagaaagagccaagcatgacaatagtagtgatgacgactcaggtggtgattctggcggaaagaacaagaaagcaaagaagactcgcttcactcatgcagtaaagggaaagggcaaatccaaagtctga

SEQ ID NO: 41892 - DNA, 426 bp, Zea mays
  Peptide Sequence Number=SeqID_85267
atggtgatcgagccctttccttcggcccctcttctcccccgccgccgcagctgcgggtggctgcttgggcgccaggctcggcagcgaccgcttcctcttcttctcgtcatcgacgtcctctccggaggcttcggcatcttctttcttgatctccttcttcgtcggaggatgaggaggagctatccatctgctgctgctcctcgtcggaagcctcctcgacagcgtgccgcccgcctcggcggcggcggcggcggcgattgtagacgaagtgagcgcgggttgtggggcccatgtgtccccaacagggttcaggtctcgggaggcgggaatggggagacgtggaggggaacggcaggcgaggcggttggtctgggctgtggtggggtttatgagttcggcgtctgcttagctttatggctaatttag

SEQ ID NO: 41893 - DNA, 307 bp, Zea mays
  Peptide Sequence Number=SeqID_85268
atgaggaaaaactcgaaggaattttttatgcttcgttatgaacgaaaagaagggaaggaaattatattacagcaactgtcaagcttcaggctaggcttcgtcaaaactttggcttcgtcattcttcagcttcgtcatcctacgaatatcaaagagcagaataagaaaaccagccttcagaaaagcagtagctgtgccccgagaagctaccagggcgcagaagtcggcgtgtccaccaataacttcgtcaagagcatcaacttcgccttcaacatattctaatgtactgggcaggttgtcagctgaag

SEQ ID NO: 41894 - DNA, 426 bp, Zea mays
  Peptide Sequence Number=SeqID_85269
atggagaaatctccaagatccactcctatcggatcaggacctgctagggccggcacacacaaagatgtcgcagaagctgtaaatggaactaggctgattgatgggagtaggcgcacaagcatcgtcgacacgagcaacattgattatggcactagtagattacgtccgcgcttcgattatgcgcagagatataatcgagtttgggatggtcttttagacgccattagacagatgcaattatttgccgatgagttgaggaggttgagccgccgcaatcatgtgcctgagtatttggatatggtgcacaagaattgcttgattaatgccatgagtgatgttactgaaattgcaaaaggtctagacactatgagcagggatttggaggaagttcttattggtccgcaacctctacttgaggattactaa

SEQ ID NO: 41895 - DNA, 222 bp, Zea mays
  Peptide Sequence Number=SeqID_85270
atggagcaccgtcccgggttggagaggttgctagaggctgcccacctggagcttgacgggaagctgttcgtcaacacgcagcaggcccctacctggcgcgccaactgtcggcgtttcgagacgggggggtccctaagccgacgagtgaatgtcgccgcgtgccccagcccagatgggtcgagcgcgaaggggggaaagcgaggtggccggagatgggcgtga

SEQ ID NO: 41896 - DNA, 204 bp, Zea mays
  Peptide Sequence Number=SeqID_85271
atggatgaaggaactcccctcggtggtctggagcctgaggacaacgccgagccgagccacgggcttcacgccgttcttcctagtctacggggccgaagccgtcttgcccacagacctggaatacggctccccgaggacgagggtgtcaaaggttcacaacaagctaataaaaagaccaaagttgggttcaaaatgaagagctaa

SEQ ID NO: 41897 - DNA, 1165 bp, Zea mays
  Peptide Sequence Number=SeqID_85272
cggcggcgggttcgggcccatgatgcgcaagcacggcctcggcgcggacaacgtggtcgacgccgaggtggtggacgccgaggggaggctcctggaccgcgccgccatgggcgagggcctcttctgggcgatccgcggcggcggcggcgggagcttcggcgtcgtggtctcctggacggtgcggctggttcccgtgccgcccgtcgtttccgccttcaccgtgcgccgcctcgtgcgccgcggggaccagcggcagacccaggcggctgtccgcctcctgacaaaatggcagcgcgtggcgcacgcgcttcccgaggacctgttcgtgaaggtggccatggagccggaggtcgacgacgccggcgagaggcatccatcggtgaccttcaagtcactgttcctcgggaactgcagcgggatggtcgccgagatgagcgcccacctgccagagctcgacgtgagggcgggcgactgcagagagatgagctggatccagtcgacgctctacttctacgggtacacgggcgaacaggcggccgaggtgctcctggaccggagcctgcagcccaaggactactacaaggtgaagctggactacctgacgtccccgatccccgcggccgggctgggcgggctcctcgccagggtcgtggaggacaggggcgggtccgtcgacgtggacccgcagggcggggcgatgagcgagacgccggagtcggacacgccgtacgcgcaccggcgagggtacctgtacaacgtgcagtacttcgtcaagtggggcggcgacgccaacgtgtcgtacgaggacgcgcacctggcgtgggtgcgtggcgtgcaccggttcatgacgccgtacgcgagcgccaggccccgggcggcgtacgtcaacttcagggacctggacctggggcagaacttggagggggagacgagctacgaggcggccagggcgtggggggagatgtacttcaggggcaacttcaggaggctggccatggtgaaggccgaggtggatcccgaccaggcaagggtaatttctgaattctgcgcgacatctttgttcataagattcagcatttcattgcggcacggcactgctgatatcgcagtattgccgcccatgctatgtacagaaccaacactgaaactgcagggcgtcaactga

SEQ ID NO: 41898 - DNA, 495 bp, Zea mays
  Peptide Sequence Number=SeqID_85273
atgccgagtccattacctttgccaccccaccacagtcagcagttactactgtgcctaaaccaggccctgcagagcattgttctgatcatcattcagctatggaagggaaactgggagctcacaaaccgtatcgccgagcacgaggattatgtgataaatgcgctgaaaaatggcaccgagagtccgtgcccgcggcagaatagaaggagaacgacggatccggccgggaaggccacgacagcgacggatccagccgggaagacacgatccggccagagggacggcggatcgagccgggaaggtcgcagctacgtggatccggccgggaaggccgcgacagcgacagatccaacgaaggcgatgaagggggtgggcggcggggcgggtccagccgagcaggggcctgcgccggacttggcaaggggtgtgaacggcgccggcgacaggagaaggtcgaagggtgaggtgctgctgcgcatcagcgcggccagttag

SEQ ID NO: 41899 - DNA, 342 bp, Zea mays
  Peptide Sequence Number=SeqID_85274
atggccgtagtgcctaaatttggtgaagggacctcttctactgccgaagcaaaacaagctgctcccaccgcccagagcgctgaaggatcgattgtggtaccgaaggtgcctacagtcgggccagctgaagccaaagatgatgtggccagagagccagaattggaaaaaacagtgacaacaccgtcagaggcagaattgccgaaggtgccaaaggctcctgccgcaactcccaagatgaggaggatggccagcgtgctagatgctatcatggagaccacaaaaaccttgacccctgctcctattaagaaagttgccgaagctgtcacagcccaggccgaatga

SEQ ID NO: 41900 - DNA, 255 bp, Zea mays
  Peptide Sequence Number=SeqID_85275
atgtaccctttgttcagagatacaagttcaccacatactaatacgcacaaaacgtgcacagaagcaagagaaagggagtcaacagtgccattattttgggagcatggtgcctttggttgcatagaaacagagttattttcgatggagatttgccaaccattggcaaggtgcatagaagcttcatcgacgagctatccttatgggtgctggctggtgccaaacacctcggaagccttgggcttgcggctgctctag

SEQ ID NO: 41901 - DNA, 288 bp, Zea mays
  Peptide Sequence Number=SeqID_85276
atgctcgtcggcggcgaggaatccggcctaaccagggcgatacagttcaatcaaatgggtcagggagcttcactagggatcaaggaaggcgggcgaccgaagcccggcgaggatgaacttgggtctccggtgaggtcctgtagggtccgagcgcttggaaagcttcacgggccactggcgaagctaaccgaggggccggcacatcttggacacgactggagcgagctagccgcggtggccgaggcttgggcagtgatggcgggtggaggaaaggctcgccggagctaa

SEQ ID NO: 41902 - DNA, 372 bp, Zea mays
  Peptide Sequence Number=SeqID_85277
atgagtgagcacacctcggtgaagctccccgagcgaggaatcgaactctgcttcgccggagaggccagtccacggtcgccggagttcacaaccccgccggagtgcgtggaccggagcctccccgagccaaccccgcccctcaccggacctatctcgccgccgcagtttgccctcctcacgcgatctgagacgaggtctcccattccggttatggtgggtacaagtgcggtcactgcacgacatcagtcggggtcactgaggcattgttccctggaggacatggttgctggagtgacttggccgtccgccttgccaccgggttggactgtcgagtgggaccccgcctcggctgaggaggagcatgaggagtga

SEQ ID NO: 41903 - DNA, 243 bp, Zea mays
  Peptide Sequence Number=SeqID_85278
atggcctctttgccgagtactttttgtcgggcactcggcaaagactttgtcgagtgccatttggtactcggcaaagaaaagtcgccatcacggcgccaagtgacggtgatggatcctttgccgagtgtcttcttcggcactcggcaaagaggccaattttgccgagtgcctgctatcatggcgctcggcaaagacggctccagtgggccccaccgccagtccctgtgccgagagctctcgtag

SEQ ID NO: 41904 - DNA, 369 bp, Zea mays
  Peptide Sequence Number=SeqID_85279
atgggaggagcaaaggcaaggcacttacaagtgtcaaaacttgggatgactcttcaagcgaagatgaacccccaaggatgtgcagccaccgatcctcatcacaatcatcacggttatcacgcaaatgccttacgccaacaaaggaaagggggccaaacgcgtctgggtgccaaagaagattatctcaaccatgaaaaacaccaagaaggtttggatcccaagagggaagtgagaagtccgaaggacgtcggggaatttggagacttggcaaaattgggatgtatatcatgggatccatcattttggattaagtctattgccaagtgggttagtgaatactttggacccaaattccccaccgatgactaa

SEQ ID NO: 41905 - DNA, 213 bp, Zea mays
  Peptide Sequence Number=SeqID_85280
atgggaagaaatgggcatctcgacctcaacacgggagttaaatccatagatcaaaaggaagagcacatcagggacttgtcagtttctgggaagatccctggtgtcttgggcttcaaagaaacaaaactctgtagctctttctaccgccgaagccaagtatattgccacaggccattgttgcgcgcaattgctttggatgaggcaaacccttag

SEQ ID NO: 41906 - DNA, 1393 bp, Zea mays
  Peptide Sequence Number=SeqID_85281
gcgaagaggcctcgggtgggggcggcgccacgggttgtggcgaaccagatgggggcgttcgaggtgctgccccaggagctgatcctctccgtgctcaccgccctgtcgtcggccgcggacaagcccgccgacctcttcaacgtcatgcttgtgtgccaggagttctgcaggctggtgactaacccgcaggtgatccgggcggcgtcggcggcgtgcgtgtccgtgctcccgcgcaggtggtgcgcagccgccgaccgtttcctccgcttctgcggcgacaacggcaacgcggacgccaactttttcctcggcatgatccagttctactgcttggggctccagacccatgggtggtcccgcatgctgatggcggtgcggtcgggccacgcgcacgccgccttcgccgcggccgtcgtctactacaacggcagctgcatcgaccacaaccagaggcagccgctggcggccgcgaacctgttcgcgctggcggcgtgccgcggccacatgggcgcgctgcgcgacctggccttctgcgtcagcaacgggctgggcgtgcggcaggacgccgaggccggccgccgcctcaccttcacggccaacctgcgggagttccgcgccacgtacccgaccgcggcggagcaggcggtggcgtacgcccacgtggtcggcaaccccgggtgcctcaccagcgagctcggctgcttcaccaccgtgccggccagcctgcgggggtgggcgcacccggccaaccggttcctgtgcgactggttctcggcgaacccgctgccgttcccgccgcggcgcctgctgctcatgtgctccatgcccacctgcggccgcccggagacgcggggcctcgagtaccgccgctgccccgtctgcggcatcgcgcgctactgctcccgctcctgccagtcgctgcactggaggatgggccacacgcgggagtgcgtccccacgcaccagtggctcatggaagccattgccaaccacgccgtcgtcaatgccgacgacggcgccaatgctgctgctatgcccgctgtcaacaataatagcgccactcaccacaacaatctcggtggtgctgctgctgatgctcctgctcctaagccaccgacgcgccatctcttcgacgacctctcgtctccgacagctcctcgtggcagagattccacgggccaccaccgcctcgcttcacctccaccgcgcccttccacgctgttcctctctgtcgccgtcacctcggatagcggcaacagcacctccacgtccgctggcaggtgtacgcagtacagtccctcaaacgacgccgacgacgaagaaccgactgtgtacgaagcggcgctggccgagcggatgaagcctgcagtcgctgaaagtcgcctagaggggg

SEQ ID NO: 41907 - DNA, 339 bp, Zea mays
  Peptide Sequence Number=SeqID_85282
atggcgcgtcggtggcctgggggcggacagcaacagcacagacagagcctcgcctggtttcgactttcgactttagagacgactgacgaggaggcggcgattttcgtgcgggcttcctatcccgagaaaaaactgggatccgacgaggatatgggctgtcagggggtttgctacccaagacaaaatctggcctctattcccaaactaggccatacgcccatacatggcctatggccttggtgggctaggcccagaccattagttacattgcgaaaggattcaggtgttttttgttgggctagcaaacaggctaaagatgactctatgcttgatcaatag

SEQ ID NO: 41908 - DNA, 119 bp, Zea mays
  Peptide Sequence Number=SeqID_85283
atggatctatcaaaggccttgatagattcaacatcggaaaagatgtacctctgccaggaccttgtcgatgtaggcttgttgatcgaggaccctttaactggtcacatgcctcgtcatgg

SEQ ID NO: 41909 - DNA, 134 bp, Zea mays
  Peptide Sequence Number=SeqID_85284
atgcccggttctaaagatcttaacgatgtttccccaggcaacaacacaaggctgactatggatgatttgtcgggcgatgagcgtgaggaatttgaggactacctaaagaagcttcgtgaggaaacaaggatgtg

SEQ ID NO: 41910 - DNA, 789 bp, Zea mays
  Peptide Sequence Number=SeqID_85285
atgcatatcttaatcaagggaatgtttataaggctttgggaatgcctcaagatgccattatgtgttatcaacgtgcactgcaggcacgtcctgactatgctatggcttatgggcaacgcacttaaagatgctggaagagtagaagaagcaatcaactgctacagatcctgccttgcactgcaagcaaaccacccgcaagcccttactaatttaggaaacatatacatggagtggaacatgataagcgctgctacttcattttacaaagcagctatatctgtgacatctggattatcttccccacttaacaacttggctgtgatatacaagcaacagggaaactatgctgatgctatcacatgttacactgaagtactccgtatagatcctacagcagctgatgcactagttaatagagggaacacattcaaagagattggcagagttaatgaagcaattcaggattatgttcaggcagcaacaatcaggccaaacatgccagaagcccatgccaacttggcctcagcatacaaggacagtgggcatgtagaaacggctataattagctacaagcaggctctccggctgcgtcctgattttcctgaggcaacctgtaatctcctgcatactctacagtgtgtctgtgactgggaaaacagagatggcatgtttcgagatgttgaagaaattattagaaggcaaataaagatgtcagtacttccaagtgttcaacctttccatgccattgcttatcctattgatccattgcttgctttggaaataaggtga

SEQ ID NO: 41911 - DNA, 768 bp, Zea mays
  Peptide Sequence Number=SeqID_85286
atgacggcggcggccttccccgaccgatccagcggcatgatgatggcgatgtcgacgagccggatccacccgtcgtcggccgcggagacggcgacgacgacgcagccactgccgccgccgccgcttccgcttccgcttcctcctcttcctccccgccgcgccggcggccgggcgctgcaccacacggtgtggaagcggtccagcatggggttccccggcaccgacggcttctccgtctacgacgccgccggcgcgctcgccttccgcgtcgacaactactcgcgccgccggaaggtgttcgccggcgagctcctcctcatggacggccagggcgcgcccctcctcgccctcaggccgcagattttcagcatgcacgaccaatggaactgctacgcagcaacagcatcagaagaaggggagggcaagaggacaaggccacgcagacggctcttctccatgaggaaatgctcgctgctacagaagggccacgaagcgcaagtgtccatgtcaggaccgtgcggcagcggctgcggcagcttctgggtcgagggctgcttcgcgaggagaagctgcaagatccgcagcggcggcggcgaggaggtggccaggatcacgaggaagaatgccggggccgcgacggcgctgctgggcgacgacgtgttcagcctcgtggtccagccgggcgcggactgcgccttggtcatggcgttcgtcgttgtcctcgaccggatctgctggcagccgtacacgcccaggatctgctcctag

SEQ ID NO: 41912 - DNA, 125 bp, Zea mays
  Peptide Sequence Number=SeqID_85287
atggatctatcaaaggccttgataggttcaacatcggaaaagatgtacctctgccagtgccaggaccttgtcgatgtaggcttgatgatcgaggaccctttaactggtcacatgcctcgtcatgg

SEQ ID NO: 41913 - DNA, 99 bp, Zea mays
  Peptide Sequence Number=SeqID_85288
atgacgatggtctccctcgccggcttcaccgctctatctgccggcctcctgctcatctcctcgttcctgcgagctcaagttgtaaatgaaattccttga

SEQ ID NO: 41914 - DNA, 859 bp, Zea mays
  Peptide Sequence Number=SeqID_85289
atgggtcggcgcgagacggagcgcgaaggtgggaagaagccggagggagacaggcgtgagagggtaatgatggtgcctcctgttgacgtggtcggtccgagcctgggttgggcgaggtggaggctcttccgaggtcgaggtcgagtctgtcttccgaggccgaggtcgagtccgagcccttgggtcgggcgaggcggagaccgtcggctgaggccagggctgagtccgagccctagggtcgggcaaagtggagttcgtcgtccttcggggctgagcccgagtccgagccctggggtcgggcaaagcggagttcatcgtctttcggggctgagcctgagtccgagccctagggtcgggcggagcggagttcgtcgtcttccggggttgagcccgagtccgagccctggggtcgggcggagcggagttcgtcgtcttccggggctgagcccgagtccgagccctggggtcgggcagagcggagttcgtcgtcttccggggctgagcctgagtccgagccctaggccttactctgtcgagtggcacagcagtcagagcagcgcaggcggcgctgtcctcttgtcaggccggtcagtggagcggcgaagtgactacggtcacttcggctctgtcaaccggagggcgcgcatcaggataaaggtgtcaggccacctttgcattaaatgcccctgcgatttggtcggttggcgtggcgacttggccaaggttgcttcttggcaaagactgggcctcgggcgagccgaaggtgtgcccgttgctggagggggtcctcgggcgagacgtagatcctccgggctttgtgctgatgggggttaccagctgagatttaggagtcttgagg

SEQ ID NO: 41915 - DNA, 441 bp, Zea mays
  Peptide Sequence Number=SeqID_85290
atgaccagaggacttcgaagattaaagaatttgaacattgatggagatggtgcagaagctgctcaggaggagcacgaaaatgtggtagataatgagaacaatgaaagtttactgtcccctcctgatgttgatggtttattagtccgcctgccacaccaacctcgaagtccaattaagatcatatggccaaatggagaggttagacagattataggggaattcacactttcaaatttactagcattacaaggaggaaaggtaattgtagagacagatgaaaatggtgtcccaaatgaaaggatatctataactaaacgaaaggttcataggatagaactatgggaggcagctcataaaaagattaatggtagatactcaacagaaatgcagatccctgatgcttacaatcccttaccctccaaatatacttgggttcattag

SEQ ID NO: 41916 - DNA, 405 bp, Zea mays
  Peptide Sequence Number=SeqID_85291
atgggcaagaggggcggtagtggtttggtgatggtgtgtactatccagaccacccgtgtgaacactaactatatccctctgccatggcagtctcctacctacccagtggtagtagaggaagtccctgtggatctccatcaccttcgtgtggagaatggagtcattctggaggacaactcagaggagattctggcgacacccaccccattgtcagaatcactagcctttgcagctggagcttcatcttcagcaccgtcagcaacagcaacacaaacccctgctcctggaggtgacaatctagatgattctggtgatcgtggagaagatgatgataatgaagaagaagaaggggacaacaacaatgaagaagccaacgatgagcaggaatatatggtctgtcactga

SEQ ID NO: 41917 - DNA, 387 bp, Zea mays
  Peptide Sequence Number=SeqID_85292
atggccaatcccatacacctctaccgaggaggcgaggcaggggaagatcacctgattctaatccagccgttcgccccatatccgacggtgcacgaatcccggccgatccccgcccaactccggccgccggggttggtgaagaagagctcgagcaccgcctacagccctgaccaaagtcgcctctgcgcggtagagagactcgccgagtcccgcctcatggccctgcccgcgcgtaccagaagctcctgccgcgcccaggctccctatcggccttccgaatcgaaggcggtggatgagccacggggaggtcgcgacaaagttctttatgccgagatgggcggggtatcaatcggcctaacggcccccgaattccccggcgaccggtga

SEQ ID NO: 41918 - DNA, 570 bp, Zea mays
  Peptide Sequence Number=SeqID_85293
atgcaggccacacgacgaggcggatttgcggcgaatgcgaagtccggcgagcaattcacgccgagcagaagcctatcttcacggtccgagcacgcggcggagtcaacggcggcgggtcacttcctctctgcggacgcaattctggaggtggcggcgggtttcttggcagggatgagcggcgcgcaaggttcgagaacccagggttttatggccggtgaggttgggcagttaacggccaacggattccacgaatcccgcgagctagcggacatcagggccatggctgttgcggcggtgaggatcgcgcggataacgctgacagcacgggcccacgcggaagtgagagtcttgcgcgcaggagagagggtgctggcatgtgggcccgacttcacagcgactcaggacgacgcgtgggtgcggcaaagaaccgggccgcgccccatcttctctagcttttgtctgataatgaagctcatgtgcctggcagaagccttcggcaagcggttctgccccctggcttcggagagcccagatgtagacgctaagcctaatgatggcattaggagttag

SEQ ID NO: 41919 - DNA, 501 bp, Zea mays
  Peptide Sequence Number=SeqID_85294
atgggcccatatccccactacctcgcctggggcgccgactggtgggccccttatgtcagtctcactagcaacttgagcccgcgcgccagccgcagcttgccgctccctcgttcctctgccgagtgggtcttgttggccagtattatatctattcccgtcgtcaactctggacgaagcttgcggcaacggaattccatgaatttcgcgtacctcgcatcgacttggggactcctcatccctatagatcaggttcctgatgccccaactccgtccgcgctaactggaagtcgtcgcagatacctcggggagcagagatcctcgccggagagagagaatcaagaggagggggagagtcgatccgccgccatgacctcggcaccgtgtctcctctggtgcacagccgctcctgttgccaccgccgtggggctctactggcggccatcatcgtcctctgtgcctgtgatcgtttggctgctactggagggtcgtggaagcgtccgt

SEQ ID NO: 41920 - DNA, 264 bp, Zea mays
  Peptide Sequence Number=SeqID_85295
atggaccgaaggtttcacaactactctttcatgcaggtcatagctactgtatcgtatcagattgtgccagctgacactcagtatgctgaaatacctctggcagttgtgagatcatcttatcaacgtgtgggtattggcaagctcttatataaggaactatcgcagaggcttcagaatgttggtgttacatccattttctgctgggcagataaggtctctgagggtttttggctaaaacaggcaagtaaaagagttagtggataa

SEQ ID NO: 41921 - DNA, 141 bp, Zea mays
  Peptide Sequence Number=SeqID_85296
atggccgacctcgtcgtgccctgcgcccctacagtcgtaaatgccagcaaggaatcgacacggaccaacaacgcttctaaggaaaagaaagaagataacgtgaagaaaaggaaggagattgtgcctagatcagaagtgtga

SEQ ID NO: 41922 - DNA, 195 bp, Zea mays
  Peptide Sequence Number=SeqID_85297
atgggagcccgcacacctgtgagccccaacgccatgccctcctgtaacgcgcgcgtgttgagaagggtcatgaccaccaaggacaaccacaatatctccccatcatgggatggaccattcatccttgctcaagtcctactcttgggaacctaccggctcaaggacatcggcgacaaccttctatccagcgcctag

SEQ ID NO: 41923 - DNA, 240 bp, Zea mays
  Peptide Sequence Number=SeqID_85298
atgtcgctgcagctcatgtccgagctcaccctcgggccgccgtacacctcgacgaagaagtcgccgaccgcctcctcgtcgatcaaaggcgcgatctttgcacctccaccactgccacttccgccgctggtcctctcctcggatttcttgcggaagggccgagacgcccttgagcttcatgctctgctgcgtcttgatgagccggccggcgccgacgcgaggaagcttcggaagcggctc

SEQ ID NO: 41924 - DNA, 2296 bp, Zea mays
  Peptide Sequence Number=SeqID_85299
atggatgccacggtgcggaggatggagttcgtcgtgttcgatcggtgcggcgcggacgaggacggtgagaagggcaaggatcttgcggtttgcgatgatggtgaacctgagcctcgcccggtgttgcaacagaagcatggtgccttcggggacagcttgtcggagtgcagtggggtacacatcgacaacgatttcgtcgaggagttgccatggttgaagtaccatggatacgagtatgatgatagcttggacgatgagatcttggaagaacagagaattggggaacaggaggttgttggagcagagttttctgtggagcaagaagcagagcaaggaacgtccggtagatcctctgatgaatacaaagaggatgctgctgatgaggagaatacaacgaatttggtccgtgaccaggagatcctctcagatcaaggtgttgcttgcagagtggaggcatgcgaggagctgggtggaagagatgaagacaacatcctggaggcgtctgctggacaagggaaggcagaagagaagctctctgatgatatctacaaatctgagatacctgatcaagaaataacagcaaggacatgtgctactctggaaggtagcttcgaagaggatatttcatcggaccaagaggcaaatgatgatgatgaagatgagtgccatgtgaaatctgatggcgaatcagaggacactgaggagcaagatctggaggatcaacagagcatgccagatgatgtctctaaaatggagatttctgaggacactatctctggtgatggatgcaaagaggatttttctgaggaagtaacctcggcagctgtgttagcaggtgaagtttcttacttcagttcaattgattgtcaagatgttggtatcaacaaattagtaatcgataacctttgccaaaatgattgtactgcagatgatgtgtttgaacaatatgagaagactgtggatgatgtgcatgaacaagatagcagccctgctaaggctcaaatggaattgggtaatccaacaagcaaaaaggaagacacttctgaagaaactgctattttgcaacaaatcaatcaagacagcaatgtggatactcaaagggaattggagattagggcatccatattggaagaatctggtattgctcagcaaagcaaccttgatggtgataaaatggaaccagagattattgtgtgcaagctggaagatgtttctgaagaatctggtgcctgcactgaaagcaacctacatgataatacagagtatgttatagacgatgctgaaatgagacaagaaattactttatgcaagcgggaagatgcttctaaagaaactggaattgatcaagaaaccttagaagatgatagctcaacatgtggtattgttgatgacagaaacaatctggagatcaataactgcaaatcggaagatgtttccatagaatctgttggcactcaggaagctgatcataatgataactttgcaaatttcagtaatgatgttcaagggactgcagaagatcatgactcacatctcattgatgatgctcaaaatgatatccaaatccctggaggcaaatcagaagacacttgcaaagaatttgataccatgaaagaaactgatcagagtgatagctctgcaaatgtcagatatgatgctgaagaaactgtagaagatgatgattctgtgtgtgtcagtgatgatgctcaaaatgatctgaagaataccaagtgcaaattggaagatgcttccaaagaatcttctactgctcgcgaagctgagcggagtgatagttctgcaaatgtcattgctgattctcaaaatggatctgaacttaccacaaatgagttggcagtcattacgatcagtaacgacaaggaaaatgaatccatgcttttcacatgcaactcagaagatggtttcaaagaatctattattggtcaacaagctgaccatgatgatagctctgcatatatcagttatgatgatcaaaatgaatgtgaagttactgcatgtcattcagaaggtgctcaaggggaatcaaatgtagttcaagaaggtgaggataaaactgcaggcgctgaaaataaattggaatttacagcatatgaatcagtagatgcttctttaaaacctgctatgcctcaagaggttgctggagatattaatatcacagatgcaaccaaagacattcgtgttactgaagaaactaatgaatcattcaatgcgcaaatgccagcagaatgtacggatgctaaagcaccttccattgatgacatatgtgggcgcgttcatc

SEQ ID NO: 41925 - DNA, 315 bp, Zea mays
  Peptide Sequence Number=SeqID_85300
atggagagcaagagcccatggtcgctgcggctgctaatttgctgcgcggcaatggtggccatcgcgcttctcccccaacaaggaggccagtacggtggtgtcacccccggcaccggcagcctccagccccacgagtgcggcggccggtgcgcggagcggtgctcggcgacggcgtaccagaagccgtgcctcttcttctgccgcaagtgctgcgcggcgtgcctgtgcgtgccgccgggcacctacggcaacaagaacacctgcccctgctacaacaactggaagaccaagcggggaggccccaagtgcccctag

SEQ ID NO: 41926 - DNA, 459 bp, Zea mays
  Peptide Sequence Number=SeqID_85301
atgcgcgcacctcgcgccttccgtggacatcgtttgatcctcgtgcctcgtgtggcggcgtcactgctcgcacgtcggggggtgccaccatcgttcgtgggttatggtgtgccgccatcgcttgagtctggaggtgcgacgtcgtcgcttgcctaccccgggagcgctattgttgcttgccctcccgtatcggaagtgacgctgcctctcgcccgcctcggggccctggggtcaccaccactcgcctggcccagggcctcgacaacgcccgccctccggatcgaggagtcgtcgccatcgcgcctccgaatctgggaaccgcccatgactcctgatcgaagaactgccaccactgcagccccagggtccacccccgccgcgcgctcttgggcaactgtcgctgtcgcacgtgcttggggctctgtcgctcgtgcatcggggtggggcgtcaaaaactga

SEQ ID NO: 41927 - DNA, 1026 bp, Zea mays
  Peptide Sequence Number=SeqID_85302
atggagggcaacaatcttctgcattttcttgataccccgagcgcccattacagaaggacatgcgacggatttgaggcccaacacggcggcgatgaacactctgagacatcagggccctgccttttggcacattcatctgcattaagtgctctggaactcatagaagtcttggtgatttcagtgaatctggatgagtggacagatgatgaagtcaactgtttagctgaatcaggcggaaattctgttgtgaactcaagatatgaagcctttttacccgaaaacaaaaagctaaaacaagattgctcaacggaggagcgtaatgattttatcaggaaaaaataccagtttcaacagtttgtgtgtgatccacaattttcatgccctttaccacttaacagaaagcatgcaccaccagataaaaatcaccagcagcataatagcagcaagtatggttttggccatacttttaggaatagctggagaaaaaaggattcagatagcaaaagcctaaagaaaatgtcggatgtgggaatgatagaatttgttggattagtaaaggtcaatatcgtaaaaggcacagatttagctgttcgtgatgtgatgtcgagcgatccgtatgtcttgattcatctagggcaccagtccatgaaaacaaaggtgataaagaacacactgaatcctatctggaatgaaagactaatgctttcgatccctgacccaattccgcctcttaagctgcaagtatttgacaaggacacattcagctccgatgaccggatgggggaggccgaggtggacatccggccgctgattgcagcaacgaaggagcacgagaactcgaccatcaccgaatcgacagaactctacagatggtcagccagcgaagacagcaacggtgtgctcgccaaggacagcgtcatctctgttgcgagtggaaaggtcaagcaggagatcacactcaggctccagaatgtcgagcgcggtgaggtcgagatcgagatcgagtgtgtgccgctcagccagtag

SEQ ID NO: 41928 - DNA, 363 bp, Zea mays
  Peptide Sequence Number=SeqID_85303
atggatcggggtctgcggaatctggaggagctaggacgccggggattggatttcgagttcttcgtggcaactgggaagcgaaatgtgagaatgttgaaatggaattcgggcggaaattttcggggtggcgggaagacggggaaaatggagaggccgcacgcgcgcaggatggattttatgggctggcttcagcaactcgtggatgccaccgcggatgaaaaaactaaattatatacgttggattgtggtaaaaagccactcaatgcgaaagttggaggggtcgccaaacatgatggcagagatgatccatccgagcgggtaggcctggtggccagggatgacgccgtgaaacagcgatgttga

SEQ ID NO: 41929 - DNA, 393 bp, Zea mays
  Peptide Sequence Number=SeqID_85304
atggggagaccgcggaagaccaaggccgagccggagccagcccccgccttcccgatcgaagcccatacacgtcttggttgggcaggcaactgcaaggtggagatccgtgggagcggactgcggtgcgagacgacagagcagggtctgacaatctccggacccaggggcgccaaggtcgtcgtctctggtgagggctctcagttcatccttctcaatccaagcgatgcagatagccaaaccaagtccttgcttgaggaagtgctaatgctttataagaaagaacttcctactatggactatgctgcagacactgggagaaagtcagggaaatacaagactctaattctgatgtctagctctgcagcacagcatgaagaggacctttttgtctga

SEQ ID NO: 41930 - DNA, 1866 bp, Zea mays
  Peptide Sequence Number=SeqID_85305
atgcgcaaggtggatgccgctgcgtcaaagctgcgctcagaggccagcgctgtgatcgatggcggtgtctacgagtccaaccagaacgacgtgtggtgcgggctgcaggtgtactacaatctcggggaactgaagacagcagtggaggggcttgtgggaaagcacaaggcagcgggtgcaaagagtgtgtctgtcgcactggacatgaaggcgatatcaatgactgctggcgttggaggtggtcctggaggggtgcagaggagtggtacgccgcagattggtgggagtaagaaggctgcagaggcactatgggataggatgaggcagtgcatggatgagctccaccgagcagtgactgctgcttggcagttgcagactgtgctcactaagaagcgtgtgccattcacacaaatgctttttcttgaggaggtttggcaggagggtgagcctcttataacagagagagtttgggatgcaattgtcaaggcctttgcaagtcagatgaagactacctttacggcttcaagctttgtgaaagaaatatttactcttgggtatccaagactgttttcgatggttgaaaacctccttgagaggatttcaagagatactgatgtaaagggcacccttccagctctcactcctgaaggaaaagatcatatgatttcagccattgagatgttccagacagcctttttggctctgtgtcatagtcggctatctgattatgtcaacagcatatttccaatgtcaaaccgtggaactataccttcaaaggatcagatctcaagattggtttctcgcatacaagaagaaatcgaagtagtgagaactcatgggcatttgcttgttcttgttctacgtgaaattggaaagaccttgcttcttttagcacagagagcagaatatcaggtgtctattttgttgccacaaaagtgtggcaagactaagatctctactggccccgaagctcgacaagttaccggcacagcgactgcagcccaactaaaaaattttgctctgtgtcttcaccttcaggaggttcacatgcgcatttctagcgtcttgtcaacactcccaaatgttgcttctgaagtcctttcaccctcccttggtgttgtttatggtgttgcttgtgattcagtgacttccctgttccaagcgatgcttgatcgtctcgagtcatgcatcctgaaaatgcatgagcaggactttgcaggtcagggaatggatgcatcaatggataacaatgcatcagcttacatggaagagcttcagaaatgtgctgtccacttccgcagcgagttcttatcgaagctgttgccttcatcatcctctcgatcagaaaccatatgtaccatcatggttagaaggatggcctcaagggtactcatattttttataaggcatgcttctcttgtcaggccactctcagaagcagggaagttgagaatggcacgggacatggctgagctggagcttgctgttggtcagaatctgtttccagtggagcagctgggggcaccataccgggcactacgggcattccgtcctgtcttgttcctggaaacatctcagcttgacaagtttccgctccttcaggacttgccgcctagtgtgatcctccaccatctgtattctcgagggcctgatgaactgcagtcgccattacagcgcaacaagctcacacctttgcagtactctctgtggcttgattcacaaggcaaggaccagatctggaagggggtcaaagcaaccctagatgactacgagatgagggtcagatctcgaggagacaaggaattcagtccggtgtatcctctcatgcttcagattggatcttcattgtctcagcccaacacctaa

SEQ ID NO: 41931 - DNA, 300 bp, Zea mays
  Peptide Sequence Number=SeqID_85306
atgggctactccactacatacatcatgttcaaggacactcacacaacgtcagcaacgtccatcgtcccagcgcacaataattcatgtccgaacaacccgagagtcgtcgacgttggcgataaccatgagccccccctgcttaacgatggacagcgtggtgcagctgctctggatcgcgtccaagcgacggcttcgcgggagcttgtcgtacacagcggcgtatgcgaccacgtaggactgcttctagaggtcgaactgacagttgccaagcttcttctcgtcatcgatgagcgacgctaa

SEQ ID NO: 41932 - DNA, 333 bp, Zea mays
  Peptide Sequence Number=SeqID_85307
atggcgctcggagatcttctgggcgacgctggcattggatacctctatatgtataccctccattttgcccctgggccacatgtcggggctcaacacccttgccgcgccaacctctttgatcacgaggggaccaagagaggctaccccaattgtgacgcaaccacgaccgtcagttaccgcgaccagtccgaggtgcccatcgacgggtgtgaagtgacgtcgtcttcggcggcggccgtcattccacgtggtcttgttcaagacgccatggtggaagaggtggctgaggcccaactcccgccaacgctgagtcccctggctcctattacttag

SEQ ID NO: 41933 - DNA, 405 bp, Zea mays
  Peptide Sequence Number=SeqID_85308
atggtgccgatgttgctacccataatacaggcagtgcttatggaggagacgaccacaacgctgcacacggtcggcacggctgcgcagacggaacagcaccgaggcggcgcctggaacgcgcaaagcccccagaccgcgctcctagcctggaaccttgccattgacaccggcggcggtggttccattgggggcgtgtcatcctggatgaatgagaaggtagctccaccaccatttttataccccaggcatacggagtccgtgcaggagcagttggcaagatctcatgcggattttgctcctgtaaatgtggcgtggcatcatctacgaggtcctgctgatgcgacatccggcaagggaataaaatataaggaaaaaaaaagaagatgtgggctaatgctgaagtga

SEQ ID NO: 41934 - DNA, 69 bp, Zea mays
  Peptide Sequence Number=SeqID_85309
gcaggaatcaggacgcctggttccgtggttcgccgtcgcattgacgccttgcttcaccggcagctccac

SEQ ID NO: 41935 - DNA, 462 bp, Zea mays
  Peptide Sequence Number=SeqID_85310
atgcccgcgacagcgctcctgcagaaggcaacagaggctggagcgacgcaatcgagctcatcgttcttgaaggagtttaggctcgcctcctcgtcgtcatcgcctcgaccaaagcagcagcaactccatggaagggttgctgaaatcagcacggacccatggcagtaccggagcagtaatcagcaaatggagatggagcgccaccagagccatcaacggagggagatggagtccagttcgcaaccatggcagcaccccgtagtgcccagcagatggagatggagcgccaccagcaccggagtcatcaacagagggagatggagtccagttagcaaccgtggcagcaccccccgcgaccagccggagaccgagcagcaggccgacgaggagaacgcgacggggatggcggagaccgagcagcaggccgacgaggagaacgcgacggggatggaggagaactga

SEQ ID NO: 41936 - DNA, 210 bp, Zea mays
  Peptide Sequence Number=SeqID_85311
atgaagatacagaaagcaaatgcaggtgtccttacaaacttcgaagtccttgacttcttgcggtcaagaggtgccaaaattgacccaatgggatgtttgggggctgttgctgtatcagagtgtaaggtgatcactgatctgctgctcttttacccaatgccttatcgtctcgacttttttctagatgctgttttgagctttgttacctaa

SEQ ID NO: 41937 - DNA, 1389 bp, Zea mays
  Peptide Sequence Number=SeqID_85312
gtctcctccatccccgtccgtgcgcatttaccctccccgtcgccgcgggtgatgggagacatggtccttctgcccaacggcgcggaggtggccatcatcaacggcgccgcggacggcaccgccgggtgggagtccgccaagacgccggcgtacgcgcccgtcgtctaccgcccggaccactcgccgggggaccggttcgaggagcagaacgcggcgggcgtcgcgcggctgtaccactcctcggcggtgctcctctgcgacggccgcctgctggtgggcggcagcaacccacacacctactacaacttcagcaacgtgcagttcccctccgacctcagcctggaggccttctcgccggagtacctcgacacgtccaatgacatgctccgaccgaggatcctcgacccgtcccccaccggcgcgccggcgaccgtgggctacggggcgacgatggtgatccggttcctggtcccggcattggcgcggagaaggcgcggcggccgcgccggctgcctcggtgacgtgtcggtgacgatggtggcgccgtccttcacgacacactcgttcgcgatgaaccagcggctgctgttccttgacgtgaccaagaatgtggcgggaccacatatggagcacggccacggcggcgacgtcgaccggccggacagggaccacatatggagcatgattcaggcaagcgcaagcaactcaggcaccttcgctccgcccccggcgccacacatgtccgcgacagcgctcctgcagaaggcaacagaggctggagcgacgcaatcgagctcatcgttcttgaaggagtttaggctcgcctcctcgtcgtcatcgcctcgaccaaagcagcagcaactccatggaagggttgctgaaatcagcactgacccatggcagtaccggagcagtaatcagcaaatggagatggagcgccgtggtcccctgcggaatgggccgggtgaatgggttgggatccttccgggatcccaagctaccaaaggagccctaaaggggctcagaacgacctggcgaagggcggcagcggcaaatcgtcgccacgagacagaggatagggaggcgccggcggggcaggttcttgagtctcttgaacagatctacgaacgtggagcacgcgccgccgaaggtgccaaccttgtccttgtcgagctgctcttccggtccctgcgtcgagaccggcgagccgagatccgcgaagatgttggctttccgatccggcttgtccctgacccatcgtcggcgtcatgcagcatgagtgccgcggcgcagaggcacatccggccacggtttgcttcagccatcactagaggttgggcgggtaggtcatggcagccgacgcaagcagcaacggcatcagtcctctag

SEQ ID NO: 41938 - DNA, 486 bp, Zea mays
  Peptide Sequence Number=SeqID_85313
atgtctccttcctccctttatgcattgtgtctctccgtcttccgagcccccggatgggggaaaccgccgtcttttcgccccatcgctggaggaacgcaactccgtgggagttggtacctttcagccatcgttcggcttcaaggattttcatcatgcagcccggctgctcccctccaccggcggtcgcccaagagggcgacctccggcttgatggtgggggaaagcgagccgggctgcggtctctgcccctccctcagcctcaaggattttcatcaccaggccaagagggaggacgaggcgagtcagggagctgtctccgtgtgggtcggttgccctcttcttccccgtgcgcctgggggagaacggcatcctccagcttcacggagacttcctccagccatgtcggaagcggcgggtcccgaggcgccggcggacggaagtggcttctcttccgacgagattgcctactccgacgaatcaagctga

SEQ ID NO: 41939 - DNA, 978 bp, Zea mays
  Peptide Sequence Number=SeqID_85314
atgacggtggcaggcgcgcgagagcagcagtcacgccatctgccaagctcatgtcccatccggaggcagcaagagaaccccctctcacggcgtgaagacgacgcgcccgtgacccgtacctcgaacggctctcgcacgcgcaacggcaacctcgccaactactcaccccggcgcattaactccgcggctcgacggacagcgctacgagcgggagcggctgggaccgagaagggggataaccccaaagggatccttccccgtgaaggaactaggctccgagcctccctactgatcaggggttcaaaggctggccccccgaagggttcaacagccgcctcagatcgcgtgggcccgacacccactactggtcaggggttcgaaggtcggcccccgaaaggactcacgaccgcctcaggctactcgggctccgtgccccctactgatcaggggttcgaaggctggcctgtcgaagggttcacagtcgcctcagacgccgagcgagggatgaccagggctcaccggagacaccatgttcggtgcccatcgaggaggctcgggggctgctctcgcaaaaccggctccggccaaaccgttgacagcgtcaacataccagcccgagaacttgggccccgacagtgcacctgggctacgccctgctcgcatgagggaaccgccagaccagccgaggcattacgcaaggcattaagacctcgaaggagtgaaaccactcctccgaggcctcgggggctacacccggcgggtgcgctcgcgcgcacccaccggaacaaagtaccaccgagaaaggctggtccccttgcaaaaaagtgcgatgcaagcctccaagcgagtgttaacactctcttcgaggctcgggggctactgtcggggaccataattaggggtaccctcaagacgcctaattctcagctggtaacccccatcagcataaagctgcagaggcctgatgggtttgattaa

SEQ ID NO: 41940 - DNA, 273 bp, Zea mays
  Peptide Sequence Number=SeqID_85315
atggcaatgggtaaatacccaccgggtattactaccccatacccatacccacgacataaaaataaccccaccgggtcacccatatggatttatatggatttacccccatacccatacctatgtggaattattggaacacagttggctgaggagcttgcgattgttctaaagccatttgggaaggccaaggtgtcccctggagaaacatcaatatggttggctaaaagttttaaaggcatgatgaatgacgaagcaagctacagttcgatgtag

SEQ ID NO: 41941 - DNA, 1029 bp, Zea mays
  Peptide Sequence Number=SeqID_85316
atgggtgacctatacccacgtgggtatgagtatgagggtaaatccataccaaccaatcagccaggggcatcgtcgcgctcgcaccaaccgaagacggcgtcggcctccacgcggcaccgacgaccgacccaccgtcccaagtccaacgaggaggccggagcgctgagcagccgtctgcatcctcctcccgaaggtgagcccccatccccagtcctaattcaccagttatcaatctatgcgtctttcttgcctactgaattaaatgttgtgtctgcccctagttcttctgcggcgaacaaggccgacaagggcggcagcaacaagggcacgccgggcggcaaggggtggcaggagatcggcatcatcgaggaggaagggctcatggacgaggaggaccacacgcgtatcgtgccccacaagtgctactgcttcctcgccttcctgctcggcttcgtcgcgctcttctccttcttcgcgctcgtgctctggggcgccagcaggtcccagaagccgcgcatcgtcatgggcaccatccgcttcgacaacttcatcatccaggccggcaccgacgcgtcgctcgtgcccaccgacatggccaccaccaactctaccgtcagattcacctaccgtaacaggggcaccttcttcgggatccacgtcaccgccgacccgttccagctctcctacagccagctcacgctcgcgtcaggagacctccacaacttctaccagcctcgcagcagcagccgcaccgtcagcgtcgccgtggtcggcaacaaggtgccgctgtacggcggcgggcccacgctgacggcggcgccggcggccgggggcaaggggcagcagcaggccagcgccaaggtggcgtcggtgcccatggtgctgaggaccacgctgcactcgcgggcctacgtgctgggcgcgctggtcaagcccaagttcacgctcgccgtcgagtgcagggtgctcatgaacccaaacaagcagaacaagcccatctcgctccggaacgcctaccactactcatga

SEQ ID NO: 41942 - DNA, 627 bp, Zea mays
  Peptide Sequence Number=SeqID_85317
atgggtgacctatacccacgtgggtatgagtatgagggtaaatccataccaaccaatcctgaggtcctgagcggcgtgcggcgcttctccaaatctcccatcctatcgacgcacgttcctgcgttcgaaaccctatttccgtccgaggcggcggcggcggcggaccggcagctccccgctcggcttgtattgggcggttgtcgcgctgcagcagccaggggcatcgtcgcgctcgcaccaaccgaagacggcgtcagcctccacgcggcaccgacgaccgacccaccgtcccaagtccaacgaggaggccggagcgctgagcagccgtctgcatcctcctcccgaagacagaaagcaaatgcaggtgtccttacaaacttcgaagtccttgacttcttgcggtcaagaggtgccaaaattgacccaatgggatgtttgggggctgttgctgtatcagagtgtaaggtgtatgagtatatcttaaaaacccctgcttgcaaccagacaagggaatcgatttatgaatttgtgaagagaagtgagggtttcaggcttgcagaggctgataagttaaatgtcatcaactggagaccatcctcagctgccgatgcctatgcggtactgtaa

SEQ ID NO: 41943 - DNA, 484 bp, Zea mays
  Peptide Sequence Number=SeqID_85318
atggagcacaacgaggggattttgacaaccaagcctaaaaaatcgtcctcgagggaatcgaacataggacttggagatgctactcggaagccctctttaaccactaggctaaccgagggggtaccccttactacagtacgaaggcacggtgcccgtgcggcaatctctagccgcgcggtgaacagcacccgaccccaccgcgtggacggctccagtggcgccacgtggccagaaaagatgatatatcctaggatgcaatcagttggaccggacctccacgaggaagcaccgaacccctatacgcacagcccggacccccgaatatggtccgggactcccaagcagagacccgatgctgccacgtggcttgttgcccgtgaagtaagccagcgggcgaagcctaacctggcaggcggcgtccaggccatcctgcaggcggcgtgcctgtccagtccattgccaaacagtacgcccgtgctgcaag

SEQ ID NO: 41944 - DNA, 165 bp, Zea mays
  Peptide Sequence Number=SeqID_85319
atggcgcacatgctgaggtggccactgtcgctggctagccgccggtgcatagaccaacaggccgggcttataagggcggacctcaccgggctggcgtacacgtatgcgttacctagttacaaaagggagaaaaattcaacccctcagacttgctcctatggatag

SEQ ID NO: 41945 - DNA, 1099 bp, Zea mays
  Peptide Sequence Number=SeqID_85320
aaggcgaaccgacgcgtgaagagcgcgccaccgcctgcggtagtgcgcctcttcgcctccgccaaaaccaacagcccagtccttggcacaagggcccgggcccacgagtcatcctccttgggcgtcggttccttggtgcagagaagtcgcaccgccgctcgcgccagtaccgctcctccacggggccgccgcagaagactgagaaggtgaattttcaaaaccaatatagcggtatcgaggcaccccgcgcatggcccaacgaaaccatcaagtacggaagtcacgggtcagtcagccgcgaggacaagcgtgacagttggcgtgaacaggcagtaattacgacagcaagcgcgcggaagcagcgtgccaatcgccaatcaaacattggccccacctgcaggctcgttccctcccctgaggcgggcccgggggccactgtcggtaccctaaatcagtggtaccccttactacaatatgaaggtacagtgccccgtgcgacaatctctagctgtgcggtgaacagcaccccgaccccactgcgtgggacggctccaggggcgcccacgtggccagaaaagatgatattatcccaggatgcaatcaattggaaccggacctccacgaggaaagcacccggaacccttatacgcaaaagccgggacccccgaatacggtccggggactccccaagtaaccgtgccgggctttatcctgtgcgcttgcgctccccgctcaggcggatacccgatgctgccacgtggcttgttgcccgtgacgtaagccagcgggcggagcctgacctggcaggcggcgtccaggccatcctgcaggcggcgtgcctgtccagtccattgccaaacagtacgcccgtgctgcaagggaagcttcccctgcacgccaataccacgcagatcgcggatgtcagggtgcaagaagattgctccagcaactccaaggatgaacgaggagaagcatgtgatgaagatgaacgagtccaggagtttcttgatatggtgaaggaggttttgccagcccctccgaaagcagaggtggagacagcggaggcagaggccgaggcgggagtagaggcaatgcaaga

SEQ ID NO: 41946 - DNA, 318 bp, Zea mays
  Peptide Sequence Number=SeqID_85321
atgagttcccgccggccgattttgaggggcaccggccagtctcccccgcgctctgaaactgccaggcgcgcgctcggctggggcgcgtcgtcaccaccacgtcgcatgacgcgcgtgtggcccaagggtgcagccagcggcaacctgaatcgtgttctgaacccgcttcggtggtcgtcgcgtgctgcgtgctgcgtgcagtgcttcctccgtctccgtccgctcccgctccccggccggccggccggccgccagtacgtcctggccaccctccgtcgggtcgaacgcgtcccctttttggtcccgttccaggcctga

SEQ ID NO: 41947 - DNA, 828 bp, Zea mays
  Peptide Sequence Number=SeqID_85322
atggcgccgccgcagatcttctgctggccgccacagcaccaccacaacagcagcaacgacgtcggcggaggccagcagcccccgttcttcccgcctctgccgccgctccccccgacaccgccgcccttcttcgccgacttgtacgcgcggcgcgcgctccagctcgcgtacgatcaccaccatccaggcggcggcccgtccacgtcgtcggacccactcggcctctacatggcgggcggcggctccgggatgatgatgatgcccccgcccttcgcgtcgtcgttgccgttcggggactttggccggatgaccgcgcaggagatcatggacgccaaggcgctggccgcgtccaggagccacagcgaggccgagcgcaggcgccgcgagcgcatcaacgcgcacctcgcgcgcctccgcagcctcctgcccaacacaaccaagacagacaaggcgtcgctgctggcggaggtgatccagcacgtgaaggagctgaagcggcagacgtcggagatcacggaggaggaggcgtgcccgctccccaccgagtccgacgagctcaccgtcgacgcgggcagcgacgaggacggccgcctcgtcgtgcgcgcgtcgctctgctgcgacgaccgcgccgacctgctgccggacctcgtccgcgcgctcaaggcgctccgcctgcgcgcgctcaaggccgagatcaccaccctcggcggccgcgtcaagaacgtgctcctcatcaccgccgacgacgacagcagcgcccatgacggccagcgggaggaggaggaggaggaggccccctgtcgcctaaagcacggtcgcgtccatcct

SEQ ID NO: 41948 - DNA, 1083 bp, Zea mays
  Peptide Sequence Number=SeqID_85323
atggccatgctccaggagtccctgcccttcaggcaatctcggctccatgaacagcccagctttacttctaaacaaaagcagcaaagagttggttcaggattgactcctgtgagaagaaagagacgtgtcgatgggaccagcctgaagcttctgaaacgtacagtacaagcaattggatctgctgaacaaatattggggcaacctattgttgatgaagaagtaccaatgatcagtcgatatcttgaaaaggaaaggagattgaaaaggagaagattgtttccccagatttcaaatagaagtcaagaaaacagtttggattcaaattgtgagcaattcaattgggatgactttgaagttctagagataaagagtgcacttaatgaagtccttgaattaattcaaacagaaaaaatagatcaggccaagagaattgggcctgttaatcaaaaaacattaacaatgataatgatgtcacaaaggacacaatatgttcacaggaactgccaaataatcaggctatacgaggtgaaaccaaaacgagtgcagtttcagaaagcggattctgtgatcctgaaaaatcatgcggacattcaaatgcagaaagtgaaaacatggaagtcttctgcaaacctcaagaaaaaatcattaaggatcaccgaaataagattattgaaagaggcatatggaaatcattggctgttgagaaatcctataagggttgaggttaagacagaggcaaagtacacaagcaaagttgctggacgacatgagcttggtccatccataacaccattagggcttcgatattttgcaacatgtgcttgtgtagattattgggctgttgttcttccactaattaactcgcttaaaggttctccaataattgcttcccatgggaagatgaaacagacgacaaacgaggtgtacacacgggtgtcgctactgcccgaggacgaggacacggagaagcgggcgcaggcgcgggtctgggaggacgaggacgcgaatcgccgcgacggcgaggacggtgccgccatgaggccgctcgcacggacgcgcacatgttctgcaagatgctcatga

SEQ ID NO: 41949 - DNA, 891 bp, Zea mays
  Peptide Sequence Number=SeqID_85324
atggctaagagacaatcaattgaagcattggacaacagcatgtgtgatatcatgggacgccctgatctgccctttggtgggaagactattgtgtttgggggagatttcagacaagtactccctgttgtacgtaaggggtcaagggctcagatagttgctgcctctctacggagttcttacctatgggaatcaatgtgccacctaaagcttgttcgcaacatgagagcaaagagcgacccatggtttgcagaatttttgttgcgtgtcggtggtggaactgaggaagtgaacaacgatggtgatgttcatcttccagatgaggtatgtgtgccatataccggtgatgaccgcgaccttgacagattgatagatgacatttaccccagtctaaacgaaaatatgtctaatacaagctacatcacttcaagagcaatattgactactcggaacgactgggtggatatgataaatatgaggatgatcgatcgtttccaacgggagcagatgatgtaccatagctttgacaccgtggtggacgatcctaataactattatccatcggaattcctaaacacgctgactcctaatggactacccccgcacgttctgaagctcaaaattgggtgcccaatcatgttgcttaggaatatagaccctgctaacggactttgcagtggtacacggctggtgcatgctggaatgcgggttttcttgcctcgtatacccctatgtccttctgatgacgagatgttccctttccattttaaaaggaagcagtttctgctatatgttgctctctcaagggccacaactcgattgaatgtgaaggtacttgtaattccagtcactgatgataaaatgaagaaggggtggaaaagaagtcaacaataa

SEQ ID NO: 41950 - DNA, 786 bp, Zea mays
  Peptide Sequence Number=SeqID_85325
atgcaagggaaggattcatatcctaaaacaaaaatcgtgacgatgggcgtaaggaaaagatatacgagtaaggaaaatggtgatgtagatgagatccagcagtatagagatgcaaggtgggtgactcctccggaggccttatggaggatatatggatttgagcttagtcagaactctccatctgtgatgcagctgcaactccatcttccaaacatgcacatggtgacgtttcacaagcgacaaatggtcgagcgagtcgtcaaccgtccaggtgctgataggtcaatgattatagcatattttgaggcgaataagttgtacgaggaggctcggggcatcctgtatcgtgacttctctgagtggtacacttggcagcagggcaaactcctcctaaaccatgtgactggtgctacctcctatgtggatctaaggacagtagacggtgacacactaccatcgtttcgtgaggcagcacaaagaaggggattacttgaagcagacaacacaatagatgagtgtctcaatgaagctgctctttaccaaatgccatcagcgctacggaggttgtttgcaacgatactggttttctgcgagccgaatgatgtggccaaattgtggcagagacaccttgacacaatgtccaaggattatcatcgtattactcagagcaaaacccatttgcagcagatgatcttgattgacattagaaacatgttgcagtcaatgggtaaagacataaagacattccctctacctgctatcatcgatagatatgacgattcataa

SEQ ID NO: 41951 - DNA, 1722 bp, Zea mays
  Peptide Sequence Number=SeqID_85326
atgcctaagaagggtcacatggggacccctaagcaggcttacgctaccgacggcggcaagggtgacgtcgccgctggcagcacggtgacggcgagcgccatcgcgtcctcctacgacgaccagatccgcccgctcctcgacgcggtggaccggctgcgccacctcaaggtgacgcaggagggcatccagctgcccaccatcgtcgtcgtcggggaccagtccagcggcaagtccagcgtcctcgagtccctcgccggcatcagccttccgcgcggccagggcatctgcacgcgcgtgccactcgtcatgcgcctgcaggacgacccctctgcggactcgcccaaacttcagctcgagtacagcaacggccgcgtggtgaccaccaccgaggccgacgtcgcggacgccatcaacgccgccaccgcggagatagccgggagcggcaagggtatctccgatgcgcctatcacgctcgttgtgcgcaagcgcggcgtgcccgacctcacgctcgtcgacctccccggcatcacgcgcgttcccgtccatggccagccggaggacatctacgaccaggttgcaaagatcatcaaggagtacatcgccccgaaggagagcatcatcctgaacgtgctctcggccacggtggacttcccaacgtgcgagtctatccgcatgtcgcagcaggtggaccgctccggcgagcgcacgcttgccgtggtcaccaaagtcgacaaaaaccccgagggactgcttgagaaggtcaccatggacgacgtgaacatcggcctcggctacgtctgcgtccgcaaccgcatcggcgacgagacttatgaccaagcgcgcgtcgaggaggaacggctctttaaataccatcctttgctgtcgaagatcgacaaggacatggtcggcatcccagtccttgctaataggctcatgcagatacagtccaccatcattgccaagtgcctcccggacatcgtgaagcagatcaacgaccgcctcagccgcagcagcgccgagctggaccagatgccgcaggacttgaacaacgtcgctgatgctgtcagggtcttcttccacatagtgaagcaggtctgtaactcacttgaaaagttgctggtgaggggcgactttgctgagtaccctgatgcgcgtgagtttcatggcacggcgcgcattgccgacatgctgtctggatatgcaaaggaactccccgcgcagtgcccgataaacaggaacgaaccgtttctgatggaggaggtgcgtatactggaggagactaagggcataaatctacctaacttcctcccaagaacagcgtttcttgtcctgctgaagaagaaggtgcagattatagatgtgatccctcaggagcttgccaacaaagtctgggactacgtggaggacctggtgatgaaggttttgctgaagcactccgaaaattttccgcagatgcagtcgccctgccgccgtgccgtgcagaccctgatggacaaggcgcggctgcgctcggcacatcacgtgaaggagctgattgccatggagctggtggcagattacaccgccaaccccagactacatgaagacctggaccgagataaatggaaggggaaggcgttcgacctgagggcgcgtcttacggcatactggaagagcatagtgctgaggcaggttgatggcccttgcattgcacgtccttctcagcgtcaagctgctggttga

SEQ ID NO: 41952 - DNA, 360 bp, Zea mays
  Peptide Sequence Number=SeqID_85327
atgacagacattgctgataagaacaacaagtgggcatcatatgctggacctagtggttggaatgtgctttgtggagctgttcagtatactattactctgttattgaacctctgcttttatgcagacccagatatgctgaaagtaggcaatggtggcatgaccttagcagagtatcgctcacattttagcatatgggctctcatgaaggcccctctattaattggctgtgatgtcagaaacatgacttctgaaacaatggaaatactgagcaacaaagaagtaattcaagtaaaccaagaccactcgtatgttgtagaaggcaacctccacaatcctgactcaaatttagaattctattaa

SEQ ID NO: 41953 - DNA, 174 bp, Zea mays
  Peptide Sequence Number=SeqID_85328
atggggagtagctctctccgggcagaatgggaatcacggcttgtgggtggatatgagattgatggttttgattatgattatggtgctggttgtcagcattgcaaccactgctcaggcgaagatgaagctgtggaaggagacttccaggagttccaagattacgacgagttctag

SEQ ID NO: 41954 - DNA, 606 bp, Zea mays
  Peptide Sequence Number=SeqID_85329
atgtctaagaagcgtcgaacaggggataagctggagaacgatgtcgaagacaccaaacgcacggccttagccatcgccagcggcgtcacagcaagcgccatcgcggcctcgtacaacgaccagatccgccccgtcctcgacgccgtagaccggctgcgccaccttaagggcgacccttccaccgactcgcccaagctccagctcgagtacagcaacggccgtgtggtgaccaccaccgaggccaaggtcgcggacgccatcaacgctgcaaccgcagagatcgctgggagcggcaagggcatctccgacgcgcccatcaccctcgtcgtgcgaaagagcggcgtgcccgacctcaccctcgtcgacctcccaggtatcacccgtgtccccgtgcaggggcagccagaggacatctacgaccagatcgcaaatattatcaaggagtacatcaccccgaaggagaccatcatcctgaacgtgctctcggccacggtggacttcccgacgtgcgagtctatcccgcatgtcgcagcagtggaccgcaccggcgagcgcacgctgggccgtggtcaccaaggtcgacaaggcccccgaggggctgcttga

SEQ ID NO: 41955 - DNA, 384 bp, Zea mays
  Peptide Sequence Number=SeqID_85330
atgaagatcattgctatagctgggtatataactgatgagaagatgcatattgctcgagactatctagagaagaatacaagacaggcttgtggcattaagactgatcaggttgaagttacagatactgctcttcttgctctcattgaaaactactgtcgagaagctggagtgaggaaccttctaaagcagattgagaaaatttaccgtaagatagctctgcagcttgttcgccaaagagtatcgaatgagctagaccatgagtctgtcagtgccactgtaactgaggaatctggtagtgatccaaaatccaaggaagagaagcatgtgagaaagagaattgtgaacggatgcaactcgccgtacacaaatcatactattagctaa

SEQ ID NO: 41956 - DNA, 312 bp, Zea mays
  Peptide Sequence Number=SeqID_85331
atggtttcaacagctactagaggaaatgccggcaagggagataatgattatcttgatatggtgtttactcaagtgtccttggaagaagtagaaaacttgtgccggtatgagcttcctaatgagagctgggaagtaaatttacctgctcaaaaggtgtctcctgagctcctagaaccaacattaggcataaactttgcaagagatggaatccaggaaaaagagtggttgtccatggttgctgcacacagtgatgcatggttactttatgttgcattttaccttggtgctcaatttggtttcaataaaaattaa

SEQ ID NO: 41957 - DNA, 847 bp, Zea mays
  Peptide Sequence Number=SeqID_85332
gactggatggggggtttccatccggtttgggagggtgtccggggccgcggccggaggttggggaggggttcaggcggagcgcggcgagcgggtggacaacctaggggcgctgaacagcgcgctgcctgacccggagacgacccctgcggaggccgcgactggagtcgccccgggaccgaccccggagactgcggaagatgcaccaggcgcccctgcacctgctgcggccggcgaagaccttcccccaaaggtggccgaaggcgcgcccgatgcccccgcagctgctgtgccgaacgctgaagatccagcggaggtgggggcggaggcagcggcggaggcctcggcggaggctcccgcagcggcagggccttcgcaggttcaagattttgggcctgcgcacgcaaccgctactactgagtttttggcggcttcgaccgcggaagatggaaatgaatatggtgggtctgtttctgagttttttgattttactgactctgggagctcggttgagtggactgaggagtcttcggaggaggacttggattattttgcggccttggacgtggctgcggcggaggctgcgccacacgctgcggacgcgccagacgtgcccggtcctagcaccgggcaccgacgacgaagggcgattgcaaagcgtaggattagtgcggaggaaggggcccggcttcgcgttagcagggctggtcggcaggagctgctgtctttgccgaccgccgctggtgcaggggaaggggagctgcgaagcctttttgcgggtgaggagcttaggataatgttgtttaattatagagagatggggattattcctaaggttgagccgatgtag

SEQ ID NO: 41958 - DNA, 369 bp, Zea mays
  Peptide Sequence Number=SeqID_85333
atggccagccagctgggccgctaccaggccgcttggccgagcagcccagcaaggccagccggcaagagagaagcgagcgtagggcacggagggaaggtggaggtggcactgcttgtgcgcagcgaggttctcctgcgctccgttgtctcaccagtgcacctgtgtggtgctctgtctgttctgattattgtccaccgtggcctggtgtctgggctccctgctgcgcggtgttcgtcttctcgggctggtgccgtggacgtctccctcggctccggcagcggctctagtatcttcgtcaacctcctgccgtgcaggcccggacgtggacggcggaattggttttctgggacagaaccttgtgttcgctga

SEQ ID NO: 41959 - DNA, 180 bp, Zea mays
  Peptide Sequence Number=SeqID_85334
atgcctgacgcagttgcattgtatgacttggacgagtctacgctctaccgctacaggatgcatgcagagcgagtgaatggaacagagcgtgactgtgagagcaggatgggaacggagcggctccgtccggttgattttttggagcggaatggttccggatctgaggagaatattccctaa

SEQ ID NO: 41960 - DNA, 951 bp, Zea mays
  Peptide Sequence Number=SeqID_85335
atggatcgggtgccgccgccggtctccatgcaggtggctgcgatgcagcgacatcagcagcagcagcagttcgtccaccacctgcagcaggtccaccagcaaggtacgcagcacgagcaaccgccgccaccgcaccagaacggcagcagcagcagcggcaggaccggcggcggccgcaagtgctgcccgctgcggcggtcgcgcaaggggtgcatgaagggcaagggcgggccggacaaccagcagtgccccttccgcggcgtccggcagcgcacctggggcaagtgggtggccgagatccgcgagcccaaccgcggcgcgcgcctctggctcggcaccttcggcagcgcgctcgaggccgcgcgcgcctacgacgccgcggccaggacgctctacggcgactgcgctcgcctaaacctgcagctatacctgcagcagcagcacgccatggcggcgcctatgatgatgatgcactcctcctgctgctccgccgacgggtcgtcgtcaaactccgattccatttccaactcctgctcgtcaccggtgaccacggcggcctcgccagcctacagccaccaccagacgatgttccagacacctgcactgcagccgtcatgcggcgcaatgacgatggcggccgctgcgccgcatgtgcagggcttccacgtcggcgacgacgacactaccaccgcgatggcgatgcaccgtcatcagcagatgatgcgcgagctggcggaggcgcctctgcaccaggaggcagacgacttcgaggacttcgtgacgcggctgcccaaggcggaggacttcggcctgcagggcttccaggaggtggcccccgaggtgttcgacgacgccgccggcatctgggaccacgcggccgcctgggagccccccaccatgatgatcgactctggcgcccagccccagcagcagctcgtcgtccctctttga

SEQ ID NO: 41961 - DNA, 948 bp, Zea mays
  Peptide Sequence Number=SeqID_85336
gcctcgacaaccacaatgaaaaaaacgccggcattcaatgtgccgttacaaacggaactccggttccccctccgcaggtacgaacaacctcactccatgggggaaggcctgcggagcaacagaagactgacgagcggctcaccgccgcccgttctgactacgacaacaaccacccccgccccgggcggcgaagcggcttaggcagcagcttcggggcaggtgttgcgacaggaaggctctcacccgcagaggacgagaaccagccattcaggccgggagacggagacccagggctactggcgctctacctatcccggcatggctggaggaagtccccgtgggacggaaggatgccattctcccccaggcgcgggggaagaaaaaggcagccgacccatgcgggggcagccccccgactcgcctcatccttcatcttggcctggatgacgaaaatccttgaggccgagggaggggaaggggccgcagctcggctcgctttcccccaccgccaaactggaggcgactctccctacgtgcgcccccaaacgccacgggccgagtcttctccaacacgctccaaggccctcccctgcggcgcgggggctaggtcccgcatgtcatgcaaaccagctcagaagcagaagaagccaaaccgccgcgcgcggtgcacacaaccgcccagcggttacaagcgattccccactttcgcccagaccaacgagcggaaggggcgggcagccatgcaggcgggcgggcgcaaaagtcacgtcgtcagccaggctcacgtcccatcctgggacagcaagagagcctcctcccacggcgtgaagacggagaagcgggcgacgcttcgccttcgccgtaataaccgcgccaaaaaaggggttcgaaggctggcccccgaagggttcacagtcgcctcagacgccgagcgagggatgaccaggg

SEQ ID NO: 41962 - DNA, 333 bp, Zea mays
  Peptide Sequence Number=SeqID_85337
atgacgaaacttaaggagaggagtctcaccaggtttctccggtgcggcgcctggtttcccagaggaggagcgatccgcggcgatggtgcttccgtctcggatgggatgaggaggaggggtcgcggagaggctgcgtcgggagggtccagcggagaagataagtccgctgcatgcccggctgaagaaaacggcatggccgaggaccgcacaaagctccggatgccggccgctccgagtttgccgcgcgacgggatctgttgggatttaggagataagcccgaccggtgggtcccgatcggcagtgggagcggagagtggagacaggaagactaa

SEQ ID NO: 41963 - DNA, 1036 bp, Zea mays
  Peptide Sequence Number=SeqID_85338
gacaccagacgaagtaattgcagccaaaggtgtgaagccaacattatcaccaaatctcaatacacttgccttagtcgagatattcgttcccatttcccaattcaagagaattagaagtagttcaattatatttgaatttgttgcttggcaagaccgcaaatctttgagatctgtagaaaagtaccttggtttggaaaagctttatgtgcttggaacaaactgtgttgacaatggtacgcgtgaagggcttgataaattcttgaaagcggcaagcagtgagccagaaactgttatgcattatgaatttatgcaagactataaggtgcatctaaagcatttagatgggcacattgaagaggttccttatttttgcctgccagcaaacgacctggtagatgttattgcaccgtcatgctatagctgctttgactacacaaatggcttggcggatttagtggtggggtatatgggagtaccgaaatatgctggggtctccatgacacagcatcctcagtacattacagtcaggaacgatcgtggacaggagatgctgaacctggtagctggccttctggaaagcacacctacaattagcagtggctccaggcaaccgtttgttatggagacagtgaaagctgacgatgccgcaaaactgggtacctcccctaatcaccatttgtatggaatactagtacttagcattggaatagaattagtagtaacaatgacgatccgtttggcttacattcatgtaaataaacaaacgaatggatctacagggaaaggcccttcgaaaccagctcctagattcgtcggcgacattctggccttcctgctgaacttggttggacccaagggtctggagttcgcacgctactctctggactatcacaccattcggaattatctgcatgttaggcgggcatggggaaagcaaagagctgagcagcacatcccggggtatgccaagaagatcgtggaggcctacgacaaagacggacggatcgaggcaatggttacgcagtcaggtgactga

SEQ ID NO: 41964 - DNA, 135 bp, Zea mays
  Peptide Sequence Number=SeqID_85339
atgcagaaagtgcagatttcagcattcaagtccaatggctatttgagtggttgggtgaaaggcaatcagaaaatacttcaaggaagatcaaccctcaaaacagcatattgcggaccgtcagaggctcttgtgtag

SEQ ID NO: 41965 - DNA, 507 bp, Zea mays
  Peptide Sequence Number=SeqID_85340
atgtcgcaaacacggttgcacaaaaaagggtgcctgcccaaaacaatgtgtactattgcattgcctctctcctcccacattgaatccgtgcaatggccaagtgcctcgacttctccctaccccgcgagagaacccaaattggcgtctccaccatcactaccggtgtcgctcgtgacggcgaatgggggaggaagcgaccagtggccacgagcgaacgttcctgtccaggcccaagtccactctttgtcggcggaagaagcactggatcacctcgacagggagcggcggctccacgacttctacattgaaatcttcaagccttgggccaggatatcaccatctcaggggccaggatatcacaagcctgccacacatttgaaatctgttctactaaaatttttggagcttgtggattggcttgacaaggtttcaatcctttgctccaaagtggtctacaagaatggacgacagcaccccgacgacaacatcatagtggaagagttttaa

SEQ ID NO: 41966 - DNA, 786 bp, Zea mays
  Peptide Sequence Number=SeqID_85341
ttgagaacaacacagcctgagtcccttagtgctgcagttagcgatattggatctgtcgtgagtatgattgacaggattgctggatcagcgcctggtaatggttccagagctgctgtgggtgaagatcttgtcgctatgacaaagtgccgcttgcaagccaggaacttcataacccatgatgggagtggtgcatcaaagagaatgaagcgggacacaggtgctatgcctcttaatgtgtcatccgctggaagtttgaatgacagcttgaagcaatcatatactgttggcactccagagctacaatcaactgcaacctcacgtgtcaagtgtcaaagggctgaggtaaaccatgttctgttagaggagattcaggagataaacaaacagcttatagatacagagctccatgtctctgaggatgatgctgagtccttcactacatctgatatggccgaagggacagtcattaaatgcacattcactgctgttgctgttagccccagcttgaaatccatgtttgcttcagcgcagatggtgcttcggcaaagaaacctcacgggggtgctctgtggttgcagcaggaactcggatgacctgtctacgaaggccaagtcaaagttcagtgtgttgctccggggtctagctgagcccatgtcattgcgagaaatcgcaaggacgtgggatgcttgcgcccggaaagtgattgcagagtatgcccagcaaactggaggaggcagtttcagctcgagctatggttgctgggaaagctgcgttggcgcttcataa

SEQ ID NO: 41967 - DNA, 591 bp, Zea mays
  Peptide Sequence Number=SeqID_85342
atggaggacttgagtacaacgaccccgaccattgtgattgggaaaattgcggtatttgagatgtcacgaaaaatgggtcgacaagaggagccaacttattcaagaccatatgcttttgcatgtgaagaaagaaaaggaaaaaagaaggctcccactcaagttcctcaagtgaagaagaggaagaagtataaagtgatgatggtcgagaatcttttctttaacattgataggaaaaagcaaagaatgagaggatgctttgcatgcagggagaaggtccacttcagggacatctgtccaactatggccaaacccacaaaagggaggagcaaaggcaatgcgcttacaagtgtcaaaacttgggatgattcttcaagcgaagatgaacctccaagaacacgcatccaccgatcctcatcacggtcatcacacaagtgccttatggcaagaggtaaaatgagtatcccatcctttactgatgacaacagtagcgatgatgaaggtgagggaaagccctccgtagatgagcttgcgaaagacgttaaattttttaggatgtatgcactaaacaaaaggctcaacttaaatctttga

SEQ ID NO: 41968 - DNA, 126 bp, Zea mays
  Peptide Sequence Number=SeqID_85343
atgggaggcaagagcggcaagggtaagtgtgacaagaagagccggagcgacaagaggaagcgtcccccaaccccttcgtcagacgacttcggcgactctaatgcggtgacctatccagatttataa

SEQ ID NO: 41969 - DNA, 363 bp, Zea mays
  Peptide Sequence Number=SeqID_85344
cgccctgctccctgctccctggtgccggagcttcttccttcccctgcgctcgccggcgttcggctctgcgtgactctgccccagcccagagctctccctgccgagtcccttcgcgttcgtcgaagctcccttgcagcgccctgctcgccccagcggctccctgctcgcgtctccagccatcggcagctcaccgcgcacagctccctgtccgtcctctctgccgagcgattttcacgtgcgcgtgcagctccggctcgttccccatggtggccgcggtgcctctctgcctgctggggcattcttgtccgcgaactccacccatccgtgccagtcgccgtttctaggatcgattccaagctgtag

SEQ ID NO: 41970 - DNA, 45 bp, Zea mays
  Peptide Sequence Number=SeqID_85345
atggcgccggcgagcttgcacgagttcatcttcttcatccccaag

SEQ ID NO: 41971 - DNA, 1062 bp, Zea mays
  Peptide Sequence Number=SeqID_85346
atggcctccgactgttgggacgccgaacctagacgcatccagactgagaccttaggagttaggcctagtcctgcagcactgaaaagcgaagtgatcaacgtcaaggcaattgaaacaccttctgatcagattaagagtttaaaggaccaatactttgcggaattgaatgatgtgtacaataagatatccatgaagatacaaaatattgacaaccacatgcccgctcaaaagtcagcggagcagtatgaaaggctgaaaggctttaaaggaatgttggagcgcatattgcatttcctgcaagctaacaagagcagcattcagccaggttttagggaaaaaatctctattttcgagaggcaaattctcagtatcatgagttcacaaagaaggaagcctgtgcaggcacctggacagcaaacgtttcagcaatctggtgggcaagctcctagctctaatatgtcacagcagcatcagacttcccaaggtttgcagcagcatgatagtcatactaatcagatgcctcaagcaagtttaccaagtatgaacacaggagtaccgacctctggagcacctggcattcagcatgtacctgcgcctcaagcatcaaactttggtgttccaacaacacagcaaaatgtcacaaatgcaccgcaggctgcctctaatccggagaatgctcagggaaataattttaatcctgtgcagcatggttcaatgggtactgcattgcaacagggaagcactggtcccatgcagggtgcattgaatgcacagcatcagtccaatagtaacatgatatccaacaatgcaatgagtacaatgcagactaataccaatgccatgcaagcaaacgtgaattcattgcagcagctaaagcaacatcaggagcatcagatgatgcaaaatcagcaaatgaagcagcgtcagcagatgctgcagcagatgcagcaaaagaaaatacttcaacaacagctcccaatacaacaactacagaaacaacagcagcaagggccgattcaggttcaacaacttcattctggaaatgatgtgaatgagctaaag

SEQ ID NO: 41972 - DNA, 243 bp, Zea mays
  Peptide Sequence Number=SeqID_85347
atggttaaggttgacctcggcgacgacgagcgcgccgcggcggtcggggccggaggggagcgacgcgcaatagacgctcgtgtagttgcacacccccgggcctacccaatcggcggtgagataaatgctagctcgagctcgggtcgagctgactcgttaacgaaccgagctaagatgttagctcagctcgtgacaaaattgaaacaagacgagtcgagtcgagccgagctgaccacgagttga

SEQ ID NO: 41973 - DNA, 270 bp, Zea mays
  Peptide Sequence Number=SeqID_85348
atgagcaagccagttccccctggcaggagcgcccttcgccgtcggctaggcagagtcgaaaaaggaattgttgatggcgacgacagtggggttgatgaagtagggctccatgttttccgtgaaccccaacttcgtgtacctgctggtggcagtgacgagcttgccaggggcaggatggagatcagagaaggtcgaaccttctcgacggggaacgtgaagggcacgatgtcgacaacggcgaggcggacaaccgagggccacgagagctag

SEQ ID NO: 41974 - DNA, 267 bp, Zea mays
  Peptide Sequence Number=SeqID_85349
atgaagaacgtagatcgacctccttctaatccaaaacagattataatccagtctactcaagagtgcttcagcgttgacataccccgtgttccggcggagactgttagacccgaaacaaggcgagctgctgatgaggatgatgactttatgccattatccaagaagcgtaacttggacgacagtcctgggaaagtcttgaagaaggtagtcacaaagtggaggaaagtagtgcctgttggggacttgttctcaaatgctaagaattaa

SEQ ID NO: 41975 - DNA, 312 bp, Zea mays
  Peptide Sequence Number=SeqID_85350
atgaccagaaattcagtgtggacatatacatatcatggattccagttgtcaagagaaataaacgccaggttaatccaaagctctactgaatctgagttttctgtgagaatcgacaatgttgtgcatcgacccaagggaagcattggcaccagtgatcttggtctcctttgtattaccttggtcccaagagagttaggtctgagaaattcttttagaatagaaagtccggtagccgcgcaaaggaaaaagaatgttgatacaattgatattgctagtcaaggtgatgtattggatactgtgttgacatcataa

SEQ ID NO: 41976 - DNA, 936 bp, Zea mays
  Peptide Sequence Number=SeqID_85351
atggcgtcaaaggtagcttttgatcacccagaacgattctccgaaaagttcgagttctgtgcagacaatattaagcccatggttcagacatgcatgacaactctatcctcaaagatttcagcttgttttagaaggaatgtatggctaggtgatctcaactataggatcaacttaccatatgagaagacacacgaactcatatccaagcaggattggaacgaattgtttgggaaagaccaggtacatgtgcacaatttggtgattgagcaaagtctggagagagaaacctggggcttcttaagggttatgtttgaggacggggattttgcaaggacaaaattgcttgctcatcttggcttcgaaccacctcaggcaccgcctgcaagttcaactgatgaattgagccaaatattggcagatacacttaatattgatcatgctgcagtaaccgataatgcggatgcccagtttcttattgataatggggatgattttttcaacaatcctcaaccttcagaggctagcttggctgaagaatcagtttctacaaatggtcaacagatagaacaggaagtttctggagatgctgtgccatcagatccatcaattgacaaaagcattcaacatgcgttggtggttggagactacaaaggggcagttaaccagtgtcttgcttctaatcgtatggctgatgctttggttatagcccatgcaggtggttctgctctctgggaaagcacaagaaatcattatctcaagaacagtatctcaccctacttaaaggttgtctctgctatggtgggcaatgatttaatgagttttgtgagtacctggccactaagttcatggaaagaaactcacgcccacctatggacctaccccctcgcctcacagcatggccgccggcttggtgtcgcccccgaccaaggttattaa

SEQ ID NO: 41977 - DNA, 456 bp, Zea mays
  Peptide Sequence Number=SeqID_85352
atggcccaagggcacatttccctttcagccgaggctgagtccgagccctggggtcggacgaagcggagtccgtcgtccagcgtcgaggttgagcccgagccctggggtcgggcgaggcggagcttcctatggcgcccgaggctggacttagctgctgtcagcctcactctgttgagtggcacagcagtcggagcgacgcaggcggcgctgtttttttgtcacgtcgcgcgcgtcaggataaggtgtcaggcgatccttgcattaaatgctcctgcgatacggtcggttggcgtggcgatctggccaaggttgcttctctgcgaagactgggcctcgggcgagccgaagctttgtgctgatgggggttaccagctgagattaggagtcttgggggtacccctaattatggtccccgacagcagtgtatcgcagtacataaatacctacaccaagtag

SEQ ID NO: 41978 - DNA, 726 bp, Zea mays
  Peptide Sequence Number=SeqID_85353
atggcaaacacaatgcgagcaactcaaatagcacgaaaaatactcacaacacaaccttctatttatatactcagaaccccacagtttggtgggtcccgcagtatgacatggattattgcaggaggcttcagctttggaatgaaggtcttctctcgtgacaagggtaaaaatatggtgcacactctccagactactcgtgtgaacatcacccgtgtccctccacctcagcaggctccttcctacccagttgtggcagaagaagtccctatggagttgcaccaccttgctgtaaagaatggtgtgatcttggaggatagttctgaggagattctggcaacacctactccgtcctcagaacatcatgcctttgctgctggagcttcttcttcagcactacctgtgctagtagctcaagcccctactctggaggtgaggaccctaatgattctggcaatgatggaggtgatgacgaggatggagaaaacaacgacaataatgatgatgccaacaacgagcatgatcaagaagatggctttgttggaatgtggcctatcgtggagcattacacctcaatgttcgagatgggacacttctcaaacttgcttcaggatgtgctacacgcactggaaacctacgttcgacctctttatgacaccagacgggtatctgagcccccttgggcttgttactatatcactcatgtgcatatcagaatgttggatgtag

SEQ ID NO: 41979 - DNA, 121 bp, Zea mays
  Peptide Sequence Number=SeqID_85354
atggcgttgcaatccgtgccagtgccaccagagcacggggaggacgtccagaaactattaactgcagatgccccgcctgcccagtctcctgctcgtccctgccactgcactctcagctaca

SEQ ID NO: 41980 - DNA, 1467 bp, Zea mays
  Peptide Sequence Number=SeqID_85355
atgggcggactctgtgcaaagtgcgtgctggctgcctggctggtcgcgcgcgctagctgctgcatctttttaagttttcgtgtaaccgtgcagcaacaagcaatgtcgtcacctaccgcacaccctagtaccctacacgacaagagtgaagagcgaacactgaaatgggtgacgttcggcgtgaagctgaccgctgtcagaatctttgcctccacatggaatgtcggcggtaaatccccaccaaggggattgaatcttgatgactggctccattcttcacttccagctgatatctatgtgttaggatttcaagaaattgttcctttgaatgctggaaatgttcttggcactgaagataatctcccagcgaaaaaatgggtctcccttgttaggaggacactgaataagaatcctggttcatgctgctatggtggctatcgcacgccatctcctgtcccggatccagttgtagaacaagatgctgattttgagggatcatcgagaaggcacgacagtttatcctatttgcatcgtcggtcattcaaccttagccggagtttaagagttgaagggaaccatatgctgtcacacccaagattggatcgtaggttcagtgtctgtgacccagttagcttgggaggcaggccaagtgattttgatgggaacttcccattcatgggatcaccagatgatcattgtatcgaggaggatacaagcaacggagcacatttttcacccttcccatatggctatggtgtctctgcacctatggaagaaaatggttatcatccaaatacaccgtctaggtactgcttggttgccagcaagcagatggtcggtatatttctcaccatttgggtacgcagcgaaataagaaatgatgtgaggaacctgaaagtttcttgtgtgggtagaggactaatgggttatctcggaaataaggggtcgatatccataagcatgtctttacaccacaccaccttttgttttatctgttgtcatttgacctccggtgagaaggagggagatgaactccggaggaactctgacgtcatggaaattctaaggaagactagatttccacaggtccgtggtgctgctgatgtcaagtcaccagaaacaattcttgaacatgatcgtatcatttggcttggggatttgaattaccggatcgctctttcgtactgctcagctaaagctcttgttgaaatgcatagctggaagcaactgttggagaaagatcagctgtcgtacgttcgcggagagtctcgcttctctgaccacagaccagtgtacagtattttcatggccgaggtcgagagcatccggcacagaaggagaaacgcgggctatttcagctctaggatcgaggtggaggagctcttgccaaacccgtacagtcatccggcgtttacagcttccagtcagatggttgagaataatcacactgcacagaaactaacataa

SEQ ID NO: 41981 - DNA, 162 bp, Zea mays
  Peptide Sequence Number=SeqID_85356
atggcgcacatgattaaaaatcaatttattccttacttgtcattttgctggaacaaagaatacaggaagtcaagacttgagagctttgctgaatctggaagtacgagtctggcaactggcaaaattgacaactttggattggccggacttgaatttacctga

SEQ ID NO: 41982 - DNA, 999 bp, Zea mays
  Peptide Sequence Number=SeqID_85357
atgcaggcggcatgcaaccgcaccaagggggcacaccctttggacttcgacgcgttcagcatggaggcccaggcccacacgtcatgcgggcagaagcagcagtcaagtcgtcagcaagctcacgccccctcctgggacagcgagagaaccctctcccacggcgtaaagatgacgcgcccgagttccgttcctcgaacggctcgcgcacgcacaacggctgccccgcgaaccactcgtcctatcgcattaactctgcggcaggacaggcggcacctttggcaggcgaagcaggcgacacttcacctccgccatgatgaccgcgtcaaaaaaggtgcgccacgtcattcgatttcgtatccttttccacttcctctttctctctcttgccacagggaccgggaaaggggatactccgaaagggatcattctgcacgaaggaagcgggccccgagccccctactgatcagaggttcgaaggctggcccctcggaagggttcaacagccgcctcaaagcactcgggcttcgcgcccactactggtcagaggttcgaaggccaggaccttggaagggttcaacggccgcctcaggccactcggtctccacgcccactactgatcaggggttcgtaggctggcccccgaagggttctgacagccgcctcagagcacgcagagcgagggatgaccctgggtatgttcgatacataaccaaggctcgggctacgctcccgagcctcggctccggaagacgacgaactccgcttcgcccgaccccagggctcggactcggcctcggctccggagacgacgaactccgcttcgcccgaccccagggctcggactcagcctcgactccggaagacgacgaactccgcctcgcccgacccccgggctcggactcagcctcggctccggaagacgacgaactccacctcgcccgaccccagggctcggactcaacctcgacctcggaggagcctccgcctcgcccgacctag

SEQ ID NO: 41983 - DNA, 54 bp, Zea mays
  Peptide Sequence Number=SeqID_85358
atggggacaaaagaagcaaagaaacaccactatggtaaaggctgctgctactaa

SEQ ID NO: 41984 - DNA, 342 bp, Zea mays
  Peptide Sequence Number=SeqID_85359
atgcggagttcttcgtcttccagggctgagcccgagttcgagccctggggtcgggcgaagcggagttcgtcgtcttctggggctgagcccgagtccgagccctggggtcgggcgaagcggagttcgtcgtcttctaaggctgagcccgagtccgagccctggggtcgggcgaagcggacctcgctctgtcgagcggcacagcagtcggagcggcgcaggcggcgctgtcctcttgtcaggccggccacctttgcattaaatgctcctgcgatacggtcggtcggcgtggcgacttggccaaggttgcttcttggcgaagactgggcctcgggcgagccgaag

SEQ ID NO: 41985 - DNA, 637 bp, Zea mays
  Peptide Sequence Number=SeqID_85360
atggctacgccgagccacctcctgctcgtcgtcttcacggcgcttcttgcgttgctcccggggacgacgcagctccagccttcgcaggtgtggactctgatcaagatccagcagctcctgaacgcccccccgatgctcagccactggcgccgcagcaccgacttctgcggcggcggcggcggcgccatggggcccggcgggctcggccgccgtcctgtgctacggggacaccgtgacgcaactccacatcgcgggcgggggggcgccgcctctgcccaggaacttctccatcggggccgtggtcacgacgctgtcccaggttcccgaacctcaaggtggtcacgctgtccggggctcggcctctgggggccccttgccggggaagctctcgcccgccttcgcgttcgctggagaatcgtcaacatgagcgggcacttactcttccggcgagggcccccggggggtgatgcctccttccccggcctccagaagctgggtcctcgacgaaatcttgctgggtggggaggtgcccgcctggaatggtgcccttgccgttctgggcgttctgaggctgggggaaaaaaccttcagggaggcctggcggagtcctcgggaaaagaacctctctgcggtcgat

SEQ ID NO: 41986 - DNA, 393 bp, Zea mays
  Peptide Sequence Number=SeqID_85361
atcgagtttgagccggagtaccatgtgaattttggtaatcctgatattgatgagaaaccaccaatgtcgttggaggagatgcttcagaaggtgaagccatttgtagttgcatatgagggcatccagaaccaggaagaatgggaggaagctgtgaaagatgtaatggctagagccccccatatgaaagagctcatagatatgtacagtggacctgatgttgtgactgcaaaacaacaagaagaggagttgcaaagagttgcaaacactcttccagaaagcatcccttcttcagtaaagcggtttactgacaaaactctactctctcttaaggtttgctttcttgtgacaacttgtgttctgaacattcgtcataggaccattggatcggtttga

SEQ ID NO: 41987 - DNA, 789 bp, Zea mays
  Peptide Sequence Number=SeqID_85362
atggcttctgccaccacttacatcaaaattgctctgactctgttcattcacttcagtgtatttttaactgaagtctggacactctatgagttttatgatctcgagagcatcattgataggacactaaagcgcgattttgacaccgaggaaacactctggttgcttaagataagtcttgtgtgcatcccggatagccctaagatcaagcccttcatgtcaatggatcatgagacctggcctgatcacagacgtcatggacctgaaagtcaggatggtagagtcggttcagttcagcttgacatcatgctcgagcactgccgcgtcgtggcctggggcgtgatgcacccactccttgttggggatttcccattcagctactacgagtcatctgccatgttgtggagaccacttgccatgcaggaggtcttcttccatgggcggatcattgtcgactggtggtgtcaggtcttcttccatgggcggtgccgtggagcacctgattgtctcacgtatttgaccagcaacaagggacgaagattggagctgtgtgaattgtgtgcaggcaacacgggtcaggagcatttcatttgcctatggccgaagcttccatgcttgattcttcaaacatccaatgcagatcccttttctctgatggatatgctgatattcaaggctgtggaagagcaggtcaagaatagagtagagcataggcaaggatcttcgagcagaatgccactgatagtcaacgacaagagaaaccaattgcgttgtatgggttttagatcataa

SEQ ID NO: 41988 - DNA, 216 bp, Zea mays
  Peptide Sequence Number=SeqID_85363
atgcagggggcgactccaaggcatcgtggtcatgtcctagttgaggagagagaggggctggctagtgggcccgacagcatagcggcggcggctggggcgaatgcgcagcgacgcgctaggggtgtcaaagaagggggagcagtcaatgatgaaatagatgaggcattatcctcttacagggatggaaaagaggaggtttcaaagggtatgttcaag

SEQ ID NO: 41989 - DNA, 510 bp, Zea mays
  Peptide Sequence Number=SeqID_85364
atggtgaagctgacaatgatagctcgtgtcactgatggccttccactggcagaagggttggatgatgggcgagatctgaaggattctgatttctataagcagcaagctaaacttcttttcaagaacttgtcaaaagggcatcatgaagcttcacggatgtcaattgagacagggccctactatttccagtatccttgtgccgtttatgttccttataagactaggaaactgtatttggatacaagaactcaaagaaacctcgcaaaactgaatgatgaactctatgaggtgcatcaaattatgactcgcaatgttcaagaagttcttggtgttggtgaaaagctagaccaggtcagtgaaatgtcaagcaggttgacttctgatacaagaatatacgcagataaggctaaggacctcaaccggcaggcgttgattcggaagtatgctcctgtcgccattgtcattggggtagtattgatgctgttttggctcaagaacaagatatggtga

SEQ ID NO: 41990 - DNA, 694 bp, Zea mays
  Peptide Sequence Number=SeqID_85365
acatggcccatttggccatctatacctccgcacgataatgatggtcctcgtctcaattgccaccacttcgttcaccatcccgtttcttttctctctccccacatgcctccacctccgcatcaccacattctcgacagagggcgtaggagcaggcgcctcctccctgtattcgtcttacaccagctccgacaccgactcgcacagtggctattgcatgtccacgaggacgtttcacatcatacgcgcaccatcattttcgtcgtcgtcggacgtctcgttcatcttcccggccttcgtcctgttcttcctccccaacctgctgcccccgcccacggtcgtagtcgcgagccgaccgacactcgtcgacgtggcagaatcgcagcgaccgcgtcgtccccacgcggtgcggccgctgcgcattgcgggccgggagagcgagaacggagtggggaagatggagacggtgaagagccttctgaagccgaagccgacgccgcagcagcagctgcgcgagtggcagcgccgcctccgcaacgagggccgcaacatcgaccggcagatccgaggcgaggcagcccgcttctcccattctccggacccagactcaccctcgccgaatgtgcagagggaggagaagaaggtggagaaggccatcatggaggccgccaagcgcaacgacatgggatccgccaag

SEQ ID NO: 41991 - DNA, 657 bp, Zea mays
  Peptide Sequence Number=SeqID_85366
atggcgggtgctgtgcgcactggaggaaagggcagcatgcgcaggtgcctcatcttcctcctcctgtcctctgcggtgatacaaaaaggtaatattaaaccgtgtgatttggttaacgtatggatggaaaagaaaaggcaggctgattcagctttaatttgtgctaacttgcatcttgggcatccacgtgtataccgtgtgtataccgttctgcggaagaagaaggcagtccacaagaccgcaaccaccgatgacaagcggcttcagagcacgttgaaaagaattggagtgaacactattcctggtattgaggaggtcaacatcttcaaggatgatattgttatccaattccagaaccctaaagtgcaagcatccattcctgcaaatacatgggtagtcagtggagtaccccagacaaaaagtctacaagaccttctgccaacaattatcaaccaactgggccctgataacctggagaacctcaagaggcttgctgagcatttccagaagcaggtacctggtgccgaagccagcgccagtgcagctgcacaggatgatgacgatgtccctgagcttgtcccaggagagacatttgaggaggctgcggaggtgaaggaggtgcctgaagcggaaccggaagagaagaaagagtcgtaa

SEQ ID NO: 41992 - DNA, 164 bp, Zea mays
  Peptide Sequence Number=SeqID_85367
tgcttgaacagtattcgatgggtatatttgcttggcatattaagttttcatcaaatctgaagggcgtccttcgttctggaaaggccttgcctagaatgcctgcctggccacgccatcaatcagagtgtccggctgttcgggaggactgggaattggagaagtaa

SEQ ID NO: 41993 - DNA, 1764 bp, Zea mays
  Peptide Sequence Number=SeqID_85368
atgagtagcgggcgcgatttggttgaagaatttatcggctgtggagtgtggctcttggcacacggctgggtacttggcgaagtgtgcccccatcggatgccgaccctgggcgatcagttggtgcaaagtccatccttcgctgtggatttacgcggccagaacctgaccgcgtttgtgcgcgaagtggaggccgaggtcgcaaggattgtagggcgatatgtgctgaagactgagaacttgcggagttgggatatccgcggttcgaatgttcggttgaatcgtgtttttgagttgaaccgtctgccatatggcggctacccgagagacgatgatgccgttgttggtgaccgccggggaaaaagggcggtggcagcggttgacgaaggcccttcacggggagcagtaccagctgcgtccgctaagaagaggaaactaggtacagcagttgaggggttgggggcttccgatcgttttgctatggatttattgggaacttgtgcggctcccggggagaggatgtcttcgcccgagctccaggaatcttccgcgcgaatgctgaaggttaccgggggtcgctggcctaggaatgtttcgatcccccgggcggcgagcgaggacattcgtacgtctcgattagctcgtgagatgaagatttttccttgcgggcggaatgttgctgctgttgtatcggtagtgatggaaaaggatcgccaagacgcggcgcagaaacgtcgggcgttcgcgagggtcggggacccgcgccgcgaggtaaagatggcgtggggggtcgcgaagtctgccacccccgacaccagcaagcctccgttgggcgcgaactccaccgcccccgacctcagcaagccgctccctgtcgtgcccgcacaggagcgaaggcctccatccccgccacgtactgctgagacggaggtgggtggggccgaggtctccatgatcggaagctgggcaactgttgttgtctcggcgccggtggcggctgggtcggtcaccgtggtgactgggccgaaggggtcttcgcaggacccatggtccaagttttgcgccagcggcgagatcgcttcggccgccaccgctaaggacgtggcgggctcagttgcgcagcaactgaagcatgcggtcgccttcgccgaacggattgcgtcgggggccctgacctcggagttcgctgccgaaaggcgacgactcgaggggaggattgagcgcctctggacgcagcacactaaggccgtgcgggacaagtcggccgcggagaacaagagccgcaacctgatggagaagttgtcggctgcggaggccgaaaaagaggacctcggccgccgactggcggtggagaaggaggatgctgacaaggcctgcacggaggcccaggctgcatgcgccgatgccaacctcgctctccaacgtgctgcggaggcgagccacgggagcctgcacagctatctggacaaggcggaggcctctacccgcacagaggttgaccaagcgcgtgcgttgcttgtggacgcgtatcggcagcttggtgcgcgtacggccccctttgttgcgtccggtaaggaggtgggcttccgctttctcggttggttgcaagaggaattggaggtgcttccgtcgatcgtgacaggtctcatgtccttcgcctcgctcatcacccgtgagggagccgcgaatgccttgtcccgtgaggaatgcaggcacttcgaagtctttgatcgatccgacgaagacttcaaccgcgaaatcttctag

SEQ ID NO: 41994 - DNA, 831 bp, Zea mays
  Peptide Sequence Number=SeqID_85369
atggttgtgcaccatgataaaatgtttgaggagatgatcaagaggcagaatgatggtgttcgctcaaagagacagaaagtggctgagcactcatatgaagccgcaaatctggtggcatctaccccagccacaataagttttagcttacagactagttcatggtaccaactctccaaatgcaacatcattatattcatgttgcatttgagaggtggtattaagaacgaattacctgtggctggagctcgagtcatcagcatagacacatctaacaaaataatacttgtttctggaagggcaaatgctataggtgctgaatatgttgttaccaagattagcatgctgtccaaccgtgaagtacgcaaaatccatcttcctcctgaaaccaaagctgttagggatatgtgtatcctgcctggtggctctgctatttttacatcactaggaaggaggctatcacttttcagcatggcaactgacagcattgttcttaactgggatttgccggctcctggttggtcgtgtgcagtaggtgcatctggttcacatcatatttatgctggattgcagaacgggatggttgtggtatttgatatccgtcaaactgtgaggcccttgcgttgtatggtggggctatctgcaaatccggttcatactctccactctgtcattgataacaacggttccaggaaggttctttcagcttctgctataggtccctgcatgtgggatgctgatagcaaccaaagcagatccatgaaaaacgtgatgagattccgagtacaggtgtctgtggcttattattctctactttcaggccgcatttgctaa

SEQ ID NO: 41995 - DNA, 276 bp, Zea mays
  Peptide Sequence Number=SeqID_85370
atggagactacgctggacaagggggagcataggcacgcacggggaagtagagaaggtcgcacacaggcggcgtaccattcagagtcaggttggcatacattggtagaagttattctcgagcattacggttttgaagctgatgaagcggcggtcacattttttgtttgtctggttccagttgctttggatgtgtacataaaattttgggtatacaaataccttccaaggttatcacccagtgtgggcaacgttctggatgaaataaagcgtcattag

SEQ ID NO: 41996 - DNA, 486 bp, Zea mays
  Peptide Sequence Number=SeqID_85371
atgtggatcattctttattgtgtccttatccgtaaacatgaggttgtacaagctgtactgacaataagctgggaataccgtaatctttcagctacagctaggacagtaggccacttgtccaagagcactgaagtgatgaaacttgtcaacggcctcatgaaagcccccgaggtcgcagccacaatgcaggaattcagcaaagagatgacaaaggctggtgtgatggaagaaatggtcaacgatgctttagattcaacgctggacagcgaggacatggaggaggaaattgaagaggaggttgacaaggtcctcactgcaatcgctggggagaccgcctctgagctcccggatgctgtcaggaaggaaaaggagaagatgaagcagccttcaacaagtgtacctgaggagagaactgctatagcagaggctgttgatgacggtgagctagaccagataagggaaaggcttgccagagtgaggtcatag

SEQ ID NO: 41997 - DNA, 138 bp, Zea mays
  Peptide Sequence Number=SeqID_85372
atggcctccggcattttgaggatggcggcagtcgcagatcccggttggggggagcaggggcggcgggagggggagcgcgtggggcgagcgggtgcggcgtgcggcgtctgcgcggcgcctatcgcggcggagaggcag

SEQ ID NO: 41998 - DNA, 360 bp, Zea mays
  Peptide Sequence Number=SeqID_85373
atgtcgtaccacggtcttcctccttgtgtgtcgatgtttagtttctctggcagtgatgatacaaatcttcgtctgtggaagtccaaagcttcagaacaacttggagttcttcttccacgggagcgcaaaaagcaagagtaccaggatgctttgaaggagcggtacaagcatctcccagaagtcaagcggattgtaaggcatagacatctaccgaagccaatctacaaggcagccaacctacggcgtacgatgatcgaagctgaaagccgtaaagaggaaaggaggcgaaagcacagtgctcccgggagcatgcctgtgcagcccttcaggaagcggagaatcatcagagaagttgagtag

SEQ ID NO: 41999 - DNA, 655 bp, Zea mays
  Peptide Sequence Number=SeqID_85374
atgggagaggaaaaccaaatcgtgagcacaagcacaaacctcacgcccaagagctcctccaacaaggacaagttcagctggtctagaccagagagttttggagagaaaaccccagctcagctgtccgggggcaagttcagctgggtatggtcaaagagggcggatgcgcttgcagtagggggttacaagcgttcgcgagggagagagagagagagtgagagcctgtccgtcagcctgttctcccgcgcggccaccttctcgtacgagggccctggaccttccttttatagacgtaaggagaaggcccaggtcgaggttgagtccgagccctggggtcaggcgaggcggagaccgtctttcggggtcgaggttgagtccgagccctggggtcgggcgaggcggagaccgtcttccggggtcgaggttgagtccgagccctggggtcgggcgaggcggagcttcctatggcgcctgaggctagacttggctgctgtcagcctcaccctggcgggtggcacagcagtcggagcagggataaggtgtcagacgatccttgcattgaatgctcctgcgatatggtcggttagcggggacgatctggccaaggttgcttctccgagaagcctgcccgagttgggcctcgggcgagtcgaag

SEQ ID NO: 42000 - DNA, 849 bp, Zea mays
  Peptide Sequence Number=SeqID_85375
atggtcacccgagacggtgaccaccagttcgatggtggggagaagcaagccgggatgcggcctccgccccgccctcagcttcaaggatcttcatcatccttgctggggcaggggcgagctgagccagagctctacctcccgtatgggccggcgggccgcctcctccttcagcaatcagaggagagggcgctcaccggcctagcggagggggcggacttcgacaacgtggggccgatcggccgcaagcgtcgccagctccagcgtgcctggttcgctggctcagctggctctggcacagcttccggtgccacctcccaccgctgggcggagcgtggctatctgcctgttgtacgggcgactgttgcgccgcgcgcaccgggggaccatccaagacgtcgcgcgctgttagggcggcgttcgtgttcttgggctgtcccgccctcgctccggcacgacgcctccgcgcggaggtcgatgctcgcccgtccgggaggactcgagtggggatctaccggtgggcaggtggctacggccgttggtgctgaggtggtggccgccggagaaggcctcgccgccgacgagatcgttggcgccatctgcactccaggcctccggcactttggctttgatagcttgtcctcgcccctcgagtggggacgtgggcgaggaccttgccgcagcagcatcttccctgaggtcatcgctgctgctgtttggccgctcggagcggaggtcattgtcgctgctgcagtggtcggcgatgagccacccggagcttgtcgtcccgcaggccctccgatgtgggggttgttcgtacctacgggggtggaaccggagttccatttgtaa

SEQ ID NO: 42001 - DNA, 471 bp, Zea mays
  Peptide Sequence Number=SeqID_85376
atgcggagttcgtcgtcttccggggctgagcctgagtccgagccctggggtcgggcgatgcggagttcgtcgtcttccggggctgagcccgagtccgagccctggggtcgggcgaagcggagttcgtcgtcttctggggctgagcctgagtccgagccctggggtcgagcgatgcggagtttccaatggcgcctgaggccggacttggctgctgtcagcctcactctgtcgagtggcaccagcagtcggagcggcgcaggcggcgctgtcctcttgtcaggccacttttgcattaaatgctcctgcgatacggtcggtcgacgtgacgacttggccaaggttgcttcttggcgaagactgggcctcgggcgagccgaagctgagattaggagtcttgagggtacccctaattatggtccccgacacttccccaacgaatgccatacatgtcttatggccaaggaaaagaag

SEQ ID NO: 42002 - DNA, 1461 bp, Zea mays
  Peptide Sequence Number=SeqID_85377
atgaggcgaaaagacggcgggtatcccccatccgggggcttagaaggtggaaagacacgatgcataagggagcgcgaagacatggtcgccttccaagggggtcaccctccttttaaaggcgactatccctactcgcgtccccagccgtcacgggctgagtcttctccaacacgctccaaggccctcccctgcggcgcgggggctgggtcccacatgtcatgcaagccggctcagagcagaagaagccaaaccgccgcgcgcggtgcacacgaccgcccagcggttacaagtgaccctccacttttgccccgaccaacgggcgaaaggggcgggcagccatgcaggcggcatgcaaccgcgccaagtgggcgcgcttctccgactcccaacacgcccagcctggaggcccaggcccacgcgtcatgcaactggcgcaccgactgcttcgtgcatgcaactgcaccgccacttgcgccactaccgcgcctcctcgactgcggaaccaataccgcgactcgaggtgaccccagcgcacgacccagcagcgccagcctggcgccgcggagaagcgggcgacgcttcgccttcgccataatgaccacgccagtaaaggctccgagcctccctactgatcagaggttcgaaggctggcccctcgaagggttcgacagccgcctcagatcgcgtgggccctacacccactactggtcagaggttcgaaggccggccccccgaagggttccacggtcgcctcaggctactcgggctctgtgcccattactgatcaggggttcgaaggctggcccccgaagggttcacaaccgcctcagacgccgagcgagggatgaccatgggtacgttcgatacataaccaaggctcgggctgcgctcccgaggctcgggggctgctctcgcaaacccggctccggccgaaccgttgacagtgtcaacataccagcccgagaacttaggacccgaccgtacacccgggctacggccagctcgcatgagggaacaaccagaccagccgaagcattacgcgaggcattaagacctcggaggagtgaaaccactcctccgaggcctcgggggctacacccggcgggtgcgctcgcgcgcacccaccggaacaaaacgcaaccgagaaaggctggtccccttgcaaaaaagtgcgacgaaagcctccaagcgagtgctaacactcccttcgaggctcgggggctactgtcggggaccataattaggggtaccctcaagactcctaattctcagctgggctcggactcgggctcagcctcggaagacggtgaactccgctccgcccgacccagggctcggactcgggctaagtcccggaagacggcgaactccgctctgcccgaccaagggctcggactcgggctaagtcccggaagatggcgaactccgctccgcccgacccagggctcggactcgggctaa

SEQ ID NO: 42003 - DNA, 264 bp, Zea mays
  Peptide Sequence Number=SeqID_85378
atggcggcagccttcgatgcttacaccgacaagaacgccgtcttccgccgtctcaaggccaagcccgagaacaagatgtgcttcgactgcaacgccaagaaccccacctgggcctccgtcacctacggcatcttcctctgcctcgactgctccgccgcccaccgcagcctcggggtccacatcaccttcgtcaggcttacaactccagctccacgattttctggagcacctaatgacctactccaccaaattttccggagctag

SEQ ID NO: 42004 - DNA, 651 bp, Zea mays
  Peptide Sequence Number=SeqID_85379
atggtggatactaagggtgctgatcaccagtgggacggcaatcttttcgcaactgttggtgctcaagttgatatatgggatcctgacaggtcagagccaataaatagcttcgaatggggtaaagatacggttctttctgtgcgatttgatcctggagactctaatattttgattacgtcgggcaggggatttgagggagtggcagcgggctgctgtgccacagtactgcggcacaacagtacccacggtgatcggagtctgacactctatgacttgcgtatgtcatctccagctagaaagctgataatgaagacaaggtgcaattcagtatgctggaaccctagagagcctatgaacttcactgctgcaaatgaagacacaaactgttactcctttgatgctagaaaattagatgaagcaaaattgttcacaaaggccatgtttcagcagtcatatatctcgtatccatatgaagatcatatgggtattgaggaaaggatggatattgactactcaccaacagggcgtgaatttgtcactggttcatatgatagaacagtaaggaattttatatatcttggagacacggcggaaagaattacccacacccagagggaaggcagggtcttctttgttctaaactaccggtaa

SEQ ID NO: 42005 - DNA, 177 bp, Zea mays
  Peptide Sequence Number=SeqID_85380
atgggcaacaatccatggggattggttgtccacgggataaaaattggaataaggattaaggtgtggtaccgttctctggaggatatggttgctggagtgacttggccgtccatcttgccaccgggttggactgtcgagtgggaccctacctcggctgaggaggagcatgaggagtga

SEQ ID NO: 42006 - DNA, 120 bp, Zea mays
  Peptide Sequence Number=SeqID_85381
atggcaaactcaactttccgctctggtggcatacccggcgggactaactcggtcaccacttcctctcctagtggagacaccaacttgattgtccttttatcacagctgataactgcctga

SEQ ID NO: 42007 - DNA, 549 bp, Zea mays
  Peptide Sequence Number=SeqID_85382
atgaagctcttcgacaacagtttccacaagcagccgcttgggtgcaagcgacctctcaaggggagagatccaatcgcggctaccatcatggcagaagcggccggcggcggacccctgctccccgaggaactcattatctgggagatcctaacccgtctgccggcgaagcccctcctccgatgccgcgctgtctgcctctcctggtgccgccgactcacctccgacgccaaattcctcctcgcccaccaccgtcgccagccctcgctcccgctcctcactgaaggggacaggagcaccgaggagaggaggatcgacgccctggactaccgcaccggcgagcggcgccccatcgcgcggacaacaggccggaccgccgccaacggggacgacctgaacgtgctggcttcctgcgaaggcctcctcatcctcctcgccaacggcggcctccagatctgcaacccggcgacccgccagcgcgcgccactcactcttctccacggcgcctattgcatctccgcgctttatcctcacatccacgaatcaagctga

SEQ ID NO: 42008 - DNA, 681 bp, Zea mays
  Peptide Sequence Number=SeqID_85383
atggcttcttgtgccccatgctcccttgtgcgtggaccccgttatgggtgcgggcagcacgtcctaggcgcagtggctcggtgccccggcgctgcagcgtggcggcccgacggcctgccagcgcggcgcgctaggcggcccgcaccgaccagccccgggcgagccttccccggcacgatagtgcagcgcgcagccccggctgggcgcgtccctcggcgcagcgaccagggcgcggctgcctgcgccctacgcggcctcgcagccggccggcgtggcatgcggtgcccggtgcggcatgcgcagcccagcgcggccccggagcgcagctcggtgcagccgtccgtggccctacgcgccccggcgcggtgcctttgccccggcgtgcttcgcgtggccccgatcgcgattcgtttccgagcttcaagggatcgaagatcaagggttggtgaccaagtgatctggttcttcgagttctatgaggctgaagatcctgagcatctgtttgccgtgctcacggttatgagcggccaagggaactccattgatttgagaaacttgatcagaaatggttggattacaggtggtgatgaggatgatgtttatgactatggtaatggtaaagaagaaggtgtcgaggtagatctccaggagttccaggacttcgatgagttcgaggattag

SEQ ID NO: 42009 - DNA, 87 bp, Zea mays
  Peptide Sequence Number=SeqID_85384
atgatgcctccttcgggtgtttcaacatcttcagtaataacctcagaagtggagcaagtgtacatccatttattactgactgattaa

SEQ ID NO: 42010 - DNA, 294 bp, Zea mays
  Peptide Sequence Number=SeqID_85385
atgacgtttactggcctcgccgaggatctcccacgacatcatggatcacttgagcacgatacactggcgggagctgcagcctggcgtccgaagggtgctggaggcgatgctccatgtgctcgtgcagaaaagccagctcaagcagacaccgtcacccaggccagtgtccccggggttgtgcactacagccgggacacggccaaccccatacgcgtcaatatcagggcagacttcgaatggggctactttgttggcctcgtcgtcggcgcggacgccgcgcgtctgcgtacctag

SEQ ID NO: 42011 - DNA, 363 bp, Zea mays
  Peptide Sequence Number=SeqID_85386
atggcgtcggacgacaacgtgaatgcgttccggcacatggagcagcaggcggcgccgagggcagcgccggaagggcaacctcatcctgcattcctgctccccttcgacaagtcctcggacggcgcgcggagcatggccaacaacgccatccgctccatcaaccggagcgtgctgcacactgcagtacgcgtcctagtccgatccgtcgccatcctcgtggaccacggcctcgcgtcctggtcggcgtgcgccaccgcctgctccagtggacggcgctctactcctaggtgtcgccgacgaccgcgaggcgctggcgtacgcggcacggatgccggatgccgaggccatgtcgctgacgcctga

SEQ ID NO: 42012 - DNA, 225 bp, Zea mays
  Peptide Sequence Number=SeqID_85387
atggcgcggctggacgaggtggtccacgtcctagacgcgggctccggcagcgaggcggccagggagagcgccgcgcgggtgctctgctcttcgaatttcagtaagaactggagcacgggcgacgcttgcacggggcggtgggcgggcgtgggctgctcggcggacggtcaccgcgtcacctcgctgaccctgccgtcgctggacttgcgcggcccgctcgactag

SEQ ID NO: 42013 - DNA, 300 bp, Zea mays
  Peptide Sequence Number=SeqID_85388
atggccgcatcgcccggcgacatcgtgcctgtcgcctcgctctcgcctgcactggagagcgtgctcgggcgagaggagggcgggagcggggcgacgcgctggcgcggtgggcgagagcgcgaggcgagacctgaggctgtagcctgctgcagcctgtgcactggagcagcagaggcgagagtggaggcgagagctgacgtggcaggggcgagagggaggctgtgcactggactcagcctaagtagcaccaaggcctccctgttggagccctgctatctcacaattccatatggctgcaag

SEQ ID NO: 42014 - DNA, 219 bp, Zea mays
  Peptide Sequence Number=SeqID_85389
atggacaggtgcacgccgggaaggggtggtgcgactgggaaggggagcagggcgtcgctggagatcgaggtgcgctcggcacggaggagcacgggcgcaagggagaggtccgacgccatggagaagatggccgatcgcgcagggagaggtctggcgtggggttgtagccatgttgttgggagccggtcgcggaagaagcttgccgagcgtgtgcaatag

SEQ ID NO: 42015 - DNA, 309 bp, Zea mays
  Peptide Sequence Number=SeqID_85390
atggagtgggacagcgagtccgacggcgccggcagcgtcggcgtcgacgagcaggaagaggagcaggaggaggagcggggaggcgagggaggaggtgttgacgccggtgggatgttcacgctcgcgattgaaggcatgctgcgcgcgtctggtccgtgcgggctcgtcgtcaccaacgcgctcgagcccgactgtcccatcatctacgctaaccgcggcttcgaggaggctacgggctaccgcgtcgaggagtttcttggcaggaactggtgcaacgattgctgccacatagaatcgagcaaaacatag

SEQ ID NO: 42016 - DNA, 1143 bp, Zea mays
  Peptide Sequence Number=SeqID_85391
atgtcttctccccctgacccaacccctccccccgaccccaacccatccccttcctccaccagccaccacagcccctcgacggttgccactccggcgccggcgaccacaccactgccctgtcctcttggcttctgcgcctctcaggtggggcggtccaaattccagcgatgggatgacaacgcttcgggttcctcctctggtggaacagtgcactcctataaggaggcccttctttcctcatctggcgccacctcccaggagttggacgtaaacacttctactgtagcgaggccgaagctctgtgacaaggagaggaggctgcgtcggcgtgaggtcctggtgccggtcgacaaggaggatggctggcaggtggtgaagagcagaaagcagtttcgttgtgcttctgcgcggagagggaccattgccggccctcagaagctgaagaccccaggccgcttgcgcgacctcctggacattaaggtctcacccctgcagcgcggaactgggagtgctgctcctccaaagaagaggtcggtttgggtgcgtatctctcctgcaccccacacattcgaccggaagactgatcagccatctccaatgttgaacaactgtgccccggctgttgatcaacgttcctttcgcaacaagaggaaaagaaggtccaagagtaaaagaggaaaaggtcctgctgaagctgcgggaactggtgcgtgtgtggattcccctccctcatcttctgaagctcattacactcagtcgaggatggaatgccacaacacatctcccccaactgttgtaggttcacgtgttcttacgttcactgatgagatggcaagggaagagatcaatttacgcaaagccatgttcgtcaccatcgcaggtaccagacctgtagtgcagggatcagaggtgttggatgaggtggctcgcagctttggagtatgcattgataaaatgtccatccaccattcctcaccggaggatttcctacttttcctgccggatgaggaaactgcctccaggattttcaatgggggcagattactagtggaatccctgaacatgcatggtcttgctccactgtggaagctattcttgaggactcatgtcatattgttgaggtccattctgataccctgctga

SEQ ID NO: 42017 - DNA, 507 bp, Zea mays
  Peptide Sequence Number=SeqID_85392
atgaccgggaaaaagaccatgaccgggaaaaagaccacgacttctctatggaggatgagaaagaggcaggcttatctatggcggcactccaaagaaagccaagttagctacacaattgaaatgccatgtttgagttttggttgtgatggaaatgccttgtttgcaattttgattgtgatggaaggaggaagtgtacggggcaagggaaaagagccatatattggtgaaggaaaaatttatggaactcgcaaacaactacaatgttctattgatgacccatggagtcatggtgagaagtggaagaaacaggaatttaagtgtgcttattgcgggtgtgctaaggagagtggaggtaagacccgtctaaggtgccatctagctggtttgtcaggagatggcaagtcatgcctgaatgtaccaaagcgtgtgagggagacaaagatcatgaaggacataccttcatcattgcagtatatgttaatgaaagatgaagcatatgaaatataa

SEQ ID NO: 42018 - DNA, 291 bp, Zea mays
  Peptide Sequence Number=SeqID_85393
atgtgccatgtcaccattcagaaacagaaggaaatagcagaagctgcagctcagcagaaccagccaaagcagacttacggagtccaaaaagtcgccgaggcacaaaaagccgtttctaaggcacaaatatcttcgaagctacaaaagtcgttctacggaacgcagcgatttctctcgaagcataaaaactcttctttgcgaagcatgaaaagaagggaaggtgttttttcgccgaaggctcaaaaacgtggctcgaagggcttcaggggggagataattcggttgtggtag

SEQ ID NO: 42019 - DNA, 807 bp, Zea mays
  Peptide Sequence Number=SeqID_85394
atggaggctgctgccgctgcttggtgttttggagggtgggctgctgtgcgccatggaagttgcaaggggaactcgacggggtggctgggacagcaggcatggtgttgtgctgcgcgttgctggccggaaagcagggcatcgtccatgggcgacggcggcctcacctgctcgagctgggggggtcggtccggccagaggagagcaggggcgaggggagggggagctgctgctcggccacaccatgggagagcttcagcgcgccaagacagaagggcagagagcacgcagggaggtggaggcgccatggggaggagggtcgagctgagccattggcatcctgtgcgctggggaaggaagctcgggaagggggcgccatggcaaggaggaggagcccggcgagaggaggaagaaggagcagggacaggggccaccgcgccctggctggccgagggaaggagcaggcctgggcgccatgggaggaagggaggaagctccctgcgcgttggggaagaaggcgtgggggagaaaaggctgatggcggctggaaaaataataggggtgggaatgcaaaatgaccaagggcaagggagagggatccgtatttatagagaaatcctagggttagggtttcttagtgggccaaatgggctggaatgggcttggcccaaaatactctattgggctgcgctaaattatttccggaataaaaatgctctcgcggagtccgtcgctacggagaaacagagcgaaaagagttcggacgaacggaaggttgagcgattaattcggtcgagagtcaaattttga

SEQ ID NO: 42020 - DNA, 1016 bp, Zea mays
  Peptide Sequence Number=SeqID_85395
gggtcgaaaactgctacgtgttcaagagccggctgcaggagtatgctcagagggttggcattccaaccccggagtaccacacgctgaaagaaggcccatctcatgaacctgtcttcaagtccacagtgttcgttaataataccaagtatgagtcgctgcctgggttcttcagccggaaggctgcagaacagtctgccgcggaagttgcgctcatggagatagccatgtccgctccggtgaccgaaattaggaacatgccagcagttcaagaaactggcctgtgcaagaatctccttcaggagtatgctcagaagatgaattacgccattccatcttatatttgcactaaacaagcttcgggtgtagctcctttcgtatgcagtgttgagattggtggcatcctatacattggtgctgcagctaggacaaagaaggaggcagagataaaagctgcccgaactgctcttcttgcaatccaaagtcaatcagaaggtggtgcaaatggtgccaaaaagtacattgttgttcctgggcaaaggccagataaggagacgaataaaaatccaactgaaacccccataccacttagagtcaagaagcgtggagataggatagtacaattggagccacccagagatcctgcagaggtccaatataacaaggaagctagaagtgttgaacaggacccacccagagatcctgcagaggtccaacataacaaggaagctagaagtgttgaacaggacccacccagagatcctgcagaggtccaacataacaaggaagctagaactgtcgaacaggacccacccagcaacacagaagtgtggaagcctgacaataaggctacaactacagagcaggagtcggtgagcgctttcatagcattgagatctaatggggattctacagatgtggaggcggcaccaggcgataccttgatgatgcagggccaggagtcggaagccacaatgcaagaagcatctcacgctggtgaacaggcccagcctaactag

SEQ ID NO: 42021 - DNA, 681 bp, Zea mays
  Peptide Sequence Number=SeqID_85396
atggcaaaaaataaaaccgacttaaaaaggaaaaggctattcagacctcgatgggttactatagaatcattagcaaatcatttgagaacaagtccccaacatcgtccaactctcttcagccctcctgacagcttcttgactcccgtgaatagcaatgggcccttgttccgaagcctttgcaaagatgatgtccgctgcgctgcctgtgtcaaccagaacattgtggaccagaaatcccttgatgacacaagatataaccatggcatcattgtgaggataatctttgagctgaagatattcctgggagaagagcttgaaccacctatgattgggagcaccagctttctggccaaaggtgctacaacttggttgttgtgcgaagccatcgtcacaactgtggaaggactatgcagtcttttcctctttaagtcggtgtcatccttcgtctttagcatgtcaccatgccgaagctccttcaatcgtagcttcggcttatatcttcatgccacacctgcttatgtattgtcctgccgaaggtaccttcggactcgggttaaaatcgtacacgatgtgaagagcatggtcgagacaaaggctgatgttgctccgaagctatgcacaagggagcttcggctcaatggcggaaaaaggaaccgacttaaaggggaaaaggctatctag

SEQ ID NO: 42022 - DNA, 1587 bp, Zea mays
  Peptide Sequence Number=SeqID_85397
atggtgtaccaaagcctacatcaaatgagttacacacagtatatcccactttcaattactgatcttgattcatggctgaagacaccttccatttatgtttttgattgctcagctgctggaattattgtgaaagcctttctagagcgcctagactggagttctacctcctcggcatcttcgcagaaggatttcattcttcttgctgcctgtgaagcacatcagacgcttccccagagtgcagaatttcctgctgatgtgtttacggcttgcctcacaacgcccatcaaaatggctttgcactggttttgtaagcgaacatcactccatggtcctctggatcgttctcttattgaccaaattcctggaaggcaaaatgaccgtaaaacacttcttggagagctcaattggatttttactgctataacagatactatcgcatggaatgttcttccacgtgatctgttccaaaggcttttcaggcaggaccttcttgttgccggtctcttccgtaacttcttgcttgctgagagaatcatgcgatctgcaaactgttctccagtttcttatccgttgttacccccaacacatcaacaccatatgtgggatgcatgggacatggctgctgagatttgcctttccaagcttcctcagttaattgctgatccaaacacagagtttcagccaagtcctttttttatggaacaattgatggctttcgaagtttggcttgatcatggctctaaggacaagaaacctcctgaattgttacccatagttcttcaggtcctgcttagtcaaccacacagatctagagtgcttgttctgcttggaagatttcttgatatgggaccatgggcagttgatttggccctgtctgttggaatatttccttgtgtgctcaaactgcttcaatcaagtgctatggatatacgtcaaaatctagtgtttatatggacaaaaattctctcccttgataagtcatgtcaggttgaattggttaaagatggaggacatgcatattttattaagtttcttgacagtttggatgctttccaagaacagcgtgcaatggccgcttttgttatagcagtcattgtggatgggtataggatgggtcaagaggcttgtatgaatgctgggcttatggatgtttgcctgagacatctgcaacctgagaattctcatgcacaaacagaacctttgcttttgcagtggctttgtttatgccttgggaaactatgggaagatttccctgaggctcagttacttggtctgcaaacaaatggaccagaaattgtaatatgcttattgtcggagcctcaacctgaggtcagagctgctgctgtttttgcacttgggaatctccttgatactacatcaaatagtcatgatgatggttccgatgatgatgaaaaggtgaaagctgaaataaatgtagttcgaagccttctgcagatctcttcagatggcagtccccttgttagatctgaggttgctatagcgcttactcgctttggcgttgggtcacaacaaacatctcaatctgttgcttccgagtattggaaacctcacccaattcattgctga

SEQ ID NO: 42023 - DNA, 339 bp, Zea mays
  Peptide Sequence Number=SeqID_85398
atgggaaattggagagttgtggtggctaatcggcggcaggagcgggtgctcgggcttggtgatgacccaacgcagcagaccatgccgtcaatttatagtggcgctaagcggtggccgatatacagcttcaaagttgacccaattccactgaaattcagacttaactcaatagagtttaagtggggctttttgcaaatagttctaaatctcaaggtttactttgcaaatccacatacatgtgaatcatatgagttaagcggggacagattccccgcggggttccccatggggataaattccccgacagggacggggacgggagaaaaagctcccccgtga

SEQ ID NO: 42024 - DNA, 267 bp, Zea mays
  Peptide Sequence Number=SeqID_85399
atggtggagggctcaccggagaagacgacctcgccggtgccgaggacaatttcgctgattgaggatgaaccattggtcggatcgacaaatcgaaggcaccgagatgaagctctcgacgactcaaacgtagcggtaccctcggattccaccaacgacacacagatcaaaagtaattgcttgccagagttgtcgccggagttagaaccgtcccgaacatcggcgagcaatttcgggagcttcggatctagactagggatggggttttga

SEQ ID NO: 42025 - DNA, 51 bp, Zea mays
  Peptide Sequence Number=SeqID_85400
atggcaaaacttgtctttttggtgcaactccaggttagaactataaattag

SEQ ID NO: 42026 - DNA, 882 bp, Zea mays
  Peptide Sequence Number=SeqID_85401
atggatttactcagcaagtcttacccgactaaagaaaagactctcaagggtatgctggttatcagagagtcaagggcaagactaagcatagtaaaaaccttttgtaaaatagggattcaaaggaaggtaatcaaattcaaggaaggtaatgcaggaattgttttagcattcaactcctatcacctaatgcatcaagcaagtgagaaagtttttaaaagaatcaaggaggtggcaaatgcaccggggcttgccttggtttacagatttccaaagtttcatagaaaaagaaaatggaaaagcttgaacagtgctgggctcaattcagtcgcagcggcccaaacccaggtggaaagcgcgcgcgcccgcgcccgcgttgcagactttgcacggaggcccctggcgttctggttaactcgaagtgggttctttcactgttgctttgagtcactgacagttttcaagaagaccccccatgttctattccttcacacgccgagctcctcgacgagcacaatagcggtggcgctcgatttggcagagaagtgctggcggctggagagaaaaagggcactggtacttggaacagatggctttcaccgtggcagtcctccggcgatcaccggacatgcactctatgattcaccaggatgcgggctagcgcttaagcacgtggcgcgcaacggtgacagatcaacggcggtgaaggttatcccgatcgacgatgagcaaggggggtgtggcgagcttatccgcggccagactcaagctgatccaggcaccaagatctttacccgctcgcagttatccacaatccatagcgcacgaatcccggcgatcatcatgaatcacagcgcgacggtcatcggcggtgaggttcactga

SEQ ID NO: 42027 - DNA, 195 bp, Zea mays
  Peptide Sequence Number=SeqID_85402
atggcgtcgttgattgtgactcaatggcgctcctactcatccagagtttggtcacctttcttccgagtatctagctcttcagagcttatgcttggtaccatggatgttttgatgattaggaaccttggagaggaccaacaaggacttgagaaaggacaagatatcaaggaggagaagctaggacgttcacaataa

SEQ ID NO: 42028 - DNA, 684 bp, Zea mays
  Peptide Sequence Number=SeqID_85403
atgacgcaccagcttgagaagaatgtagtagccagcacgtattgcctggaggagtttgaggaccactatgtcactcgacatactgcttcatgctctgtatgctcgcgagtttatccaacttcaaggttgctgagcatccatgtttctgagacgcacgactcgtatttccaagcaaaagttgcccgtggttttccaatgtacgagtgtttggtggagggttgtggtatgaaattgaagagttacaagagccggcagcagcatctcatcgataagcatcagtttcccaaatcatttgagttcttcaaaaaggcacgggactcccagcgtcagcggcagaagtcccagaggaggcagactgctcacaagggtgaagagacaagggataattcgatggacgtcgacggaaaaggtgcaaggcaaacaaaccggaggtaccggctgaagcaacatgatcatagcgaaccgaaagagaacaagcagcagcataaggaggcccaggaggacgaaatggaggtcgagcagaagattgatgagctcacctctgctgtatcgaggttgagcacagcagattctacgccctcaagcgtcacctttggccaccgtcgctctcgtggccttacgtttgttcccaggtcaatcaggcagaataagcaggcggccctcccagctggaagcaacaaatga

SEQ ID NO: 42029 - DNA, 147 bp, Zea mays
  Peptide Sequence Number=SeqID_85404
atgcagaagaagcctgatgacgccatggaggaggaggcggcggcggctcctgggccggagatagggttctggttggcagcacgcgcgactcgcccagagacccttcttcgctgccgggaactcgagcgcgagctccctgccaagcac

SEQ ID NO: 42030 - DNA, 186 bp, Zea mays
  Peptide Sequence Number=SeqID_85405
atgaagctgtggaaggagacttccaggagttccaagactatgacgagttctaggtgtgggttagcggcaacccccagtcggctgcctgtgaaggccgcgtttatctacgtttcttttccgcactttgatttactagttgcagggaagtcccttagcagcagccgagtgaaggcaagtgccctctaa

SEQ ID NO: 42031 - DNA, 166 bp, Zea mays
  Peptide Sequence Number=SeqID_85406
atggcgatgctcgtgcgaggagggggaggcagtgttaggatcaggcttggcggtggcggcgaggatgaggagtctgtccttggcctcgtcgtggttgcggttgtcgtcatcatccgtggagaggttgatgcaggagcagcgctcgagggaggcgaagaaggcagag

SEQ ID NO: 42032 - DNA, 70 bp, Zea mays
  Peptide Sequence Number=SeqID_85407
atggcgctggcggataacctcgcagccttactggaaccggcgttgctgatcataacgggaggaattattg

SEQ ID NO: 42033 - DNA, 651 bp, Zea mays
  Peptide Sequence Number=SeqID_85408
acgaggcggcggcccggcgggcgtggtgtcagcggaaggaagaagaggacggcattgctacgtaccgtcggcggcggcgggcggtctgcttcactcgagccagaactccggcgaacaaaaggagcagcggaagaagaggagcagcaagacggcgggcggctagggtttttacggagcgcggaaggcaaagttcaaacagcgccgacccccgcccccttttataggcaggggcgcggctcttcgggaaacccgcaatccgacagggcgcgacgcttcgggaaacccgcaatccaacagtacgccgtccatcaacggtcacatcaaaaacccccgcggaaccacttcgagcgagggcagcgtctccgccatctagcgacgccttcggcactaggtgactttgtcgaactggtccctcggagggcaaatgttggggcgaaggcaaagccgccacccttcgctcgaggcctccgccgcagtcgctggtctgacagagacaaagcgggcagggacacccttcgctccattcggcactttgacgaaggcctgcggcgacgcctttccgcggcgcggcctcgttcagtcctgaggcccacgtgtgatttggcccattgtaacgggccctgcgtggccgcctttgtgttacgggcctaa

SEQ ID NO: 42034 - DNA, 999 bp, Zea mays
  Peptide Sequence Number=SeqID_85409
atggtggggacggcggaaggcggcgcggagagggcggtgcggcggtgggtggacgccgccggcgggcgcctggtcctggacggcgggctggccacggagctcgaggccaacggcgccgacctcaacgacccgctctggagcgccaagtgcctcctctcctccccgcacctcatccgcaaggcaagcccgcccgcccgcccgcgaccctccttaaggctaccctcactcttcgtccatatggactacctagaagctggggcgaacattataatcacagcatcgtatcaggccactatccaagggtttgaatcaaagggcttttcaaaagaacaaagtgaaaacttgttaacaaagagtgttcagattgcactggaagcccgtgagatgttcttgaaggaacatttggagaaatccactcctatacagcatcctattctggttgcagcagctctagggagttatggggcttatcttgctgatggctctgagtacagtggggattatggtgaagctggtacgaaagagttcctgaaggactttcatcggcggaggcttcaggttcttgctgaagcaggcccggatttgattgcttttgaaacgatccccaacaaattggaagctcaggcatatgttgaactccttgaggaatgtaacatcaatatcccttcatggctttccttcaactcaaaagatggagtgcatgttgtgagtggtgattcgttaattgaatgcgctactattgctgacaagtgtgcaaaggtcacagacaagcctattctgatatatcccaacagtggtgaaagatatgatggtgaaaaaaaggagtgggtggaatccactggtgtgtcagatggtgattttgtttcgtacgtaaatgaatggtgcaaagatggggctgcgcttatcgggggctgctgcaggacaactccaaacactatcagggccatacacagaactcttaaccaaggctgccacaagcatcagttacctgtagcatag

SEQ ID NO: 42035 - DNA, 459 bp, Zea mays
  Peptide Sequence Number=SeqID_85410
atgcgtggcgacattgaccagccaataacggcacgtgaccacaggtcaatgaccactgccagatacagccagccttcatctgtacatcacttcgaaactgctctccgtgattacaaagctcagctggaagaagatcctattgtccacaggcacctttcctcgctgtatgacactctcttggagcagaacctctgcaggctgattgagccctactcaagggtggagattgctcacatagcagagatgattgagctgccaatgaaccatgttgagaagaagctgtcccagatgatcctcgacaagaaattcgcagggacacttgatcaaggcgctggctgcctcatcatcttcgaggacagcaagactgaggagatcttccctgccacacttgaaacgatcacgaatgttggcaaggttgtggacagcctgtacatgagatcggccaagatcatggcctga

SEQ ID NO: 42036 - DNA, 312 bp, Zea mays
  Peptide Sequence Number=SeqID_85411
atgcaagcgtcaaagttggagtcgccgctcgagtccagggcactgacgccgtggaggaggcactgcctctccttcgcggagagtttcgcgacaacgcggtcaaggtcgtctggctgcttcttctccgcgacccgcacaggccctccactgccgacacggggcgacgacctggagcagcaggatcgcgaggagcgccagggtgacaccgcgtgttcacatggtcaagatctgcaacaaccaaaggtggaaccaatgacgggcggacagatgagggctgctgtgggaggaggaaggtatatttgtcaagagtag

SEQ ID NO: 42037 - DNA, 210 bp, Zea mays
  Peptide Sequence Number=SeqID_85412
atggaagctggatggttaactctctatgacatgatcttaacagattttgccaacaatgaatttccattaggcgaaggtctcatctcacggtctgaatcaggttccagacaatgtgatgagcacagagagcagccaccgtgccagtgtcagggggttggcttatcgcccacaacctggccagtcgtcaatgcccaatgtacacacctttaa

SEQ ID NO: 42038 - DNA, 303 bp, Zea mays
  Peptide Sequence Number=SeqID_85413
atggcgaagctaaccaagtggctggcgcggcttggaagtgactggagtgggctggccacggtggccgaggctctagtggcaatggcaggcagaaaagagcttgccgaagctaaggagtggcgtctggccggcgaagatgggcacggggtgaggtttaagattttgtctaagcataatggattaagacttggattgcctcttaaatgttttagtaggcactcaaggggtttgctggtttggttaagggtgggtttgaactacaacagtgatttaagtttctccaaaacttctaaggttacttag

SEQ ID NO: 42039 - DNA, 555 bp, Zea mays
  Peptide Sequence Number=SeqID_85414
atggctacctgggccgactggagatttgggtccaaggcacagcagagggtagaacaagaacagaagcaaagagccacgtgttcgacgcgctctgagctcgccagagcacgcccgacgcccgcccccgcgtgccccgcgtcacgccaaagccgagccggcgccgttgcccgcgcccgcgcccgcgcctataaaactcctagggactttgaccgtactcctccgcgcgcgctcgacctcaccagagcaccagatcaccggcattgccccgcgcacggcgtgcccgcggccacccgaacaccggccaccgtagaccggccagcagagcctctaccagccgcgtccgaccctcagagtagaccgtgcaagcctcggccggagcactcgccgccgacgagttcacccgcctgcgcacgtggaccggccgattccgaccaccaccgccgtcgagccgtacctcgctttgaccgccagaacctcccggagccaaccccacccctcgccggacctccctcgctgccgcgactcaagagaatagtggtgcagaggtataactga

SEQ ID NO: 42040 - DNA, 633 bp, Zea mays
  Peptide Sequence Number=SeqID_85415
gcgccccctgcaccaccccaaggcgtccccgctgttggaggagttgatggaggggatcctgatggcgacgacgatgacggtggtagttcgagccacaacaccacactttttgaggagcagcatagtcacgggttatacccggatcgctgggaggctacttgcttggtgcgccgaccggaggacgacctccgaggcgtagaggtctgctcagagcattattctatctctgagagggacactctcgaggcagccatgcatgatgctgcacgacttgcactttcgcagtattgcttgttgttcagcggggtggctgacggtcttaatctgaagtattaccctcgccgctcgactggcagcattggaagttggattgtctcaccagtaggtgaaggcaatcctaggttgaatagcgcagtcaacctagtcgctgtgctcaacatacagctggaccactctcttgacgagctaagaagggctcgtgttgagattgcagagttgcgggtggagcgccatcatcaggagtatggttctcctgcccccgctgggactcaacacccgtaccgctcaccaccacgagggtaccgtgcttatggcacacctgattgtagaaccaagctagatttggatcattag

SEQ ID NO: 42041 - DNA, 720 bp, Zea mays
  Peptide Sequence Number=SeqID_85416
atggctcttcccaaaccccgcccgccaacgccgacggcgtcagcggccacgggcacctcctcgtcgcgaatagactcgccatcgctaaaggccgcgctcgcaatggctctcatccactacaaccgcctccctggcaaagccaacgccaccgcgggcacatcacccccgtctctcctccactggaagcgcaaggccaaggaccggaagcgcgaaatcctccgcctccgcgaggagctcaaggtcctccaaggcgtcgtggaaattgagtttgttatcggagcagatggggtgcgcggggaggagatggagcccccggttgcgtcgtgccggtgccacttcttcgacgggtgccgggaccttcgaccgcagcagggtggcggtggtggggagcactgggttgacgaggtgctgaggaggaggtttctcagactggatttcaacagtgaggatgagatgcagcagctcagcatgtcgactgatttcctggtggagctatcagacggcatttttgccaaaagtgaagctggccactcatttgctacattttctcaccaagcagtagatttcattttggctacactgaagaacattctttcatcggaaagggaaaaagacttagttggggagataatcgatagtttagtgactcgtttgatgaaaaggatgtgcactgttcctgaaaagcttgtcacatcagattcagataccaggattgggtaa

SEQ ID NO: 42042 - DNA, 828 bp, Zea mays
  Peptide Sequence Number=SeqID_85417
atggctgaccctgcagcctcctccacggtgctggcgatcaccgctgctttgctaggtcttcggcggaaactctgcctagattgttctaggcgggtggcggcgacggcgcttcaacgtcatttctccttgaaggcgctgtccagaagcccttcgacttgggtggttgtcggcaatgcagaggcctttcgtcacttcgcttggctcggtggtgtttgggtctttgtcgctcctggcatctacttgcccccggtgctcggcgctgtggttccagactcatctgtgaagaatcggagcagcctcgcgtgggaattagagagaggtgttgataggattagagctcctatcagagagattgcgcagattgcgaagacgctacccttcgctccagggctccaggccctcgtcaatctcgctgcaccaacggaggtgaaacgaccggttctggggtttgggcctgcgcacgcaaccgctactgacaatgctatttttgtggcggcttcgaccgtggctgctggtgacgattcgtttggctctgaggagtcttcggatgaggacttggattattttgcagcgttggatgtggctgcgggggagacttctccgcgtgtggtgggtgctgaggatcttacgggtgcgaggactgggtgtaggcggcgaagggcggtggcgaaacggagagtgagtaaattgtcgcgaagtgataggcatcatcgtggtgagatggagggtggttgtcttcgtgtggatgggactggcaaacgcgaattgaggataatgctgttcaactacagggagatgtgtatcatcccgaaggttgagccaatgtaa

SEQ ID NO: 42043 - DNA, 204 bp, Zea mays
  Peptide Sequence Number=SeqID_85418
atgacaaatgggcaggtggagcgcgccaacggctcagacatcggcatggggaggagcagcacgctcggcgtcattttcaccctcgacagaatttggcccggcctcagacggcgacacgggcggaaggacctccacctcaaaggaggaagtcagcgccgcgcttgggacctcgacgaccacgtcaagcctctggacctcggctaa

SEQ ID NO: 42044 - DNA, 366 bp, Zea mays
  Peptide Sequence Number=SeqID_85419
atggccttagggcaaacgctactgctgaaaggccctcgttcatgtcccctcacgggggacgagaaccagccattaaagccaaagagccggaggcccgtagcgcaggtggcgctgacggtctcgtcggcggaggcaattgcttttgcaaggggaagcctcacctatggcgaccaccaccccagcaccgacgatagtgaccacctgcccaccaacaatgcaccggcgaacggaggctgccccaaagcgcagcggcaggtcctcactcccgtcctcgccgaggctgtcccagaacacgagtatcaccctcgcggcgtacgacgtgttgttcgaccccccggtgcagccgatggcacaaggaggacctag

SEQ ID NO: 42045 - DNA, 138 bp, Zea mays
  Peptide Sequence Number=SeqID_85420
atggcgaaggattgcactctcattatcacacaggagagggactttgctcaatttgtagccatagtccctgatgatgaggacatcctccactattacccgttggcaaagacgcaattggcccagttggcccaattgtag

SEQ ID NO: 42046 - DNA, 309 bp, Zea mays
  Peptide Sequence Number=SeqID_85421
atggcggtgttgtcgcgccatgccttagtctatgcttggtatttgttcagttcctctagggcaaggacacagtctccgtcgatgaggtccttggaggttggctcgtcgacgtcaggagtgggtgtggggcttgctcgtggagatccgtgctttagctcttgcggcatcattgcttccaatccgtacatcaagcggaaaggttattatggatacagctctggcctcgatccacttggtgaagtattcaacgacgacgaaggtgaatttgagattgccttgggctgtaggcagtggtccgatgatatctag

SEQ ID NO: 42047 - DNA, 887 bp, Zea mays
  Peptide Sequence Number=SeqID_85422
atgacaactcaattaaaggactaacaagtgtgctaagtgttgaacaggtgcttaatgcaaagctaacagggttcaacacaaagacaaccgatcaagccaaggatggaggcaagaagagcttcgaggtaccgagtgcacgggagaaggtcaaggagaccaggaacccaaagccaggggtgaagaagaagacttgcaaagtcaaggttgatcgagttaagaagagttgtgagtccaacatcgacctcaaacaagccaaattgggtaaaacaatgaaaaagagaaagtaccattctgagctctgctggaggacaaacagaaaagctaggagaagaacaagaaagatggaaggctgggagcttccaaatgaagctccaacggctcctaggccatttggggctataaaagggacccctaggcgcctcaaacaagaatataagtgcatccaacaattatctgagcaaatggaggaaggagttgaaatagactccaagcccagggaactttcaccaccgcggtcggccagtagaaaccttgtcggaaagcgtttcctacgagggtccgaggtgttgcatggtgactgcaagcccccgagtcaaaacgaacgactaggcgcgccgagccagtcgccgagcttcggccttgtcgaggggcagctctcctcggaggagatattccaggtacggggtctgccagtcttggtttggagcaacctcattctgctctccctcgatgcgcatggcctcaccctcggcggccgagggtacctcgggctgggccgaggtcccctcgggttcgggcgtgtcgttgattttgacggatggctgatatatgtccctggagaagatgtccgggggaactgtcgttcgccccgaggctattttagttag

SEQ ID NO: 42048 - DNA, 261 bp, Zea mays
  Peptide Sequence Number=SeqID_85423
atgaagagcctgttcaagattaagatctggtggtcgcatcggtccaacgaccccacgtccacagcggggcagtcgcaacagacgtcggggccgcctaccgcgagctccccgtcggggacagtgccggcgacagcgctttctgtttcgacgccggcctcctcctcaccccctcccacggtggcgacgctcacgggcgctgctgctgctgtggtggctggagcgggagaggaggattacatatcgtcgtcggaggatttctag

SEQ ID NO: 42049 - DNA, 173 bp, Zea mays
  Peptide Sequence Number=SeqID_85424
atggagcacgcggacttgagcaatcgccagatgctcgaggaaatgcggctgatggaagcgcgtctcgccgagaaattcgtcggccgctgcgacgccgtcgagaagtgcgtcgaggagtggtgcatgatctgcaatcactcttcacggggcggtgcaattcgctccaggagcag

SEQ ID NO: 42050 - DNA, 204 bp, Zea mays
  Peptide Sequence Number=SeqID_85425
atggggttcgtccccctgcttgctcagggcgcggggcgacggtccgaaccagcgttggtgcttgcgggtggtcttcctcgagcgcgatggtgggggcggagccgagacgagggggatgcagagggggaggtagcgcgtcggagacatgcgggtgtagaggcgagtctgagggtgcacgaacgcaaggaggacgtgcaacgttga

SEQ ID NO: 42051 - DNA, 381 bp, Zea mays
  Peptide Sequence Number=SeqID_85426
atgaccaccagccttgtggtggggagaagcaagccgggctgcaggctctgccccgccctcagcttcaaggatgttcatcatcctcactgtggcgaagggcaagccgagccggtgttctacctcccgcatgggccggcaagccgcttcttccttcggcatttggggggagaaggacatcctccagccctgcggaggagacatcctccagctacgcgggggaaggcgaactgctgctgcctggacagggtgcagctgtccgtcctccacccgggcgacggtcgtgtcgtgcgcgggccggccacgcccagcgaggacgggagtgaggacctgtcagtgcgctttggggcgaccgccgttcgccggcgcggcgttggtgggtag

SEQ ID NO: 42052 - DNA, 260 bp, Zea mays
  Peptide Sequence Number=SeqID_85427
atgcctaccgacacgacactcgacaatgaaaactccaatgggccccacgacagcatctatgtcgagagccacaaactgacactctgtaaagagggagcctttgtcgagtgcttgccttcctggcactcggcaaagggaacaccaatgggcccctttgcaagtcttgttatcgagcgtgctgggccggcactcggcaaagggagcttcttgccgagtgccaggactacaacactcgataaagaggctgtatcggttctcag

SEQ ID NO: 42053 - DNA, 555 bp, Zea mays
  Peptide Sequence Number=SeqID_85428
atgaaggttgctattgagagaacaggtggccttgttgtcttgtctgaaagttttgggcattccgtattcaaggattctttcaaacgcatttttgagggaggtgaacagtctctaggactttctttcaatggcataattgaaataaactgttcaaaagatattaaagtccaaggtattattggaccatgcacatctttggagaagaaaggagccatgtgctctgacacagttgtcggtcaaggaaatacatcagcatggaaaatgtgtggtctcgatagaaatacttctcttacagtattttttgatgtctcaccgagtgaacgatcgagccagccaggaaaccaaaatccccatttgtatatacaatttgtgacaagttaccaacacccagaaggtcaaatgaggataagagttactacgatatgcaggaaatgggtagatggttccactaataccgagttccacctaaaagctgctaaaagcaggtctagaggtgctttcagttttgcactacaggaaagtcggcttttagaaaaagctgacgaatcaagctga

SEQ ID NO: 42054 - DNA, 255 bp, Zea mays
  Peptide Sequence Number=SeqID_85429
atgaagaagaagaagattatgataatgaagaagatcgatgatcaaccctctacatcatcctccaaggtcgaagaaatggttcgacgtgttggaaaggtagaggatcatctctttaacattgacaaggaaaagcaaagaaagagaggatgcttcacatgtggagagaagggacatttccaagttaattgcccaaatatgatcgaacccaagaagaggaggagcaaaggcaaagcgctcacaatgatcaagacttga

SEQ ID NO: 42055 - DNA, 87 bp, Zea mays
  Peptide Sequence Number=SeqID_85430
atggggcacggcgaggacgggctcatgaccgacgtggtgccactaggggaccccaggattggaactgatcgtgtaagcttatactaa

SEQ ID NO: 42056 - DNA, 354 bp, Zea mays
  Peptide Sequence Number=SeqID_85431
atggctcggcctcaccctcggcctcggaaggtggtctccgcctcgcccgaccccagggctcggcctcaacctcaccctcggaaggtggtctccgcctcgcccgaccccagggctcggcctcaacctcgacctcgggaggaatcgcgtcctcgcccgacctcgacctcaggaggagtctccgcctcgcccgaccttgggctcggaccgaccatgccacggggggtacatcattaccctacccctagctacctcaggctacgggggaacaagaccggcgtcccatccaggctcgccccggtaacaaggctcaagtgctcctccgacggccacgacaccacgtacacagggctctag

SEQ ID NO: 42057 - DNA, 753 bp, Zea mays
  Peptide Sequence Number=SeqID_85432
atggcatctccttcctctgttctctccctagtccttttcctgttcctggatacgtcatgtcaaagcagcaaggacgacgagccatgcacctacctagaagtagtgctgacgagcagcatggatgagcgtagtcacgacagcgggaggagaaagtgggccgcgcgacggccgactgcctactcaccctgtcacccagaggaggaggcacaaccgcacaacagacatcatgtggtcggctacctactcacccggcggcggcgcagcaccagcccccgcagcgctacgctgaccaactccagcagtccatggctccgaattcgtatcctacggagtgcaggagtggatacggaggtgtggatagagtgtggtttccagcaatgcttcgtaaaaacgacgttcgtttatgttgccgcgattccgctgaaatgttgcccctggccgaagacagcggtcgcccaaatcaactccaccgtcgtcaacctcgtctccggctcggcggcccggcggattggatctccgtgtcagcgcctcgaccacgggtttcctccgacggattgcagcttcgcctcgtctccggacctcgacagcggtcgcccaaatcaactccaccgtcgtcaacctcgtatccggctcggcggcccggcggattggatctccgtgtcgtcagcgcctcggccacgggtttcctccgacggattgcagcttcgcctcgtctccggacctcgacagcggcaactctccgccggattttag

SEQ ID NO: 42058 - DNA, 318 bp, Zea mays
  Peptide Sequence Number=SeqID_85433
atggatctccaagccaaggtgcagcgtcagtcgatcgaccgcgagatggacaacgagggcaacgacaagagcgaggtctcaccggcggcgcgcgtccagtgtgagggcgtggtgttcacggtgacggtgggcaacgaggtggccatggtggcgatgggcggcacagcgcgcgtgctgagcagcgagagctacttcgacgcggacacgtgcacgaggcaccacttcgtggacgtgcaggggaaggccgaggcgatgttgttcttcgtgtccgtgcgcgaggaccagagccgcattgtctccgtccggaggttttcttag

SEQ ID NO: 42059 - DNA, 1356 bp, Zea mays
  Peptide Sequence Number=SeqID_85434
atggacaacgacaagggcgaggtctccccggcggcgcgcgttgtccagtgcgagggcgtcgtgttcacggcgacggagggcaacgaggtggccagggtgacgaagggcggcgcagcgcgcgtgctgagcagcgagagctacttcgacgcggacacgtgcacgaggcaccacttcgtggacgtgcaggggaagaccgaggcgatgctgttcttcgtgtctgtgcgcgaggacctgaaccgtgtcgtctccgtccggagcccgcgtcaagcagaccgcgcgccgtcgccgacggtacgtagccatgtcgtcttcttcttcatccgctgtgaatacgccattgggcgaattgtcgtccgagggtacctcagtgatttggcagcggtggagctacacccgggccacacggtggaattcggcgtttccaggatctcctcggttcgcatgcaagacatgcatcagttggggtattttgggaatggagttggacgagtttcgggggcggaggagattcctgagccggagggtaagatagttgtgttcgaggcattttttactgccgaccttcggttacctgtgcatcgttttgtggtggagaagagaaaagttggaagcaagattgcacagtttggatcatgcacctttacgccgaggactagaaagatttcggcggaagttgtggagctagttccctgcgcccgcaacaagtggggcaactggtatgattattggttttatgtggcgggaggcgaagtcgaagacctcccaggactcccgacggccgtgatgtgctcccactgctatgtggcgttcccgccatttgaggtggcggaggatgatagtgacgaaggggcccttcgttgtgctgcccgcatgagtagcgggcgcgatttagttgaggaattcatcggtaatggagtgtggcccttggcgcatggctgtgcattgggcgaagtatgccctcgccaaatgccctctctgggcgagcagcaagtgcgaagtccggccttcgcgttggatctgtgtggccgggatccagccgcattcgtgcgtgaagtggaagacggggctgtgcggattgtggggcgttatgtgccgaggacggaggctctgcggagttgggatatctgtggatccaacgttcgcctgaatagggtctttgagttgaatcgtttgccatacggtggctatcccggggatgacgctgccgtggccatcgaccgccacgggaagaaaccagtggtcgtgactgagaaaggcccttcgcaggaggctgccccagccactaagaagagaaaaataggtactgcagtgggggggactgtgaagcgtccccaatcctctgggactcaaatgtga

SEQ ID NO: 42060 - DNA, 243 bp, Zea mays
  Peptide Sequence Number=SeqID_85435
atggcgcaacatagaggtgctgctgatgtagatttttcgacatcatggttggtgatctacatctatcctttgtttttagattcctttattcaaactatgcggtgtgctttactttgtgcttctcgtctaacaaaccaagacaagataagtcttgcatgcaaaacagataaattcagttcaaaaaatagtgaaaatgataggaaggtggatcaggtggtgtttcgggttactcacaagaattaa

SEQ ID NO: 42061 - DNA, 249 bp, Zea mays
  Peptide Sequence Number=SeqID_85436
atggcgcgcggtggccacgcccacctagtcgctacactattcctctttctcctgttggtcatgcccctcgccactggagcttctccactaaggcagaggcgaacctcgtgcagggcgcgtctgaggcagtgccagacacacaacacctcctgccgcgcccgctcatcatcgagctcccgtcgacgtgggacagggacgagcccgacgttgtgccgatggacgtgtgttgtgccagctggtgactcgtga

SEQ ID NO: 42062 - DNA, 2781 bp, Zea mays
  Peptide Sequence Number=SeqID_85437
atgccatcttcttcttcttccgccgacgccacgccgccggccgccgcctcgtctgaggagacgttgagtagcgtgatggtggaggaattgcgcgccggcgactctgttgaatttggggtgtcacggatgacgtcagcccgcattgaagatatgcagcggttgggctactttggcggcggagtcgcccttgctccggggacggaggaagtccccgagccggagggcgaattggttgttttcgaggcgttcttcgtcgctggactccgcttgcctgcgcaccagtttgttggcgagaaaagggtggttgagggcggagttgcgcagttcgggtcatgcacgttcacgccgaagaccggcaagaccacaatgccagtagtggagttggtcccgtgcgcccgcaacaagtggggaaattggaatgaattttggttttatgttgctgaggctactgtcgaaggccatgaaggactccccgtgtctgaaatgtgctctcactattactctgcgtatccgccttttgaagtggcagaagaggatgcggacgaaggggcccttcggtgcgccgccggtcagagcagcggccgtgatttagttgaagagttcgcggcgtacggggtctggcccttggcgcacggctgggcgctgggcgaagtatgccctcgccagatgccctttcacggaggaagggaggtgcgaagtcctgccttcgcactgaatttgcgaaaccgtgacccggccgcctttgtgcgtgatgcggaggacttggcggtgcggctcgtggggcgttacgtgccgaggacggaaggccagcgcagctttgatatccgcgggtcaaatgaacgtttgaacagggtcttcgagttaaatcaattgccgtacgagggctaccctggtcaagacgaagcggaccgccgtgggaagaaaccggcagtggagactggaggcgaccctgcgctggtggccgccgtctcctcgaaaaagagaaaattaggtactgcgatgggaggacttggggtatctgatagttttgctagagagttaatgaggacgtgtgcggccccgggggaaaggatgtcttcgcccgagctccgggagtcttcggctcggatgctgagggttaccgggggttgctggcctaaaaacattcctatcccctgcgcggctgaggaggactgctttacatctcgtatggttcatcgatggagagtttttccttacggtcaaaatatcggtgctgttgtgtgggcagtgatggacaaggatcgccaaggtgcggcgcagaaacgccaggcgactgtccgggttcacgaagctcggccgaaaaggcagcggggaccggcgaaggctgcggcccccggcggaggcaaaccgccgctgccggcgaaggtgggcgcctctgcgcctagcaaggcgccggagacgacggtgggcgccggaggctccaagctgacgaaggttgtgccgccggtcagcggagtggcggaggccgcgaaggcggcccgaacgttgccgccgcctggcaaacgcgttgccgacttcggcaccgagattaatgtggaggattatcttggggggtcggacgagggcccgctcgctctagttgtgcctggcgcggcgatcgcgacggctgcgccgacgccgaaggcggggggagagacccttggcgccggaggcgaggtgtctgccctcgcgctggtcagggacgaggcgggcatggcgacccgccggctgaagggagcgacagaggcgttgagtcgagcgacggaggcgctgagccagccttgtctgccgaggtcgagagacttcggacgcaacacgctgacgctgtccgtgagaagtcggcctcccgacagcaagtgccgcaaactggcggagaaggtggccgccctggagaaggagaaggctgacctccggcgccagctggcgggggagaggagggaggccaacgaagccatcgccaaagagcaggctgcgcaggcggaggccaggctggcgcgggcggaaggcaacatcgccaaggagctcgcgggggagctgcagcggcggcttactgccctggagagccgcgcggagggggccgaggccgcgatgcgagcggaggccgaacggacgcgcacgcagctcatgactgcatatcgtgagctgggtgtgcggacgggtgacttcgaggtgccggagcgagaggccgggcttcgctgtctggaatgggtgcaggaggaactgcaggagctccccactgtcttggcggggttgatgtcgttcacctccctggtcacctgcgaggcagcgatgaacgcgctctctcgcgaaggctgccggcacttcgaggccctcgaccaggcagatgaggactttgggcgagatatctttgaggtcgaagaccccgtggtgaaggaatccgccggggccctctacgaccagatgtggggttcatacggtcgtgaggtggtccgggcgcgggccgaggctgcgagggctcaggcggagcgcggcgagcgggtggacgacttcggggcgctgaacagcgcgttgcctgacccagagacgacccctgcggaggccgcggaagctgcaccaggcgcccctgcgcctgctgcggccggcgaaggccttcccccaaaggcggccgaaggcgcgcccgatgcccccgcagctgctgtgccgagcgctgaagatccagcggaggtgggggcggaggcagcggcagaggcttcggcggaggcctcggcggaggcctcggcggaggcccccgcagcggcagggccttcgcaggtagcatag

SEQ ID NO: 42063 - DNA, 1591 bp, Zea mays
  Peptide Sequence Number=SeqID_85438
gaagtcttcggcgggtgcgaaggctgctgcttctagcgcgggcaaaccaccctcgagcgagcctgcgaaggggcgaaggttgccttcgccgccgcgtactgacgaggcggcggcgcgtgttgccgacttcgaaatagacatctatgtgggggattatcttgttggtgagtttttttttaaactaggtcttaaccaagatcatggtgcagggtcggatgtggggcaactagctgttgtcccaactccggtggtggccacttcgccgacggtggtggttggtgcgaaggttgcttcgcaggacccgtggtccgccttctgcgcgagcgacgtgattctgtcggccgccgccgctaaggatgtggtgggctctgtgtcccatcagctgaggcatgtgtcgcagcagctgaagcatgcggccgacttcgccgaccatgttgcgttgggttcttttacttcggagcttgttgccgaagtcgagcgtcttcgggtgcaccatgctgatgctgtccgggagaagtcggctgcggaaagcaaaagctgcaggctgacggagaggttggccgctgcggaggccgagaagggggatctccggcgacagttggtggaggagaggagggacgcgaacaaggccattgccgacgcgcaggctgctcaagccgatgctaagcttgcacgggcggaggccagtctcgcccgccaacgcgccgaggagctggaggcgcggctcggcagcctacgcaaccgcgtggacaaagtcgaggcctcgacgcgcgcggaggaggagctgggggtgctgccaacaatcgtgacaggcctcatgtccttcacctccctcgttacctgcgagggggtcgtgaatgctttgtcccacgaggggtgcgggcatttcgaggtctttgaccagtcggacgaaggctttgaacgcgaaatcttccaggttgaggtcccggtgcttaagcggtcggcgggggcgctcttcgacaggatgtggggtcctcacggccgagagacagtctgggagaggtccgaccgggcaatggatcagatggcgcatgacgaggaggtggaggaccttggcgatctagacagcacgctgcccgagggcacgttgccggaggcctcgggggtggagctggcgccgccgtctgatgcgggcgagggcccctcggcgacccttgcgccgactggagctagagaagacctcacgccagcccctgcgccggcgagtgaggacgccccgaaggcggtggtcgaaccagttgccgaagaccccacggcggcggccgggcctttgcaggttcctacgtttgggcctgcgcaagcaaccgctactggcaatactgattttgttgcggagacttcaaccgtagtgcctaccgatgatagtttgtttggttctgtgtctgaatattttgagtctgatggtgaatctgagagctcatttccatggatggaggagtcctcggatgaaggcttagattatattgttgcgtcggatgtagctgcggcggagacttcgccacgtgtggagggtgctggggatgttcctggcgccgtcgtatggggatggagcgtgaccgtctccgagtag

SEQ ID NO: 42064 - DNA, 1098 bp, Zea mays
  Peptide Sequence Number=SeqID_85439
atgccggttgaaaatgtcgaaggtcaaagagaggaagatataaatgatcaagctcatcctctttacaattataatgaacccccaaaactgatttctaagtgcgatggtgtaagaatcctctccaactcaagtacggaatttctacaccgagtctcagattttactacatcatttgttggcattggaagcatgtccccagcaacattactgtacgatgtttgtgatcactatgacattcagagcaaaggcagtgttcgatatgggatgactgaactgacacaatggtggctcaatgcttttagtttaggaaacagtggcatggcagttcagtcacagccaaacattcaaaggaactccatgaacagattaaggggattatcgttcataatggtgtacgataaaggcaaggagaatatagtggctgatacattttcacaagggggttcacttatggctaagtatggtgaccttgctgttcaaatagatatacctaactctgttgtgactaattcctatgctctagatatgttgccaatagtgaccacccacagtccacatggggttgtgtactcagttcagtggggcaaatttataaggctccatcagtttgggaagcagtgtttagtttctgagcaagcgaaagaagagcaacatgtttttggtgggttctggcatttgttttcagtgctacagggggtctgggagggcctaaagtcaggttttcttgaggatttttccatacctgaaggctgtgattttattatgctgcttcagtgtgttgcccaggaccatctcccacggtggaaaaccttgccgccattggctgaactgtggtactgccctgataagaatgctagcaacccagaagcatcaaaactcttcaaagaagttgcatattcttatagcatcttgtcagatccaaagaaacgaaggcagtatgataatgctgattttggggcgttagaaaatgaaggaatggatatggaaattgaattgtccaatcttggaactgtgaacaaatgtctgcagcatttttttgcaaacttggtgttcctatcaagaccacattattttctactgtgctggaaaaggccatga

SEQ ID NO: 42065 - DNA, 401 bp, Zea mays
  Peptide Sequence Number=SeqID_85440
atggatcctggcacacatatgatggttcgcactctccaaactacctgcatcaacaccagctacgcccctcagccccggcagatcccggtctacccagtggtagtcaaggaagttccagcggatctccctcccatccgagtggagaatgtagtcaacctggaggacagctcggaggaacagctgccggcgcccaccccgttggcagagtccctggccttcgcagctgggtcatcgacgtcagcactagccttccaagcacctgcacccggaggcgacgaccccgacgactccggagacgacgatgacgaggatgacgacgacgaattttttgtccagacgaacacgtccacgaggaagctgactacgcccagcaacgaattcaagcctgaatcattcggggg

SEQ ID NO: 42066 - DNA, 207 bp, Zea mays
  Peptide Sequence Number=SeqID_85441
atggtggtggccccctgggtgaggtaccttagccaagaatacgaccccatgttaacgtgggctaccagcacctaccgctccccctcttgcccatatttcaggtacaaacagaatatgcagagggagaatccacttgccttgctcaagcgagtcctgcggattgtcctcgaacgagttcggttcgtctaccgcacagtcgatttctaa

SEQ ID NO: 42067 - DNA, 171 bp, Zea mays
  Peptide Sequence Number=SeqID_85442
atgatacatttgtaccccgttgggaaggactgtgcggcgctccaaaagtccaggatcaatgtggatcacgagagttttttggtcatgccattattcaagaaggcagaaggaacaagtccgcatatctgggagactgagggtagctcaaaccaggcaaaagagctatgctga

SEQ ID NO: 42068 - DNA, 270 bp, Zea mays
  Peptide Sequence Number=SeqID_85443
atgccccgctcgcccacttctccctactcacgtgcgccctcagccgagctctctcgccccctctctcgcccggtgtacgcaaccagacaagctccgccaccgctcaccgaggaccaccaccattctgcgaccatcgttgagcccacgtcgtgcctgttccctcgatccagtagctcagcccgctcccctcacccgcgcccctaccgttgggcccagcctgttagtcctgcccagtgtaacacccctggtgttactggcactaaaacttga

SEQ ID NO: 42069 - DNA, 519 bp, Zea mays
  Peptide Sequence Number=SeqID_85444
atggaccactacagaaggccattgcccaagggcagggtagcagcagtgttcgtcctcgctacgttccgcctcagggtaccccagctcatccagaaggaggaccacgcccagcttagtacatgcttcaattgcagtcaggttgggcactatgctaatgcttgtccggtgggaaattttggtactccagctcagaacaagcaacagactcttggtaagggatactctattgccagggttaatcaagtcaccgctgatgctactcctgatggtgctgacatcgcactttctgaggagtttgttggtgataacatccgtgtgttatacctctgccttggcaaagaatggttcccgaatgatgcaattgacaataccggaatccgtgaacaccgaagcttgactctcggaatcgaacgaagctccagcttgaagcctgcttcgtcagacgaaaaacttcggaagaaaaagtatttaattgccacaaattcagaattaaatggccagagtgcgctctaccgctag

SEQ ID NO: 42070 - DNA, 712 bp, Zea mays
  Peptide Sequence Number=SeqID_85445
atggagcacgacgtgcactttcacagtattgctcattgttctgcaaggctgaacagcatggtcaacctggctgccatgctcaacaccgagctggaccacgcccttgacgagttgggcaaggtttgggtggaagttgcggaactgcgtgctgagtgcgcagcacgccgctatctggatggtggttctcccgcacctatcgggattcagcacccgtaccgttcaccaccccatggtcacttcgcgtacgaacaggcgcagaggtgcaaggcgtgcttagctggaacaacaggcaccccaggaggaggcagctcagcagcagcagttgccaccgccacccccaatgatacctcaccattcggcccaccaggagaatcccttccgcacagcccactccccacgcgggcacttccctatgggtccgcctggtcggccgcagactcgcacccatgttgtgacccagtcccttcactgcacttgggtcccactgtctggtctcagccgctcgccatccacttcagccacgtgctcgccactggctgcatgtcatcagggccccacatgtcacccacccgttacaaccgggtcttcgtgcccacgtcgccggtgattgcgggcgccataaccatcgtccgtagctccagcttgcaagagctagtggctaaggaccccggtgttcagcagatagaagttgctgagcaggagctcatcgaaa

SEQ ID NO: 42071 - DNA, 126 bp, Zea mays
  Peptide Sequence Number=SeqID_85446
atggctctggctttgaaatttgcagatgaagttatgatgctgaactccatggatgctagtccagttatacccccggtcatcttcctgtggaaggatgtccatgtttcgctgtactttgatgaataa

SEQ ID NO: 42072 - DNA, 351 bp, Zea mays
  Peptide Sequence Number=SeqID_85447
atggagtgctgttatcaagttcttatccgttcttaccaagccacattggtgaactgcaatcgacaggtggaaccggtgaaagattggatgagcgattgcctggagaaacagaaacctgctcgtcgtagaaaatatgagaaaaaaacactcgataaactcaccgatcaacctggaaatctgataccacttgatatagctgaggtgcccgatctttcggtgagtggagataatttcgatttggcagaagatgacccttgcgatccgactacgatgagcaagcccgaggtgccaatgcaatcgctgaaccaactccctgtggttaccgaccttgctgatgcgagatcggcctga

SEQ ID NO: 42073 - DNA, 402 bp, Zea mays
  Peptide Sequence Number=SeqID_85448
atggaactagcagaatggcagtaccgtaaatattgtactagcgaggccaaaaaggcactagtaggaatcacaggccgtagaatttcagatgagacaagctcaaaatggtgtcaacaagctcctgtaaaaatttcagattttttgaacaaccgagcgaaaagttatgcccggtttaaggaagactgtaggagaaaaacactcgataaactcaccgatcaacctggaaatctgataccacttgatatagctgaggtgcccaatctttcggtgagtggagataattctgatttggtggaagatgacccttgtgatccgactacgacgagtaagcccgaggtgccaatgcaatcgctaaaccaactcactatggttaccgaccttgctgatgcgagattggcctaa

SEQ ID NO: 42074 - DNA, 213 bp, Zea mays
  Peptide Sequence Number=SeqID_85449
atggcttatggacagatggtcaataccaagaagggtggtggaattgatctacctcccaatcgacacactcggaggatattcagacaaccccaaccacaaccagatgtgatggatcctctacagcctccaccagccagagctgatcccgcatttactacccaaatgcggataatacagcagatggtagataccatggtggacatgcatgcatag

SEQ ID NO: 42075 - DNA, 120 bp, Zea mays
  Peptide Sequence Number=SeqID_85450
atggccggcgctcgggcgggcagcgcagagctcgtcggagctaatgacggggtcaggacagtgggggccgtgccgggccggcccatgggcctagccctcggcccacagcccggcccgtaa

SEQ ID NO: 42076 - DNA, 264 bp, Zea mays
  Peptide Sequence Number=SeqID_85451
atgagtccgtcttccgaggtcgaggctgagtccgagccctggggtcgggcgaggcggagtccgtcttccgaggtcgaggttgagtccgagccctgggtcgggcgaggtggagaccgtcttccgaggctgaggctgtgtccgagccctagggtcgggcaaggcggagcgatccttgcattaaatgctcctgcgatacggtcgattggcgtggcgatctggccaaggttgcttctctgcgaagactgggcctcgggtgagccgaag

SEQ ID NO: 42077 - DNA, 983 bp, Zea mays
  Peptide Sequence Number=SeqID_85452
atgaatggcggcaaccacccccgcggcggtgagccctccttctcgcagctcctccaaggccttcaaaaggggctggagattcttctatctctcgcgcggggccccgtagcgccaattaccgccagcggcggccaccactcgttgagaaaacgacgggagcctcccgtcgtcattttggagataaaaccaccggcgctgccaccctttattcgaagacgcaaggatggcagggatgtactgctgtgcccgcgccagcctcaactggaggatgcagccatcggcccgcaccgccatgcgaactcttctttcccccgtcgtcgaggcaaaaagctccgcggagaagagatgggtccacaggtcccagtgcggggcaatcccaaaatatcctttgcaaatcgccgcgaagatggctgcttgcgagatggagttgggactgagattgtgcagctccaccctgtagacgtgcagaatcgcccgcataaaatggcttgccggcactccgaacccccgctcgtgaaaagagacgaagctcagcacataccccggcggcggggacggggcggctccgctcggaggggccatccactccggctgcgagtcaccggagagagggtgaagcaaaccttcagcaacaagggcctccagatcatccgccgtgatggtggagaaaggccatgggtcgcgcagcgaaacaacggtcacccggtcggctatcaccaagcagaagaggtggcggcggagaggacaaggataggcaacacctttggcaggcaaagcaggcgacgcttcacctccgccatgatgaccgcgtcaaaaaaggctggcccctcggaagggttcaacagccgcctcagagcactcgggctccgcgcccactactggctggcccccgaagggttcgacagccgcctcagagcacgcagagcgagggatgaccctaggtacgttcgatacataaccaaggctcgggctatgctcccgag

SEQ ID NO: 42078 - DNA, 180 bp, Zea mays
  Peptide Sequence Number=SeqID_85453
aggagtgctactacacctgtgcagaacaagaagcagactccaggatctgacaatggattctctattgccagagttaatcaggtcagcgctgatgctactgctgaaggagctgacatcgcacttggagaagaacaggtggttcaagaggagcaacacaacgaggagtttgatctgatctag

SEQ ID NO: 42079 - DNA, 427 bp, Zea mays
  Peptide Sequence Number=SeqID_85454
ggaacttagaggatttgggttcatccaatactttgatcctgaggatgcttctgatgcaaagcacggtgtatcgccgacgtgcgcgcggacgccagctcgaccaccttcctcgccgggaccctcagcctcaaaggaggagaacgaggtgcacctgatccggctttcgccggcggagagtgagctggtgtgcgatggagtcttctaccaccccaacgagatctgggatctcaaatcatgtcccttcgatcacagggtcttctccacagtctacacatctggtgagggctttggtgcgtcagtttggaagatcccagagcttaatgggcaatcaaactcaccgcagcttgagcagctctttgagcttagtgggcatacgggcaagattagacggtggactcctgtttctgttggtttttggctgctctag

SEQ ID NO: 42080 - DNA, 795 bp, Zea mays
  Peptide Sequence Number=SeqID_85455
atggacgcggaccgtccgggcctctggcgcggacagtccggcccccttgcgcggaccgtccggaccctggcagagcattaccattccattcctttttataagtgtggttttggtggtctccgcaagaaacttgcaggtcgctttaaatccaagcgccctcgtggcaatgatgatgactatacaccgaccactgattcagaggcccaatcctcagctgggggcactgaatccatggatgctgaagattttcttcatgttcaccctgattatcccattgatatccaaggatggacttaccccaagcggagattttctatggctgagtactgctctagacggactgtgaaccagtatgctctgccatcagatacaaatattcagtttttccacactcagctgcagtttgatgtctttttgggggcacccctggtggataccaattttcataagcatcagtttatggggcagcgcactgatttcaatgaaatggcagttaagcaattcttggctacctcagagattgatattgcagaagaatctatcacatggatgactggcttcaagcggtattctgcttcttttgctgactttgccgctgccaacagtctgaactatggcaccatttctgctggggtggatctttatactgaagataattttgaggattttgtgcagttttatgagccagccaggctcggtatacccaggaggtttggaaacagcaggactcagacatcatcctgctgtcatcaacaagattgccagagtcaccattcttcccaagagtggcgataa

SEQ ID NO: 42081 - DNA, 276 bp, Zea mays
  Peptide Sequence Number=SeqID_85456
atgaatcctgccgagacaaagttaaaggagaaggggattgaacaaagctcggaagggaaggaggctgcttctgcaactaggggaaatgctgggggtcagaagaaacagcggatgatgactgtaatgaaggctattcataagaccccacccccagcctcggtggaaaaaattgttgcatttgctaatgtcgaagttgacaccgatgctgaagcagaagagactgcacctgaagctgaatacctcgggaccacatgccagagattgatagaattatag

SEQ ID NO: 42082 - DNA, 303 bp, Zea mays
  Peptide Sequence Number=SeqID_85457
atgaactttagacatgatcggacaatcaaggacgagggcctcaacatagagagcttcgtcaaggaactccaggcaactccatgtcaggagcatggctcagacttgacattcttctcttcggccaggaacaattacatcatggcaaaagttaaaggatatgctagtcacaagcttccaaagcttccaaacgaagccaatgactgcccaagctttgttccagtgcacgcaagaccatggggaatacttgcaggcatacgtccgaaggttcttgcgactgagagccaaggggccaacggtgcctaa

SEQ ID NO: 42083 - DNA, 297 bp, Zea mays
  Peptide Sequence Number=SeqID_85458
atggcgtccctagccccgcgcgcgaagccgcccgacgccaggacggccgagcagcgcccagcatgggtcatcctggaagacagctcggaggaacttctatcgacgcccaccccgttggcagagtcattggccatcgcaactaggtcatcaacctcgacaccgcctacaccaaccgttcaagctcctgcacccggaggcgacgacccagacgactctgggaacgacgatggtgaggaggatgacaacgacggcgaggacgaagaagaacaagtcaacgaagaggccaactatgcctag

SEQ ID NO: 42084 - DNA, 471 bp, Zea mays
  Peptide Sequence Number=SeqID_85459
atggtgcacagggttacccggtccacgtgctccggcgggttcacaaactccagcgagcgcgattacactattccggtggggctggtccttggctcatgctcgggcaagcttcacggcctcctggggaagctatccgagggctcggatcaagtagaggtggcgagaaagggtttggccatggtggttgccctcgagtggctctggcaggtcgcgaggaggtcgccggagctgcgggcgagctcggaagggttaggcgtggtgcgggggaggcaacggggaagatggccatgcccgagggtgggctttatagccgttcgcgagcacggtacgggcgtgggcatgggggtggccgagggcgcgcgagggggtgagcgtgcgggcgtgctctgtcgcgttcccgagtgtctgcccacgtcgaacacgtggtggtttacttctgtcagtgttcaacggcttgtttggtcgccttag

SEQ ID NO: 42085 - DNA, 195 bp, Zea mays
  Peptide Sequence Number=SeqID_85460
atggcgaagcctggccacactactcctcttggtcctctcctgcggaagcagcaacccactcgaccgtctatcccggtggcagggatggaggccaagtcataccatcaaccaaaacaaggaggtacaatggatcagcgagcttcattagctgggagagagcgacgatcgaatccggtttacttgccagggacctaa

SEQ ID NO: 42086 - DNA, 144 bp, Zea mays
  Peptide Sequence Number=SeqID_85461
ggaggttctcgggttgatattgctgtgatagcggtcaggcgagagattcttgcaaccgccctctactctctccactgcttcctcctccctctagatctcttccacgcagcaaggatcgagaagagaaggagcaagttggattga

SEQ ID NO: 42087 - DNA, 537 bp, Zea mays
  Peptide Sequence Number=SeqID_85462
atgggggtggagtggtacttctactgcctccgcgaccgcaagtacccggtggtcctgtgcaccaaccgcgccacggcggtcggctactggaagatcaccggcaaggactatgtcggcgaactacagcgtggtggggacgctgagaacccgaacgtcaccggcggcgacatgctcccagacgaagtgcaggtcaatctccacatgcttcgtgcattgatgctgcacgggattggtggagaggtagactgcgctgacgttattgcagtagacgagggtggcgcgctggaggggactgtggagctcatggaggagctatcgcagccaggaggcctctgccacgccgttggccacagcgcggtactcggcctcagcactggagcaagagacgatgggctgccgcttggcggccttggagacgagccacacctgctggacgacgtaggcaatgtcaggtctagagaaggtgaggtactggagcgcgccggtcaggctccggtaggacatcgcatcggcaaccgagggcccgtcgtcctctaa

SEQ ID NO: 42088 - DNA, 135 bp, Zea mays
  Peptide Sequence Number=SeqID_85463
atggcgcgcgccgcgatttgggtgccgtatgtcgtcgccggcggcatccaggacgagcaacccactgtggaaactgaggttcaacaagtagagatagctgagcaggagctcgttgaaggcaagttgtgcccttga

SEQ ID NO: 42089 - DNA, 186 bp, Zea mays
  Peptide Sequence Number=SeqID_85464
atggaaataaatcatgatcggttttgtttaagcgatatgcttaagtggttcattcaagaggttgagcttcatgttgatgatgaagttatgatgctgagctccatggatgctaatgtagtgatacccccggtcatcttcctgtggatggatgtccatgtttcgctgtactttgatgaaaaagggtaa

SEQ ID NO: 42090 - DNA, 351 bp, Zea mays
  Peptide Sequence Number=SeqID_85465
atggaagaacttggatttttcacgaggcttataagtggcagcgagttaaatgaaaaggaagtttttgaattggaaagcaaaggcaaagctttgggctacgggcctggggctttactctttggcggggaagaccggatgctgattttttcggacatcgaagaaaaacactaccaagtaaagaagagaaagctttcccacaacttggcttatactagcatcaaggggctgatgttaagtaaggccttaagaatgcaacaagagaaggagaaaaagaagctttccactcttcaagacgaagttgctgaacttcggaagttcttagaagaaaagatgcagagatatcatctttga

SEQ ID NO: 42091 - DNA, 624 bp, Zea mays
  Peptide Sequence Number=SeqID_85466
atgatgaccgcgttaaaaaaggggtaccccccaacacttctaaacacggctagtaatcaccatcagcacaagctgcagagactgatgggcacgatccaaggtcaaggcttcgtctggtcaagggacgcgatcttgccccacccgagcccagcctcgggcgggaacaatagtcctagacggattctcgcctcacccgagggcctcttcaagcaacggacgcaccctcgtctcgcccgaaccccagctcgggcaggcttcgttgtgaagcaaccttggccaaatcgcctcaccaaccgaccgtatcgcaggcgcattcaatgcgaggatcgcctgacaccttatcctgacacacacgcctcagtcggcaaggtcgaagaggaggtcttcgcctcgcccgaccccaaggctcggcccccgcctcgacctcggaagatgatctccgcctcgcccgaccccagggctcggcctcaacctcgacctcggaaggtggtctccgcctcgcccgaccttagggctcggcctcgacctcgggaggaatcgcgtcctcgcccgaccccggcctcgggctcaggaggagtctccgcctcgcccgaccttgggctcggaccgaccacgccacggggg

SEQ ID NO: 42092 - DNA, 502 bp, Zea mays
  Peptide Sequence Number=SeqID_85467
ctgccgcggggacccgcgcgccgccggggccgggaccggcctgccgcttccggggcggggcgccgcgcgggggcctgcgcgggccccgccgcttccgaggacctgcggcccctctctgaaacgtgccgcgacacgcgaagagtcggagcaggcgtcggccgagagcggcggcggcaagcggcggaagggcgcgggcgtggtggtggtgcgtccgttcgcgctgctgaagcccgacggcctggacggcggcgcgacgctggcggacatcaacgcgcgcgtcctgatgcggccggcgcggccggtgcggcaccccgtgggcgagttcgcgtgcgcgccgcgcgtgtccgcggaccagccgggcatctcgggcaaggccgtcgccggcttcacgcgcctgcacacccccgggcgcggctccataaccatcataaggacgcgaggctaccgccgcgccggggccggcagtggtgactcgacctccgagtcgcgattccgtgtgtaa

SEQ ID NO: 42093 - DNA, 411 bp, Zea mays
  Peptide Sequence Number=SeqID_85468
atgagagacgtgcacaagaggagcagtgagcaggagaagccgacatcggtgatgtacctttaccaattaaagaaagttgaaatgaaaatgcactcatcatggttcaacaagaggaagcagaacactatttacaggatatttgaggagaatgaagcttgtgctagctttgtttaccgtgaagaagtcggtgccgtagacgacaccagcgacgagatctcgcttagcttccagttgtctagatgtagagatcgtgcctgcaatttttcatcaaaagttccattgtccagttacttcaaaccaaaggaatggatccagaaagcagctttttctaaaagccgagtttgtcgtagtggaaaattgaaaggattcaatgacccagaatccatatatcgaagaaaatttaacgattaa

SEQ ID NO: 42094 - DNA, 516 bp, Zea mays
  Peptide Sequence Number=SeqID_85469
atgaacaaacctcctgaaatgatatctggcaatatgaaggtaggtttgcatggatggtacatccctgaaataattgtagcagaaggaagcagaaagaagtttaaggaaattcaatttcagaaacttcagagattgctagatgggtgccatcctgattttgataatgatcatctgtgttttgtaaataatcatgacctgcttcttgaaatgagtactccaagtgctgaccttcatctacttcctgagacaggagtggaaaacataaggacacctaaaagtcttcacgctgaacttaagcgtgaactgtcaaagctaaatacggtgttaaagctacaagataatgtactctttctggccaaccagttcattgaatatcttttacataatcatttagttgtgcgggagccacggagcatactgcatgcgttcaacatagccttgtgttggcgtgctgcttcttttctgaaatacactgagttggatcatcgagaatcagttgcccttgcttcagattga

SEQ ID NO: 42095 - DNA, 576 bp, Zea mays
  Peptide Sequence Number=SeqID_85470
atggacatctccgcgcagggccagggccagggccaggaccaggcggcgcccgccgccgaccgcgcgtgctcgcgcgccagcgacgaggacgacggcggctcggcgcgcaagaagctgcgcctctccaaggaacagtccgcgttcctggaggagagcttcaaggtgcgcgccacgccgaacccgaagcagaagctggcgctggcgaggcagctcaacctgcgggcgcgccaggtggaggtgtggttccagaaccgcagggccaggacgaagctgaagcagacggaggtggactgcgagcacctgaagcgctgctgcgagacgctgacgggggagaaccggcggctgcacaaggagctagccgagctccgcgcgctcaaggcggtgcgccccttgttgcacatgcacctcccggccaccaccctctccatgtgcccctcctgcgagcgcgtcgcctccaccagctccgcggcccccgccgcgccggcgccagcgtcgccctcacctgctgctggtgctggcattgcggcgtcggccccggacccggatcagaggccctcgtcgtcgttcgcggcgtga

SEQ ID NO: 42096 - DNA, 207 bp, Zea mays
  Peptide Sequence Number=SeqID_85471
atggcgggcctacgaactttaggccggaggcggtcaggcagcgaaagaaaggaggcatatatcatcgatgatagccccttaagaattgatcttgtttcagggttcatgcaaacaagcattaaatactacacatccaccgtcatcggtgtgcttcacatcaacatgatacgaattagagttgtgtacgacattttgaggatcatctag

SEQ ID NO: 42097 - DNA, 787 bp, Zea mays
  Peptide Sequence Number=SeqID_85472
gctggtcaatagcagagttgagcgaagcatgacagctcgaagagcacagctggtcatggcaatgctgggaatggatatatgtcatttcattctttacctcatcgcactaccggaatcgagcgctctgccgcttgaaaaacactcggcaaagactttgtcgagtgtggcactcgacaaagagatctcggcgaacagtacatcggcaatgacttctttgtcgagtactttttatcgggcactcggcaaagtcggtactcggcaaagaaaaatggccgtcacggcgcctggtgacggaggaggcgactttgccgagctgctattgaccatcgtcaatagcagagttgagcgaagcatgacagctcgaagagcacagctggtcatggcaatgcggaatgcgcatgctcgttggggatggcatactcctgctattacagcgtacctcatcaacaatgccaacgacttcagtgacagatcctacagatctgttcctcggcatgtttacggaccgggccatgttcacttcggctggaattacgggaggcaacggaagtcggaagatggagtaggagatggcgagcaaggacgggctcactcgatccccatggcggtcctggcggaccagggtccagggcccggcgaccctgggcgcgcctgccgtgacgccggccaaggtaggcggcgggaaaggatcgtcgtccggaggctagctggaggcgaacgggatgcacggctgcactgtccagtgtacgggtacggcgacagccttggcgatggggactttaattag

SEQ ID NO: 42098 - DNA, 414 bp, Zea mays
  Peptide Sequence Number=SeqID_85473
atgacgcccgaagcaaccagaccaaccaagaagactcactggactagctggaagaggctcgggacatggccttactacactcggcgcgaatcaggcatcgcccgggggaggagctgcaccctcggcttcgtttccaccctcggcgagatccgccccgacctcggacggcggcgcaagtgggaggatttccacctcaaaggaggacgccagcaccgcgcttgggcccgcggcggccgcgtcaagcctctgaacttcggccagggcagcttcatcttcgtcaggaaggcagtacccctcgctgacctgctccagatccacatcgtagtgggaagcgagtacagcgaaggcccgcctaacgccgtgatgcagcgcctcgcggagtctaccacgcgcgtgatcacccaaggcctatag
